United States Patent Application Publication US 2011/0183924 A1 - sequence listing, part 3

SEQ ID NO: 5829 - DNA, 377 bp, Homo sapiens
taaagaaacaaatgacaaagtttgaatggaaaagcctgctgttgttccacatctcgttgctgtttacattcctttgtggagcctacatcttcctaagctttttagcaggtatatgttgaacacttctgtttcatggttgagacagaatcagaggccatggatactgacaactgatttgtctgttttttttctctgtctttttccatgactcttatatactgcctcatcttgatttataagcaaaacctggaaaacctacaaaataagtgttgtggtttatctagaaaaatatggaaaatattgctgttatttttggtgaagaaaatcaattttgtatagtttatttcaatctaaataaaatgtgaattttgtttaaa

SEQ ID NO: 5830 - DNA, 620 bp, Homo sapiens
gacggcccattccggaagttggaattccttggaggcacccaagggaccaacagaaagtgttccaaaaggaagtttggggttctggattgccaagcgaacgaaggagagctctcaggtcacatcaaggtcaggaaccagagattgaaccttactaacaaaaggtgttggagagcagctttgggttctgtgctggttgttagaactcatctccaggtagcccacggatacgtggttggcacagacacaagactcccagagttgtcctaacaataagtctgagcccatctcaacccacttttctccggtagtctttatgtatctgttagcacaatcacttcagttactgatgaattttgttgggatctgacttggggaaagggttatcagagcctagaggggcttaaaaagtaatcatttgatgtacataccacactccttggcttcctttctcttcccttaaccctttctgcttttcattaaccacattcctgcacaactcatttctgaaaacctaccatgtttctttacagagccatccaaaaattttttgtccctacatagcaattttctgtggcactgagaaaccatgtatgaccacaataaaaatccattttgtgaaa

SEQ ID NO: 5831 - DNA, 483 bp, Homo sapiens
ggtgatctagaggatcttttggcggtgcctttcacattcaattagcgaggccagcacactcagagacagacctcaggatatcattgtgtttgtaattggaggagccacctatgaagaggctctaacagtttataacctgaaccgcaccactcctggagtgaggattgtcctgggaggcaccacagtgcacaacacgaaaagtttcctagaggaagttctggcttctggactgcacagccgaagcaaggagagctctcaagtcacatcaaggtcagcgagcagaagatgaaacggtggttgggggaagggcacagcttcctctcttgtccccactacaggttttccctactaaacaaaggtgttggagagcagctttgggttctgtgctggttgttagaactcatctccaggtagcccacggatacgtggttggcacagacttattgttaggactactctgggagtcttgtgtctgtggtcgac

SEQ ID NO: 5832 - DNA, 703 bp, Homo sapiens
tctctctcttctgctcgcacacaccccggcgctactctgtcttttgcgtttctctttcttctattctgttgattattctccgtttcgcctccttctttgtttagtttcatttttttatatcttctttgtttgtttttttgttatatttttttttttttttttttttttttcttttttttttcgcaaataccgcgtgtgatttattaaatgccgtctctccgagtcccaagcggccgggagcattatgccacctcccttgccctcatctctcactgccatgcaagaaagcgttaatggcaaatagggcacgtagccacactccgtcgttcctgcttccaagcaaaccttgtgccaggttcctcatttcgcgaggctccactctcttgggcttcaggctgccgctgggcctccagcaccaaagggcaataggggtctgagagtccgggcctcaggcatcttcaggccgcagactggcatagtgagtatggtatacacacaatcggagattctacagaaggaagtgtacctctttgaacgcattgattctcaaaatcgagagatcatgaaacacctgaaggcaatttgttttcttcgacctacaaaggtactgcataaactgagcttccatctgcccaggcagatgcagaacactctgatctgaaagcattaagaaggcaaaataaatttgtattatcataaaaag

SEQ ID NO: 5833 - DNA, 2961 bp, Homo sapiens
tctctctcttctgctcgcacacaccccggcgctactctgtcttttgcgtttctctttcttctattctgttgattattctccgtttcgcctccttctttgtttagtttcatttttttatatcttctttgtttgtttttttgttatatttttttttttttttttttttttttcttttttttttcgcaaataccgcgtgtgatttattaaatgccgtctctccgagtcccaagcggccgggagcattatgccacctcccttgccctcatctctcactgccatgcaagaaagcgttaatggcaaatagggcacgtagccacactccgtcgttcctgcttccaagcaaaccttgtgccaggttcctcatttcgcgaggctccactctcttgggcttcaggctgccgctgggcctccagcaccaaagggcaataggggtctgagagtccgggcctcaggcatcttcaggccgcaggtgggtggagaataacgcccgcgcgtggcagcggcccaggccgtctcagccggatttttccatccccggggtaggcttggtcccctgtacactccagcggaactacaactcccagcaccgtggctgcccggactcccggaagccgaatcccggctgggaggaagcagctgagacccggccaacagactgggggttaatttagccagaaaagggggcgggaagggctgtagggtacttgtcaattcgccgccatgaacgtggtttttgctgtgaagcagtacatttccaaaatgatagaggacagcgggcctggtatgaaagtacttctcatggataaagagacgactggcatagtgagtatggtatacacacaatcggagattctacagaaggaagtgtacctctttgaacgcattgattctcaaaatcgagagatcatgaaacacctgaaggcaatttgttttcttcgacctacaaaggagaatgtggattatattattcaggagctccgaagacccaaatacactatatatttcatttatttcagtaatgtgatcagcaagagtgacgtgaagtcattggctgaagctgatgaacaggaagttgtggctgaggttcaggaattttatggtgattacattgctgtgaacccacatttgttttccctcaatattttgggttgctgccagggtcgaaattgggatccagcccagctatctagaacaactcaagggcttacagctctccttttatctctgaagaagtgtcccatgattcgttatcagctctcatcagaggcagcaaagagacttgcagagtgcgttaagcaagtgataactaaagaatatgaactgtttgaattccgtcggacagaggttcctccattgctccttattttagatcgctgtgatgatgccatcaccccattgctaaaccagtggacatatcaggccatggtccacgaactactaggcataaacaacaatcggattgatctttccagagtgccgggaatcagtaaagacttaagagaagtggtcctatctgctgaaaatgatgaattctatgctaataatatgtacctgaactttgctgagattggtagcaatataaagaatctcatggaagattttcagaagaagaaaccaaaagaacagcaaaaactagaatcaatagcagacatgaaggcgtttgttgagaattatccacagttcaagaaaatgtctgggactgtttcaaagcatgtgacagtggttggagaactgtctcgattggtcagtgaacggaatctgctggaggtttcagaggttgagcaagaactggcctgtcaaaatgaccattctagtgctctccagaatataaaaaggcttctgcagaaccccaaagtgacagagtttgatgctgcccgcctggtgatgctttatgctttacattatgagcgacacagcagcaatagcctgccaggactaatgatggacctcaggaataaaggtgtttctgagaagtatcgaaagctcgtgtctgcagttgttgaatatggtggtaaacgagtcagaggaagtgacctcttcagccccaaagatgctgtggctatcaccaaacaattcctcaaaggactgaagggagtagaaaatgtatatacacagcatcaacctttcctacatgaaaccctggatcatctcatcaaaggaaggcttaaggaaaacctatatccttatttaggccccagcacactcagagacagacctcaggatatcattgtgtttgtaattggaggagccacctatgaagaggctctaacagtttataacctgaaccgcaccactcctggagtgaggattgtcctgggaggcaccacagtgcacaacacgaaaagtttcctagaggaagttctggcttctggactgcacagccgaagcaaggagagctctcaagtcacatcaaggtcagcgagcagaagatgaaacggtggttgggggaagggcacagcttcctctcttgtccccactacaggttttccctactaaacaaaggtgttggagagcagctttgggttctgtgctggttgttagaactcatctccaggtagcccacggatacgtggttggcacagacacaagactcccagagttgtcctaacaataagtctgagcccatctcaacccacttttctccggtagtctttatgtatctgttagcacaatcacttcagttactgatgaattttgttgggatctgacttggggaaagggttatcagagcctagaggggcttaaaaagtaatcatttgatgtacataccacactccttggcttcctttctcttcccttaaccctttctgcttttcattaaccacattcctgcacaactcatttctgaaaacctaccatgtttctttacagagccatccaaaaattttttgtccctacatagcaattttctgtggcactgagaaaccatgtatgaccacaataaaaatccattttgtgaaa

SEQ ID NO: 5834 - DNA, 2907 bp, Homo sapiens
tctctctcttctgctcgcacacaccccggcgctactctgtcttttgcgtttctctttcttctattctgttgattattctccgtttcgcctccttctttgtttagtttcatttttttatatcttctttgtttgtttttttgttatatttttttttttttttttttttttttcttttttttttcgcaaataccgcgtgtgatttattaaatgccgtctctccgagtcccaagcggccgggagcattatgccacctcccttgccctcatctctcactgccatgcaagaaagcgttaatggcaaatagggcacgtagccacactccgtcgttcctgcttccaagcaaaccttgtgccaggttcctcatttcgcgaggctccactctcttgggcttcaggctgccgctgggcctccagcaccaaagggcaataggggtctgagagtccgggcctcaggcatcttcaggccgcaggtgggtggagaataacgcccgcgcgtggcagcggcccaggccgtctcagccggatttttccatccccggggtaggcttggtcccctgtacactccagcggaactacaactcccagcaccgtggctgcccggactcccggaagccgaatcccggctgggaggaagcagctgagacccggccaacagactgggggttaatttagccagaaaagggggcgggaagggctgtagggtacttgtcaattcgccgccatgaacgtggtttttgctgtgaagcagtacatttccaaaatgatagaggacagcgggcctggtatgaaagtacttctcatggataaagagacgactggcatagtgagtatggtatacacacaatcggagattctacagaaggaagtgtacctctttgaacgcattgattctcaagagaatgtggattatattattcaggagctccgaagacccaaatacactatatatttcatttatttcagtaatgtgatcagcaagagtgacgtgaagtcattggctgaagctgatgaacaggaagttgtggctgaggttcaggaattttatggtgattacattgctgtgaacccacatttgttttccctcaatattttgggttgctgccagggtcgaaattgggatccagcccagctatctagaacaactcaagggcttacagctctccttttatctctgaagaagtgtcccatgattcgttatcagctctcatcagaggcagcaaagagacttgcagagtgcgttaagcaagtgataactaaagaatatgaactgtttgaattccgtcggacagaggttcctccattgctccttattttagatcgctgtgatgatgccatcaccccattgctaaaccagtggacatatcaggccatggtccacgaactactaggcataaacaacaatcggattgatctttccagagtgccgggaatcagtaaagacttaagagaagtggtcctatctgctgaaaatgatgaattctatgctaataatatgtacctgaactttgctgagattggtagcaatataaagaatctcatggaagattttcagaagaagaaaccaaaagaacagcaaaaactagaatcaatagcagacatgaaggcgtttgttgagaattatccacagttcaagaaaatgtctgggactgtttcaaagcatgtgacagtggttggagaactgtctcgattggtcagtgaacggaatctgctggaggtttcagaggttgagcaagaactggcctgtcaaaatgaccattctagtgctctccagaatataaaaaggcttctgcagaaccccaaagtgacagagtttgatgctgcccgcctggtgatgctttatgctttacattatgagcgacacagcagcaatagcctgccaggactaatgatggacctcaggaataaaggtgtttctgagaagtatcgaaagctcgtgtctgcagttgttgaatatggtggtaaacgagtcagaggaagtgacctcttcagccccaaagatgctgtggctatcaccaaacaattcctcaaaggactgaagggagtagaaaatgtatatacacagcatcaacctttcctacatgaaaccctggatcatctcatcaaaggaaggcttaaggaaaacctatatccttatttaggccccagcacactcagagacagacctcaggatatcattgtgtttgtaattggaggagccacctatgaagaggctctaacagtttataacctgaaccgcaccactcctggagtgaggattgtcctgggaggcaccacagtgcacaacacgaaaagtttcctagaggaagttctggcttctggactgcacagccgaagcaaggagagctctcaagtcacatcaaggtcagcgagcagaagatgaaacggtggttgggggaagggcacagcttcctctcttgtccccactacaggttttccctactaaacaaaggtgttggagagcagctttgggttctgtgctggttgttagaactcatctccaggtagcccacggatacgtggttggcacagacacaagactcccagagttgtcctaacaataagtctgagcccatctcaacccacttttctccggtagtctttatgtatctgttagcacaatcacttcagttactgatgaattttgttgggatctgacttggggaaagggttatcagagcctagaggggcttaaaaagtaatcatttgatgtacataccacactccttggcttcctttctcttcccttaaccctttctgcttttcattaaccacattcctgcacaactcatttctgaaaacctaccatgtttctttacagagccatccaaaaattttttgtccctacatagcaattttctgtggcactgagaaaccatgtatgaccacaataaaaatccattttgtgaaa

SEQ ID NO: 5835 - DNA, 2981 bp, Homo sapiens
tctctctcttctgctcgcacacaccccggcgctactctgtcttttgcgtttctctttcttctattctgttgattattctccgtttcgcctccttctttgtttagtttcatttttttatatcttctttgtttgtttttttgttatatttttttttttttttttttttttttcttttttttttcgcaaataccgcgtgtgatttattaaatgccgtctctccgagtcccaagcggccgggagcattatgccacctcccttgccctcatctctcactgccatgcaagaaagcgttaatggcaaatagggcacgtagccacactccgtcgttcctgcttccaagcaaaccttgtgccaggttcctcatttcgcgaggctccactctcttgggcttcaggctgccgctgggcctccagcaccaaagggcaataggggtctgagagtccgggcctcaggcatcttcaggccgcaggtgggtggagaataacgcccgcgcgtggcagcggcccaggccgtctcagccggatttttccatccccggggtaggcttggtcccctgtacactccagcggaactacaactcccagcaccgtggctgcccggactcccggaagccgaatcccggctgggaggaagcagctgagacccggccaacagactgggggttaatttagccagaaaagggggcgggaagggctgtagggtacttgtcaattcgccgccatgaacgtggtttttgctgtgaagcagtacatttccaaaatgatagaggacagcgggcctggtatgaaagtacttctcatggataaagagacgttaatcttttgtttttacagactggcatagtgagtatggtatacacacaatcggagattctacagaaggaagtgtacctctttgaacgcattgattctcaaaatcgagagatcatgaaacacctgaaggcaatttgttttcttcgacctacaaaggagaatgtggattatattattcaggagctccgaagacccaaatacactatatatttcatttatttcagtaatgtgatcagcaagagtgacgtgaagtcattggctgaagctgatgaacaggaagttgtggctgaggttcaggaattttatggtgattacattgctgtgaacccacatttgttttccctcaatattttgggttgctgccagggtcgaaattgggatccagcccagctatctagaacaactcaagggcttacagctctccttttatctctgaagaagtgtcccatgattcgttatcagctctcatcagaggcagcaaagagacttgcagagtgcgttaagcaagtgataactaaagaatatgaactgtttgaattccgtcggacagaggttcctccattgctccttattttagatcgctgtgatgatgccatcaccccattgctaaaccagtggacatatcaggccatggtccacgaactactaggcataaacaacaatcggattgatctttccagagtgccgggaatcagtaaagacttaagagaagtggtcctatctgctgaaaatgatgaattctatgctaataatatgtacctgaactttgctgagattggtagcaatataaagaatctcatggaagattttcagaagaagaaaccaaaagaacagcaaaaactagaatcaatagcagacatgaaggcgtttgttgagaattatccacagttcaagaaaatgtctgggactgtttcaaagcatgtgacagtggttggagaactgtctcgattggtcagtgaacggaatctgctggaggtttcagaggttgagcaagaactggcctgtcaaaatgaccattctagtgctctccagaatataaaaaggcttctgcagaaccccaaagtgacagagtttgatgctgcccgcctggtgatgctttatgctttacattatgagcgacacagcagcaatagcctgccaggactaatgatggacctcaggaataaaggtgtttctgagaagtatcgaaagctcgtgtctgcagttgttgaatatggtggtaaacgagtcagaggaagtgacctcttcagccccaaagatgctgtggctatcaccaaacaattcctcaaaggactgaagggagtagaaaatgtatatacacagcatcaacctttcctacatgaaaccctggatcatctcatcaaaggaaggcttaaggaaaacctatatccttatttaggccccagcacactcagagacagacctcaggatatcattgtgtttgtaattggaggagccacctatgaagaggctctaacagtttataacctgaaccgcaccactcctggagtgaggattgtcctgggaggcaccacagtgcacaacacgaaaagtttcctagaggaagttctggcttctggactgcacagccgaagcaaggagagctctcaagtcacatcaaggtcagcgagcagaagatgaaacggtggttgggggaagggcacagcttcctctcttgtccccactacaggttttccctactaaacaaaggtgttggagagcagctttgggttctgtgctggttgttagaactcatctccaggtagcccacggatacgtggttggcacagacacaagactcccagagttgtcctaacaataagtctgagcccatctcaacccacttttctccggtagtctttatgtatctgttagcacaatcacttcagttactgatgaattttgttgggatctgacttggggaaagggttatcagagcctagaggggcttaaaaagtaatcatttgatgtacataccacactccttggcttcctttctcttcccttaaccctttctgcttttcattaaccacattcctgcacaactcatttctgaaaacctaccatgtttctttacagagccatccaaaaattttttgtccctacatagcaattttctgtggcactgagaaaccatgtatgaccacaataaaaatccattttgtgaaa

SEQ ID NO: 5836 - DNA, 2664 bp, Homo sapiens
tctctctcttctgctcgcacacaccccggcgctactctgtcttttgcgtttctctttcttctattctgttgattattctccgtttcgcctccttctttgtttagtttcatttttttatatcttctttgtttgtttttttgttatatttttttttttttttttttttttttcttttttttttcgcaaataccgcgtgtgatttattaaatgccgtctctccgagtcccaagcggccgggagcattatgccacctcccttgccctcatctctcactgccatgcaagaaagcgttaatggcaaatagggcacgtagccacactccgtcgttcctgcttccaagcaaaccttgtgccaggttcctcatttcgcgaggctccactctcttgggcttcaggctgccgctgggcctccagcaccaaagggcaataggggtctgagagtccgggcctcaggcatcttcaggccgcaggtgggtggagaataacgcccgcgcgtggcagcggcccaggccgtctcagccggatttttccatccccggggtaggcttggtcccctgtacactccagcggaactacaactcccagcaccgtggctgcccggactcccggaagccgaatcccggctgggaggaagcagctgagacccggccaacagactgggggttaatttagccagaaaagggggcgggaagggctgtagggtacttgtcaattcgccgccatgaacgtggtttttgctgtgaagcagtacatttccaaaatgatagaggacagcgggcctggtatgaaagtacttctcatggataaagagacgactggcatagtgagtatggtatacacacaatcggagattctacagaaggaagtgtacctctttgaacgcattgattctcaaaatcgagagatcatgaaacacctgaaggcaatttgttttcttcgacctacaaaggagaatgtggattatattattcaggagctccgaagacccaaatacactatatatttcatttatttcagtaatgtgatcagcaagagtgacgtgaagtcattggctgaagctgatgaacaggaagttgtggctgaggttcaggaattttatggtgattacattgctgtgaacccacatttgttttccctcaatattttgggttgctgccagggtcgaaattgggatccagcccagctatctagaacaactcaagggcttacagctctccttttatctctgaagaagtgtcccatgattcgttatcagctctcatcagaggcagcaaagagacttgcagagtgcgttaagcaagtgataactaaagaatatgaactgtttgaattccgtcggacagaggttcctccattgctccttattttagatcgctgtgatgatgccatcaccccattgctaaaccagtggacatatcaggccatggtccacgaactactaggcataaacaacaatcggattgatctttccagagtgccgggaatcagtaaagacttaagagaagtggtcctatctgctgaaaatgatgaattctatgctaataatatgtacctgaactttgctgagattggtagcaatataaagaatctcatggaagattttcagaagaagaaaccaaaagaacagcaaaaactagaatcaatagcagacatgaaggcgtttgttgagaattatccacagttcaagaaaatgtctgggactgtttcaaagcatgtgacagtggttggagaactgtctcgattggtcagtgaacggaatctgctggaggtttcagaggttgagcaagaactggcctgtcaaaatgaccattctagtgctctccagaatataaaaaggcttctgcagaaccccaaagtgacagagtttgatgctgcccgcctggtgatgctttatgctttacattatgagcgacacagcagcaatagcctgccaggactaatgatggacctcaggaataaaggtgtttctgagaagtatcgaaagctcgtgtctgcagttgttgaatatggtggtaaacgagtcagaggaagtgacctcttcagccccaaagatgctgtggctatcaccaaacaattcctcaaaggactgaagggagtagaaaatgtatatacacagcatcaacctttcctacatgaaaccctggatcatctcatcaaaggaaggcttaaggaaaacctatatccttatttaggccccagcacactcagagacagacctcaggatatcattgtgtttgtaattggaggagccacctatgaagaggctctaacagtttataacctgaaccgcaccactcctggagtgaggattgtcctgggaggcaccacagtgcacaacacgaaaagtttcctagaggaagttctggcttctggactgcacagccgaagcaaggagagctctcaagtcacatcaaggtcagcgagcagaagatgagatggcagttgagaacagagagaatgtcacggcctccctcttatcccgtctcggccttccctgtgaccaggggcttcagggtagctcttgtgtttgctctaactcactccaggtaaccctgattcctgaactgctggcacacacgccggctgggactgccaatgatgagcccaccccaacccacttgtgattctgtatcaaataaatatgttctttgtgtatttgacagca

SEQ ID NO: 5837 - DNA, 3005 bp, Homo sapiens
tctctctcttctgctcgcacacaccccggcgctactctgtcttttgcgtttctctttcttctattctgttgattattctccgtttcgcctccttctttgtttagtttcatttttttatatcttctttgtttgtttttttgttatatttttttttttttttttttttttttcttttttttttcgcaaataccgcgtgtgatttattaaatgccgtctctccgagtcccaagcggccgggagcattatgccacctcccttgccctcatctctcactgccatgcaagaaagcgttaatggcaaatagggcacgtagccacactccgtcgttcctgcttccaagcaaaccttgtgccaggttcctcatttcgcgaggctccactctcttgggcttcaggctgccgctgggcctccagcaccaaagggcaataggggtctgagagtccgggcctcaggcatcttcaggccgcaggtgggtggagaataacgcccgcgcgtggcagcggcccaggccgtctcagccggatttttccatccccggggtaggcttggtcccctgtacactccagcggaactacaactcccagcaccgtggctgcccggactcccggaagccgaatcccggctgggaggaagcagctgagacccggccaacagactgggggttaatttagccagaaaagggggcgggaagggctgtagggtacttgtcaattcgccgccatgaacgtggtttttgctgtgaagcagtacatttccaaaatgatagaggacagcgggcctggtatgaaagtacttctcatggataaagagacgactggcatagtgagtatggtatacacacaatcggagattctacagaaggaagtgtacctctttgaacgcattgattctcaaaatcgagagatcatgaaacacctgaaggcaatttgttttcttcgacctacaaaggagaatgtggattatattattcaggagctccgaagacccaaatacactatatatttcatttatttcagtaatgtgatcagcaagagtgacgtgaagtcattggctgaagctgatgaacaggaagttgtggctgaggttcaggaattttatggtgattacattgctgtgaacccacatttgttttccctcaatattttgggttgctgccagggtcgaaattgggatccagcccagctatctagaacaactcaagggcttacagctctccttttatctctgaagaagtgtcccatgattcgttatcagctctcatcagaggcagcaaagagacttgcagagtgcgttaagcaagtgataactaaagaatatgaactgtttgaattccgtcggacagaggttcctccattgctccttattttagatcgctgtgatgatgccatcaccccattgctaaaccagtggacatatcaggccatggtccacgaactactaggcataaacaacaatcggattgatctttccagagtgccgggaatcagtaaagacttaagagaagtggtcctatctgctgaaaatgatgaattctatgctaataatatgtacctgaactttgctgagattggtagcaatataaagaatctcatggaagattttcagaagaagaaaccaaaagaacagcaaaaactagaatcaatagcagacatgaaggcgtttgttgagaattatccacagttcaagaaaatgtctgggactgtttcaaagcatgtgacagtggttggagaactgtctcgattggtcagtgaacggaatctgctggaggtttcagaggttgagcaagaactggcctgtcaaaatgaccattctagtgctctccagaatataaaaaggcttctgcagaaccccaaagtgacagagtttgatgctgcccgcctggtgatgctttatgctttacattatgagcgacacagcagcaatagcctgccaggactaatgatggacctcaggaataaaggtgtttctgagaagtatcgaaagctcgtgtctgcagttgttgaatatggtggtaaacgagtcagaggaagtgacctcttcagccccaaagatgctgtggctatcaccaaacaattcctcaaaggactgaagggagtagaaaatgtatatacacagcatcaacctttcctacatgaaaccctggatcatctcatcaaaggaaggcttaaggaaaacctatatccttatttaggccccagcacactcagagacagacctcaggatatcattgtgtttgtaattggaggagccacctatgaagaggctctaacagtttataacctgaaccgcaccactcctggagtgaggattgtcctgggaggcaccacagtgcacaacacgaaaagtttcctagaggaagttctggcttctggactgcacagccgaagcaaggagagctctcaagtcacatcaaggtcagcgagcagaagatgaaacggtggttgggggaagggcacagcttcctctcttgtccccactacaggttttccctactaaacaaaggtgttggagagcagctttgggttctgtgctggttgttagaactcatctccaggtagcccacggatacgtggttggcacagacacaagactcccagagttgtcctaacaataagtctgagcccatctcaacccacttttctccggtagtctttatgtatctgttagcacaatcacttcagttactgatgaattttgttgggatctgacttggggaaagggttatcagagcctagaggggcttaaaaagtaatcatttgatgtacataccacactccttggcttcctttctcttcccttaaccctttctgcttttcattaaccacattcctgcacaactcatttctgaaaacctaccatgtttctttacagagccatccaaaaattttttgtccctacatagcaattttctgtggcactgagaaaccatgtatgaccacaataaaaatccattttgtgaaaaaaaaaacaggggcgcgccaaggagataccggggggcaaggatg

SEQ ID NO: 5838 - DNA, 1609 bp, Homo sapiens
aaatggcaggtcgaggcctggtctaattcggccgaaggacccattgctaaaccagtggacatatcaggccatggtccacgaactactaggcataaacaacaatcggattgatctttccagagtgccgggaatcagtaaagacttaagagaagtggtcctatctgctgaaaatgatgaattctatgctaataatatgtacctgaactttgctgagattggtagcaatataaagaatctcatggaagattttcagaagaagaaaccaaaagaacagcaaaaactagaatcaatagcagacatgaaggcgtttgttgagaattatccacagttcaagaaaatgtctgggactgtttcaaagcatgtgacagtggttggagaactgtctcgattggtcagtgaacggaatctgctggaggtttcagaggttgagcaagaactggcctgtcaaaatgaccattctagtgctctccagaatataaaaaggcttctgcagaaccccaaagtgacagagtttgatgctgcccgcctggtgatgctttatgctttacattatgagcgacacagcagcaatagcctgccaggactaatgatggacctcaggaataaaggtgtttctgagaagtatcgaaagctcgtgtctgcagttgttgaatatggtggtaaacgagtcagaggaagtgacctcttcagccccaaagatgctgtggctatcaccaaacaattcctcaaaggactgaagggagtagaaaatgtatatacacagcatcaacctttcctacatgaaaccctggatcatctcatcaaaggaaggcttaaggaaaacctatatccttatttaggccccagcacactcagagacagacctcaggatatcattgtgtttgtaattggaggagccacctatgaagaggctctaacagtttataacctgaaccgcaccactcctggagtgaggattgtcctgggaggcaccacagtgcacaacacgaaaagtttcctagaggaagttctggcttctggactgcacagccgaagcaaggagagctctcaagtcacatcaaggtcagcgagcagaagatgaaacggtggttgggggaagggcacagcttcctctcttgtccccactacaggttttccctactaaacaaaggtgttggagagcagctttgggttctgtgctggttgttagaactcatctccaggtagcccacggatacgtggttggcacagacacaagactcccagagttgtcctaacaataagtctgagcccatctcaacccacttttctccggtagtctttatgtatctgttagcacaatcacttcagttactgatgaattttgttgggatctgacttggggaaagggttatcagagcctagaggggcttaaaaagtaatcatttgatgtacataccacactccttggcttcctttctcttcccttaaccctttctgcttttcattaaccacattcctgcacaactcatttctgaaaacctaccatgtttctttacagagccatccaaaaattttttgtccctacatagcaattttctgtggcactgagaaaccatgtatgaccacaataaaaatccattttgtgaaa

SEQ ID NO: 5839 - DNA, 1132 bp, Homo sapiens
atcttgcttaggctattttttttgtgattcttcgataatggcccatttgggcaaaaagccggttagcgggggcaggcctcctagggagaggagggtggatggaattaagggtgttagtcatgttagcttgtttcaggtgcgagatagtagtaggctcgtgtctgcagttgttgaatatggtggtaaacgagtcagaggaagtgacctcttcagccccaaagatgctgtggctatcaccaaacaattcctcaaaggactgaagggagtagaaaatgtatatacacagcatcaacctttcctacatgaaaccctggatcatctcatcaaaggaaggcttaaggaaaacctatatccttatttaggccccagcacactcagagacagacctcaggatatcattgtgtttgtaattggaggagccacctatgaagaggctctaacagtttataacctgaaccgcaccactcctggagtgaggattgtcctgggaggcaccacagtgcacaacacgaaaagtttcctagaggaagttctggcttctggactgcacagccgaagcaaggagagctctcaagtcacatcaaggtcagcgagcagaagatgaaacggtggttgggggaagggcacagcttcctctcttgtccccactacaggttttccctactaaacaaaggtgttggagagcagctttgggttctgtgctggttgttagaactcatctccaggtagcccacggatacgtggttggcacagacacaagactcccagagttgtcctaacaataagtctgagcccatctcaacccacttttctccggtagtctttatgtatctgttagcacaatcacttcagttactgatgaattttgttgggatctgacttggggaaagggttatcagagcctagaggggcttaaaaagtaatcatttgatgtacataccacactccttggcttcctttctcttcccttaaccctttctgcttttcattaaccacattcctgcacaactcatttctgaaaacctaccatgtttctttacagagccatccaaaaattttttgtccctacatagcaattttctgtggcactgagaaaccatgtatgaccacaataaaaatccattttgtgaaa

SEQ ID NO: 5840 - DNA, 1583 bp, Homo sapiens
tctctctcttctgctcgcacacaccccggcgctactctgtcttttgcgtttctctttcttctattctgttgattattctccgtttcgcctccttctttgtttagtttcatttttttatatcttctttgtttgtttttttgttatatttttttttttttttttttttttttcttttttttttcgcaaataccgcgtgtgatttattaaatgccgtctctccgagtcccaagcggccgggagcattatgccacctcccttgccctcatctctcactgccatgcaagaaagcgttaatggcaaatagggcacgtagccacactccgtcgttcctgcttccaagcaaaccttgtgccaggttcctcatttcgcgaggctccactctcttgggcttcaggctgccgctgggcctccagcaccaaagggcaataggggtctgagagtccgggcctcaggcatcttcaggccgcaggtgggtggagaataacgcccgcgcgtggcagcggcccaggccgtctcagccggatttttccatccccggggtaggcttggtcccctgtacactccagcggaactacaactcccagcaccgtggctgcccggactcccggaagccgaatcccggctgggaggaagcagctgagacccggccaacagactgggggttaatttagccagaaaagggggcgggaagggctgtagggtacttgtcaattcgccgccatgaacgtggtttttgctgtgaagcagtacatttccaaaatgatagaggacagcgggcctggtatgaaagtacttctcatggataaagagacggccccagcacactcagagacagacctcaggatatcattgtgtttgtaattggaggagccacctatgaagaggctctaacagtttataacctgaaccgcaccactcctggagtgaggattgtcctgggaggcaccacagtgcacaacacgaaaagtttcctagaggaagttctggcttctggactgcacagccgaagcaaggagagctctcaagtcacatcaaggtcagcgagcagaagatgaaacggtggttgggggaagggcacagcttcctctcttgtccccactacaggttttccctactaaacaaaggtgttggagagcagctttgggttctgtgctggttgttagaactcatctccaggtagcccacggatacgtggttggcacagacacaagactcccagagttgtcctaacaataagtctgagcccatctcaacccacttttctccggtagtctttatgtatctgttagcacaatcacttcagttactgatgaattttgttgggatctgacttggggaaagggttatcagagcctagaggggcttaaaaagtaatcatttgatgtacataccacactccttggcttcctttctcttcccttaaccctttctgcttttcattaaccacattcctgcacaactcatttctgaaaacctaccatgtttctttacagagccatccaaaaattttttgtccctacatagcaattttctgtggcactgagaaaccatgtatgaccacaataaaaatccattttgtgaaa

SEQ ID NO: 5841 - DNA, 981 bp, Homo sapiens
agaattgcctcttgtctctgataaaggcaagcaactttttcatttggtgaggaaatggagctatatgatcatgcattccagaatcagtcaattcaaaaaggaagtacttttcatgtttatacaaatgtagtagaatcttgttgctacagcttattttttgtttctgtgaagcagcagtcctttttcattggccttttttcctgcagtaaatgctcataagaactgtaccatttacctcaggatatcattgtgtttgtaattggaggagccacctatgaagaggctctaacagtttataacctgaaccgcaccactcctggagtgaggattgtcctgggaggcaccacagtgcacaacacgaaaagtttcctagaggaagttctggcttctggactgcacagccgaagcaaggagagctctcaagtcacatcaaggtcagcgagcagaagatgaaacggtggttgggggaagggcacagcttcctctcttgtccccactacaggttttccctactaaacaaaggtgttggagagcagctttgggttctgtgctggttgttagaactcatctccaggtagcccacggatacgtggttggcacagacacaagactcccagagttgtcctaacaataagtctgagcccatctcaacccacttttctccggtagtctttatgtatctgttagcacaatcacttcagttactgatgaattttgttgggatctgacttggggaaagggttatcagagcctagaggggcttaaaaagtaatcatttgatgtacataccacactccttggcttcctttctcttcccttaaccctttctgcttttcattaaccacattcctgcacaactcatttctgaaaacctaccatgtttctttacagagccatccaaaaattttttgtccctacatagcaattttctgtggcactgagaaaccatgtatgaccacaataaaaatccattttgtgaaa

SEQ ID NO: 5842 - DNA, 817 bp, Homo sapiens
ggtgatctagaggatcttttggcggtgcctttcacattcaattagcgaggccagcacactcagagacagacctcaggatatcattgtgtttgtaattggaggagccacctatgaagaggctctaacagtttataacctgaaccgcaccactcctggagtgaggattgtcctgggaggcaccacagtgcacaacacgaaaagtttcctagaggaagttctggcttctggactgcacagccgaagcaaggagagctctcaagtcacatcaaggtcagcgagcagaagatgaaacggtggttgggggaagggcacagcttcctctcttgtccccactacaggttttccctactaaacaaaggtgttggagagcagctttgggttctgtgctggttgttagaactcatctccaggtagcccacggatacgtggttggcacagacacaagactcccagagttgtcctaacaataagtctgagcccatctcaacccacttttctccggtagtctttatgtatctgttagcacaatcacttcagttactgatgaattttgttgggatctgacttggggaaagggttatcagagcctagaggggcttaaaaagtaatcatttgatgtacataccacactccttggcttcctttctcttcccttaaccctttctgcttttcattaaccacattcctgcacaactcatttctgaaaacctaccatgtttctttacagagccatccaaaaattttttgtccctacatagcaattttctgtggcactgagaaaccatgtatgaccacaataaaaatccattttgtgaaa

SEQ ID NO: 5843 - DNA, 2426 bp, Homo sapiens
tctctctcttctgctcgcacacaccccggcgctactctgtcttttgcgtttctctttcttctattctgttgattattctccgtttcgcctccttctttgtttagtttcatttttttatatcttctttgtttgtttttttgttatatttttttttttttttttttttttttcttttttttttcgcaaataccgcgtgtgatttattaaatgccgtctctccgagtcccaagcggccgggagcattatgccacctcccttgccctcatctctcactgccatgcaagaaagcgttaatggcaaatagggcacgtagccacactccgtcgttcctgcttccaagcaaaccttgtgccaggttcctcatttcgcgaggctccactctcttgggcttcaggctgccgctgggcctccagcaccaaagggcaataggggtctgagagtccgggcctcaggcatcttcaggccgcaggtgggtggagaataacgcccgcgcgtggcagcggcccaggccgtctcagccggatttttccatccccggggtaggcttggtcccctgtacactccagcggaactacaactcccagcaccgtggctgcccggactcccggaagccgaatcccggctgggaggaagcagctgagacccggccaacagactgggggttaatttagccagaaaagggggcgggaagggctgtagggtacttgtcaattcgccgccatgaacgtggtttttgctgtgaagcagtacatttccaaaatgatagaggacagcgggcctggtatgaaagtacttctcatggataaagagacgactggcatagtgagtatggtatacacacaatcggagattctacagaaggaagtgtacctctttgaacgcattgattctcaaaatcgagagatcatgaaacacctgaaggcaatttgttttcttcgacctacaaaggagaatgtggattatattattcaggagctccgaagacccaaatacactatatatttcatttatttcagtaatgtgatcagcaagagtgacgtgaagtcattggctgaagctgatgaacaggaagttgtggctgaggttcaggaattttatggtgattacattgctgtgaacccacatttgttttccctcaatattttgggttgctgccagggtcgaaattgggatccagcccagctatctagaacaactcaagggcttacagctctccttttatctctgaagaagtgtcccatgattcgttatcagctctcatcagaggcagcaaagagacttgcagagtgcgttaagcaagtgataactaaagaatatgaactgtttgaattccgtcggacagaggttcctccattgctccttattttagatcgctgtgatgatgccatcaccccattgctaaaccagtggacatatcaggccatggtccacgaactactaggcataaacaacaatcggattgatctttccagagtgccgggaatcagtaaagacttaagagaagtggtcctatctgctgaaaatgatgaattctatgctaataatatgtacctgaactttgctgagattggtagcaatataaagaatctcatggaagattttcagaagaagaaaccaaaagaacagcaaaaactagaatcaatagcagacatgaaggcgtttgttgagaattatccacagttcaagaaaatgtctgggactgtttcaaagcatgtgacagtggttggagaactgtctcgattggtcagtgaacggaatctgctggaggtttcagaggttgagcaagaactggcctgtcaaaatgaccattctagtgctctccagaatataaaaaggcttctgcagaaccccaaagtgacagagtttgatgctgcccgcctggtgatgctttatgctttacattatgagcgacacagcagcaatagcctgccaggactaatgatggacctcaggaataaaggtgtttctgagaagtatcgaaagctcgtgtctgcagttgttgaatatggtggtaaacgagtcagaggaagtgacctcttcagccccaaagatgctgtggctatcaccaaacaattcctcaaaggactgaagggagtagaaaatgtatatacacagcatcaacctttcctacatgaaaccctggatcatctcatcaaaggaaggcttaaggaaaacctatatccttatttaggccccagcacactcagagacagacctcaggatatcattgtgtttgtaattggaggagccacctatgaagaggctctaacagtttataacctgaaccgcaccactcctggagtgaggattgtcctgggaggcaccacagtgcacaacacgaaaagcaagaggttccttagagaaggtcttgctttctgaactggacacccgaagcaagggtttcaggtacaattaaggtaaggggc

SEQ ID NO: 5844 - DNA, 2526 bp, Homo sapiens
tctctctcttctgctcgcacacaccccggcgctactctgtcttttgcgtttctctttcttctattctgttgattattctccgtttcgcctccttctttgtttagtttcatttttttatatcttctttgtttgtttttttgttatatttttttttttttttttttttttttcttttttttttcgcaaataccgcgtgtgatttattaaatgccgtctctccgagtcccaagcggccgggagcattatgccacctcccttgccctcatctctcactgccatgcaagaaagcgttaatggcaaatagggcacgtagccacactccgtcgttcctgcttccaagcaaaccttgtgccaggttcctcatttcgcgaggctccactctcttgggcttcaggctgccgctgggcctccagcaccaaagggcaataggggtctgagagtccgggcctcaggcatcttcaggccgcaggtgggtggagaataacgcccgcgcgtggcagcggcccaggccgtctcagccggatttttccatccccggggtaggcttggtcccctgtacactccagcggaactacaactcccagcaccgtggctgcccggactcccggaagccgaatcccggctgggaggaagcagctgagacccggccaacagactgggggttaatttagccagaaaagggggcgggaagggctgtagggtacttgtcaattcgccgccatgaacgtggtttttgctgtgaagcagtacatttccaaaatgatagaggacagcgggcctggtatgaaagtacttctcatggataaagagacgactggcatagtgagtatggtatacacacaatcggagattctacagaaggaagtgtacctctttgaacgcattgattctcaaaatcgagagatcatgaaacacctgaaggcaatttgttttcttcgacctacaaaggagaatgtggattatattattcaggagctccgaagacccaaatacactatatatttcatttatttcagtaatgtgatcagcaagagtgacgtgaagtcattggctgaagctgatgaacaggaagttgtggctgaggttcaggaattttatggtgattacattgctgtgaacccacatttgttttccctcaatattttgggttgctgccagggtcgaaattgggatccagcccagctatctagaacaactcaagggcttacagctctccttttatctctgaagaagtgtcccatgattcgttatcagctctcatcagaggcagcaaagagacttgcagagtgcgttaagcaagtgataactaaagaatatgaactgtttgaattccgtcggacagaggttcctccattgctccttattttagatcgctgtgatgatgccatcaccccattgctaaaccagtggacatatcaggccatggtccacgaactactaggcataaacaacaatcggattgatctttccagagtgccgggaatcagtaaagacttaagagaagtggtcctatctgctgaaaatgatgaattctatgctaataatatgtacctgaactttgctgagattggtagcaatataaagaatctcatggaagattttcagaagaagaaaccaaaagaacagcaaaaactagaatcaatagcagacatgaaggcgtttgttgagaattatccacagttcaagaaaatgtctgggactgtttcaaagcatgtgacagtggttggagaactgtctcgattggtcagtgaacggaatctgctggaggtttcagaggttgagcaagaactggcctgtcaaaatgaccattctagtgctctccaggtcagtccaatttgatgagcacctactatgtgtaaggcactgtgccaggcagagcaagagataaaaaggcaagtaatccttcttcatcaacatggaatttagtccaacaaggagctgacatgagaacacaaattaatattatttaagatagatctataaaaagagtcacaagagaagtgtaatgtgcaattcccaagggttcagttaattagtataagggcagcctagtctactagaaagagcaccaaactagaatcagaagatctagattggagtgtttggtataccacttacaggctttgtgacatggagctgttgacttaatctctgagccagtttcattatttgtaaaataggtatattaatactcatctcacagagtggttaggaagactttaaaagataaaacatatattaaaatgtattgtctaagttttttcattattgaagatctgcttttcatcgcaccaacatattaatgcctgctatatgtatatactactgctgtgaggatctgaatacaaagatgaataagataccacattacagtaggggagaaagaaatttaaaccagcaattgtaataccaagcactatgtactatattagaggtatttacaaaggaatatggaaatacagaggaaggacaactgttttccccaaggatgaagcttcttagcacttcttagggaaaataacatca

SEQ ID NO: 5845 - DNA, 1219 bp, Homo sapiens
tttattttttaatttttttttttattagagacagggtcttgctctgttgcccaggttggtctcaaactcctgggctcgagcaatccacccgcctcagccttctaaagtgctagcattacaggcctgagccaccgcgcctgcctgtaatctgcattttagaaaagtaactctggtgccactctggagagtagattggataagaaagaaactatagacaacatacaagctctgagacagtttcaagagtacagataacaggtgctgatgtaacatggtactgagttaatatagtggccttgcccttaaaaattctgggatcctaaatagaaacttcaaacttgaaatgttagtcttaatagatcttacaaatttaattctaaaaaaaaaatgaagaccctggggaagagcacagagggactgtccttgcagtatggatgttgtagtgctcaactgatgcttccattctatacccaaatatcagaccagtacctcctgcctactattcatgatatattttcatctggttagatgtccagagcaagacattctatttttggagatgcttttgttttttccttcaagtaacctcaaactacttatcagtttcctagaggaagttctggcttctggactgcacagccgaagcaaggagagctctcaagtcacatcaaggtcagcgagcagaagatgaaacggtggttgggggaagggcacagcttcctctcttgtccccactacaggttttccctactaaacaaaggtgttggagagcagctttgggttctgtgctggttgttagaactcatctccaggtagcccacggatacgtggttggcacagacacaagactcccagagttgtcctaacaataagtctgagcccatctcaacccacttttctccggtagtctttatgtatctgttagcacaatcacttcagttactgatgaattttgttgggatctgacttggggaaagggttatcagagcctagaggggcttaaaaagtaatcatttgatgtacataccacactccttggcttcctttctcttcccttaaccctttctgcttttcattaaccacattcctgcacaactcatttctgaaaacctaccatgtttctttacagagccatccaaaaattttttgtccctacatagcaattttctgtggcactgagaaaccatgtatgaccacaataaaaatccattttgtgaaa

SEQ ID NO: 5846 - DNA, 1630 bp, Homo sapiens
tctctctcttctgctcgcacacaccccggcgctactctgtcttttgcgtttctctttcttctattctgttgattattctccgtttcgcctccttctttgtttagtttcatttttttatatcttctttgtttgtttttttgttatatttttttttttttttttttttttttcttttttttttcgcaaataccgcgtgtgatttattaaatgccgtctctccgagtcccaagcggccgggagcattatgccacctcccttgccctcatctctcactgccatgcaagaaagcgttaatggcaaatagggcacgtagccacactccgtcgttcctgcttccaagcaaaccttgtgccaggttcctcatttcgcgaggctccactctcttgggcttcaggctgccgctgggcctccagcaccaaagggcaataggggtctgagagtccgggcctcaggcatcttcaggccgcaggtgggtggagaataacgcccgcgcgtggcagcggcccaggccgtctcagccggatttttccatccccggggtaggcttggtcccctgtacactccagcggaactacaactcccagcaccgtggctgcccggactcccggaagccgaatcccggctgggaggaagcagctgagacccggccaacagactgggggttaatttagccagaaaagggggcgggaagggctgtagggtacttgtcaattcgccgccatgaacgtggtttttgctgtgaagcagtacatttccaaaatgatagaggacagcgggcctggtatgaaagtacttctcatggataaagagacgactggcatagtgagtatggtatacacacaatcggagattctacagaaggaagtgtacctctttgaacgcattgattctcaaaatcgagagatcatgaaacacctgaaggcaatttgttttcttcgacctacaaaggagaatgtggattatattattcaggagctccgaagacccaaatacactatatatttcatttatttcagtaatgtgatcagcaagagtgacgtgaagtcattggctgaagctgatgaacaggaagttgtggctgaggttcaggtaaacatattggtcctgtaacacatctcgtatgttggccctttttaaatatttgagtctaaaaataaaaaataaggaaaggtctgtctcaaaagaagttttattatgaatacttgaatatgtttatcacataaatgaggaatattgttttcagaggcagcaaataaactagttttgaatttttcagaaggatgtgataggtgataaatgaataaaaagaatacctgttttaaattatattctctctcatgacaacacattggacagcaaagttcttttttatctgagtagaacattgtatctcctattagcagtattttatttttactaattgataagtatgcatagaggtctccagaaatataatgtgtataaccttacaacctttatttgttagatttattattattgctactgttttgtaattattttaattctcccacgttgactgttgttacccaattattaattgaacaatttagtatctctttacacctgtatttcacaaagtttggctatatcatattatatcacttatgaa

SEQ ID NO: 5847 - DNA, 1047 bp, Homo sapiens
tctctctcttctgctcgcacacaccccggcgctactctgtcttttgcgtttctctttcttctattctgttgattattctccgtttcgcctccttctttgtttagtttcatttttttatatcttctttgtttgtttttttgttatatttttttttttttttttttttttttcttttttttttcgcaaataccgcgtgtgatttattaaatgccgtctctccgagtcccaagcggccgggagcattatgccacctcccttgccctcatctctcactgccatgcaagaaagcgttaatggcaaatagggcacgtagccacactccgtcgttcctgcttccaagcaaaccttgtgccaggttcctcatttcgcgaggctccactctcttgggcttcaggctgccgctgggcctccagcaccaaagggcaataggggtctgagagtccgggcctcaggcatcttcaggccgcaggtgggtggagaataacgcccgcgcgtggcagcggcccaggccgtctcagccggatttttccatccccggggtaggcttggtcccctgtacactccagcggaactacaactcccagcaccgtggctgcccggactcccggaagccgaatcccggctgggaggaagcagctgagacccggccaacagactgggggttaatttagccagaaaagggggcgggaagggctgtagggtacttgtcaattcgccgccatgaacgtggtttttgctgtgaagcagtacatttccaaaatgatagaggacagcgggcctggtatgaaagtacttctcatggataaagagacgactggcatagtgagtatggtatacacacaatcggagattctacagaaggaagtgtacctctttgaacgcattgattctcaaaatcgagagatcatgaaacacctgaaggcaatttgttttcttcgacctacaaaggtactgcataaactgagcttccatctgcccaggcagatgcagaacactctgatctgaaagcattaagaaggcaaaataaatttgtattatcataaaaag

SEQ ID NO: 5848 - DNA, 800 bp, Homo sapiens
cgaatcccggctgggaggaagcagctgagacccggccaacagactgggggttaatttagccagaaaagggggcgggaagggctgtagggtacttgtcaattcgccgccatgaacgtggtttttgctgtgaagcagtacatttccaaaatgatagaggacagcgggcctggtatgaaagtacttctcatggataaagagacggtgagtttgcttttgctcagcatttgtgaaggaaccctctcaaccttacaattgctcgtcccattccactgtaggacttagcatttaattaaacatacgaaaatgagggtcggtttgtgtggaattgaaaagttgtttatataaagcttgcccggtgggttttcagtctacatggctccagccactgcctagagactacttctacccggaacaatttattggaatcagaaatccttttctaaatgtccccgccaagaaatcattaatatgtcagagcacttggaaggctttgggatgggcctactgtttccactcaacattgtgtttttaaagtaaagctgttggagctcaagctgaaatgacagattatttgttggccacagaccagaaaacaaaactctttaaggtgatagaaaaaaatatttttggaaacttatggattgttcctgttcaaagagaccatgttttttgtttttaatcttgaagcttcagctgaaaggatagagcgtatttttcattctcgtatgttacctacctgtttggatgttcagtaaatgttttccgtatattactatttaagttatccagctaagtattaa

SEQ ID NO: 5849 - DNA, 2462 bp, Homo sapiens
gggaagacgaatctcgaccactgtttcgcaaataccgcgtgtgatttattaaatgccgtctctccgagtcccaagcggccgggagcattatgccacctcccttgccctcatctctcactgccatgcaagaaagcgttaatggcaaatagggcacgtagccacactccgtcgttcctgcttccaagcaaaccttgtgccaggttcctcatttcgcgaggctccactctcttgggcttcaggctgccgctgggcctccagcaccaaagggcaataggggtctgagagtccgggcctcaggcatcttcaggccgcagactggcatagtgagtatggtatacacacaatcggagattctacagaaggaagtgtacctctttgaacgcattgattctcaaaatcgagagatcatgaaacacctgaaggcaatttgttttcttcgacctacaaaggagaatgtggattatattattcaggagctccgaagacccaaatacactatatatttcatttatttcagtaatgtgatcagcaagagtgacgtgaagtcattggctgaagctgatgaacaggaagttgtggctgaggttcaggaattttatggtgattacattgctgtgaacccacatttgttttccctcaatattttgggttgctgccagggtcgaaattgggatccagcccagctatctagaacaactcaagggcttacagctctccttttatctctgaagaagtgtcccatgattcgttatcagctctcatcagaggcagcaaagagacttgcagagtgcgttaagcaagtgataactaaagaatatgaactgtttgaattccgtcggacagaggttcctccattgctccttattttagatcgctgtgatgatgccatcaccccattgctaaaccagtggacatatcaggccatggtccacgaactactaggcataaacaacaatcggattgatctttccagagtgccgggaatcagtaaagacttaagagaagtggtcctatctgctgaaaatgatgaattctatgctaataatatgtacctgaactttgctgagattggtagcaatataaagaatctcatggaagattttcagaagaagaaaccaaaagaacagcaaaaactagaatcaatagcagacatgaaggcgtttgttgagaattatccacagttcaagaaaatgtctgggactgtttcaaagcatgtgacagtggttggagaactgtctcgattggtcagtgaacggaatctgctggaggtttcagaggttgagcaagaactggcctgtcaaaatgaccattctagtgctctccagaatataaaaaggcttctgcagaaccccaaagtgacagagtttgatgctgcccgcctggtgatgctttatgctttacattatgagcgacacagcagcaatagcctgccaggactaatgatggacctcaggaataaaggtgtttctgagaagtatcgaaagctcgtgtctgcagttgttgaatatggtggtaaacgagtcagaggaagtgacctcttcagccccaaagatgctgtggctatcaccaaacaattcctcaaaggactgaagggagtagaaaatgtatatacacagcatcaacctttcctacatgaaaccctggatcatctcatcaaaggaaggcttaaggaaaacctatatccttatttaggccccagcacactcagagacagacctcaggatatcattgtgtttgtaattggaggagccacctatgaagaggctctaacagtttataacctgaaccgcaccactcctggagtgaggattgtcctgggaggcaccacagtgcacaacacgaaaagtttcctagaggaagttctggcttctggactgcacagccgaagcaaggagagctctcaagtcacatcaaggtcagcgagcagaagatgaaacggtggttgggggaagggcacagcttcctctcttgtccccactacaggttttccctactaaacaaaggtgttggagagcagctttgggttctgtgctggttgttagaactcatctccaggtagcccacggatacgtggttggcacagacacaagactcccagagttgtcctaacaataagtctgagcccatctcaacccacttttctccggtagtctttatgtatctgttagcacaatcacttcagttactgatgaattttgttgggatctgacttggggaaagggttatcagagcctagaggggcttaaaaagtaatcatttgatgtacataccacactccttggcttcctttctcttcccttaaccctttctgcttttcattaaccacattcctgcacaactcatttctgaaaacctaccatgtttctttacagagccatccaaaaattttttgtccctacatagcaattttctgtggcactgagaaaccatgtatgaccacaataaaaatccattttgtgaaa

SEQ ID NO: 5850 - DNA, 2912 bp, Homo sapiens
tctctctcttctgctcgcacacaccccggcgctactctgtcttttgcgtttctctttcttctattctgttgattattctccgtttcgcctccttctttgtttagtttcatttttttatatcttctttgtttgtttttttgttatatttttttttttttttttttttttttcttttttttttcgcaaataccgcgtgtgatttattaaatgccgtctctccgagtcccaagcggccgggagcattatgccacctcccttgccctcatctctcactgccatgcaagaaagcgttaatggcaaatagggcacgtagccacactccgtcgttcctgcttccaagcaaaccttgtgccaggttcctcatttcgcgaggctccactctcttgggcttcaggctgccgctgggcctccagcaccaaagggcaataggggtctgagagtccgggcctcaggcatcttcaggccgcaggtgggtggagaataacgcccgcgcgtggcagcggcccaggccgtctcagccggatttttccatccccggggtaggcttggtcccctgtacactccagcggaactacaactcccagcaccgtggctgcccggactcccggaagccgaatcccggctgggaggaagcagctgagacccggccaacagactgggggttaatttagccagaaaagggggcgggaagggctgtagggtacttgtcaattcgccgccatgaacgtggtttttgctgtgaagcagtacatttccaaaatgatagaggacagcgggcctggtatgaaagtacttctcatggataaagagacgactggcatagtgagtatggtatacacacaatcggagattctacagaaggaagtgtacctctttgaacgcattgattctcaaaatcgagagatcatgaaacacctgaaggcaatttgttttcttcgacctacaaaggagaatgtggattatattattcaggagctccgaagacccaaatacactatatatttcatttatttcagtaatgtgatcagcaagagtgacgtgaagtcattggctgaagctgatgaacaggaagttgtggctgaggttcaggaattttatggtgattacattgctgtgaacccacatttgttttccctcaatattttgggttgctgccagggtcgaaattgggatccagcccagctatctagaacaactcaagggcttacagctctccttttatctctgaagaagtgtcccatgattcgttatcagctctcatcagaggcagcaaagagacttgcagagtgcgttaagcaagtgataactaaagaatatgaactgtttgaattccgtcggacagaggttcctccattgctccttattttagatcgctgtgatgatgccatcaccccattgctaaaccagtggacatatcaggccatggtccacgaactactaggcataaacaacaatcggattgatctttccagagtgccgggaatcagtaaagacttaagagaagtggtcctatctgctgaaaatgatgaattctatgctaataatatgtacctgaactttgctgagattggtagcaatataaagaatctcatggaagattttcagaagaagaaaccaaaagaacagcaaaaactagaatcaatagcagacatgaaggcgtttgttgagaattatccacagttcaagaaaatgtctgggactgtttcaaagcatgtgacagtggttggagaactgtctcgattggtcagtgaacggaatctgctggaggtttcagaggttgagcaagaactggcctgtcaaaatgaccattctagtgctctccagaatataaaaaggcttctgcagaaccccaaagtgacagagtttgatgctgcccgcctggtgatgctttatgctttacattatgagcgacacagcagcaatagcctgccaggactaatgatggacctcaggaataaaggtgtttctgagaagtatcgaaagctcgtgtctgcagttgttgaatatggtggtaaacgagtcagaggaagtgacctcttcagccccaaagatgctgtggctatcaccaaacaattcctcaaaggactgaagggagtagaaaatgtatatacacagcatcaacctttcctacatgaaaccctggatcatctcatcaaaggaaggcttaaggaaaacctatatccttatttaggccccagcacactcagagacagacctcaggatatcattgtgtttgtaattggaggagccacctatgaagaggctctaacagtttataacctgaaccgcaccactcctggagtgaggattgtcctgggaggcaccacagtgcacaacacgaaaagagctctcaagtcacatcaaggtcagcgagcagaagatgaaacggtggttgggggaagggcacagcttcctctcttgtccccactacaggttttccctactaaacaaaggtgttggagagcagctttgggttctgtgctggttgttagaactcatctccaggtagcccacggatacgtggttggcacagacacaagactcccagagttgtcctaacaataagtctgagcccatctcaacccacttttctccggtagtctttatgtatctgttagcacaatcacttcagttactgatgaattttgttgggatctgacttggggaaagggttatcagagcctagaggggcttaaaaagtaatcatttgatgtacataccacactccttggcttcctttctcttcccttaaccctttctgcttttcattaaccacattcctgcacaactcatttctgaaaacctaccatgtttctttacagagccatccaaaaattttttgtccctacatagcaattttctgtggcactgagaaaccatgtatgaccacaataaaaatccattttgtgaaa

SEQ ID NO: 5851 - DNA, 2968 bp, Homo sapiens
tctctctcttctgctcgcacacaccccggcgctactctgtcttttgcgtttctctttcttctattctgttgattattctccgtttcgcctccttctttgtttagtttcatttttttatatcttctttgtttgtttttttgttatatttttttttttttttttttttttttcttttttttttcgcaaataccgcgtgtgatttattaaatgccgtctctccgagtcccaagcggccgggagcattatgccacctcccttgccctcatctctcactgccatgcaagaaagcgttaatggcaaatagggcacgtagccacactccgtcgttcctgcttccaagcaaaccttgtgccaggttcctcatttcgcgaggctccactctcttgggcttcaggctgccgctgggcctccagcaccaaagggcaataggggtctgagagtccgggcctcaggcatcttcaggccgcaggtgggtggagaataacgcccgcgcgtggcagcggcccaggccgtctcagccggatttttccatccccggggtaggcttggtcccctgtacactccagcggaactacaactcccagcaccgtggctgcccggactcccggaagccgaatcccggctgggaggaagcagctgagacccggccaacagactgggggttaatttagccagaaaagggggcgggaagggctgtagggtacttgtcaattcgccgccatgaacgtggtttttgctgtgaagcagtacatttccaaaatgatagaggacagcgggcctggtatgaaagtacttctcatggataaagagacgactggcatagtgagtatggtatacacacaatcggagattctacagaaggaagtgtacctctttgaacgcattgattctcaaaatcgagagatcatgaaacacctgaaggcaatttgttttcttcgacctacaaaggagaatgtggattatattattcaggagctccgaagacccaaatacactatatatttcatttatttcagtaatgtgatcagcaagagtgacgtgaagtcattggctgaagctgatgaacaggaagttgtggctgaggttcaggaattttatggtgattacattgctgtgaacccacatttgttttccctcaatattttgggttgctgccagggtcgaaattgggatccagcccagctatctagaacaactcaagggcttacagctctccttttatctctgaagaagtgtcccatgattcgttatcagctctcatcagaggcagcaaagagacttgcagagtgcgttaagcaagtgataactaaagaatatgaactgtttgaattccgtcggacagaggttcctccattgctccttattttagatcgctgtgatgatgccatcaccccattgctaaaccagtggacatatcaggccatggtccacgaactactaggcataaacaacaatcggattgatctttccagagtgccgggaatcagtaaagacttaagagaagtggtcctatctgctgaaaatgatgaattctatgctaataatatgtacctgaactttgctgagattggtagcaatataaagaatctcatggaagattttcagaagaagaaaccaaaagaacagcaaaaactagaatcaatagcagacatgaaggcgtttgttgagaattatccacagttcaagaaaatgtctgggactgtttcaaagcatgtgacagtggttggagaactgtctcgattggtcagtgaacggaatctgctggaggtttcagaggttgagcaagaactggcctgtcaaaatgaccattctagtgctctccagaatataaaaaggcttctgcagaaccccaaagtgacagagtttgatgctgcccgcctggtgatgctttatgctttacattatgagcgacacagcagcaatagcctgccaggactaatgatggacctcaggaataaaggtgtttctgagaagtatcgaaagctcgtgtctgcagttgttgaatatggtggtaaacgagtcagaggaagtgacctcttcagccccaaagatgctgtggctatcaccaaacaattcctcaaaggactgaagggagtagaaaatgtatatacacagcatcaacctttcctacatgaaaccctggatcatctcatcaaaggaaggcttaaggaaaacctatatccttatttaggccccagcacactcagagacagacctcaggatatcattgtgtttgtaattggaggagccacctatgaagaggctctaacagtttataacctgaaccgcaccactcctggagtgaggattgtcctgggaggcaccacagtgcacaacacgaaaagtttcctagaggaagttctggcttctggactgcacagccgaagcaaggagagctctcaagtcacatcaaggtcagcgagcagaagatgaaacggtggttgggggaagggcacagcttcctctcttgtccccactacaggttttccctactaaacaaaggtgttggagagcagctttgggttctgtgctggttgttagaactcatctccaggtagcccacggatacgtggttggcacagacacaagactcccagagttgtcctaacaataagtctgagcccatctcaacccacttttctccggtagtctttatgtatctgttagcacaatcacttcagttactgatgaattccgctcggatctcacccgcgccacacgcctcatccccgccccgcgcgccttccacactcacatccacttcgctctccctcaccacactccttggcttcctttctcttcccttaaccctttctgcttttcattaaccacattcctgcacaactcatttctgaaaacctaccatgtttctttacagagccatccaaaaattttttgtccctacatagcaattttctgtggcactgagaaaccatgtatgaccacaataaaaatccattttgtgaaa

SEQ ID NO: 5852 - DNA, 2298 bp, Homo sapiens
tctctctcttctgctcgcacacaccccggcgctactctgtcttttgcgtttctctttcttctattctgttgattattctccgtttcgcctccttctttgtttagtttcatttttttatatcttctttgtttgtttttttgttatatttttttttttttttttttttttttcttttttttttcgcaaataccgcgtgtgatttattaaatgccgtctctccgagtcccaagcggccgggagcattatgccacctcccttgccctcatctctcactgccatgcaagaaagcgttaatggcaaatagggcacgtagccacactccgtcgttcctgcttccaagcaaaccttgtgccaggttcctcatttcgcgaggctccactctcttgggcttcaggctgccgctgggcctccagcaccaaagggcaataggggtctgagagtccgggcctcaggcatcttcaggccgcaggtgggtggagaataacgcccgcgcgtggcagcggcccaggccgtctcagccggatttttccatccccggggtaggcttggtcccctgtacactccagcggaactacaactcccagcaccgtggctgcccggactcccggaagccgaatcccggctgggaggaagcagctgagacccggccaacagactgggggttaatttagccagaaaagggggcgggaagggctgtagggtacttgtcaattcgccgccatgaacgtggtttttgctgtgaagcagtacatttccaaaatgatagaggacagcgggcctggtatgaaagtacttctcatggataaagagacgactggcatagtgagtatggtatacacacaatcggagattctacagaaggaagtgtacctctttgaacgcattgattctcaaaatcgagagatcatgaaacacctgaaggcaatttgttttcttcgacctacaaaggagaatgtggattatattattcaggagctccgaagacccaaatacactatatatttcatttatttcagtaatgtgatcagcaagagtgacgtgaagtcattggctgaagctgatgaacaggaagttgtggctgaggttcaggaattttatggtgattacattgctgtgaacccacatttgttttccctcaatattttgggttgctgccagggtcgaaattgggatccagcccagctatctagaacaactcaagggcttacagctctccttttatctctgaagaagtgtcccatgattcgttatcagctctcatcagaggcagcaaagagacttgcagagtgcgttaagcaagtgataactaaagaatatgaactgtttgaattccgtcggacagaggttcctccattgctccttattttagatcgctgtgatgatgccatcaccccattgctaaaccagtggacatatcaggccatggtccacgaactactaggcataaacaacaatcggattgatctttccagagtgccgggaatcagtaaagacttaagagaagtggtcctatctgctgaaaatgatgaattctatgctaataatatgtacctgaactttgctgagattggtagcaatataaagaatctcatggaagattttcagaagaagaaaccaaaagaacagcaaaaactagaatcaatagcagacatgaaggcgtttgttgagaattatccacagttcaagaaaatgtctgggactgtttcaaagcatgtgacagtggttggagaactgtctcgattggtcagtgaacggaatctgctggaggtttcagaggttgagcaagaactggcctgtcaaaatgaccattctagtgctctccagaatataaaaaggcttctgcagaaccccaaagtgacagagtttgatgctgcccgcctggtgatgctttatgctttacattatgagcgacacagcagcaatagcctgccaggactaatgatggacctcaggaataaaggtgtttctgagaagtatcgaaagctcgtgtctgcagttgttgaatatggtggtaaacgagtcagaggaagtgacctcttcagccccaaagatgctgtggctatcaccaaacaattcctcaaaggactgaagggagtagaaaatgtatatacacagcatcaacctttcctacatgaaaccctggatcatctcatcaaaggaaggcttaaggaaaacctatatccttatttaggccccagcacactcagagacagacctctaggaaacttttcgtgttgtgcactgtggtgcctcccaggacaatcctcactccaggagtggtgcggttcaggttataaa

SEQ ID NO: 5853 - DNA, 1264 bp, Homo sapiens
tctctctcttctgctcgcacacaccccggcgctactctgtcttttgcgtttctctttcttctattctgttgattattctccgtttcgcctccttctttgtttagtttcatttttttatatcttctttgtttgtttttttgttatatttttttttttttttttttttttttcttttttttttcgcaaataccgcgtgtgatttattaaatgccgtctctccgagtcccaagcggccgggagcattatgccacctcccttgccctcatctctcactgccatgcaagaaagcgttaatggcaaatagggcacgtagccacactccgtcgttcctgcttccaagcaaaccttgtgccaggttcctcatttcgcgaggctccactctcttgggcttcaggctgccgctgggcctccagcaccaaagggcaataggggtctgagagtccgggcctcaggcatcttcaggccgcaggtgggtggagaataacgcccgcgcgtggcagcggcccaggccgtctcagccggatttttccatccccggggtaggcttggtcccctgtacactccagcggaactacaactcccagcaccgtggctgcccggactcccggaagccgaatcccggctgggaggaagcagctgagacccggccaacagactgggggttaatttagccagaaaagggggcgggaagggctgtagggtacttgtcaattcgccgccatgaacgtggtttttgctgtgaagcagtacatttccaaaatgatagaggacagcgggcctggtatgaaagtacttctcatggataaagagacgactggcatagtgagtatggtatacacacaatcggagattctacagaaggaagtgtacctctttgaacgcattgattctcaaaatcgagagatcatgaaacacctgaaggcaatttgttttcttcgacctacaaaggagaatgtggattatattattcaggagctccgaagacccaaatacactatatatttcatttatttcagtaatgtgatcagcaagagtgacgtgaagtcattggctgaagctgatgaacaggaagttgtggctgaggttcaggaattttatggtgattacattgctgtgaacccacatttgttttccctcaatattttgggttgctgccaggtatggaaggaaaggtttaatttatcagtcgagagttaattcagcaaataattagacttgtaagagaaaattcaaatattttctctgaatatatgtttttaacaaa

SEQ ID NO: 5854 - DNA, 1208 bp, Homo sapiens
tctctctcttctgctcgcacacaccccggcgctactctgtcttttgcgtttctctttcttctattctgttgattattctccgtttcgcctccttctttgtttagtttcatttttttatatcttctttgtttgtttttttgttatatttttttttttttttttttttttttcttttttttttcgcaaataccgcgtgtgatttattaaatgccgtctctccgagtcccaagcggccgggagcattatgccacctcccttgccctcatctctcactgccatgcaagaaagcgttaatggcaaatagggcacgtagccacactccgtcgttcctgcttccaagcaaaccttgtgccaggttcctcatttcgcgaggctccactctcttgggcttcaggctgccgctgggcctccagcaccaaagggcaataggggtctgagagtccgggcctcaggcatcttcaggccgcaggtgggtggagaataacgcccgcgcgtggcagcggcccaggccgtctcagccggatttttccatccccggggtaggcttggtcccctgtacactccagcggaactacaactcccagcaccgtggctgcccggactcccggaagccgaatcccggctgggaggaagcagctgagacccggccaacagactgggggttaatttagccagaaaagggggcgggaagggctgtagggtacttgtcaattcgccgccatgaacgtggtttttgctgtgaagcagtacatttccaaaatgatagaggacagcgggcctggtatgaaagtacttctcatggataaagagacgactggcatagtgagtatggtatacacacaatcggagattctacagaaggaagtgtacctctttgaacgcattgattctcaaaatcgagagatcatgaaacacctgaaggcaatttgttttcttcgacctacaaaggagaatgtggattatattattcaggagctccgaagacccaaatacactatatatttcatttatttcagtaatgtgatcagcaagagtgacgtgaagtcattggctgaagctgatgaacaggaagttgtggctgaggttcaggaattttatggtgattacattgctgtgaacccacatttgttttccctcaatattttgggttgctgccaggctcgaaattgggatccagcccagcacaagaaccaacgccagcacaagaa

SEQ ID NO: 5855 - DNA, 310 bp, Homo sapiens
agtaaggacagcttgaagaagctgctggtcccgttttctttattgtaagcattttcaacatttcgaagcttgcccagtgtttgttttggtaattacaacaggggcatgggaaaagaaccatgctattttcttcttttttctttttatttttagtttaagttctggtatacatgtgcagaatgtgcaggtttgttatataggtatacatgtgccatggtggttcgctgcacctatcaacccgtcatctaggttttaagccccacacacattaggtatttaccctatagcaccccctctaccccctctaagc

SEQ ID NO: 5856 - DNA, 1220 bp, Homo sapiens
  misc_feature (617)..(617): n is a, c, g, or t
ttagagaacccacaaagtcaggagatcttccagagcccttagcaaagggccatctgcaaagcctctcttcctccccgggcaggtccattcccccagggcccagagtggggccaccaagaccagagcagacaccaggaattgaccctggtctggaactagtctgtctgttctgatctgccgccctgtgacaatcacctgcctgggaaccctgctcacagatgaccaggcccagtggagagatgataagaataggtagtttgttctgatgcagattcctaggggatctggctgatgctggctgatggctgcttacagcaggagacctcaagtttctcaatctaatgttcttagttctgcatcaaacagatgggtttattttctggatcctgtctattcacggaactcatttaatatggagggcgttatgatgtcctgcctcatctgctactcaagctatatatttgcaggtgaggggagaagaatcataaggtaagctctcagagatacgagggtcaaggagaatataagatcttacattccctaacgcacctcttgctcttttgtgtttttgcatgtgaccttcatgctggttgtcctctggactgtgtgaccttggngccctcagtttcctcatcttattggtccctgtacttctaatagtcagtgggctgacagtccacacccctctgcagggctccagacctggctgtctgactttccagcaggctgtcccctcggtcatgccgcagacttttcacactgtgtccgaagctgagccttgatctgttcctgaacttgctgcccctcttttgtcctctcccatccactccactgtttgtgctagaaagtggggagatattgttggcaccttccctctcactcctacatattagccaaaggttttatagatttcacacctaagcagtgatgtttcagcctgcttccactctcccgtgctcaggataactgccttggttcagtcactttcatgtaacactcctgcctggagtacgcagcagctcctacctggtattctgattcctctccggcactcttcagtggccctctagtgctccctgagtgatcttttttttgtttgtttgtttgtttttgagacagggtctggctctgtcactcaggctggaatgcagtggcatgatcacagctcactgtagcctctaccacctggactcatcatcaataaacactgttatttgcaa

SEQ ID NO: 5857 - DNA, 782 bp, Homo sapiens
gaatgtagttaatgtaaaccatgtaagtttagctacttaaaatacctttgcacacaagttatgtgtctgatggtttaatatacatatatatgtcttattcttgtatattttccaataatatgttgctattctactagagttgggtttcttaacctggagtccagagaatcccaggacagaaggaaaatcagtgaacttgaatgggaaaaaattgtcatctttatttttaccaatctctaagtgaaatttagcatggccttccattttgaatacggataacaaaataatccagacagtacctacagtttttgtcacagtagaacaatagatattttcatatcataattgttgcagatatcttaagctattatttatgctttcaaattattattagtcctggctgctaaatcttattaatgtgttaataaattacagggaaatgtgaggtttttaaaaggaacattttgatgattacgtgtcattgtacattaaaatacttacattttgttttgtacatttataatcgtgattctgagaagtccgcccaagaggcccatgcacatgtgcacacaccgatacctatacacactcacacccccgcaacacaagagtgtagtaaaaaccctgtattagactatcccagagaattctttgtaataattttttcataggtgcttcaaggaaaattagatatatgttacattactagtagttcttaaactgttttcagctgaagttgactggttaaaattgtctatacttcatttatgtatatttatgtt

SEQ ID NO: 5858 - DNA, 423 bp, Homo sapiens
ctttggacacatgcccaccactaggatagaagagtaggccaccataattgacaacttcatcaggactgtgcggaaggggagaaatgggtccctaaggaagagatgatgggcagataaatgaaatgcacccactatatcccaccctttattgcatccacctatacttttcttgacaaacatacaatttcaaaaatgtgcctgcctgacaatgcaataatcatagacccaacaaaaaccacattcacctatttcccaaggggagataaaacagaattacatccagttgctttattgagccctcagtccagggtcccttggtgatgggcaattcttgctcaggtctggatatgacttcttaagattttgccatctataggtaaaagataaacttagctaccccatacttgccctataaccaatgtg

SEQ ID NO: 5859 - DNA, 654 bp, Homo sapiens
gattacagttttttttttgttgcaaacgatttttatgggctgctgaagtttaaggagtctggcattttaaattgttcttcactgtctgagaagtaaaaatatgtcttaaaaaatcattgatgttatagtaaaggaaagctccctcccttccctaagttagtgcctttcagaatgtgagcatttgtcaagtggaattctgtctgatcctttttcattttctgagctattataagtgctttcttttcctttaactatcataaatggtttttcttcccttaactaagtaaagatttctggaagaatgttttgacccagattgaaaccagcttctgtccctatctactagtcattcatttcttgatttctcgtggcatttcctaaacataggataagtttctaatggtgaagaaagtgaaacagaaaggaaggaaagaagcaaaagctgggttgggtcaccatattgagcgaaggatatgcttgtggggaatcctacactgtgatattggagtaaacagttacattatggggtgagaccaggtgagatggcttatgcctgtgatcccagcactttgagaagctgaggtgggaggattgctttaggccaggagttcaagaccaggctgggcaacaaaaatgagaccctgtctgtacaaa

SEQ ID NO: 5860 - DNA, 261 bp, Homo sapiens
ctctcacctgcctgttttctgtatctaaaagaatctttatgacttcggcttaaactcccactggatgcctgataagctgctatttcacccatgtgatagtatcttctggtagttagcagtgcctccttgcagttgttcagaagattgtagtggttaacagccttaaagttctcaaagaagaaacatctttttccctttagaacatgaatgggcctgacccacaagttcccctaaatcattaaactatcttaagttaaacag

SEQ ID NO: 5861 - DNA, 2319 bp, Homo sapiens
  misc_feature (1100)..(1100): n is a, c, g, or t
  misc_feature (1164)..(1164): n is a, c, g, or t
  misc_feature (1328)..(1328): n is a, c, g, or t
  misc_feature (1531)..(1531): n is a, c, g, or t
tgagacagggtcttactctgttaactcagtctggagtaaaggatgcaatcacgactcactgtagcctggacctcctgggttcaagtgatccttccacctcagccaactgagtagctggcctgcaggcacaagtcaccatgcctacctaagtttttgtagagacagggttttgccattttgcccaggctggtcttgaactcccggggtcaagtgatctgcccacctcagcctcccaaagtgcttggattactggcgtgagccactgtgcctggcctgaaaccactgatgttaaggcaaaagcttgcgtgcatctaattcattttttaatagtttgtaattaaggatgtccagaggaggtgatgtttgccaggtctaccaccatatattattctataaattctacccagtttctcataatactacatctgttcctacccctaataagagtgatatgagggtaagaaaggaaaggcagtcttctgcttttaattacctttagttctgtatgccctgcttcacgctgcatacttcagagatgttaattttaaaagggaaacaagttatgtgtggtgtctgtcttgtttactagcctgaactgaagatggggactgtcttggttgttaatcatcagcatgttatgatttttcatagtgtctagtttttactgtgagggatggttaagggaattggacatggttaacctgaaaaaaattacttggagaactcaatgagtgtcagataaataaaaggctgtgagtggaaccatcagtggaaccatcagaatattctgttttttaagaccttttgttttgcaaaagcagctttttcttaccctaacaaagtagtgccagatttgtgcatttgccaaaaccagttttaaaaccagacaaaatatatgttgccattattttcaggcatagagcaacaagcaacactggattgtgatccctgagagaagaaaaacacaagatgttaaatcccacagatggtcattgtgggattctacctgggggtatctcccagcattaccgtgggagttgagccccaggagagtcagagagtggcaactctgatgcaacagaggttagggttactaaaanagctggaatttataagatagagttcaagattgggaagagaggcagaaatctgcatgagacttgncaagggtactgggatgtgcatgtccaggataaggatctgcaaagtgttagcaaacgattacttcctctaggacttaagagttgaacagtgacaccagaagttatacagtacttagaatccttggaattgcagcctgagtggagcaatctcattgaacactttcntatttagttactactcaagaaatgcgacaccttaggaatcagtagtataccctaaacaaggtttggcaagtgttttcttaaagggctatgacttaggcttgtgagctaggatgtttgtggcttctccaaattcatatattgaaacctaatccccaacgtgatggtatttggaggtggggcctttgggtgatgatattagagtnttagtgctctcataaaagagaccccagagagttcccttgcccctactgacatgtgaggccacagtgaaaagctgtaaaccacaaagcaggccttcacaagacaccatatatgctcatgccttaaacttggacttcccagcctccagaaccatgagaaataaatctgtgtgactgattgataaacacccagtcttctaaatactccatactagtctctggtattttgttataccatcctgaatggactaagacacatagggtctatgttacaactactcagctctgctattatagcacaaaagaagccagataatatattaatattaaacaaatgggcatggctatatccaataaagcttcatttacaaaaatagccagcctatggaccacatttgactaagttcaaacagaaataatcctctttaacaagaaataaaacaataccatttaaaggaagataacataagccagatgccttacaaggtattattcacaatgcctaccattcaattaaaaaattactagccatacaaagaggcaggaaaatctgacccataatcaagggaaaaaaaaaaaaggacccagcttttcttaatagaatttattaatagaccttaaaagtagctatttaagtatacccaagaaaataagggaaaaactagtgaacaaaaaaagattctcagagaaatgggaattggtaaaataaaaatgggaaattcagtacctggaattgtacaagaggtgaattgaaaatttcattgtgtggtcaacggatggggtaaaagata

SEQ ID NO: 5862 - DNA, 477 bp, Homo sapiens
gctattttaatggcttcaaatgatagaggtttatttaactcaagcaacagaaagtttagaggtagcagtagagaaccagaatggtacttcaacaatgtctttgagaacccaggctccaccttcatgctccttcatgctcagcctgtgaattctgtcttcaaggttgtaagatgcctgtgacatttctaggcattacatctgcattatgggaagagaggaggcaaaaggccaaaagccaaagaacatgccaactgagactaactctgtggaattgagggtactttttaattttaggcatcacaattttctagtttccaaatgttccacaacgatatgtattaatgttattttaaaaagaaggctctgctaaatggattgcaacaaagcaaaattattctctgattctgaacttcaagccctgtagaggtcctgttgggctgaataattggagaaccctttctatgcctataggggcag

SEQ ID NO: 5863 - DNA, 663 bp, Homo sapiens
  misc_feature (27)..(27): n is a, c, g, or t
  misc_feature (29)..(29): n is a, c, g, or t
atatatgttttcttcagattgatcaananaatatctcctagtgagaacgcctttcactttggggaaaaaaaaaatcacctaacaattagtatttgctttccatagttaatgcttgaggagtactcttttctccttttcttctttgcctatcccctttcataccaccacctccagtttatatagtgagaatttatttttctaggcacccatctaattttttgtatttttagcagagacagggtttcaccgtgttagccaggatggtcttgctctcctgacctcacgatctgcccaccttggcctcccagaatgctgggattacaggcgtgagccactgcgccctgtcaggaagagtaatttttaagtaaattagagtgaaatttccatgaagtattaatgaggtaagtttaagcaattattttaagctaactttcttttgttgagagaaagaaaatgtcagcgtttttctgccagatgttgagaaattaaagctttttagatgaagatagtaaatcatttttattggccaaagattacttttttaaattgctctcagttccttgattttaaaagataatgctgtttagctggcctgactgcataaagctcacttactagaaaaatattcgaagtatttggataggagaatcctgttgctccttt

SEQ ID NO: 5864 - DNA, 472 bp, Homo sapiens
tcaattaccagtggcaactgtggcccaaaaacattaaatggaatattcccaaaataaataactcggaaattttaaactgtacactgttctcactaatgtgatgaaatttcacattgttccacccaggacataaatcatccctttaatacggtgtagcccacacagaataacctacccctctctcagtcacctagtagtcatctcagttagcgttgttagagtatcatcgtgtttgtgttcaagtatctccctattttacttaattatggccccaaagcacaaaagtagtgaggcttgcaacttggatatctcagagaagctgtaagctagacacaatagcatgtacctgtagtctcaggtagtctggaggctgaggtgggaggaccactttttgacgctgcagtgtgctaagatcttacctgtgaataaccactgcactcagcctgggtgacatagcaaaaccccctaacaa

SEQ ID NO: 5865 - DNA, 356 bp, Homo sapiens
ggattttaagattctttcagtctgagagcacattttaaatttcatagcacatatgtcattattggtgcaataactggtgtttgataccacatattatattgaagcaacagaaaatttttaaaaatctaaaaatcagcaagctagccaaagaactgtatgcttaaaaatggtaaaaatggtaaaagttacattatatatattttactacaattaaaaaatcagcaagctggtatcttgatactttcaattaggtgggaaatagatattttttattttcttctttttacatgttatttgccaggagattttttttaatttttttaactttaaaaaaagtcctttttcctccttctccc

SEQ ID NO: 5866 - DNA, 1035 bp, Homo sapiens
taacaactgagccatatggacaaattaatttttaattcttaccagtttgtatcaggagagcaaagtaagaggccatttaaataaatggagtagttctgaagaagaaagtgggagaataaagtaaaatcacttaaaaaaaggaatcagtgagggcaatgtgatacgtcatataaacaaaagtgccttctcttgggagaatctgtatttgttgagaagatacagtatgtgaatttacacatataaatttattaaaataatttataccaatacaaatttgttcaattatataaaccaatgaaaacatccagaatctcaaacattctagatctgaataatgctttaacatgagggtaagcctcattcaaagcaacttccataacttagtagtaaattacattgtcctaggactttaaaaaaagccctcagatcattgtgtagggccacatgagcatattaaacatggttctaagttttctcattttgggaatatactgtgaaatacagcaaatcaaaataaactctgaaataaagtttattgatattcaataaactttaaaaatcagatttttaaaaagcatttggggcacaaaagcagaaatctgtaaaattcaactggagtttccacacaagaagccagagagtcactagaaatagtccaacaaactaaaatcttaattggatattacaaacctgaaatgagttctaagatagctcttttaaggtctgtcaaaaccagttctctctctactagatcaggtttgggatttgcatcattatttaaaattaaccctataataacatgctgttgtgattagtaattttatccagggggttttaattttgcattcttggctcttcacttttgtttatttttgttttgtggttttttttcagaaagttttcacagaagtctgttagacctcagctctaaagacattggttacacttcaccacagtaaaaagtgcaaaagagtgatgggggagggggcaggcattggatggggttagcttcagctaagaactattagacagtat

SEQ ID NO: 5867 - DNA, 370 bp, Homo sapiens
cttggggtcggcaccgattagctctgatcatgtccatccttgaagatggggagtggggacagtctctcctgaacctcgtcgactgagtttggtggagaggttatttcccaaaggtaaccagaggaagggagaatgcattgttgctgggcagataacaccaccactgcaaggctatgaatgataatcccccaaagcagtgaagtaccaggggttgttgggattcgttctgtcaaaatatcaaaatatgggaaggggcctgggacagtggctcatgcctgtaatcccagcactttgggaggctaaggcaggaggatcgaaaaggcaggaattcaagatcagcctgggcaacatggtgaaactctgtctctac

SEQ ID NO: 5868 - DNA, 619 bp, Homo sapiens
tcgcattacatagcaagaagccagccaaggccatggctgtgactggtgacccctcagctgtgaggcagtccaaagtaaaggtggcactgcatcttcagaagccagcctagtgcggaggggaggtgtttgaaaagcccaaagggcagggcagagggcatggccacttggtccaggcgtaaaatttcttttcccttgttgaaaagtgcaagtggttccaggagctctgtgactttattttctgagcaggcccctctgagaaatcatgtggtccctggtccactcacgcctaggccaagcttgtggcctgattcggggccccatcgttctggggcctacttactcctctccagggctccctagctcccctcctacatccctacaccctccttcccatccagtctttccagaagtgtggtccctcccattccctagggtctgtgggatgctgctgccctaacaagtccctgccagtgcatctacaaaatgagtttcagccagagtttcagtttgacttaagtcaattaagcaacatctcaagggaggtgacaaaaatttcaaagtgtgtttagtgacctttcatttattaaaaacaaataaataaacaaacagatgccaatga

SEQ ID NO: 5869 - DNA, 874 bp, Homo sapiens
aatcagtcccattgcacgggaacacggggttttgaaacaaacagcagcctgtttttatttaaagtcgtgatcccttgcttatcgtagatttttttcataatttgattttggaaaatattgcacacaaatactactcgatccctgagtttgtgggcacttccttacattttgcacccatgaaaatgcctcctccgcctccaggtcaggctccctggaatggggtgtttagtgtcatttccagagacaagctggcagttggctcttgtgtcagagagaagcccacagtcacagtgacaccagcccgcactgtggaagggcttgctatgtgcagtgccctgagccaagtgttccacagacattatctcatttgaaccccatagcagccctggaaggaggcattgggtggggaaccaagttgtcctggggagtcagtgccaagatgtgagccccggacgcggcctcgtcactcacagccccgtgctcctcagctcccacccactgccgcttgacagtcgttttaatcactacctgggctgtggcgaacaatgccaggctctgatagatcctgctgtctcatttctcaacctagtttcccttaactaatatttcatggctatcgttaatgtgcgtttttcatcgagtaatttccacagcccgaacttgtaacacatcccaatgacaaacgtccccagttcggaagcccccgtcagtggcaatgtcacccttgctgctgcctcgacaccttccgacagcccattcagttttatgatcgccctgtcccagtgatcactactgaacctttaagaatccagatgcatttcaagtttaattgaataaaattctttgtataataaattccgcatgaatgctacat

SEQ ID NO: 5870 - DNA, 908 bp, Homo sapiens
  misc_feature (888)..(888): n is a, c, g, or t
  misc_feature (892)..(892): n is a, c, g, or t
  misc_feature (897)..(897): n is a, c, g, or t
aatcagtcccattgcacgggaacacggggttttgaaacaaacagcagcctgtttttatttaaagtcgtgatcccttgcttatcgtagatttttttcataatttgattttggaaaatattgcacacaaatactactcgatccctgagtttgtgggcacttccttacattttgcacccatgaaaatgcctcctccgcctccaggtcaggctccctggaatggggtgtttagtgtcatttccagagacaagctggcagttggctcttgtgtcagagagaagcccacagtcacagtgacaccagcccgcactgtggaagggcttgctatgtgcagtgccctgagccaagtgttccacagacattatctcatttgaaccccatagcagccctggaaggaggcattgggtggggaaccaagttgtcctggggagtcagtgccaagatgtgagccccggacgcggcctcgtcactcacagccccgtgctcctcagctcccacccactgccgcttgacagtcgttttaatcactacctgggctgtggcgaacaatgccaggctctgatagatcctgctgtctcatttctcaacctagtttcccttaactaatatttcatggctatcgttaatgtgcgtttttcatcgagtaatttccacagcccgaacttgtaacacatcccaatgacaaacgtccccagttcggaagcccccgtcagtggcaatgtcacccttgctgctgcctcgacaccttccgacagcccattcagttttatgatcgccctgtcccagtgatcactactgaacctttaagaatccagatgcatttcaagtttaattgaataaaattctttgtataatagaaacccccttggccaaccccccaaaaaaagggcncccngcttntagaggagcga

SEQ ID NO: 5871 - DNA, 408 bp, Homo sapiens
aaacctataactgagtggggctttagagatcctaaaattcagtgcttttacttcatacgtgagaaaaataagctttctgcccaagtttacaaggtacacatagggaaatgggaatgggaactcaagtcccccaataccagtgtattgttcttacccaaacagataatttaagattcacttattgtatatttttcggtcatctctaaaacccactttcttctctgaagggcatgctctaaagtttcttcttcacctatctcccctcagggcacctaatcttagaatgtaagagaaactctgaccaaatttgtcttcatgttgacctcaggcactttagtcattgttgaaacttcttttttgttgtagttaagagaagtaacaagtaagtctttatttccttgtttagaa

SEQ ID NO: 5872 - DNA, 418 bp, Homo sapiens
ttttgagacagggtcttgctttgttgcccaggccagagtgcagtgtgtaatcttggctcactgcagcctcgacctcttgggttcaagctatcctcctacctcagcctcctgagtagctgggactacaggtacatgccatcacaccagctaatttttttatttgtagagatggggtcaccctacattgcccaggctggtcttgaactctggggctcaagccatcctcccaccttggcctcccaaagtgttggaattacaggcgtgacgactgcactgggctggtgaaggtatttttcaaaagaagaaaaaacattatgggaaagatggtatcatatgaccttgatgtgatttcaggttgtattttcactcactgaattgtgatataaaattgccatgctagttaaaaaatacgtcgacg

SEQ ID NO: 5873 - DNA, 489 bp, Homo sapiens
atgtaaagtttaaacagacacacgtacatacacacatacttactgaacatatttaatattaaagacaaattaaatctactcgctgagatgacaaggtccctggagaaggaagatataggttgactggaatgtgtggggacctttcagcagctccaagtaggacacacagccaggtcctgaatcaagctttagctccgggacaaagagaaagaaaagctgaaaagacctgcatgttgaacagatcatagtttatatgttcttgggagttatttccattatcatttttaaaaattctaaatttttagcagatttgtgctctattctcatctgcatttatcatgtcaccaacaatgcatttgttttataaaaaccctaacttccaaaagactgtaccaaaggctctattggctttaaaacaaggctttagaaccccaacttcagggtgctctaaaatgaaaactaagtagacaatctactcaactaagagtt

SEQ ID NO: 5874 - DNA, 246 bp, Homo sapiens
taaagcacctctctagtcttgtcaccctagctcaagaacattcagtggccccttattccctaataaggttgaataaaagtccacatatgaagccctttctactttcccagcccatttctcctgtcctagagcttcgactggcattcagtaaggcatcatgggagggcgtctacaggttttacaacttctctgtgctgggttttgtttgttttctcatatgaggggagatttccaaaaaggttatgg

SEQ ID NO: 5875 - DNA, 801 bp, Homo sapiens
agtcgttgaggaaggggctgccagtgaaaaagccaagatggagtctgtctggctttcttagctaagggagagtcaattcaggtggaaacaaggctaggtgattaaaggaaagggagagtctaagaacagggttagtaaaaaacaaggttgggcattacattataaaaagatacaaacatgcctgtatctgattatgtctgaccttgtacatctcatgacatccgcagtcaatgaacatgtctattttagtctctgaataggcctggaaaggaaaggtatacacaaatacttgataagtggaaaaaataaatgtttgcaatttgggtacataccaataccttccttctgtttattaattgtttaagttttgcttttgttgtatgcaactaaatcatgtttatggtatgcctgtgttctgttttttgcaattatttgacataaatacactggttttgtttttattttgtttgttttagtctacctttcctcagataatgagagcactatctaaacatgcaatctttcaggagacaaagttgtgtattatccatgtctgcagcctttgaacttcagagagatggttactttctggcatctgatagctctctccattgtgattctactgaaataaatcacttctgtctttaatcatgattctgtatctgaaccattggagtctacaacaaatagtaatttccacatgtgttgttttcaaggattttctttgctctgccccacttcagcaagtactttgttatttatggaccatattttctaaaatataaagccatataactttaa

SEQ ID NO: 5876 - DNA, 259 bp, Homo sapiens
caaacagtttagattttttgacctgacctggaaatggaagtgtttggatttatgtgaaattctgaaatgtatagtgtgagaatggaaggatatttggggaatttttctgaataatttcttcagttcaaaaattatcttacaattagattaggtaccataatttaattagatcaaaacaattcacctctctacagttcattttgctacttcaacaacattcagatatttctgcaaaatacattttgtgagaataatacaa

SEQ ID NO: 5877 - DNA, 444 bp, Homo sapiens
gccagaatacaaggctccatgagcactgaatggcagttatgagcaggcctgcagccctcacaaaatgttccaaacttgagtccccagcatgaggggatcaagaagaggtggggcagcccatttgctggctgtgtgtaaagggaggattagcaatggggaccctctagaggccacgcagggtcattgtaggagcttaagggttgggctcccagacccacattcccatcccagatctgccacttagggggtgggtgatcttggccaaatgattttgctgctctaggcccccacttcaggttttttaacacgattgccattgtcttcctacctctgtccctgacacatacatgggatcccacaaaggcgtggctagtgccctgcacacaagtgacagccctgcagcattcactctggccctgacagtgagaacaccaatggcttaga

SEQ ID NO: 5878 - DNA, 1328 bp, Homo sapiens
aaattcggcaagaggaaacgcccacttgaatcagtgcattaacaggtccctgtttcttttgtggactgatccgaggacatcattcaatatccaaagagctgcagaatgttatccttgaattgcgtccacaagattcctgtagataactccaaggatttttttttttaagcaaactagtctttttatgtccgatggtgattgtatgttcaatgaaaaccaaatgtattaaaaggtcagcaatctagtccattagataaaatcttttaattttcttaggatcaaaataatatatttttgacagtaactgtgcactttactccgacttttttttttaatccctcatttcccgacccctgtactctgcgctggttttgcccacagctgcttgcgaatggcaggctttttcctccattcctttgcggaacatagaagagtttgtctcagttctcttagaattgatgttactaactgaagtcaaagccaaaagcatgaataattcaggaacgagcactttccttgccccaccccactgtgctcacccaatgcccaaaagcttcttcatttttaaacgggtgtgtacgttttgctactaggctatgtggtggagactggaggggaccaggaactagatggactgttacattccgaaatttatatcaagtacaccatgctttattgagtgttatcacacctgtattgaaaatagcattaatatttaaaatcttttttaataaaagaagtttccgaacaaacagttaaacataatattgcctcatttgccttggagctagctcatctggtacctctgaaatattttgctgtgacactgctaccaggactgttgtgatcttcccccaaagtactcagcaccattgtcgcatgtccagcgtatttttaagcttaaaatgtagggtagtatttaacatttgggaatttctctttcaaatagaatgaaacgttaagtaaatagtaatatgcctatgatacttctcatttacctgcaagtattaatttgcagagcaccaggcttaatattctcttcccatcctcttggctatcactgattataagttaatggtcttgatccatggctgtgggttcagtactattgtaggagcttggtacacatgatctcagtgaatcctcacagcaactctattgaagtaggatcattcttaccgctgttttgcagagaaagacactgaggtcagaaagatggaattgttgtccagggttacacagctggtaaatggtggatccaggatttacacagagtttggaagattaggtagacctgtcggcagatgctgagttgaaatgggcatttc

SEQ ID NO: 5879 - DNA, 440 bp, Homo sapiens
tctccattaccttgggtactgggtaatttatatactgagatagcgtgttacttcaaggggaaaacaggttctggtgttctacaatactgtttccagtcctcggagaatgcactgtaaatgttacatttatcaaatgctaagtgacatttagcaaataataaagctaatacctcttagcttaactaaggaggggtggacagaatactgtttatatctcacaaacttagttccatatcagataatatctaacttaaccattgaacaatttaactagattttttttctgaagatagacaaagatgagctcaattttccaaatcttgggaggagcctgtgatttctttagacttcagaggaagtgtataagtgtagtaattcacaatcgtaactttcataggagcagaaatctgcaataatgctaattttcactcagtacttac

SEQ ID NO: 5880 - DNA, 254 bp, Homo sapiens
atgcaactagatgccactatgttctccctattccacaccaagcactgtgcccaatcaacaccagaaaacagagaactgaaacagaaaacacttaaggataacccaggtttcatttgtttgcttgcttgttggtttagttggagaaagcaggggacacacaaataatactttaatagaactctgactgtgattgttgtaagagtgataatgccctaaatgacaagcaatggcagaggaagggagaaagtaggtta

SEQ ID NO: 5881 - DNA, 419 bp, Homo sapiens
agcattttcattttgtagagcatacatgtccccaagcagtgtttgaaatttaggtttctaatttatgtagaacttaacatacaagagtgagtacactagactgaattagtgcattcagtggaatacagattctctttagacccattttgccttgtctcgccatacataccactgttgcccaccttcattgtatattttattaaaggttcatctctaagttgaaatggaaggactgtggatatgaaacaaatttcaggaaaggagcagaccacactcgttggaactgttagtaagatcaagttctgaataaccatgaaagacgttttgtgttttatttcataaacttatatctaaaagggtgatgattaagatatgaggtgagctctaaccaaatccatattagagaaagcaaaatcctt

SEQ ID NO: 5882 - DNA, 441 bp, Homo sapiens
tctcccagcagtcctgtgcttccctgttacagagtgccccccagtctgctgtgatggctgtggccctgcatctcttccaaatgaaatgagagctggaggcatggctcactccatgatacagatctagtccctagaacagaactaggctcctatggggaaatgcaataaggacagcgaacaaagaaagggagaggtagaaggaagctcagaagtttaaaggactcagtctggcagaaaaagaaagaggggttgaggagggagtgagatgaagggaagttgagtgcaaggaagttcagagggggaactctacagaatgcacatggaaaataaagttaatcagcaaggatggaaagatatcttaaacgtcaacatcaacagaaaaaagacctaactgtatatcaaattgaactttaataatttagtggaatataattttaatgg

SEQ ID NO: 5883 - DNA, 308 bp, Homo sapiens
gcatgttaatattttacaagtagctctcattctttaaccttaaataaaaatgttagcatttcaaatattttcatagttatacaaagacgcagaatattttacttcacactataagatgcatttagacagtaataaaaggcaaaaagtcttggggttgacttttcaattctaagcaactaaactaactaaattttagacatggaatgcctccaggttaaaactgttttaataccatcagctactgataaattatagttaaagcaatagtagtgattaatgatttgaaaataatccttaagattttgctc

SEQ ID NO: 5884 - DNA, 341 bp, Homo sapiens
gacggggtttcactgtgttagccagggtagtctcgatctcctgacctcatgatccgcccacctcggcctcccaaagtgctgggattacaggcgtgagccaccgcgcccagcccataaaataattttttaaaaaatacactcaggcacaagaaagttaacttacacgggatcatatagctaacaaaagctgggatttgaacccaggttgttcaaactcttgaacaatgctttactgcctcttcaaattcagtggtctttttccccaaacaaataataagttccttgagagcaaataccatgaatcacatgtctcatcctcaagcacctagcctagggtcagg

SEQ ID NO: 5885 - DNA, 2070 bp, Homo sapiens
agcccaagatttctagggcattggcgcgctgctgggtgacttccgggctcaagttgcaagggggcgggccgggccggaggtggagtctcccgccaattgaagcctccgctataaattgaactccctgcactgctgaagcccagatgcctcgccaggccacgtcgcggttggtggtcggagagggcgaggggtcccagggggcttcggggcctgcagccaccatgctccactccctgctgcttcactccttgaggctctgcgcccagaccgcctcgtgcctcgtgctcttcccgcgcttcctcggcacggccttcatgctctggcttctcgatttcttgtgtatccgcaagcatttcctgggccgccgccgccggggcaagcccgagcccgaagtggagctcaacagtgaaggcgaggaggtgcctcccgatgacccgcccatctgcgtgtccgacgacaaccgcctgtgcaccctggcgtcgctcaaggcggtgtggcatggccagaagttggatttcttcaagcaggcgcacgagggcggtccggcgcccaactccgaggtggttctgcccgacggcttccagagccagcacatcctcgactacgcgcaagggaaccgcccgctggttctcaatttcggcagctgcacctgaccaccgttcatggcgcgcatgagcgccttccagcgcctggtcactaagtaccagcgcgacgtcgacttcctcatcatctacatcgaggaagcgcacccctccgacggctgggtcaccacggactctccctacatcatcccacagcaccggagcctggaggaccgggtcagcgcagcgagggtactgcagcaaggtgcacccggctgcgctctggtcctcgacaccatggccaactccagcagctcggcctatggcgcctacttcgagcgtctctatgtcatccagagtggcactattatgtaccagggcggccgtggccccgacggctaccaggtctctgagctgcgcacttggttggaacgctatgatgagcaactgcacggcgctcggccccggagggtgtaaacatccaacggacaattgactgaacttggtgggctgggccttcgagccttcgaagcccacgtgcaagcgcctcaaaccaagtcacgcttgggaggccccagtgacactgatgtgctgagccaccatttcagactgagtctgcaccctcagccacatgaacaatctcccctacctccctgggactctgcttctgtaactgtctcattcacacctgctggcttgcccttgtccgtgtgcccccaggactttgcctctacagcattttcttacaccccctccccagcgtgccctcagccaagtgctttggcccggtgcttcccgcagctgcacagagaccttggccacgcccgcgcgccctgagcgcagctgggttccaggagactctcagctcagctgagctagttgcctggcacccacctgtcgcgcgcggagagggggttccctgttgcttttgtgtctgtttcctgtccctggtaggggaagtgatgtcgtggatggggaggggtgggcagagtagtttcccccgcttgttttgggtgcacaggagccccactgctgatgacgaactatctctaactggtcttgaccacgagctagttctgaattgcaggggcctcaaagcagcacctaaaccttgagggggagggtgctctgggtttccgtgaggtaaccaccttaaatgggagggaagttggggtgtctgctttgggaccagaggaagatagcttgagaggcattggcgaggttcgcagcgccccagggagagagaaaaagctgagactcctggggaatgacgttggggtgatggagtccggggaaagagaggtggggggagagcctgaggtccccaagtgaggggagtcctaggcagagctgctgattgtggggctgggaggtggagggcccctgattcgaaggccatttggtgagtgttttgctggaaatatttcctgtatataaacttctttcaatctacaataataaaggcttgaggtaaactgcaaaaaaggaa

SEQ ID NO: 5886 - DNA, 94 bp, Homo sapiens
aacaatctcccctacctccctgggactctgcttctgtaactgtctcattcacacctgcctggctcactggaaatcctcttttgagcgcgggata

SEQ ID NO: 5887 - DNA, 408 bp, Homo sapiens
aatatatttaaggttttaaggcagattgccctattagatctataattcatcatctaacacagtacagctactgcctttctttaaaaagttaaaattgctgaatctcaaagcaaagctactgacaagtttacatttgttccttaatttctgattattattattattattattagtttttggcaagaaaaaatgtaaaacactttccaaagtatgcagctttaatttttaccataataattaactttcttctctgaattactgattataataggaccacactgtatagcatttgaccttgtgtgtggtaacttttacttcctgactatattataattaaaggtaggagagatgatttatgttatttgtgtctctttgagatgctttacttggatttgagaacatatcaca

SEQ ID NO: 5888 - DNA, 468 bp, Homo sapiens
cgttgtcctgccgagcccagggcgttctgttccgggcgagccttgtgctgcaggggcatcagcatgcaggctgccccgggagggtccaggtgctgcaggcagagttcaacgtggggcttgtccgccctcccttagctctggctcagtgcatcctactgtggggacatctcatgaggggacacgaagtcactgatctcactcccagtatttggagctgggaacccaaatagtgtggcgcaggactgatctgtgcctgttattttggttgtgagtcattgtcctgtggaattggcaaaagctacatttttactgtccttaccagcaacggttcgtgttgtcacatgctgtgagtgcaggctgtggtgtgtccttgtgtgtacatgtatgtatatgtatacatcatgcacaaagcatgtcatgctgctgtccagcggtgaagcaacaagtacaataaaatgtggctctaaa

SEQ ID NO: 5889 - DNA, 456 bp, Homo sapiens
catcaaacaaatcagacttctgccttggagtcgtcatatgtctaacctccctggctattttccatgaaaacatcattggaaagaccaagagcttcagttcccctgcttgtgagacttgaaatgttacagatcagggaggattatcttaaaacaaaagcctccttacacaaggacatgcccttggcaaagcaacacctcaaggtattcagcaatggaataaaagatctattttgactgatcatgtgaaaaactctgagaggccatatatgtttcagagattcctgtggggttggcctaggccttacctggcctgcatcacagttcaacctttttttttttttttttttttttgcttacttatgctcctccttttctcttttcaaatgtcaattttaataaatacataacaccgcagtccttactcaatgcctgcttttaaagatttcatcctgtggc

SEQ ID NO: 5890 - DNA, 315 bp, Homo sapiens
gacaggagtagtcaaatgactaagttctgggcaatgagatgtgagcagaagctgatggctccagctcccaggggctggctcttccctcctgcctccttacagtgagtgggcatgctgtggccatcttgcaaccatgcagtgaacttaaggatagaagatgcgttaagggctgggtgcggtggctcactccgataatcccagctactcgggtggccgaggagggagaattgcttggacccgggaggtggaggttgcagtgagccaagataacaccactgcactccagcctgggcaacagaacaagactccatctca

SEQ ID NO: 5891 - DNA, 324 bp, Homo sapiens
tggatgtggttttctgagggccctatcggtgtgagcccagcccatttgtcactaaggacagctgtggccccttttggcttctccaaaggtccatgcccctcctactctgtcctcctgtacaaagtctcagaaatgacttcggtcttcttccccgcctctgaggattgatgggagctgaggtgtggggacccatcccctcaggtacactgcctcatagtatttcttctccccgcttggctgagcctcctctcttcagatggctaaaacaggcacaacccccacgttgccacacagtcccataaactcctatggatacaggtcagt

SEQ ID NO: 5892 - DNA, 162 bp, Homo sapiens
aaactaataaacttagccaggtgtggtgttacatggctgtaatcccaactacctgggaggctgaggtgggagaatcacttgagcccagttgatggaagctgtagtgagccataatcacctcgccgtacctcagcctgtgtgacttagggggactctgtctca

SEQ ID NO: 5893 - DNA, 466 bp, Homo sapiens
ggtaaatacctaggagtggtgttgccagctcagtgagtaggattttatttaacttactacgtttcaccaaacagtttttgcaaagtggttctatcattttacattctaccagcagggtatattagagttctcttttgctccacacactataagggttgatattgtctgccttttaaattttacctgttcttgaaggtgtaaagtattatgtcacgatgttttaatttgccttttcctaatgatcagtggtattgcgtatcttttcctgtgcttattagtgacttgtatgtcattttttgtaaacatctattcagatattttgttcattgcaaaaataggattatttatttatttatttatttagagacagagtctcactgaatcgcacaggctggactgcagaggttgcagtgagctgagatctgcgcccctgcactccaacctgggtgacagaacgagactccat

SEQ ID NO: 5894 - DNA, 3094 bp, Homo sapiens
cagcggcgccgcggcctctccccaccaggcggccccggatcctactggacgccctgagggcacaccgaccgcgcctctagagtcaccccacgccgacccctcccctcttctctagacttatttccatccttcccgcttttaccctccccacccctccctgggctccaggccgccgccccctcctcactcctggaccggcccttctcggtgcccctcttccctagggagatgcgatgagccggtgcccccgcgtcctcatcgtcgccccgggcacggtgcccgtccagtgcccgtggtggggagggagcactccgcggtccctccgtgacgcccctcgcttggccccccccacagctggcgtccctcggccatgccccaggggacccagccagggggtgggctctagagcgagtggggtggagaggagaaaggacggggccttgggcgcctctgagatgctcccaagtgccagggagggccgagcgaggcgcaggcaaccgggcagcaggcatgatgccctcgcctagtgactccagccgctcgctgaccagccggcccagcaccaggggccttacccacctccgcctccaccgaccctggctgcaggccctgcttacgctggggctggtccaagtgctcctgggcatcctggtggtcaccttcagcatggtggcctcttccgtcaccaccaccgagagcatcaagaggtcctgcccgtcttgggctgggttctcgctggcgttctccggggtggttggcattgtgtcctggaagcggccattcactctagtgatctccttcttctccttgctttcggtgctctgtgtcatgcttagcatggctggctctgttctctcctgtaagaatgctcaactggcccgagacttccaacagtgctctctggaaggaaaggtctgtgtgtgctgtccctctgttcccctcctccggccctgtccagagtcggggcaggaactgaaagttgcccctaactccacctgtgatgaagcccgaggggccctcaagaacctgctcttcagcgtctgtgggctcaccatttgtgccgctataatctgtacactctctgctattgtctgctgcatccaaatcttctccctggacctcgtgcatacgctggcccctgagcggtcagtctcaggcccactgggacctctgggctgcacgtccccgcccccagcccctctcctacacaccatgctggacctggaggaatttgtcccgcctgtgcccccaccgccctactatcccccagagtatacctgcagctcagaaacagatgcacagagcatcacgtacaatggctccatggacagcccagtgcccttgtaccctaccgattgccccccttcttatgaggcagtcatgggactacgaggagacagccaggccactctctttgaccctcagcttcacgatggctcgtgcatctgtgaacgagtggcctccattgtagacgtgtccatggacagcgggtctctggtgctgtcagccattggtgacctccctgggggctctagcccgtcggaggactcgtgcctgctggagctgcagggctccgtgcgctccgtggactacgttctctttcgctccatccagcgcagccgtgccggctactgcctcagcctggactgtggcctgcggggccccttcgaggaaagccccctgccacggcgccccccacgggctgcccgctcctattcctgctctgcccctgaagctccacccccactgggtgcccccacagctgcccgcagctgccaccggttggagggctggccgccctgggtgggaccctgcttccccgagctgaggcggcgggtcccccggggagggggccgcccagccgcagccccgcccacccgagccccgactcgtcgcttcagcgatagctcaggttccctcaccccaccggggcaccggcctcctcatccggcatccccaccaccgctgctgctgccacggtcccacagcgacccaggcatcacgacctccagtgacactgctgacttcagggacctttataccaaagtgcttgaggaagaagctgcttctgtttcctctgcagatacagggctctgctctgaagcctgcctcttccgcctagcccgctgcccttcccccaagttgctacgtgcccggtcagccgagaaacggcgccctgtgcccaccttccaaaaagttcccctgccctcgggccctgcacctgcccactccctgggggacctaaagggcagctggccaggtcggggcctggtcactcgtttcctccagatatccaggaaagccccagaccccagtgggactggagctcatggacataagcaggtgccccggagcctgtggggccggcctggccgagagagcctccaccttcgcagctgcggagatctgagctctagctcttccctgcggcgtctcctgtctggccgcaggctggagcgtggtacccgcccccacagcctcagcctcaacgggggcagccgggagactgggctctgacctaggcttcttgtcacactgaacacatccagccacaggcaccagctggttgggaccagcagcccccagcatcctcttgcactggctggcacaaaaagaaacctgctgtataccccccaaagtgtccctttccctcctacctctggggtctcttgctgcttgcctctgctgctctggactgggagagcttctgtcctgtgctgcatgggtatttagactgtgggggagatgccccttcttatagcactggaggaggaaaacaaattcttgtccccctcagaatgagagtggctctttctgatttgcaagggcactatggtcagggcaaaggcatggcccaggtgtttaagtacagggtgacgtgtgcctatgcaatggggtggtaaggcaggcacgaagagtccaaaaaatctaggtggcctctcagctctgccacctctagctgcatgaccttgggcaagctatgtaaccccaattgcctgctccattaaagactgtgaaggtagaatgtttgtaaagctcttaacagtatgtaagccttcaataaatttcagttttccccttgttttcttgatca

SEQ ID NO: 5895 - DNA, 637 bp, Homo sapiens
gtggggcccgtttaagaattagggattcccccggggctgcaggaattcggcacgagttgacctaggcttcttgtcacactgaacacatccagccacaggcaccagctggttgggaccagcagcccccagcatcctcttgcactggctggcacaaaaagaaacctgctgtataccccccaaagtgtccctttccctcctacctctggggtctcttgctgcttgcctctgctgctctggactgggagagcttctgtcctgtgctgcatgggtatttagactgtgggggagatgccccttcttatagcactggaggaggaaaacaaattcttgtccccctcagaatgagagtggctctttctgatttgcaagggcactatggtcagggcaaaggcatggcccaggtgtttaagtacagggtgacgtgtgcctatgcaatggggtggtaaggcaggcacgaagagtccaaaaaatctaggtggcctctcagctctgccacctctagctgcatgaccttgggcaagctatgtaaccccaattgcctgctccattaaagactgtgaaggtagaatgtttgtaaagctcttaacagtatgtaagccttcaataaatttcagttttccccttgttttcttgatca

SEQ ID NO: 5896 - DNA, 1441 bp, Homo sapiens
cagcggcgccgcggcctctccccaccaggcggccccggatcctactggacgccctgagggcacaccgaccgcgcctctagagtcaccccacgccgacccctcccctcttctctagacttatttccatccttcccgcttttaccctccccacccctccctgggctccaggccgccgccccctcctcactcctggaccggcccttctcggtgcccctcttccctagggagatgcgatgagccggtgcccccgcgtcctcatcgtcgccccgggcacggtgcccgtccagtgcccgtggtggggagggagcactccgcggtccctccgtgacgcccctcgcttggccccccccacagctggcgtccctcggccatgccccaggggacccagccagggggtgggctctagagcgagtggggtggagaggagaaaggacggggccttgggcgcctctgagatgctcccaagtgccagggagggccgagcgaggcgcaggcaaccgggcagcaggcatgatgccctcgcctagtgactccagccgctcgctgaccagccggcccagcaccaggggccttacccacctccgcctccaccgaccctggctgcaggccctgcttacgctggggctggtccaagtgctcctgggcatcctggtggtcaccttcagcatggtggcctcttccgtcaccaccaccgagagcatcaagaggtcctgcccgtcttgggctgggttctcgaacctgctcttcagcgtctgtgggctcaccatttgtgccgctataatctgtacactctctgctattgtctgctgcatccaaatcttctccctggacctcgtgcatacgctggcccctgagcggtcagtctcaggcccactgggacctctgggctgcacgtccccgcccccagcccctctcctacacaccatgctggacctggaggaatttgtcccgcctgtgcccccaccgccctactatcccccagagtatacctgcagctcagaaacagatgcacagagcatcacgtacaatggctccatggacagcccagtgcccttgtaccctaccgattgccccccttcttatgaggcagtcatgggactacgaggagacagccaggaggaaaacaaattcttgtccccctcagaatgagagtggctctttctgatttgcaagggcactatggtcagggcaaaggcatggcccaggtgtttaagtacagggtgacgtgtgcctatgcaatggggtggtaaggcaggcacgaagagtccaaaaaatctaggtggcctctcagctctgccacctctagctgcatgaccttgggcaagctatgtaaccccaattgcctgctccattaaagactgtgaaggtagaatgtttgtaaagctcttaacagtatgtaagccttcaataaatttcagttttccccttgttttcttgatca

SEQ ID NO: 5897 - DNA, 3202 bp, Homo sapiens
cagcggcgccgcggcctctccccaccaggcggccccggatcctactggacgccctgagggcacaccgaccgcgcctctagagtcaccccacgccgacccctcccctcttctctagacttatttccatccttcccgcttttaccctccccacccctccctgggctccaggccgccgccccctcctcactcctggaccggcccttctcggtgcccctcttccctagggagatgcgatgagccggtgcccccgcgtcctcatcgtcgccccgggcacggtgcccgtccagtgcccgtggtggggagggagcactccgcggtccctccgtgacgcccctcgcttggccccccccacagctggcgtccctcggccatgccccaggggacccagccagggggtgggctctagagcgagtggggtggagaggagaaaggacggggccttgggcgcctctgagatgctcccaagtgccagggagggccgagcgaggcgcaggcaaccgggcagcaggcatgatgccctcgcctagtgactccagccgctcgctgaccagccggcccagcaccaggggccttacccacctccgcctccaccgaccctggctgcaggccctgcttacgctggggctggtccaagtgctcctgggcatcctggtggtcaccttcagcatggtggcctcttccgtcaccaccaccgagagcatcaagaggtcctgcccgtcttgggctgggttctcgctggcgttctccggggtggttggcattgtgtcctggaagcggccattcactctagtgatctccttcttctccttgctttcggtgctctgtgtcatgcttagcatggctggctctgttctctcctgtaagaatgctcaactggcccgagacttccaacagtgctctctggaaggaaaggtctgtgtgtgctgtccctctgttcccctcctccggccctgtccagagtcggggcaggaactgaaagttgcccctaactccacctgtgatgaagcccgaggggccctcaagaacctgctcttcagcgtctgtgggctcaccatttgtgccgctataatctgtacactctctgctattgtctgctgcatccaaatcttctccctggacctcgtgcatacgctggcccctgagcggtcagtctcaggcccactgggacctctgggctgcacgtccccgcccccagcccctctcctacacaccatgctggacctggaggaatttgtcccgcctgtgcccccaccgccctactatcccccagagtatacctgcagctcagaaacagatgcacagagcatcacgtacaatggctccatggacagcccagtgcccttgtaccctaccgattgccccccttcttatgaggcagtcatgggactacgaggagacagccaggccactctctttgaccctcagcttcacgatggctcgtgcatctgtgaacgagtggcctccattgtagacgctggaggcacagtggcccctagaggctgggcttgggagaagaggaactgcctgggcagggctaggccaggccaggctggtgctacacagcgccccctgccgcccacagtgtccatggacagcgggtctctggtgctgtcagccattggtgacctccctgggggctctagcccgtcggaggactcgtgcctgctggagctgcagggctccgtgcgctccgtggactacgttctctttcgctccatccagcgcagccgtgccggctactgcctcagcctggactgtggcctgcggggccccttcgaggaaagccccctgccacggcgccccccacgggctgcccgctcctattcctgctctgcccctgaagctccacccccactgggtgcccccacagctgcccgcagctgccaccggttggagggctggccgccctgggtgggaccctgcttccccgagctgaggcggcgggtcccccggggagggggccgcccagccgcagccccgcccacccgagccccgactcgtcgcttcagcgatagctcaggttccctcaccccaccggggcaccggcctcctcatccggcatccccaccaccgctgctgctgccacggtcccacagcgacccaggcatcacgacctccagtgacactgctgacttcagggacctttataccaaagtgcttgaggaagaagctgcttctgtttcctctgcagatacagggctctgctctgaagcctgcctcttccgcctagcccgctgcccttcccccaagttgctacgtgcccggtcagccgagaaacggcgccctgtgcccaccttccaaaaagttcccctgccctcgggccctgcacctgcccactccctgggggacctaaagggcagctggccaggtcggggcctggtcactcgtttcctccagatatccaggaaagccccagaccccagtgggactggagctcatggacataagcaggtgccccggagcctgtggggccggcctggccgagagagcctccaccttcgcagctgcggagatctgagctctagctcttccctgcggcgtctcctgtctggccgcaggctggagcgtggtacccgcccccacagcctcagcctcaacgggggcagccgggagactgggctctgacctaggcttcttgtcacactgaacacatccagccacaggcaccagctggttgggaccagcagcccccagcatcctcttgcactggctggcacaaaaagaaacctgctgtataccccccaaagtgtccctttccctcctacctctggggtctcttgctgcttgcctctgctgctctggactgggagagcttctgtcctgtgctgcatgggtatttagactgtgggggagatgccccttcttatagcactggaggaggaaaacaaattcttgtccccctcagaatgagagtggctctttctgatttgcaagggcactatggtcagggcaaaggcatggcccaggtgtttaagtacagggtgacgtgtgcctatgcaatggggtggtaaggcaggcacgaagagtccaaaaaatctaggtggcctctcagctctgccacctctagctgcatgaccttgggcaagctatgtaaccccaattgcctgctccattaaagactgtgaaggtagaatgtttgtaaagctcttaacagtatgtaagccttcaataaatttcagttttccccttgttttcttgatca

SEQ ID NO: 5898 - DNA, 3145 bp, Homo sapiens
cagcggcgccgcggcctctccccaccaggcggccccggatcctactggacgccctgagggcacaccgaccgcgcctctagagtcaccccacgccgacccctcccctcttctctagacttatttccatccttcccgcttttaccctccccacccctccctgggctccaggccgccgccccctcctcactcctggaccggcccttctcggtgcccctcttccctagggagatgcgatgagccggtgcccccgcgtcctcatcgtcgccccgggcacggtgcccgtccagtgcccgtggtggggagggagcactccgcggtccctccgtgacgcccctcgcttggccccccccacagctggcgtccctcggccatgccccaggggacccagccagggggtgggctctagagcgagtggggtggagaggagaaaggacggggccttgggcgcctctgagatgctcccaagtgccagggagggccgagcgaggcgcaggcaaccgggcagcaggcatgatgccctcgcctagtgactccagccgctcgctgaccagccggcccagcaccaggggccttacccacctccgcctccaccgaccctggctgcaggccctgcttacgctggggctggtccaagtgctcctgggcatcctggtggtcaccttcagcatggtggcctcttccgtcaccaccaccgagagcatcaagaggtcctgcccgtcttgggctgggttctcgatctccttcttctccttgctttcggtgctctgtgtcatgcttagcatggctggctctgttctctcctgtaagaatgctcaactggcccgagacttccaacagtgctctctggaaggaaaggtctgtgtgtgctgtccctctgttcccctcctccggccctgtccagagtcggggcaggaactgaaagttgcccctaactccacctgtgatgaagcccgaggggccctcaagaacctgctcttcagcgtctgtgggctcaccatttgtgccgctataatctgtacactctctgctattgtctgctgcatccaaatcttctccctggacctcgtgcatacgctggcccctgagcggtcagtctcaggcccactgggacctctgggctgcacgtccccgcccccagcccctctcctacacaccatgctggacctggaggaatttgtcccgcctgtgcccccaccgccctactatcccccagagtatacctgcagctcagaaacagatgcacagagcatcacgtacaatggctccatggacagcccagtgcccttgtaccctaccgattgccccccttcttatgaggcagtcatgggactacgaggagacagccaggccactctctttgaccctcagcttcacgatggctcgtgcatctgtgaacgagtggcctccattgtagacgctggaggcacagtggcccctagaggctgggcttgggagaagaggaactgcctgggcagggctaggccaggccaggctggtgctacacagcgccccctgccgcccacagtgtccatggacagcgggtctctggtgctgtcagccattggtgacctccctgggggctctagcccgtcggaggactcgtgcctgctggagctgcagggctccgtgcgctccgtggactacgttctctttcgctccatccagcgcagccgtgccggctactgcctcagcctggactgtggcctgcggggccccttcgaggaaagccccctgccacggcgccccccacgggctgcccgctcctattcctgctctgcccctgaagctccacccccactgggtgcccccacagctgcccgcagctgccaccggttggagggctggccgccctgggtgggaccctgcttccccgagctgaggcggcgggtcccccggggagggggccgcccagccgcagccccgcccacccgagccccgactcgtcgcttcagcgatagctcaggttccctcaccccaccggggcaccggcctcctcatccggcatccccaccaccgctgctgctgccacggtcccacagcgacccaggcatcacgacctccagtgacactgctgacttcagggacctttataccaaagtgcttgaggaagaagctgcttctgtttcctctgcagatacagggctctgctctgaagcctgcctcttccgcctagcccgctgcccttcccccaagttgctacgtgcccggtcagccgagaaacggcgccctgtgcccaccttccaaaaagttcccctgccctcgggccctgcacctgcccactccctgggggacctaaagggcagctggccaggtcggggcctggtcactcgtttcctccagatatccaggaaagccccagaccccagtgggactggagctcatggacataagcaggtgccccggagcctgtggggccggcctggccgagagagcctccaccttcgcagctgcggagatctgagctctagctcttccctgcggcgtctcctgtctggccgcaggctggagcgtggtacccgcccccacagcctcagcctcaacgggggcagccgggagactgggctctgacctaggcttcttgtcacactgaacacatccagccacaggcaccagctggttgggaccagcagcccccagcatcctcttgcactggctggcacaaaaagaaacctgctgtataccccccaaagtgtccctttccctcctacctctggggtctcttgctgcttgcctctgctgctctggactgggagagcttctgtcctgtgctgcatgggtatttagactgtgggggagatgccccttcttatagcactggaggaggaaaacaaattcttgtccccctcagaatgagagtggctctttctgatttgcaagggcactatggtcagggcaaaggcatggcccaggtgtttaagtacagggtgacgtgtgcctatgcaatggggtggtaaggcaggcacgaagagtccaaaaaatctaggtggcctctcagctctgccacctctagctgcatgaccttgggcaagctatgtaaccccaattgcctgctccattaaagactgtgaaggtagaatgtttgtaaagctcttaacagtatgtaagccttcaataaatttcagttttccccttgttttcttgatca

SEQ ID NO: 5899 - DNA, 3012 bp, Homo sapiens
cagcggcgccgcggcctctccccaccaggcggccccggatcctactggacgccctgagggcacaccgaccgcgcctctagagtcaccccacgccgacccctcccctcttctctagacttatttccatccttcccgcttttaccctccccacccctccctgggctccaggccgccgccccctcctcactcctggaccggcccttctcggtgcccctcttccctagggagatgcgatgagccggtgcccccgcgtcctcatcgtcgccccgggcacggtgcccgtccagtgcccgtggtggggagggagcactccgcggtccctccgtgacgcccctcgcttggccccccccacagctggcgtccctcggccatgccccaggggacccagccagggggtgggctctagagcgagtggggtggagaggagaaaggacggggccttgggcgcctctgagatgctcccaagtgccagggagggccgagcgaggcgcaggcaaccgggcagcaggcatgatgccctcgcctagtgactccagccgctcgctgaccagccggcccagcaccaggggccttacccacctccgcctccaccgaccctggctgcaggccctgcttacgctggggctggtccaagtgctcctgggcatcctggtggtcaccttcagcatggtggcctcttccgtcaccaccaccgagagcatcaagaggtcctgcccgtcttgggctgggttctcgctggcgttctccggggtggttggcattgtgtcctggaagcggccattcactctagtgatctccttcttctccttgctttcggtgctctgtgtcatgcttagcatggctggctctgttctctcctgtaagaatgctcaactggcccgagacttccaacagtgctctctggaaggaaaggtctgtgtgtgctgtccctctgttcccctcctccggccctgtccagagtcggggcaggaactgaaagttgcccctaactccacctgtgatgaagcccgaggggccctcaagaacctgctcttcagcgtctgtgggctcaccatttgtgccgctataatctgtacactctctgctattgtctgctgcatccaaatcttctccctggacctcgtgcatacgctggcccctgagcggtcagtctcaggcccactgggacctctgggctgcacgtccccgcccccagcccctctcctacacaccatgctggacctggaggaatttgtcccgcctgtgcccccaccgccctactatcccccagagtatacctgcagctcagaaacagatgcacagagcatcacgtacaatggctccatggacagcccagtgcccttgtaccctaccgattgccccccttcttatgaggcagtcatgggactacgaggagacagccaggccactctctttgaccctcagcttcacgatggctcgtgcatctgtgaacgagtggcctccattgtagacgtgtccatggacagcgggtctctggtgctgtcagccattggtgacctccctgggggctctagcccgtcggaggactcgtgcctgctggagctgcagggctccgtgcgctccgtggactacgttctctttcgctccatccagcgcagccgtgccggctactgcctcagcctggactgtggcctgcggggccccttcgaggaaagccccctgccacggcgccccccacgggctgcccgctcctattcctgctctgcccctgaagctccacccccactgggtgcccccacagctgcccgcagctgccaccggttggagggctggccgccctgggtgggaccctgttcagcgatagctcaggttccctcaccccaccggggcaccggcctcctcatccggcatccccaccaccgctgctgctgccacggtcccacagcgacccaggcatcacgacctccagtgacactgctgacttcagggacctttataccaaagtgcttgaggaagaagctgcttctgtttcctctgcagatacagggctctgctctgaagcctgcctcttccgcctagcccgctgcccttcccccaagttgctacgtgcccggtcagccgagaaacggcgccctgtgcccaccttccaaaaagttcccctgccctcgggccctgcacctgcccactccctgggggacctaaagggcagctggccaggtcggggcctggtcactcgtttcctccagatatccaggaaagccccagaccccagtgggactggagctcatggacataagcaggtgccccggagcctgtggggccggcctggccgagagagcctccaccttcgcagctgcggagatctgagctctagctcttccctgcggcgtctcctgtctggccgcaggctggagcgtggtacccgcccccacagcctcagcctcaacgggggcagccgggagactgggctctgacctaggcttcttgtcacactgaacacatccagccacaggcaccagctggttgggaccagcagcccccagcatcctcttgcactggctggcacaaaaagaaacctgctgtataccccccaaagtgtccctttccctcctacctctggggtctcttgctgcttgcctctgctgctctggactgggagagcttctgtcctgtgctgcatgggtatttagactgtgggggagatgccccttcttatagcactggaggaggaaaacaaattcttgtccccctcagaatgagagtggctctttctgatttgcaagggcactatggtcagggcaaaggcatggcccaggtgtttaagtacagggtgacgtgtgcctatgcaatggggtggtaaggcaggcacgaagagtccaaaaaatctaggtggcctctcagctctgccacctctagctgcatgaccttgggcaagctatgtaaccccaattgcctgctccattaaagactgtgaaggtagaatgtttgtaaagctcttaacagtatgtaagccttcaataaatttcagttttccccttgttttcttgatca

SEQ ID NO: 5900 - DNA, 3216 bp, Homo sapiens
cagcggcgccgcggcctctccccaccaggcggccccggatcctactggacgccctgagggcacaccgaccgcgcctctagagtcaccccacgccgacccctcccctcttctctagacttatttccatccttcccgcttttaccctccccacccctccctgggctccaggccgccgccccctcctcactcctggaccggcccttctcggtgcccctcttccctagggagatgcgatgagccggtgcccccgcgtcctcatcgtcgccccgggcacggtgcccgtccagtgcccgtggtggggagggagcactccgcggtccctccgtgacgcccctcgcttggccccccccacagctggcgtccctcggccatgccccaggggacccagccagggggtgggctctagagcgagtggggtggagaggagaaaggacggggccttgggcgcctctgagatgctcccaagtgccagggagggccgagcgaggcgcaggcaaccgggcagcaggcatgatgccctcgcctagtgactccagccgctcgctgaccagccggcccagcaccaggggccttacccacctccgcctccaccgaccctggctgcaggccctgcttacgctggggctggtccaagtgctcctgggcatcctggtggtcaccttcagcatggtggcctcttccgtcaccaccaccgagagcatcaagaggtcctgcccgtcttgggctgggttctcgctggcgttctccggggtggttggcattgtgtcctggaagcggccattcactctagtgatctccttcttctccttgctttcggtgctctgtgtcatgcttagcatggctggctctgttctctcctgtaagaatgctcaactggcccgagacttccaacagtgctctctggaaggaaaggtctgtgtgtgctgtccctctgttcccctcctccggccctgtccagagtcggggcaggaactgaaagttgcccctaactccacctgtgatgaagcccgaggggccctcaagaacctgctcttcagcgtctgtgggctcaccatttgtgccgctataatctgtacactctctgctattgtctgctgcatccaaatcttctccctggacctcgtgcatacgctggcccctgagcggtcagtctcaggcccactgggacctctgggctgcacgtccccgcccccagcccctctcctacacaccatgctggacctggaggaatttgtcccgcctgtgcccccaccgccctactatcccccagagtatacctgcagctcagaaacagatgcacagagcatcacgtacaatggctccatggacagcccagtgcccttgtaccctaccgattgccccccttcttatgaggcagtcatgggactacgaggagacagccaggccactctctttgaccctcagcttcacgatggctcgtgcatctgtgaacgagtggcctccattgtagacgtgtccatggacagcgggtctctggtgctgtcagccattggtgacctccctgggggctctagcccgtcggaggactcgtgcctgctggagctgcagggctccgtgcgctccgtggactacgttctctttcgctccatccagcgcagccgtgccggctactgcctcagcctggactgtggcctgcggggccccttcgaggaaagccccctgccacggcgccccccacgggctgcccgctcctattcctgctctgcccctgaagctccacccccactgggtgcccccacagctgcccgcagctgccaccggttggagggctggccgccctgggtgggaccctgcttccccgagctgaggcggcgggtcccccggggagggggccgcccagccgcagccccgcccacccgagccccgactcgtcgcttcagcgatagctcaggttccctcaccccaccggggcaccggcctcctcatccggcatccccaccaccgctgctgctgccacggtcccacagcgacccaggcatcacgacctccagtgacactgctgacttcagggacctttataccaaagtgcttgaggaagaagctgcttctgtttcctctgcagatacagggctctgctctgaagcctgcctcttccgcctagcccgctgcccttcccccaagttgctacgtgcccggtcagccgagaaacggcgccctgtgcccaccttccaaaaagttcccctgccctcgggccctgcacctgcccactccctgggggacctaaagggcagctggccaggtcggggcctggtcactcgtttcctccagatatccaggaaagccccagaccccagtgggactggagctcatggacataagcaggtgccccggagcctgtggggccggcctggccgagagagcctccaccttcgcagctgcggagatctgagctctagctcttccctgcggcgtctcctgtctggccgcaggctggagcgtggtacccgcccccacagcctcagcctcaacgggggcagccgggagactgggctctgacctaggcttcttgtcacactgaacacatccagccacaggcaccagctggttgggaccagcagcccccagcatcctcttgcactggctggcacaaaaagaaacctgctgtataccccccaaagtgtccctttccctcctacctctggggtctcttgctgcttgcctctgctgctctggactgggagagcttctgtcctgtgctgcatgggtatttagactgtgggggagatgccccttcttatagcactggaggaggaaaacaaattcttgtccccctcagaatgagagtggctctttctgatttgcaagggcactatggtcagggcaaaggcatggcccaggtgtttaagtacagggtgacgtgtgcctatgcaatggggtggtaaggcaggcacgaagagtccaaaaaatctaggtggcctctcagctctgccacctctagctgcatgaccttgggcaagctatgtaaccccaattgcctgctccattaaagactgtgaaggtagaatgtttgtaaagctcttaacagtatgtaagccttcaataaatttcagttttccccttgttttcttgatcaacacaacaaacaacaccgacgcaatacacaaacaacaacccaggggggcgcataaaatacccccagcggggcagcgagtggcacacaccccttttgcacaaggggcctcaagggggcgcaag

SEQ ID NO: 5901 - DNA, 2205 bp, Homo sapiens
cagcggcgccgcggcctctccccaccaggcggccccggatcctactggacgccctgagggcacaccgaccgcgcctctagagtcaccccacgccgacccctcccctcttctctagacttatttccatccttcccgcttttaccctccccacccctccctgggctccaggccgccgccccctcctcactcctggaccggcccttctcggtgcccctcttccctagggagatgcgatgagccggtgcccccgcgtcctcatcgtcgccccgggcacggtgcccgtccagtgcccgtggtggggagggagcactccgcggtccctccgtgacgcccctcgcttggccccccccacagctggcgtccctcggccatgccccaggggacccagccagggggtgggctctagagcgagtggggtggagaggagaaaggacggggccttgggcgcctctgagatgctcccaagtgccagggagggccgagcgaggcgcaggcaaccgggcagcaggcatgatgccctcgcctagtgactccagccgctcgctgaccagccggcccagcaccaggggccttacccacctccgcctccaccgaccctggctgcaggccctgcttacgctggggctggtccaagtgctcctgggcatcctggtggtcaccttcagcatggtggcctcttccgtcaccaccaccgagagcatcaagaggtcctgcccgtcttgggctgggttctcgctggcgttctccggggtggttggcattgtgtcctggaagcggccattcactctagtgatctccttcttctccttgctttcggtgctctgtgtcatgcttagcatggctggctctgttctctcctgtaagaatgctcaactggcccgagacttccaacagtgctctctggaaggaaaggtctgtgtgtgctgtccctctgttcccctcctccggccctgtccagagtcggggcaggaactgaaagttgcccctaactccacctgtgatgaagcccgaggggccctcaagaacctgctcttcagcgtctgtgggctcaccatttgtgccgctataatctgtacactctctgctattgtctgctgcatccaaatcttctccctggacctcgtgcatacgctgacttcagggacctttataccaaagtgcttgaggaagaagctgcttctgtttcctctgcagatacagggctctgctctgaagcctgcctcttccgcctagcccgctgcccttcccccaagttgctacgtgcccggtcagccgagaaacggcgccctgtgcccaccttccaaaaagttcccctgccctcgggccctgcacctgcccactccctgggggacctaaagggcagctggccaggtcggggcctggtcactcgtttcctccagatatccaggaaagccccagaccccagtgggactggagctcatggacataagcaggtgccccggagcctgtggggccggcctggccgagagagcctccaccttcgcagctgcggagatctgagctctagctcttccctgcggcgtctcctgtctggccgcaggctggagcgtggtacccgcccccacagcctcagcctcaacgggggcagccgggagactgggctctgacctaggcttcttgtcacactgaacacatccagccacaggcaccagctggttgggaccagcagcccccagcatcctcttgcactggctggcacaaaaagaaacctgctgtataccccccaaagtgtccctttccctcctacctctggggtctcttgctgcttgcctctgctgctctggactgggagagcttctgtcctgtgctgcatgggtatttagactgtgggggagatgccccttcttatagcactggaggaggaaaacaaattcttgtccccctcagaatgagagtggctctttctgatttgcaagggcactatggtcagggcaaaggcatggcccaggtgtttaagtacagggtgacgtgtgcctatgcaatggggtggtaaggcaggcacgaagagtccaaaaaatctaggtggcctctcagctctgccacctctagctgcatgaccttgggcaagctatgtaaccccaattgcctgctccattaaagactgtgaaggtagaatgtttgtaaagctcttaacagtatgtaagccttcaataaatttcagttttccccttgttttcttgatca

SEQ ID NO: 5902 - DNA, 1917 bp, Homo sapiens
cagcggcgccgcggcctctccccaccaggcggccccggatcctactggacgccctgagggcacaccgaccgcgcctctagagtcaccccacgccgacccctcccctcttctctagacttatttccatccttcccgcttttaccctccccacccctccctgggctccaggccgccgccccctcctcactcctggaccggcccttctcggtgcccctcttccctagggagatgcgatgagccggtgcccccgcgtcctcatcgtcgccccgggcacggtgcccgtccagtgcccgtggtggggagggagcactccgcggtccctccgtgacgcccctcgcttggccccccccacagctggcgtccctcggccatgccccaggggacccagccagggggtgggctctagagcgagtggggtggagaggagaaaggacggggccttgggcgcctctgagatgctcccaagtgccagggagggccgagcgaggcgcaggcaaccgggcagcaggcatgatgccctcgcctagtgactccagccgctcgctgaccagccggcccagcaccaggggccttacccacctccgcctccaccgaccctggctgcaggccctgcttacgctggggctggtccaagtgctcctgggcatcctggtggtcaccttcagcatggtggcctcttccgtcaccaccaccgagagcatcaagaggtcctgcccgtcttgggctgggttctcgaacctgctcttcagcgtctgtgggctcaccatttgtgccgctataatctgtacactctctgctattgtctgctgcatccaaatcttctccctggacctcgtgcatacgctgacttcagggacctttataccaaagtgcttgaggaagaagctgcttctgtttcctctgcagatacagggctctgctctgaagcctgcctcttccgcctagcccgctgcccttcccccaagttgctacgtgcccggtcagccgagaaacggcgccctgtgcccaccttccaaaaagttcccctgccctcgggccctgcacctgcccactccctgggggacctaaagggcagctggccaggtcggggcctggtcactcgtttcctccagatatccaggaaagccccagaccccagtgggactggagctcatggacataagcaggtgccccggagcctgtggggccggcctggccgagagagcctccaccttcgcagctgcggagatctgagctctagctcttccctgcggcgtctcctgtctggccgcaggctggagcgtggtacccgcccccacagcctcagcctcaacgggggcagccgggagactgggctctgacctaggcttcttgtcacactgaacacatccagccacaggcaccagctggttgggaccagcagcccccagcatcctcttgcactggctggcacaaaaagaaacctgctgtataccccccaaagtgtccctttccctcctacctctggggtctcttgctgcttgcctctgctgctctggactgggagagcttctgtcctgtgctgcatgggtatttagactgtgggggagatgccccttcttatagcactggaggaggaaaacaaattcttgtccccctcagaatgagagtggctctttctgatttgcaagggcactatggtcagggcaaaggcatggcccaggtgtttaagtacagggtgacgtgtgcctatgcaatggggtggtaaggcaggcacgaagagtccaaaaaatctaggtggcctctcagctctgccacctctagctgcatgaccttgggcaagctatgtaaccccaattgcctgctccattaaagactgtgaaggtagaatgtttgtaaagctcttaacagtatgtaagccttcaataaatttcagttttccccttgttttcttgatca

SEQ ID NO: 5903 - DNA, 419 bp, Homo sapiens
tccaaagtctcactcctccaggggtgtcccgtagtcaagaggttgatgctgatgcctgtggaaagagcggctgaagatggcttctcaggctttcatcttgacctcctcctcttacttcacactcgccctgggctccagcctcagcacccaagacgtcaaccacctcccaccaggcttgcgatgccaaatctttatctctagcctgactcccagcaccttccagtcgtctgcctagagtggaggctggctggctccagttccctttccaacagcagccagggtggcctgcctcaaacgcacacatctggccacagcactcgcccacgcccgcgtaggagctggccctggtcaccgtcatccacgtcagagatcacaaacatttggaaatgtaacttgtttttcaaataaatgttatattc

SEQ ID NO: 5904 - DNA, 476 bp, Homo sapiens
aacaaatgttggaaaatatttttaatgatgtaaaaatagtccactggatggagatatcataatttaaggaatctaatttttcagcaattttaatcacatctaagtactgctataagactttgatggctgttattactgcataatatttacttgtttcatctttagttttttctccaacaaagttgtgtcccattggctgacttctatttttacattaattagcatatttttaaaaaatcaacttaaaaatccagatttgcaggtcctcttgagaagagacaatcaggtacagccacttagtgctgcctcctttagttgtggtatgagctcctagtaatctcatttgttatttgcctggcccatctgtaagcgctgagtcaaggaacacgtctgcttcctaggcatatccttagggcccagaaagcacactgcctggcataaaggagctaagtatttattgaaaggaaaagcaaacc

SEQ ID NO: 5905 - DNA, 470 bp, Homo sapiens
aagcagatttatctctaagaaaaagaaaacaaaattgtttccatcttttatttcaatttaaaagctaagatggaatattaatattgcctacttctgctttccttgtttaagcactaaaagaaatcaagcagtcattggaatgttttcttttttaaaagaccctttaactatatgattttaaaaatgtctgtctccaaaaaatgaaaatcaaaacacatagccaagagccaagagacgaggaagaacattctcatatcttttcagcatttggaggtggtggtgattgtgagcactttagactgagccaacttgacctaatatggacaaaggaccagagcttttggttatgggtattcatcagcttcctttctcagcatgcataattgggcttatatttatgtcattgttgctgtacgattcctacagctgtataatacctaagaactttacttattcaccatctctttttt

SEQ ID NO: 5906 - DNA, 382 bp, Homo sapiens
gaataaagtagctatggaaatatatcttgaataatagtgtatttttgtagaaagatggcaaattcattattaaaattaaagagaatgtgaattataagaacttcagtaaaaaacttattcttcatgtttcctttgatgctgctgcatgtgttgtaggtgtagttatatccaactttaccattggctttgaaatacaggtccaagaaattctagaaatgaataatcaaaaaaatatgtcagtgtataaaattcccaggcatacaaattatccattttcaaaattggccaattttatatgctcaaggaatcttcagaatatcttttcacaccttctcatttctttacaagccttctgaaactaaaaattccagtggccccaaag

SEQ ID NO: 5907 - DNA, 1146 bp, Homo sapiens
ccgagatcgcgcccttgtgcttggacaacaagagcgaaacttcgtctcaaaaataaaaaataaaaaataacctgaataaccatcgtctgtctgctccctaacactcacaggattagaatttctggggatagtacttaagctaccaaagaggatgccatcactcagagatatagaggtgatcagaaaactgcaaaagagaccttcttgtctttttctctaccaactgttatgatttgtcattgccactagcatgtatttggcaaaacttgctatggccttgtttgtcttccttctataaaatgaatttgttctaaaatttggaaatagaaattactgtttttgttctttcagtatattccagtgggttgctgcagagtaatatttttatgttttcaatgcttttagtttacacttaaatgtttgtgttggaaatgtcttttctgctaattcagttattggaaaagggctgtaattgagtagggtagtaaatactaattgcttgtttctttaactgaataacattttcctattgttaacggattgactacaggtgtgctgtttgactttctattacttgtaactgaagttagcctctctcctctacccccgcaaaagtgtaggagactgggtgatggtcttgtattctctacaagttggtggcgttgtttaggccccaagctggaatgctgatgaccctatgattctctccctccaccctttacatctgttttatcatgcaagttctgatgatttttagactatttttctaggctctgcttcacacctcattgacacctatcttccctaattaaggtcttttttttctggcatgtatgttgccctattaacagtagctttccagagggtacatggctcacacctgtaaacttagcactctgggaggccaaagcaggaggattgcttgagcccaggagtttgagacaagcctgggcaacacagggagactcttatctctacaaaaatttaaaaaaataaaataactgggcgtggtggcacacatcttatagtcccagctacttgggagactgagacaggaggatcccttgaacccaggaggttgagggtacaataagccatgatctaaccactgcactccagcctgggtgacagagtgacactgtctca

SEQ ID NO: 5908 - DNA, 511 bp, Homo sapiens
gaggacaagatgacacataatagaggagcctgggctcaccgtaggagaactgggttaggagagagaaagcctgagcccttcctggacttgtttgccctgggccagggttttacaaaacagcatctctctctctctccctaggaaccaagatgacccttgttggggcattgagaatatcatgagtgccacggggaaggggagtagggatgtcttttcccccccagcagtgatgagtggggctagctgaagcccattggtttccacgatttcaattggctgagaaggcagagagctagctcctccctttctttctttttccacctgagacttgtttataaaaaacaaaacaataaaaagagtctgatcagagcccagggccctgtctgtctggttctgtgcagcaggttgggaagaaggggactgcagggtcctgtatatcaacgcacactggtagcttctgcttccccttccactccgtcaaaagcactaagttaggccaggcacaatggct

SEQ ID NO: 5909 - DNA, 994 bp, Homo sapiens
ccttatgcttctctagcttgggaggacttacgggcggacgggttgtgtctcgtttatctgttaggttgattgtctagcacagtgccaggcacatagtaggcattcagtttttgtggagggaacagaggctgcggcctcctgtcattgcaggagggtgccccttgggccgagttcccctctcagtgtatcccagcccatgctgggcatccgtgaagcgaggcctgctggcttgggtgctggccctgcagcctcaccccacctcagccccagtcctgcccctagcacagccagcagtgccccaggcagaacctggcaggggaatggggagatgactcccccacttcaaggaccccgtgctcgattccggaagaaacccaaggctcttccctacaggagggagaacagtcctggggacttgcccccaccacccttgccaccgccagaggaagaggcgagctgggccctagagctgagggcagcaggcagcatgtcctccctggagcgggagcgcagtggggagaggaaagcggtccaggccgtgcccctggcagcccagcgggtgctccacccagatgaagaggcctggctcccatacagcagaccaagcttcctgtcccggggccagggcaccagcacatgttccacggccggcagcaactcttccaggggctccagcagctctaggggctcccggggccctggccggagccggagtcggagtcagagccggagccagagccaaaggccaggacagaaacgccgagaggaaccaagatgacccttgttggggcattgagaatatcatgagtgccacggggaaggggagtagggatgtcttttcccccccagcagtgatgagtggggctagctgaagcccattggtttccacgatttcaattggctgagaaggcagagagctagctcctccctttctttctttttccacctgagacttgtttataaaaaacaaaacaataaaaagagtctgatcaga

SEQ ID NO: 5910 - DNA, 1800 bp, Homo sapiens
  misc_feature (26)..(26): n is a, c, g, or t
aagcagctggtcctgccccggagtanggatggccgctgaaagaaggcgatccgagttctgctacttcctagtaagggacgtctctggagagattctgaggtgtttgagcctcttttgcctacacaccggcagtgtccttcccgcactcagagggcctctctggagccagttccaggccacccatgggccttggccccgccccctactcatggctggcagattcgtggccccacccatctcgaagcccctcggcccaggaacccaggggaagctgctgccctagcaatcctgacccggacgacagatattacaacggtgaggagttctcattccctcacctggcttcagcgcacttctcccgacctactggggcaaaccgaagggcgcccgggagcccggtctctctgagaagcaggaatctccctgtatctagctcagacggccaggggcacggccgcccctggcgagggtcctgtctatagcaccattgacccagcgggggaggagctgcagaccttccatgggggcttcccccaacatccctcaggagatctgggtccctggagccagtacgctcctccagagtggagccagggggacagtggagccaagggaggcaaagtgaagcttctggggaaacctgtgcagatgccctctctgaactggccagaagccctgcccccacctcctccttcttgtgaactgagctgcctagaagggccggaggaggagctggagggcagctcagagccagaggagtggtgcccgccaatgcctgagagaagtcacctgacggagcccagctccagtggagggtgcctggtcaccccatcccgaagggaaaccccctctcccacaccttcctatggacagcagtccacagccactcttacaccctcacctcctgaccctccccagcccccaactgacatgccccatctccatcagatgcccaggagggtgccccttgggccgagttcccctctcagtgtatcccagcccatgctgggcatccgtgaagcgaggcctgctggcttgggtgctggccctgcagcctcaccccacctcagccccagtcctgcccctagcacagccagcagtgccccaggcagaacctggcaggggaatggggagatgactcccccacttcaaggaccccgtgctcgattccggaagaaacccaaggctcttccctacaggagggagaacagtcctggggacttgcccccaccacccttgccaccgccagaggaagaggcgagctgggccctagagctgagggcagcaggcagcatgtcctccctggagcgggagcgcagtggggagaggaaagcggtccaggccgtgcccctggcagcccagcgggtgctccacccagatgaagaggcctggctcccatacagcagaccaagcttcctgtcccggggccagggcaccagcacatgttccacggccggcagcaactcttccaggggctccagcagctctaggggctcccggggccctggccggagccggagtcggagtcagagccggagccagagccaaaggccaggacagaaacgccgagaggaaccaagatgacccttgttggggcattgagaatatcatgagtgccacggggaaggggagtagggatgtcttttcccccccagcagtgatgagtggggctagctgaagcccattggtttccacgatttcaattggctgagaaggcagagagctagctcctccctttctttctttttccacctgagacttgtttataaaaaacaaaacaataaaaagagtctgatcaga

SEQ ID NO: 5911 - DNA, 2503 bp, Homo sapiens
  misc_feature (26)..(26): n is a, c, g, or t
aagcagctggtcctgccccggagtanggatggccgctgaaagaaggcgatccgagttctgctacttcctagtaagggacgtctctggagagattctgaggtgtttgaggtcagtggttttcaatcttggttggctacacataggaatcacttgaggggcttgagaaaaataccgacacctgagtcccacccccgagaaattctgatgaaatgggtccagggtgcagcctgagtggtggaactgggaccggggcctaggcgtggacaagtataggggtatttctgacccttctcctcatttcacctcttctttctcccacgggttcctttctggaagcctcttttgcctacacaccggcaggtaagccatctctgccccagtggggttcagaccccccgggacgggcccttctctcactcattcgccccctcattttccccagtgtccttcccgcactcagagggcctctctggagccagttccaggtaattctcttagcccatttcctcaggatgacctccaccgacaggccactcttcttccgccccgctgacgccccaggtggagggagcatggccacctcccaccccaacaccaccgccactgtcctgaaactcccgaatatcgccacctccctttcctttgctggcctcttcaggctctccgtccccaacgctcacctgctctccctcaggccacccatgggccttggccccgccccctactcatggctggcagattcgtggccccacccatctcgaagcccctcggcccaggaacccaggggaagctgctgccctagcaatcctgacccggacgacagatattacaacggtgaggagttctcattccctcacctggcttcagcgcacttctcccgacctactggggcaaaccgaagggcgcccgggagcccggtctctctgaggttggtcagtccctggggaggatgtgagctggggaagcctctcagacctacctccaccctggtttaggatgtaaggcttgtgtgggggaagaagttgatcccgtgggatttccctttgtcttccattctgttgtcctctatgtttctgtctctgcttccgggcctccctctttcttctctgcagaagcaggaatctccctgtatctagctcagacggccaggggcacggccgcccctggcgagggtcctgtctatagcaccattgacccagcgggggaggagctgcagaccttccatgggggcttcccccaacatccctcaggagatctgggtccctggagccagtacgctcctccagagtggagccagggggacagtggagccaagggaggcaaagtgaagcttctggggaaacctgtgcagatgccctctctgaactggccagaagccctgcccccacctcctccttcttgtgaactgagctgcctagaagggccggaggaggagctggagggcagctcagagccagaggagtggtgcccgccaatgcctgagagaagtcacctgacggagcccagctccagtggagggtgcctggtcaccccatcccgaagggaaaccccctctcccacaccttcctatggacagcagtccacagccactcttacaccctcacctcctgaccctccccagcccccaactgacatgccccatctccatcagatgcccaggagggtgccccttgggccgagttcccctctcagtgtatcccagcccatgctgggcatccgtgaagcgaggcctgctggcttgggtgctggccctgcagcctcaccccacctcagccccagtcctgcccctagcacagccagcagtgccccaggcagaacctggcaggggaatggggagatgactcccccacttcaaggaccccgtgctcgattccggaagaaacccaaggctcttccctacaggagggagaacagtcctggggacttgcccccaccacccttgccaccgccagaggaagaggcgagctgggccctagagctgagggcagcaggcagcatgtcctccctggagcgggagcgcagtggggagaggaaagcggtccaggccgtgcccctggcagcccagcgggtgctccacccagatgaagaggcctggctcccatacagcagaccaagcttcctgtcccggggccagggcaccagcacatgttccacggccggcagcaactcttccaggggctccagcagctctaggggctcccggggccctggccggagccggagtcggagtcagagccggagccagagccaaaggccaggacagaaacgccgagaggaaccaagatgacccttgttggggcattgagaatatcatgagtgccacggggaaggggagtagggatgtcttttcccccccagcagtgatgagtggggctagctgaagcccattggtttccacgatttcaattggctgagaaggcagagagctagctcctccctttctttctttttccacctgagacttgtttataaaaaacaaaacaataaaaagagtctgatcaga

SEQ ID NO: 5912 - DNA, 2151 bp, Homo sapiens
  misc_feature (26)..(26): n is a, c, g, or t
aagcagctggtcctgccccggagtanggatggccgctgaaagaaggcgatccgagttctgctacttcctagtaagggacgtctctggagagattctgaggtgtttgaggtcagtggttttcaatcttggttggctacacataggaatcacttgaggggcttgagaaaaataccgacacctgagtcccacccccgagaaattctgatgaaatgggtccagggtgcagcctgagtggtggaactgggaccggggcctaggcgtggacaagtataggggtatttctgacccttctcctcatttcacctcttctttctcccacgggttcctttctggaagcctcttttgcctacacaccggcaggtaagccatctctgccccagtggggttcagaccccccgggacgggcccttctctcactcattcgccccctcattttccccagtgtccttcccgcactcagagggcctctctggagccagttccaggtaattctcttagcccatttcctcaggatgacctccaccgacaggccactcttcttccgccccgctgacgccccaggtggagggagcatggccacctcccaccccaacaccaccgccactgtcctgaaactcccgaatatcgccacctccctttcctttgctggcctcttcaggctctccgtccccaacgctcacctgctctccctcaggccacccatgggccttggccccgccccctactcatggctggcagattcgtggccccacccatctcgaagcccctcggcccaggaacccaggggaagctgctgccctagcaatcctgacccggacgacagatattacaacggtgaggagttctcattccctcacctggcttcagcgcacttctcccgacctactggggcaaaccgaagggcgcccgggagcccggtctctctgaggttggtcagtccctggggaggatgtgagctggggaagcctctcagacctacctccaccctggtttaggatgtaaggcttgtgtgggggaagaagttgatcccgtgggatttccctttgtcttccattctgttgtcctctatgtttctgtctctgcttccgggcctccctctttcttctctgcagaagcaggaatctccctgtatctagctcagacggccaggggcacggccgcccctggcgagggtcctgtctatagcaccattgacccagcgggggaggagctgcagaccttccatgggggcttcccccaacatccctcaggagatctgggtccctggagccagtacgctcctccagagtggagccagggggacagtggagggtgccccttgggccgagttcccctctcagtgtatcccagcccatgctgggcatccgtgaagcgaggcctgctggcttgggtgctggccctgcagcctcaccccacctcagccccagtcctgcccctagcacagccagcagtgccccaggcagaacctggcaggggaatggggagatgactcccccacttcaaggaccccgtgctcgattccggaagaaacccaaggctcttccctacaggagggagaacagtcctggggacttgcccccaccacccttgccaccgccagaggaagaggcgagctgggccctagagctgagggcagcaggcagcatgtcctccctggagcgggagcgcagtggggagaggaaagcggtccaggccgtgcccctggcagcccagcgggtgctccacccagatgaagaggcctggctcccatacagcagaccaagcttcctgtcccggggccagggcaccagcacatgttccacggccggcagcaactcttccaggggctccagcagctctaggggctcccggggccctggccggagccggagtcggagtcagagccggagccagagccaaaggccaggacagaaacgccgagaggaaccaagatgacccttgttggggcattgagaatatcatgagtgccacggggaaggggagtagggatgtcttttcccccccagcagtgatgagtggggctagctgaagcccattggtttccacgatttcaattggctgagaaggcagagagctagctcctccctttctttctttttccacctgagacttgtttataaaaaacaaaacaataaaaagagtctgatcaga

SEQ ID NO: 5913 - DNA, 2065 bp, Homo sapiens
ctcccggcctcggagcggacggatccgggagggagccaggcggcccatggggaggggcaggggcttagccgctggcgagtgaggaccgggtcgggagaaaggggtcgcacctggagttcagcctcttgggtaggggcgggatacgtggggcgactcgaggagctgccaggactagggagggctgcgggccaagacggggcgggatctggatgacgtttgcctctaagacgccacgaggaggccaggctttgcaaccatctccataaagaaggggcaagttcgaggacggaaagcccactcaaagggcggggggcggggcctggcaagagggggtgtggccaggatcccaggcagtaaattgtgcggcggggtctggatggaaaggcggggcccgctgaaagaaggcgatccgagttctgctacttcctagtaagggacgtctctggagagattctgaggtgtttgagcctcttttgcctacacaccggcagtgtccttcccgcactcagagggcctctctggagccagttccaggccacccatgggccttggccccgccccctactcatggctggcagattcgtggccccacccatctcgaagcccctcggcccaggaacccaggggaagctgctgccctagcaatcctgacccggacgacagatattacaacgaagcaggaatctccctgtatctagctcagacggccaggggcacggccgcccctggcgagggtcctgtctatagcaccattgacccagcgggggaggagctgcagaccttccatgggggcttcccccaacatccctcaggagatctgggtccctggagccagtacgctcctccagagtggagccagggggacagtggagccaagggaggcaaagtgaagcttctggggaaacctgtgcagatgccctctctgaactggccagaagccctgcccccacctcctccttcttgtgaactgagctgcctagaagggccggaggaggagctggagggcagctcagagccagaggagtggtgcccgccaatgcctgagagaagtcacctgacggagcccagctccagtggagggtgcctggtcaccccatcccgaagggaaaccccctctcccacaccttcctatggacagcagtccacagccactcttacaccctcacctcctgaccctccccagcccccaactgacatgccccatctccatcagatgcccaggagggtgccccttgggccgagttcccctctcagtgtatcccagcccatgctgggcatccgtgaagcgaggcctgctggcttgggtgctggccctgcagcctcaccccacctcagccccagtcctgcccctagcacagccagcagtgccccaggcagaacctggcaggggaatggggagatgactcccccacttcaaggaccccgtgctcgattccggaagaaacccaaggctcttccctacaggagggagaacagtcctggggacttgcccccaccacccttgccaccgccagaggaagaggcgagctgggccctagagctgagggcagcaggcagcatgtcctccctggagcgggagcgcagtggggagaggaaagcggtccaggccgtgcccctggcagcccagcgggtgctccacccagatgaagaggcctggctcccatacagcagaccaagcttcctgtcccggggccagggcaccagcacatgttccacggccggcagcaactcttccaggggctccagcagctctaggggctcccggggccctggccggagccggagtcggagtcagagccggagccagagccaaaggccaggacagaaacgccgagaggaaccaagatgacccttgttggggcattgagaatatcatgagtgccacggggaaggggagtagggatgtcttttcccccccagcagtgatgagtggggctagctgaagcccattggtttccacgatttcaattggctgagaaggcagagagctagctcctccctttctttctttttccacctgagacttgtttataaaaaacaaaacaataaaaagagtctgatcaga

SEQ ID NO: 5914 - DNA, 1904 bp, Homo sapiens
cagcgcaaagagctcagccactacacggcctcttttgcctacacaccggcagtgtccttcccgcactcagagggcctctctggagccagttccaggccacccatgggccttggccccgccccctactcatggctggcagattcgtggccccacccatctcgaagcccctcggcccaggaacccaggggaagctgctgccctagcaatcctgacccggacgacagatattacaacggtgaggagttctcattccctcacctggcttcagcgcacttctcccgacctactggggcaaaccgaagggcgcccgggagcccggtctctctgaggttggtcagtccctggggaggatgtgagctggggaagcctctcagacctacctccaccctggtttaggatgtaaggcttgtgtgggggaagaagttgatcccgtgggatttccctttgtcttccattctgttgtcctctatgtttctgtctctgcttccgggcctccctctttcttctctgcagaagcaggaatctccctgtatctagctcagacggccaggggcacggccgcccctggcgagggtcctgtctatagcaccattgacccagcgggggaggagctgcagaccttccatgggggcttcccccaacatccctcaggagatctgggtccctggagccagtacgctcctccagagtggagccagggggacagtggagccaagggaggcaaagtgaagcttctggggaaacctgtgcagatgccctctctgaactggccagaagccctgcccccacctcctccttcttgtgaactgagctgcctagaagggccggaggaggagctggagggcagctcagagccagaggagtggtgcccgccaatgcctgagagaagtcacctgacggagcccagctccagtggagggtgcctggtcaccccatcccgaagggaaaccccctctcccacaccttcctatggacagcagtccacagccactcttacaccctcacctcctgaccctccccagcccccaactgacatgccccatctccatcagatgcccaggagggtgccccttgggccgagttcccctctcagtgtatcccagcccatgctgggcatccgtgaagcgaggcctgctggcttgggtgctggccctgcagcctcaccccacctcagccccagtcctgcccctagcacagccagcagtgccccaggcagaacctggcaggggaatggggagatgactcccccacttcaaggaccccgtgctcgattccggaagaaacccaaggctcttccctacaggagggagaacagtcctggggacttgcccccaccacccttgccaccgccagaggaagaggcgagctgggccctagagctgagggcagcaggcagcatgtcctccctggagcgggagcgcagtggggagaggaaagcggtccaggccgtgcccctggcagcccagcgggtgctccacccagatgaagaggcctggctcccatacagcagaccaagcttcctgtcccggggccagggcaccagcacatgttccacggccggcagcaactcttccaggggctccagcagctctaggggctcccggggccctggccggagccggagtcggagtcagagccggagccagagccaaaggccaggacagaaacgccgagaggaaccaagatgacccttgttggggcattgagaatatcatgagtgccacggggaaggggagtagggatgtcttttcccccccagcagtgatgagtggggctagctgaagcccattggtttccacgatttcaattggctgagaaggcagagagctagctcctccctttctttctttttccacctgagacttgtttataaaaaacaaaacaataaaaagagtctgatcaga

SEQ ID NO: 5915 - DNA, 2379 bp, Homo sapiens
  misc_feature (26)..(26): n is a, c, g, or t
aagcagctggtcctgccccggagtanggatggccgctgaaagaaggcgatccgagttctgctacttcctagtaagggacgtctctggagagattctgaggtgtttgagtggtggaactgggaccggggcctaggcgtggacaagtataggggtatttctgacccttctcctcatttcacctcttctttctcccacgggttcctttctggaagcctcttttgcctacacaccggcaggtaagccatctctgccccagtggggttcagaccccccgggacgggcccttctctcactcattcgccccctcattttccccagtgtccttcccgcactcagagggcctctctggagccagttccaggtaattctcttagcccatttcctcaggatgacctccaccgacaggccactcttcttccgccccgctgacgccccaggtggagggagcatggccacctcccaccccaacaccaccgccactgtcctgaaactcccgaatatcgccacctccctttcctttgctggcctcttcaggctctccgtccccaacgctcacctgctctccctcaggccacccatgggccttggccccgccccctactcatggctggcagattcgtggccccacccatctcgaagcccctcggcccaggaacccaggggaagctgctgccctagcaatcctgacccggacgacagatattacaacggtgaggagttctcattccctcacctggcttcagcgcacttctcccgacctactggggcaaaccgaagggcgcccgggagcccggtctctctgaggttggtcagtccctggggaggatgtgagctggggaagcctctcagacctacctccaccctggtttaggatgtaaggcttgtgtgggggaagaagttgatcccgtgggatttccctttgtcttccattctgttgtcctctatgtttctgtctctgcttccgggcctccctctttcttctctgcagaagcaggaatctccctgtatctagctcagacggccaggggcacggccgcccctggcgagggtcctgtctatagcaccattgacccagcgggggaggagctgcagaccttccatgggggcttcccccaacatccctcaggagatctgggtccctggagccagtacgctcctccagagtggagccagggggacagtggagccaagggaggcaaagtgaagcttctggggaaacctgtgcagatgccctctctgaactggccagaagccctgcccccacctcctccttcttgtgaactgagctgcctagaagggccggaggaggagctggagggcagctcagagccagaggagtggtgcccgccaatgcctgagagaagtcacctgacggagcccagctccagtggagggtgcctggtcaccccatcccgaagggaaaccccctctcccacaccttcctatggacagcagtccacagccactcttacaccctcacctcctgaccctccccagcccccaactgacatgccccatctccatcagatgcccaggagggtgccccttgggccgagttcccctctcagtgtatcccagcccatgctgggcatccgtgaagcgaggcctgctggcttgggtgctggccctgcagcctcaccccacctcagccccagtcctgcccctagcacagccagcagtgccccaggcagaacctggcaggggaatggggagatgactcccccacttcaaggaccccgtgctcgattccggaagaaacccaaggctcttccctacaggagggagaacagtcctggggacttgcccccaccacccttgccaccgccagaggaagaggcgagctgggccctagagctgagggcagcaggcagcatgtcctccctggagcgggagcgcagtggggagaggaaagcggtccaggccgtgcccctggcagcccagcgggtgctccacccagatgaagaggcctggctcccatacagcagaccaagcttcctgtcccggggccagggcaccagcacatgttccacggccggcagcaactcttccaggggctccagcagctctaggggctcccggggccctggccggagccggagtcggagtcagagccggagccagagccaaaggccaggacagaaacgccgagaggaaccaagatgacccttgttggggcattgagaatatcatgagtgccacggggaaggggagtagggatgtcttttcccccccagcagtgatgagtggggctagctgaagcccattggtttccacgatttcaattggctgagaaggcagagagctagctcctccctttctttctttttccacctgagacttgtttataaaaaacaaaacaataaaaagagtctgatcaga

SEQ ID NO: 5916 - DNA, 2645 bp, Homo sapiens
  misc_feature (26)..(26): n is a, c, g, or t
aagcagctggtcctgccccggagtanggatggccgctgaaagaaggcgatccgagttctgctacttcctagtaagggacgtctctggagagattctgaggtgtttgaggtcagtggttttcaatcttggttggctacacataggaatcacttgaggggcttgagaaaaataccgacacctgagtcccacccccgagaaattctgatgaaatgggtccagggtgcagcctgagtggtggaactgggaccggggcctaggcgtggacaagtataggggtatttctgacccttctcctcatttcacctcttctttctcccacgggttcctttctggaagcctcttttgcctacacaccggcaggtaagccatctctgccccagtggggttcagaccccccgggacgggcccttctctcactcattcgccccctcattttccccagtgtccttcccgcactcagagggcctctctggagccagttccaggtaattctcttagcccatttcctcaggatgacctccaccgacaggccactcttcttccgccccgctgacgccccaggtggagggagcatggccacctcccaccccaacaccaccgccactgtcctgaaactcccgaatatcgccacctccctttcctttgctggcctcttcaggctctccgtccccaacgctcacctgctctccctcaggccacccatgggccttggccccgccccctactcatggctggcagattcgtggccccacccatctcgaagcccctcggcccaggaacccaggggaagctgctgccctagcaatcctgacccggacgacagatattacaacggtgaggagttctcattccctcacctggcttcagcgcacttctcccgacctactggggcaaaccgaagggcgcccgggagcccggtctctctgaggttggtcagtccctggggaggatgtgagctggggaagcctctcagacctacctccaccctggtttaggatgtaaggcttgtgtgggggaagaagttgatcccgtgggatttccctttgtcttccattctgttgtcctctatgtttctgtctctgcttccgggcctccctctttcttctctgcagaagcaggaatctccctgtatctagctcagacggccaggggcacggccgcccctggcgagggtcctgtctatagcaccattgacccagcgggggaggagctgcagaccttccatgggggcttcccccaacatccctcaggagatctgggtccctggagccagtacgctcctccagagtggagccagggggacagtggagccaagggaggcaaagtgaagcttctggggaaacctgtgcagatgccctctctgaactggccagaagccctgcccccacctcctccttcttgtgaactgagctgcctagaagggccggaggaggagctggagggcagctcagagccagaggagtggtgcccgccaatgcctgagagaagtcacctgacggagcccagctccagtggagggtgcctggtcaccccatcccgaagggaaaccccctctcccacaccttcctatggacagcagtccacagccactcttacaccctcacctcctgaccctccccagcccccaactgacatgccccatctccatcagatgcccaggagggtgccccttgggccgagttcccctctcagtgtatcccagcccatgctgggcatccgtgaagcgaggcctgctggcttgggtgctggccctgcagcctcaccccacctcagccccagtcctgcccctagcacagccagcagtgccccaggcagaacctggcaggggaatggggagatgactcccccacttcaaggaccccgtgctcgattccggaagaaacccaaggctcttccctacaggagggagaacagtcctggggacttgcccccaccacccttgccaccgccagaggaagaggcgagctgggccctagagctgagggcagcaggcagcatgtcctccctggagcgggagcgcagtggggagaggaaagcggtccaggccgtgcccctggcagcccagcgggtgctccacccagatgaagaggcctggctcccatacagcagaccaagcttcctgtcccggggccagggcaccagcacatgttccacggccggcagcaactcttccaggggctccagcagctctaggggctcccggggccctggccggagccggagtcggagtcagagccggagccagagccaaaggccaggacagaaacgccgagaggaaccaagatgacccttgttggggcattgagaatatcatgagtgccacggggaaggggagtagggatgtcttttcccccccagcagtgatgagtggggctagctgaagcccattggtttccacgatttcaattggctgagaaggcagagagctagctcctccctttctttctttttccacctgagacttgtttataaaaaacaaaacaataaaaagagtctgatcagagcccagggccctgtctgtctggttctgtgcagcaggttgggaagaaggggactgcagggtcctgtatatcaacgcacactggtagcttctgcttccccttccactccgtcaaaagcactaagttaggccaggcacaatggct

SEQ ID NO: 5917 - DNA, 2029 bp, Homo sapiens
  misc_feature (26)..(26): n is a, c, g, or t
aagcagctggtcctgccccggagtanggatggccgctgaaagaaggcgatccgagttctgctacttcctagtaagggacgtctctggagagattctgaggtgtttgaggtcagtggttttcaatcttggttggctacacataggaatcacttgaggggcttgagaaaaataccgacacctgagtcccacccccgagaaattctgatgaaatgggtccagggtgcagcctgagtggtggaactgggaccggggcctaggcgtggacaagtataggggtatttctgacccttctcctcatttcacctcttctttctcccacgggttcctttctggaagcctcttttgcctacacaccggcaggtaagccatctctgccccagtggggttcagaccccccgggacgggcccttctctcactcattcgccccctcattttccccagtgtccttcccgcactcagagggcctctctggagccagttccaggtaattctcttagcccatttcctcaggatgacctccaccgacaggccactcttcttccgccccgctgacgccccaggtggagggagcatggccacctcccaccccaacaccaccgccactgtcctgaaactcccgaatatcgccacctccctttcctttgctggcctcttcaggctctccgtccccaacgctcacctgctctccctcaggccacccatgggccttggccccgccccctactcatggctggcagattcgtggccccacccatctcgaagcccctcggcccaggaacccaggggaagctgctgccctagcaatcctgacccggacgacagatattacaacggtgaggagttctcattccctcacctggcttcagcgcacttctcccgacctactggggcaaaccgaagggcgcccgggagcccggtctctctgaggttggtcagtccctggggaggatgtgagctggggaagcctctcagacctacctccaccctggtttaggatgtaaggcttgtgtgggggaagaagttgatcccgtgggatttccctttgtcttccattctgttgtcctctatgtttctgtctctgcttccgggcctccctctttcttctctgcagaagcaggaatctccctgtatctagctcagacggccaggggcacggccgcccctggcgagggtcctgtctatagcaccattgacccagcgggggaggagctgcagaccttccatgggggcttcccccaacatccctcaggagatctgggtccctggagccagtacgctcctccagagtggagccagggggacagtggagccaagggaggcaaagtgaagcttctggggaaacctgtgcagatgccctctctgaactggccagaagccctgcccccacctcctccttcttgtgaactgagctgcctagaagggccggaggaggagctggagggcagctcagagccagaggagtggtgcccgccaatgcctgagagaagtcacctgacggagcccagctccagtggagggtgcctggtcaccccatcccgaagggaaaccccctctcccacaccttcctatggacagcagtccacagccactcttacaccctcacctcctgaccctccccagcccccaactgacatgccccatctccatcagatgcccaggaaccaagatgacccttgttggggcattgagaatatcatgagtgccacggggaaggggagtagggatgtcttttcccccccagcagtgatgagtggggctagctgaagcccattggtttccacgatttcaattggctgagaaggcagagagctagctcctccctttctttctttttccacctgagacttgtttataaaaaacaaaacaataaaaagagtctgatcagagcccagggccctgtctgtctggttctgtgcagcaggttgggaagaaggggactgcagggtcctgtatatcaacgcacactggtagcttctgcttccccttccactccgtcaaaagcactaagttaggccaggcacaatggct

SEQ ID NO: 5918 - DNA, 632 bp, Homo sapiens
ggagccggagtcagagccggagccagagccaaaggccaggacagaaacgccgagaggaaccaagatgacccttgttggggcattgagaatatcatgagtgccacggggaaggggagtagggatgtcttttccccctcggcccaggaacccaggggaagctgctgccctagcaatcctgacccggacgacagatattacaacggtgaggagttctcattccctcacctggcttcagcgcacttctcccgacctactggggcaaaccgaagggcgcccgggagcccggtctctctgagaagcaggaatctccctgtatctagctcagacggccaggggcacggccgcccctggcgagggtcctgtctatagcaccattggtttccacgatttcaattggctgagaaggcagagagctagctcctccctttctttctttttccacctgagacttgtttataaaaaacaaaacaataaaaagagtctgatcagagcccagggccctgtctgtctggttctgtgcagcaggttgggaagaaggggactgcagggtcctgtatatcaacgcacactggtagcttctgcttccccttccactccgtcaaaagcactaagttaggccaggcacaatggct

SEQ ID NO: 5919 - DNA, 2086 bp, Homo sapiens
  misc_feature (26)..(26): n is a, c, g, or t
aagcagctggtcctgccccggagtanggatggccgctgaaagaaggcgatccgagttctgctacttcctagtaagggacgtctctggagagattctgaggtgtttgaggtcagtggttttcaatcttggttggctacacataggaatcacttgaggggcttgagaaaaataccgacacctgagtcccacccccgagaaattctgatgaaatgggtccagggtgcagcctgagtggtggaactgggaccggggcctaggcgtggacaagtataggggtatttctgacccttctcctcatttcacctcttctttctcccacgggttcctttctggaagcctcttttgcctacacaccggcaggtaagccatctctgccccagtggggttcagaccccccgggacgggcccttctctcactcattcgccccctcattttccccagtgtccttcccgcactcagagggcctctctggagccagttccaggtaattctcttagcccatttcctcaggatgacctccaccgacaggccactcttcttccgccccgctgacgccccaggtggagggagcatggccacctcccaccccaacaccaccgccactgtcctgaaactcccgaatatcgccacctccctttcctttgctggcctcttcaggctctccgtccccaacgctcacctgctctccctcaggccacccatgggccttggccccgccccctactcatggctggcagattcgtggccccacccatctcgaagcccctcggcccaggaacccaggggaagctgctgccctagcaatcctgacccggacgacagatattacaacgaagcaggaatctccctgtatctagctcagacggccaggggcacggccgcccctggcgagggtcctgtctatagcaccattgacccagcgggggaggagctgcagaccttccatgggggcttcccccaacatccctcaggagatctgggtccctggagccagtacgctcctccagagtggagccagggggacagtgctcagagccagaggagtggtgcccgccaatgcctgagagaagtcacctgacggagcccagctccagtggagggtgcctggtcaccccatcccgaagggaaaccccctctcccacaccttcctatggacagcagtccacagccactcttacaccctcacctcctgaccctccccagcccccaactgacatgccccatctccatcagatgcccaggagggtgccccttgggccgagttcccctctcagtgtatcccagcccatgctgggcatccgtgaagcgaggcctgctggcttgggtgctggccctgcagcctcaccccacctcagccccagtcctgcccctagcacagccagcagtgccccaggcagaacctggcaggggaatggggagatgactcccccacttcaaggaccccgtgctcgattccggaagaaacccaaggctcttccctacaggagggagaacagtcctggggacttgcccccaccacccttgccaccgccagaggaagaggcgagctgggccctagagctgagggcagcaggcagcatgtcctccctggagcgggagcgcagtggggagaggaaagcggtccaggccgtgcccctggcagcccagcgggtgctccacccagatgaagaggcctggctcccatacagcagaccaagcttcctgtcccggggccagggcaccagcacatgttccacggccggcagcaactcttccaggggctccagcagctctaggggctcccggggccctggccggagccggagtcggagtcagagccggagccagagccaaaggccaggacagaaacgccgagaggaaccaagatgacccttgttggggcattgagaatatcatgagtgccacggggaaggggagtagggatgtcttttcccccccagcagtgatgagtggggctagctgaagcccattggtttccacgatttcaattggctgagaaggcagagagctagctcctccctttctttctttttccacctgagacttgtttataaaaaacaaaacaataaaaagagtctgatcaga

SEQ ID NO: 5920 - DNA, 2669 bp, Homo sapiens
  misc_feature (26)..(26): n is a, c, g, or t
aagcagctggtcctgccccggagtanggatggccgctgaaagaaggcgatccgagttctgctacttcctagtaagggacgtctctggagagattctgaggtgtttgaggtcagtggttttcaatcttggttggctacacataggaatcacttgaggggcttgagaaaaataccgacacctgagtcccacccccgagaaattctgatgaaatgggtccagggtgcagcctgagtggtggaactgggaccggggcctaggcgtggacaagtataggggtatttctgacccttctcctcatttcacctcttctttctcccacgggttcctttctggaagcctcttttgcctacacaccggcaggtaagccatctctgccccagtggggttcagaccccccgggacgggcccttctctcactcattcgccccctcattttccccagtgtccttcccgcactcagagggcctctctggagccagttccaggtaattctcttagcccatttcctcaggatgacctccaccgacaggccactcttcttccgccccgctgacgccccaggtggagggagcatggccacctcccaccccaacaccaccgccactgtcctgaaactcccgaatatcgccacctccctttcctttgctggcctcttcaggctctccgtccccaacgctcacctgctctccctcaggccacccatgggccttggccccgccccctactcatggctggcagattcgtggccccacccatctcgaagcccctcggcccaggaacccaggggaagctgctgccctagcaatcctgacccggacgacagatattacaacggtgaggagttctcattccctcacctggcttcagcgcacttctcccgacctactggggcaaaccgaagggcgcccgggagcccggtctctctgaggttggtcagtccctggggaggatgtgagctggggaagcctctcagacctacctccaccctggtttaggatgtaaggcttgtgtgggggaagaagttgatcccgtgggatttccctttgtcttccattctgttgtcctctatgtttctgtctctgcttccgggcctccctctttcttctctgcagaagcaggaatctccctgtatctagctcagacggccaggggcacggccgcccctggcgagggtcctgtctatagcaccattgacccagcgggggaggagctgcagaccttccatgggggcttcccccaacatccctcaggagatctgggtccctggagccagtacgctcctccagagtggagccagggggacagtggtatgactccaactcctgaaaccccgtttagccctgaccagggtatccccaaagaggatcctcctccctgaccctctggcacctagcccggcacttccttctgacctgtctcatctctggctctttcctgcctgttctccgggtgtccccatcctattctcctcaggagccaagggaggcaaagtgaagcttctggggaaacctgtgcagatgccctctctgaactggccagaagccctgcccccacctcctccttcttgtgaactgagctgcctagaagggccggaggaggagctggagggcagctcagagccagaggagtggtgcccgccaatgcctgagagaagtcacctgacggagcccagctccagtggagggtgcctggtcaccccatcccgaagggaaaccccctctcccacaccttcctatggacagcagtccacagccactcttacaccctcacctcctgaccctccccagcccccaactgacatgccccatctccatcagatgcccaggagggtgccccttgggccgagttcccctctcagtgtatcccagcccatgctgggcatccgtgaagcgaggcctgctggcttgggtgctggccctgcagcctcaccccacctcagccccagtcctgcccctagcacagccagcagtgccccaggcagaacctggcaggggaatggggagatgactcccccacttcaaggaccccgtgctcgattccggaagaaacccaaggctcttccctacaggagggagaacagtcctggggacttgcccccaccacccttgccaccgccagaggaagaggcgagctgggccctagagctgagggcagcaggcagcatgtcctccctggagcgggagcgcagtggggagaggaaagcggtccaggccgtgcccctggcagcccagcgggtgctccacccagatgaagaggcctggctcccatacagcagaccaagcttcctgtcccggggccagggcaccagcacatgttccacggccggcagcaactcttccaggggctccagcagctctaggggctcccggggccctggccggagccggagtcggagtcagagccggagccagagccaaaggccaggacagaaacgccgagaggaaccaagatgacccttgttggggcattgagaatatcatgagtgccacggggaaggggagtagggatgtcttttcccccccagcagtgatgagtggggctagctgaagcccattggtttccacgatttcaattggctgagaaggcagagagctagctcctccctttctttctttttccacctgagacttgtttataaaaaacaaaacaataaaaagagtctgatcaga

SEQ ID NO: 5921 - DNA, 2212 bp, Homo sapiens
  misc_feature (26)..(26): n is a, c, g, or t
aagcagctggtcctgccccggagtanggatggccgctgaaagaaggcgatccgagttctgctacttcctagtaagggacgtctctggagagattctgaggtgtttgaggtcagtggttttcaatcttggttggctacacataggaatcacttgaggggcttgagaaaaataccgacacctgagtcccacccccgagaaattctgatgaaatgggtccagggtgcagcctgagtggtggaactgggaccggggcctaggcgtggacaagtataggggtatttctgacccttctcctcatttcacctcttctttctcccacgggttcctttctggaagcctcttttgcctacacaccggcagtgtccttcccgcactcagagggcctctctggagccagttccaggccacccatgggccttggccccgccccctactcatggctggcagattcgtggccccacccatctcgaagcccctcggcccaggaacccaggggaagctgctgccctagcaatcctgacccggacgacagatattacaacggtgaggagttctcattccctcacctggcttcagcgcacttctcccgacctactggggcaaaccgaagggcgcccgggagcccggtctctctgaggttggtcagtccctggggaggatgtgagctggggaagcctctcagacctacctccaccctggtttaggatgtaaggcttgtgtgggggaagaagttgatcccgtgggatttccctttgtcttccattctgttgtcctctatgtttctgtctctgcttccgggcctccctctttcttctctgcagaagcaggaatctccctgtatctagctcagacggccaggggcacggccgcccctggcgagggtcctgtctatagcaccattgacccagcgggggaggagctgcagaccttccatgggggcttcccccaacatccctcaggagatctgggtccctggagccagtacgctcctccagagtggagccagggggacagtggagccaagggaggcaaagtgaagcttctggggaaacctgtgcagatgccctctctgaactggccagaagccctgcccccacctcctccttcttgtgaactgagctgcctagaagggccggaggaggagctggagggcagctcagagccagaggagtggtgcccgccaatgcctgagagaagtcacctgacggagcccagctccagtggagggtgcctggtcaccccatcccgaagggaaaccccctctcccacaccttcctatggacagcagtccacagccactcttacaccctcacctcctgaccctccccagcccccaactgacatgccccatctccatcagatgcccaggagggtgccccttgggccgagttcccctctcagtgtatcccagcccatgctgggcatccgtgaagcgaggcctgctggcttgggtgctggccctgcagcctcaccccacctcagccccagtcctgcccctagcacagccagcagtgccccaggcagaacctggcaggggaatggggagatgactcccccacttcaaggaccccgtgctcgattccggaagaaacccaaggctcttccctacaggagggagaacagtcctggggacttgcccccaccacccttgccaccgccagaggaagaggcgagctgggccctagagctgagggcagcaggcagcatgtcctccctggagcgggagcgcagtggggagaggaaagcggtccaggccgtgcccctggcagcccagcgggtgctccacccagatgaagaggcctggctcccatacagcagaccaagcttcctgtcccggggccagggcaccagcacatgttccacggccggcagcaactcttccaggggctccagcagctctaggggctcccggggccctggccggagccggagtcggagtcagagccggagccagagccaaaggccaggacagaaacgccgagaggaaccaagatgacccttgttggggcattgagaatatcatgagtgccacggggaaggggagtagggatgtcttttcccccccagcagtgatgagtggggctagctgaagcccattggtttccacgatttcaattggctgagaaggcagagagctagctcctccctttctttctttttccacctgagacttgtttataaaaaacaaaacaataaaaagagtctgatcaga

SEQ ID NO: 5922 - DNA, 1885 bp, Homo sapiens
ggcaagccccccactggggtagctgtgcctgccgggtcgggaatgaccctttcccagttccaggtttcgggcccctcctcccctcacttctctgacccccacagcgtccccgccggacctggagcccgggctggaggtgggcgcggggctggcggtgcggctggcgagggtgctgcgagcccgccttcctcgcgggcagcggcgcagcctgcggggcgctgcttctcgggctctgcgccgcctctactggcgccggaaacagcgcaaagagctcagccactacacggcctcttttgcctacacaccggcagtgtccttcccgcactcagagggcctctctggagccagttccaggccacccatgggccttggccccgccccctactcatggctggcagattcgtggccccacccatctcgaagcccctcggcccaggaacccaggggaagctgctgccctagcaatcctgacccggacgacagatattacaacgaagcaggaatctccctgtatctagctcagacggccaggggcacggccgcccctggcgagggtcctgtctatagcaccattgacccagcgggggaggagctgcagaccttccatgggggcttcccccaacatccctcaggagatctgggtccctggagccagtacgctcctccagagtggagccagggggacagtggagccaagggaggcaaagtgaagcttctggggaaacctgtgcagatgccctctctgaactggccagaagccctgcccccacctcctccttcttgtgaactgagctgcctagaagggccggaggaggagctggagggcagctcagagccagaggagtggtgcccgccaatgcctgagagaagtcacctgacggagcccagctccagtggagggtgcctggtcaccccatcccgaagggaaaccccctctcccacaccttcctatggacagcagtccacagccactcttacaccctcacctcctgaccctccccagcccccaactgacatgccccatctccatcagatgcccaggagggtgccccttgggccgagttcccctctcagtgtatcccagcccatgctgggcatccgtgaagcgaggcctgctggcttgggtgctggccctgcagcctcaccccacctcagccccagtcctgcccctagcacagccagcagtgccccaggcagaacctggcaggggaatggggagatgactcccccacttcaaggaccccgtgctcgattccggaagaaacccaaggctcttccctacaggagggagaacagtcctggggacttgcccccaccacccttgccaccgccagaggaagaggcgagctgggccctagagctgagggcagcaggcagcatgtcctccctggagcgggagcgcagtggggagaggaaagcggtccaggccgtgcccctggcagcccagcgggtgctccacccagatgaagaggcctggctcccatacagcagaccaagcttcctgtcccggggccagggcaccagcacatgttccacggccggcagcaactcttccaggggctccagcagctctaggggctcccggggccctggccggagccggagtcggagtcagagccggagccagagccaaaggccaggacagaaacgccgagaggaaccaagatgacccttgttggggcattgagaatatcatgagtgccacggggaaggggagtagggatgtcttttcccccccagcagtgatgagtggggctagctgaagcccattggtttccacgatttcaattggctgagaaggcagagagctagctcctccctttctttctttttccacctgagacttgtttataaaaaacaaaacaataaaaagagtctgatcaga

SEQ ID NO: 5923 - DNA, 1581 bp, Homo sapiens
  misc_feature (26)..(26): n is a, c, g, or t
aagcagctggtcctgccccggagtanggatggccgctgaaagaaggcgatccgagttctgctacttcctagtaagggacgtctctggagagattctgaggtgtttgagtgtccttcccgcactcagagggcctctctggagccagttccaggccacccatgggccttggccccgccccctactcatggctggcagattcgtggccccacccatctcgaagcccctcggcccaggaacccaggggaagctgctgccctagcaatcctgacccggacgacagatattacaacggtgaggagttctcattccctcacctggcttcagcgcacttctcccgacctactggggcaaaccgaagggcgcccgggagcccggtctctctgaggagccaagggaggcaaagtgaagcttctggggaaacctgtgcagatgccctctctgaactggccagaagccctgcccccacctcctccttcttgtgaactgagctgcctagaagggccggaggaggagctggagggcagctcagagccagaggagtggtgcccgccaatgcctgagagaagtcacctgacggagcccagctccagtggagggtgcctggtcaccccatcccgaagggaaaccccctctcccacaccttcctatggacagcagtccacagccactcttacaccctcacctcctgaccctccccagcccccaactgacatgccccatctccatcagatgcccaggagggtgccccttgggccgagttcccctctcagtgtatcccagcccatgctgggcatccgtgaagcgaggcctgctggcttgggtgctggccctgcagcctcaccccacctcagccccagtcctgcccctagcacagccagcagtgccccaggcagaacctggcaggggaatggggagatgactcccccacttcaaggaccccgtgctcgattccggaagaaacccaaggctcttccctacaggagggagaacagtcctggggacttgcccccaccacccttgccaccgccagaggaagaggcgagctgggccctagagctgagggcagcaggcagcatgtcctccctggagcgggagcgcagtggggagaggaaagcggtccaggccgtgcccctggcagcccagcgggtgctccacccagatgaagaggcctggctcccatacagcagaccaagcttcctgtcccggggccagggcaccagcacatgttccacggccggcagcaactcttccaggggctccagcagctctaggggctcccggggccctggccggagccggagtcggagtcagagccggagccagagccaaaggccaggacagaaacgccgagaggaaccaagatgacccttgttggggcattgagaatatcatgagtgccacggggaaggggagtagggatgtcttttcccccccagcagtgatgagtggggctagctgaagcccattggtttccacgatttcaattggctgagaaggcagagagctagctcctccctttctttctttttccacctgagacttgtttataaaaaacaaaacaataaaaagagtctgatcaga

SEQ ID NO: 5924 - DNA, 1519 bp, Homo sapiens
  misc_feature (26)..(26): n is a, c, g, or t
aagcagctggtcctgccccggagtanggatggccgctgaaagaaggcgatccgagttctgctacttcctagtaagggacgtctctggagagattctgaggtgtttgaggtcagtggttttcaatcttggttggctacacataggaatcacttgaggggcttgagaaaaataccgacacctgagtcccacccccgagaaattctgatgaaatgggtccagggtgcagcctgagtggtggaactgggaccggggcctaggcgtggacaagtataggggtatttctgacccttctcctcatttcacctcttctttctcccacgggttcctttctggaagcctcttttgcctacacaccggcaggtaagccatctctgccccagtggggttcagaccccccgggacgggcccttctctcactcattcgccccctcattttccccagtgtccttcccgcactcagagggcctctctggagccagttccaggtaattctcttagcccatttcctcaggatgacctccaccgacaggccactcttcttccgccccgctgacgccccaggtggagggagcatggccacctcccaccccaacaccaccgccactgtcctgaaactcccgaatatcgccacctccctttcctttgctggcctcttcaggctctccgtccccaacgctcacctgctctccctcaggccacccatgggccttggccccgccccctactcatggctggcagattcgtggccccacccatctcgaagcccctcggcccaggaacccaggggaagctgctgccctagcaatcctgacccggacgacagatattacaacggtgaggagttctcattccctcacctggcttcagcgcacttctcccgacctactggggcaaaccgaagggcgcccgggagcccggtctctctgaggttggtcagtccctggggaggatgtgagctggggaagcctctcagacctacctccaccctggtttaggatgtaaggcttgtgtgggggaagaagttgatcccgtgggatttccctttgtcttccattctgttgtcctctatgtttctgtctctgcttccgggcctccctctttcttctctgcagaagcaggaatctccctgtatctagctcagacggccaggggcacggccgcccctggcgagggtcctgtctatagcaccattgacccagcgggggaggagctgcagaccttccatgggggcttcccccaacatcctcagagccggagccagagccaaaggccaggacagaaacgccgagaggaaccaagatgacccttgttggggcattgagaatatcatgagtgccacggggaaggggagtagggatgtcttttcccccccagcagtgatgagtggggctagctgaagcccattggtttccacgatttcaattggctgagaaggcagagagctagctcctccctttctttctttttccacctgagacttgtttataaaaaacaaaacaataaaaagagtctgatcaga

SEQ ID NO: 5925 - DNA, 428 bp, Homo sapiens
ggttgactaaaaaaaaaaaaaaagtaaaggaaagccatcttagcaattgagactattaaaaccacaataaaataccactagacacccaccaaaatagctaaaactaaaaagactgttactagcagttctggacatgatgtagaacaatcacaacttatatacactgctggtgggagtataaactgtacaactactttaaaattaaacacatatattttggtaaattgcaaaaatgactccaattcttcacctctcactataaacataacctttgaagtgtgactttgcagcatgttccatcaacaattagaatctacttccctattccttaaatctggcctattctttcaaattcctttggccaacagaatatgatgaaaataacggtgtgcctgttctgtaccagatctccaaagacctatcctaca

SEQ ID NO: 5926 - DNA, 347 bp, Homo sapiens
taacaggttagccaagctaccgatctattgcctgaaaataaatgagaataattttggagctaaaaaaatttagtatctaaatttttgtaaaggatctagctggaattctaaatataaaatgtgttaacagtcaacaaagaataacacaacaaatatcaaattttctctggtaggaaagtagataacttgaaaatcatcatcacatctctgtggaatttaggtaagttatggtacagaatctttgagtccaataagctgagctattttaaacctaattgtgcacaactatgtaaatgtttgaaaacctgctcccagtcaacagcaagaaacactgtccagaaaaattg

SEQ ID NO: 5927 - DNA, 1025 bp, Homo sapiens
  misc_feature (67)..(67): n is a, c, g, or t
  misc_feature (70)..(70): n is a, c, g, or t
  misc_feature (74)..(74): n is a, c, g, or t
  misc_feature (78)..(78): n is a, c, g, or t
  misc_feature (81)..(81): n is a, c, g, or t
  misc_feature (84)..(84): n is a, c, g, or t
  misc_feature (89)..(89): n is a, c, g, or t
  misc_feature (93)..(94): n is a, c, g, or t
  misc_feature (102)..(103): n is a, c, g, or t
  misc_feature (110)..(110): n is a, c, g, or t
  misc_feature (115)..(115): n is a, c, g, or t
  misc_feature (124)..(124): n is a, c, g, or t
  misc_feature (135)..(137): n is a, c, g, or t
  misc_feature (141)..(141): n is a, c, g, or t
gctcgctgccgccgaggctccaattttcgtctgtctgctttgtgtcctctgcacgtagaagcccagnctntgtngccntgnganctgcnggtnntgggaganncacagcnaagangccagggcnccctggaagcnnngaantgggagcgttgacatttagagatgtggccatagaattctctctggaggagtggcaatgtctggacaccgaacaacagaatttatatagaaatgtaatgttagataactacagaaacctggtcttcctgggtattgctgtctcaaagccagacctgatcacctgtctggagcaagaaaaagagccttggaatttgaagacacatgatatggtagccaaacccccaggaactgctttcagcatcttttatatgtttgtgaagttttataagtatatgcagtgccaatatactttttcagaatttggctattttggaacatcattttttcatttttcaggacagatttgctgatggtgttactctcacttgaaagctattttttttcccaggactttgactgcatcacacagtttctttccggcctacaaaatttttgttgacaattcactggttatatcgtaagactatgtttgtatatgacacatcacttttatcttgtagctcccaagatgctctgtgacttttgaaattgtgcttatatatgtatttgttataaatattttgtatgtattctagtttgtttgttaagcttcttcatgtttacattatttttcttactgagggatttttcaggtattatttcttcttgtattttttacccccataatttctattttttaattttttcaatatttttgttcttatcttcatttctgattttctgtagtctgtgttcctgtttcactcattgaatattcaattttttatcaatttttaaaattaatgtgtacatcttttctatggtttccttctgaaaattttataatatttttgatggaattatattgccctgttttgtatatattgtaatctttaattgagatt

SEQ ID NO: 5928 - DNA, 1060 bp, Homo sapiens
  misc_feature (102)..(102): n is a, c, g, or t
  misc_feature (105)..(105): n is a, c, g, or t
  misc_feature (109)..(109): n is a, c, g, or t
  misc_feature (113)..(113): n is a, c, g, or t
  misc_feature (116)..(116): n is a, c, g, or t
  misc_feature (119)..(119): n is a, c, g, or t
  misc_feature (124)..(124): n is a, c, g, or t
  misc_feature (128)..(129): n is a, c, g, or t
  misc_feature (137)..(138): n is a, c, g, or t
  misc_feature (145)..(145): n is a, c, g, or t
  misc_feature (150)..(150): n is a, c, g, or t
  misc_feature (159)..(159): n is a, c, g, or t
  misc_feature (170)..(172): n is a, c, g, or t
  misc_feature (176)..(176): n is a, c, g, or t
ggtcgacgtctctcgctcccgccagagcttgggattggtcttcactgttccgcgtcctctacctgggaaccaccgacccccgcccggcgactttgtcacagnctntgtngccntgnganctgcnggtnntgggaganncacagcnaagangccagggcnccctggaagcnnngaantgggagcgttgacatttagagatgtggccatagaattctctctggaggagtggcaatgtctggacaccgaacaacagaatttatatagaaatgtaatgttagataactacagaaacctggtcttcctgggtattgctgtctcaaagccagacctgatcacctgtctggagcaagaaaaagagccttggaatttgaagacacatgatatggtagccaaacccccaggaactgctttcagcatcttttatatgtttgtgaagttttataagtatatgcagtgccaatatactttttcagaatttggctattttggaacatcattttttcatttttcaggacagatttgctgatggtgttactctcacttgaaagctattttttttcccaggactttgactgcatcacacagtttctttccggcctacaaaatttttgttgacaattcactggttatatcgtaagactatgtttgtatatgacacatcacttttatcttgtagctcccaagatgctctgtgacttttgaaattgtgcttatatatgtatttgttataaatattttgtatgtattctagtttgtttgttaagcttcttcatgtttacattatttttcttactgagggatttttcaggtattatttcttcttgtattttttacccccataatttctattttttaattttttcaatatttttgttcttatcttcatttctgattttctgtagtctgtgttcctgtttcactcattgaatattcaattttttatcaatttttaaaattaatgtgtacatcttttctatggtttccttctgaaaattttataatatttttgatggaattatattgccctgttttgtatatattgtaatctttaattgagatt

SEQ ID NO: 5929 - DNA, 775 bp, Homo sapiens
ggcctcgccctgcttcgactcgcgcatggtgcgcgcacgcactgacctgcgcccactgtctggcactccctagtgagatgaacccggtacctcagatggaaatgcagaaatcaccagtcttctgcgtcgctcacgctgggagctgtagaccggagctgttcctattcggccatcttgtctcctcccgtgaactggaaattccctgtctccccttaaccagcactggaagcagatgggaagagaatagctgtgactgactcacactctaacccagcaaccctcagcatacaagtgggagaccataaagtttttcaagaccccaaaagaggccaaaggtctgataattgctgggagaaggtccactatccaagaagagaagaggaaaaggaattaaagtctccaagcactggggatgcaagaagagagttgcacaggagagaaagaagaagttgtccacggggtgaccctgcaattggagggaaatgcatgtggatatgtgcagggagtctaggaagtgaagccttagtgagtgatcatttacaagaatgagggttaggtaaaataagggatgcaaagccacctgtagtctattctaacctcactccatcactctatacaatctgtgttttatcatctgaaatgttaagtaaagacctgtttgggtcttcttcagaatcccatacatttgagttcattagtcagaaaaagggaaaataccaccaccccatcctggaatggcagtcatgtacacttttataatgagagattgggcagc

SEQ ID NO: 5930 - DNA, 878 bp, Homo sapiens
ggcctcgccctgcttcgactcgcgcatggtgcgcgcacgcactgacctgcgcccactgtctggcactccctagtgagatgaacccggtacctcagatggaaatgcagaaatcaccagtcttctgcgtcgctcacgctgggagctgtagaccggagctgttcctattcggccatcttgtctcctcccgtgaactggaaattccctgtctccccttaaccagcactggaagcagatgggaagagaatagctgtgactgactcacactctaacccagcaaccctcagcatacaagtgggagaccataaagtttttcaagaccccaaaagaggccaaaggtctgataattgctgggagaaggtccactatccaagaagagaagaggaaaaggaattaaagtctccaagcactggggatgcaagaagagagttgcacaggagagaaagaagaagttgtccacggggtgaccctgcaattggagggaaatgcatgtggatatgtgcagggagtctaggaagtgaagccttagtgatcattccctatttattcaaaatctgtgctacctccactgcgaagacttccacgagaaaattcagatatttcttcttttgtggacactttctaccttacaaataagttaattttaattcaaggaagagtttttccggaaccctgttggcctgctcacaggaatgtaagttccttaaatctagggcacagtgtctttgagaactgcaatcacctacatcaacatgacatagctattaggactaagaacagagaccacctgtgtcaacatgagttactatttttttccgtgaaacatttgtccaagaaagataagactgtaaccaataaatagtttgcaagtaaaaaaaaaa

SEQ ID NO: 5931 - DNA, 107 bp, Homo sapiens
gcatataaaatccagtttatatatctggattatattgcaagaaccattcaagaaatgtgccatccatgttccaagtataaaaatagaaattttaagacagcgtaaca

SEQ ID NO: 5932 - DNA, 387 bp, Homo sapiens
ctgaatttatttttcaagtaaaatggtaatagacatatgtggtatgactacctagttatgaaggttaaaagcagaggtacattgtttagtacctattgcacgtatacgtggtaaaaatgtttgtggtttccaaaaaattcaggagtgtggtaaccttgggtgagagtgaaggaacacaggagtttctgggaacgggcactgttctcgatgactttggcagtggttacctggtgtctgccttgtagttatttgtgatagttaatgtcttacagacttttctgttatgtttcacagtttaactattttttaaaaatgagtgatgtctttggccaaaaacttcaaattgagttacttttatcttctattttaaaaagctggagtcacatt

SEQ ID NO: 5933 - DNA, 520 bp, Homo sapiens
ttgtgtgacttctgcctctcttgaatccactgatcccctcaattgcacgatcaggcctactctagtcttgagcaactcagaccaaagctggacgtgttgggagacaatatgtgtatgtggtttttacaagcctgctgggaggagtgagacagacctgggccaagacccaggtgtgtgctgtgctagccgtgtgaccttaggtaaattcattaatccctcagttcagctaccatgggctggatccaattaaaagaggacaaatcactgaaattcagccccatcagccacttgttgagctttcctgacgttacctcccatacctgtctggcttcttccttcccttttccctgtctccctgctcccactattcttgtactgccctctggctgccccatccaggcactgaggctggggttgctaccttattcccaccttgccctggtgctctcagagacttcacttttcaccaacccatcattccttgccctcccttccctttactcactttctcctttctgcc

SEQ ID NO: 5934 - DNA, 303 bp, Homo sapiens
ttgtgtgacttctgcctctcttgaatccactgatcccctcaattgcacgatcaggcctactctagtcttgagcaactcagaccaaagctggacgtgttgggagacaatatgtgtatgtggtttttacaagcctgctgggaggagtgagacagacctgggccaagacccaggtgtgtgctctcagagctagtacggggctctccggcccgtcaggggactatcgggctagtcggggacttcgggctagtcggggctgtcgggctagtcggggctgtcgggctatcgggatgtcgggctagtcgg

SEQ ID NO: 5935 - DNA, 447 bp, Homo sapiens
aagacaataacaacatttcttagtacgtgaagctggactcagaagtaaattttgttatagtgtttttcaaatgcaggcttgctttcttcaagttaagaaggcatagtgtgaatttaaaataaatgttatagaaattgaacgagaaaaaatactcttcagattatataattttctatttattatatttatggcagaagatagcacatccaattgaagaagtcatattaaatcaatagtggtgatcataataattgaaattcattctttgccatcttctggaagagattaagcctttatatatcttgaaaaaataataatttcaatacacatttttaatgccactcatattcagataatcactaattgtaaaagcctatgtcttgctacttttgcttgaaaattggaatacatcctcatagtgcttaataaatatttgttgagcagaca

SEQ ID NO: 5936 - DNA, 332 bp, Homo sapiens
aaaaatgatctctgaggatttttttgtttgttttttaagagacagggtctttctctgtcacctaggctggagggcagtggtacaatcatatctcactgtagcctcaaactcttgggttcagtcatcccacttcagcctcctgaatagctggtactactggtgcataccacctcgctaatttattttatttttttgtagagatggggtcttgctctgttgctcaggctgctatcaaactcctggtctcatgcgattctctctccttggcctcccaaagtgctggggtaatgagcatggccactgaggatttctaagatttaggactgtgtagc

SEQ ID NO: 5937 - DNA, 424 bp, Homo sapiens
ttacatggcctcaaaaacccaaataagaaatgggcttttcctctaggtcacggataatttttagcagaaatgcagagaaagcaggccacagaagtagacataaagtataggaagtgcagtattatgagagctcagagaggagtggtttgtttgcagcaacaagggtgggagttgagaccaagccaggcagtttcaccagagaaacacttcccttaggtcagaggctcttggggagctaagggttcctcacagctcaccttgccctgctgcctgacccactgggagactggggcctataggtgaccacacttgctggcaccatacacagccaggtagaaactgatcctgactgccagaaggactcctgattccttccccagtctccttagaactgtggccctcatcagcgaacagtgaggaacta

SEQ ID NO: 5938 - DNA, 442 bp, Homo sapiens
gctcaaggtcagagtcttaacgagccaagcatggggactgcgtggaaagctccattcaggcaacttgactcccaagaccatgcttctggcacagcagacctgcagagccacaccaaacctgctagttaatagcagtgcatctttctggaggacaagagtttcatgtttgtccttcattccatactgaagtggaagaaatactttctgattcctggattccagatccttcagctctcatgagtaactgagcacggtgtctaggcagggtcttcagggagtgttctttttcatccaggtactagtgtcacgttagtgtccagtgataacctgttgattgcaactctgtagcttcctttccctcaaatacttctcactttctttctgatctactcagaagataatcaacataaactattagaaactgagttcttaattacttaac

SEQ ID NO: 5939 - DNA, 377 bp, Homo sapiens
taacatttatgacagatgttgatgaacaataactcgttggagctattttgtcatacttgagattttccagaaaatagaacaagcccacagaatgggtttaatctgccaaagcatctccctctttacaagcatctacacaggcctccagccctaagtactttcacctggacaatgttatgaagcttaatccagtactagtagcagaaagacttgtttactttggagctaaggagtgagtaggacacttaagactttgttttgtccttggactcaaggcaaactaatggttagcatcactccagttgttgctatcattttattactcatatgtagctatgagtaacttgagaaactgaaatgtaactgctgcatataat

SEQ ID NO: 5940 - DNA, 730 bp, Homo sapiens
ccggctctctgggggagagggaggacgggtatgccagccactaggtggtactgtggtaccttgctaattaacctttcccatggctcatgggtagtggagggcggaggttcttttccagcctctgtggatcaacttgtgatcctggggtggtgtgcctaagcccgtttccatagagtcccattttgaacacttttctgccagaggattatgttgccaaccatatgtaaagcccagttcctttcacatgccttttccagttgatctggtactcgttctgtcaggaagctgggccacgcttcatcagaaataaggaaatcagctcaaggtcacatgactcttgaggggtaaagctaaggacttgaccctcagaatccagaactctgtccttcagcgtattgtgtttcagtgaagggaaaattggccccacagacaaatataacccagagccagtaatggaggtcccaagaacacaggaaggccatgtgaagggtgctttcccttgagagtgtttactatgtgacaggcaagcagttttcacatattgtttcatttaatcctcacatgagccccatgaagtcttatccccattttcagataaggtgcctgaagctcacagagcttccctagctagttactgacagagccaggtgtgatattggactcttgacctggagcttgttactttgctgtattgctttaaccttaaccaaaagagacatgcctttctgtc

SEQ ID NO: 5941 - DNA, 438 bp, Homo sapiens
cgggcacagtaaacggcttttaataaagcagccgcgtttatgacctaaagatcctataaaagctgggacttgcaagagctgcgaagcagaaacattcatacatagtctattagacactcatttttgtaagtaggaggaggacaagtagtcttcgtgtgtccctcaaatttaatcagatcaaaggttgaatcatgctgtgtcgtgacaacagggtatttatgaggtgtgttacaagtacactggccaaacactaccaatgtcttctgcgacacacacacacacacactccttcctagggaatttacaatttcagcctcaaattcaccaaaccgtaaagaggatattaagccctccctttgaataagaatagcgatgttagtatgtccgagtctatcccggcaggaaacttttggcacgaatttcaacagtgaaaaggag

SEQ ID NO: 5942 - DNA, 595 bp, Homo sapiens
caaagcagaatcgacaaaaagaaaatcttcacatctttaagagacaaccatgttcagtacaatgacaaagaatcaaatggcactttacatgtatttgcaggatactgtgtcactcaaagtaatgggagggagagagaacagggagggtagggatgcttttgaaaaagctttttttcccacttttaacttgctttagcgttaagagtacttaccagctaataatgtggaggaaattattctttctcattggagattacagaatatatctattcatcttgaatacccacttgaagcctctgtagaaatgtctcgtcctccggttgtatttctaaaacctacatgattttgtcttgtttctgcagtgagaaattacatccatagcaaagacaaaagtctttttaaattatttttatttatctttcatatagttcttacaatttctaaaaaattaacactcatttagtatcacaatttatgggagagggttttttgtatttttaagcatatgtggcttatataaaaattgcagaagtcataggactgtcatgtattgcagctctgagaaccaatgcctgaaacttaagccaaaaaaaaa

SEQ ID NO: 5943 - DNA, 252 bp, Homo sapiens
tcttgtcaaaggaaaacattcatcttgttaaaggaaaacattcattttgctaaaggaatccccacttgtagccctggttattatttttgtctcagtactattcttgtttatagtttgtaaagagaaagactgaagaagtgtgaaatacggaagtgcatgtatgaattaacagggcagaattgggactggtatgcgtaagttaagagaaagtgcatataaatttatgtgaacataaagaggacttcttgtttt

SEQ ID NO: 5944 - DNA, 336 bp, Homo sapiens
aattttgaaggccctaatttgctttccattgcccatgttctaatctgaattcatccaagagtgaaactgatgcgaaatctcatcttctatttctcttaatgttaagcactttgtttcttaaattgatgctgtagacaatttatgtagccaaacagaaatgtcacaacaattttgggaaacatctcaagttatttgtttcaaagaaagaaaataaattattttaccaagagataagtgaaaacattgtttttcaatccctttaaacatttatgatcgaattctggatagccaaggtgatggcagctgcttaagtctgaatctcccagcacatactcc

SEQ ID NO: 5945 - DNA, 385 bp, Homo sapiens
aaatgatgtagtctctaatttatgctttttgagtgatacgaagaactattcccaaatttatgaaattattgtgataagcaaaaacatgtaaatattctaaatgattccttactctatgttaaaataaaatagcgcagatctatctctattgtgttctatctggtaactcacaggagaaactcaccttgatacatacacatatgcatttttttcagtctcccaatttttggcattttctgcattagagataattgaagatgaaaaggagaaatgctttaagttcttgatgagaaagctatttgtactgatttttaaacagtgaaatgcgatgtaaacatgtttaaaagataagtgagaaactgagactaatataaagctttaatat

SEQ ID NO: 5946 - DNA, 492 bp, Homo sapiens
tacttcttctataatatggcaatattttatgtaaaaatagttatattttttatttgttccatcaaccaataatcttcagtttatttttaatgttgttacttaatatatttgtcattatgtatttgaatataaaagcaaatttttcttttgttatacttttagttagcttaaaatttattacttcccttacccattcatctaccaaactttttgcctttataaaagaggctgttctgctgtttacaacaacgctataaaattttgggatcgtgttctctttttgcctctgcaatttagctgtttactcaaggaagtagcatacatgatggactaaggatgatcagatacttgatttaattgctcccattcctgttgatttatgtagaaatgttaggccatgtaaaatgtcagtatttttaatgtattttgatcttagatatgaaagattttatatgcttctctagaattaaattttatatctttgaaaaaaaa

SEQ ID NO: 5947 - DNA, 257 bp, Homo sapiens
aaagtgaggcaagagatagcatattgcaaatacatggaagaaaccagattttgagtctacaagatctggctctggaatctgtgttcttaccttttacatagcttcgcagcaaagctaaacattctaaattgcaatagaacaatttgaaattacttccttcttaaataattgtattaaaaatgaaaaattaggtgcaaatggctgaaaagcaatgctctttgaaattcctttaatttcccattaagaatgaaaagtat

SEQ ID NO: 5948 - DNA, 354 bp, Homo sapiens
caaagtgctgggattacaggcatgagccaccacacccagccctgactaagtttttaaataattttttgtagagatgggttcttgccatattgcccaggctggtctcaaattcttggactcatgtgatcctcccacctcagcctctcaaagtgctgggattataggcatgagccctcatgcccggccattactatcattatttattttgtggctgaaattattccagacttacttttaaagagaaggtttccttgcatttacatccaattaagagaaaggactgcagtttctgtgttgttgttgttgttgttgttgttgttgttgttgttttggagaataccgtgtgatgagata

SEQ ID NO: 5949 - DNA, 379 bp, Homo sapiens
caattttttctaatacagaatataaaatatgtagagaaagatatcaaggctatctttagagaaagtctataaaggtgaacattattaataaaaaatagaaaatgaggggttgaaagcaggagttagaatccatattgtagggaaaggtgtgactgaaggggctgaagactactgagaataccactgctgcctccttgacagaaggtccaccatgacttgaggaatgattgaaattggagcagtttccatgaatgtcatgctggacaagggaaaagttgggacagtgaggttctgagttcatgtggtttttctagagtagacttccagactgtacgtaattcaccttggctgagagatgtcaagaacagggaattatgtc

SEQ ID NO: 5950 - DNA, 304 bp, Homo sapiens
aaatacaaaattagcctggcatgatggcgcatgcctataatcccagctacttgggaggctgaggcaggagaatcacttgaacccagaggcagaagttgcagtgagctaagatcgcaccattgcactccagcctgggcaacaagagtgaaactccatctcaaaaaaattaataataaaaagtacgttatagctagtttcttttttcttttttattctttttttttttttttttgcatcaggtataatcattacacgaacaacccctcagagtcagagtcccacctggccttgtaatctcagctct

SEQ ID NO: 5951 - DNA, 558 bp, Homo sapiens
tccatcactgattcctgtagtctgtagatgtctttttgagcaattcttctgggtcaagacttgttcttatttgctgggataaaacagcagtgagcaaaacagagctgacagcatggtgggaaggttgagctcttccagaccgtgatgagaagtattggtgagtggtggggagagtggccagaaggcagagtgtgggcgcagcatgagaggaggctttgtccagacttaaggacctggaaggccttgaaggccaggaccagggctccaattgtcctgctggcaataggaagccatatgggtgggggtgaggcagaatcagatttaggtgtggaaaagatgactccagccagtgtgggcatcgaagaggaggcacagaagcaggcgtggccacctgtgcctctgtgtaggagctgtgtgagcatgtgcttgaggatgtgtgtctgtgtagaggactggggtgtaggcgtgataggaacatggacgtgtatctatggaaagactccaattgtgcataggggtgtatgtgtgtaagattctgtggcccagggcagcctgtga

SEQ ID NO: 5952 - DNA, 1248 bp, Homo sapiens
ttacatagtttgaaaaatagtattttatttctcagaacaaggtaaaaaggtgagtgggtgcatatgtacagaagattaagacagagaaacagacagaaagagacacacacacagccaggagtgggtagatttcagggagacaagagggaatagtatagacaataaggaaggaaatagtacttacaaatgactcctaagggactgtgagactgagagggctcacgcctctgtgttcaggatacttagttcatggcttttctctttgactttactaaaagagaatgtctccatacgcgttctaggcatacaagggggtaactcatgatgagaaatggatgtgttattcttgccctctcttttgaggctctctcataacccctctatttctagagacaacaaaaatgttgccagtcctaggcccctgccctgtaggaaggcagaatgtaactgttctttttgtttaacgattaagtccaaatctccaagtgcggcactgcaaagagacgcttcaagtggggagaagcggcgatatcatagagtccagatcttgcctccagagatttgctttaccttcctgattttctggttactaattagcttcaggatacgctgctctcatacttgggctgtagtttggagacaaaatattttcctgccactgtgtaacatagctgaggtaaaaactgaactatgtaaatgactctactaaaagtttagggaaaaaaaacaggaggagtatgacacacacagcaacttgattctagattatttggtttgatccgtaaatgatgggatggggcgtcgcgctccgagcgtgtcccgcggcgggcccctggagccacactgtggccgcatgtgcatattgcagcctccgcccgtatctgggggccgcagccgccagcgcccggggacccagctgcggcgaaagctgtcgggcgcgcgcttctccgcagctccgcgcccccgccaaaacccagtgagaaattatttgcattcctggagcctgcaggagcgagaaatgagctgtaggagtcggtgggcagcaacggcggcaggcggatggaagagagcaaggggtcgccgttcgtgtcccattcgcccgagtcaaggggcggccccccaaaatcccaacgtcattgtttcctcggggccggcaggtgtgaaaacccggcggcagaatggaagttcggtagtctgcgagggcccgcggcctccccaggcgcgtagctgagtccctccaaccccgcc

SEQ ID NO: 5953 - DNA, 523 bp, Homo sapiens
gtttttgttttgttttgttttgtttcctaaggagggggaggctctgtagaggaagcttcggccctgggtgcccctgggttgggagcagtcggggagcgctgagaccaggcgcacgccctgtcggcgctgcgggtgtggggcgcaggagtccttctggccggcccctccgccccccggggaggctggagctctccaaggccggggagtctcccgaagcgcgctgccccctctgttctccgcgtgctttcactagggccccatgctgcttagtggccgatttgcagggaatctgggcacaatcttaataacaccagggccaaaaataacaacgttcctgggaaccgagcagctggagcgcaccccatggacgctgggccatctccccggggactagtgcctgacagagctgacagagttctaggccacatgtgggctagaaggaaccgccatgtctaccacagcacagtccttaagcaggagccttttgaagcacttggactcaaaacaatggctgtttgttgtt

SEQ ID NO: 5954 - DNA, 139 bp, Homo sapiens
cagtgactctttgctccttgaacttctctatcccaaagcttgcatgacaatgctctcattcattcactcattcttcaaacatacatttcttgagcatctcttttgtgccatcctctgggtttggaattaaatgcaagca

SEQ ID NO: 5955 - DNA, 525 bp, Homo sapiens
aagactcggtctcaaaacaaaacaaaacaaaacaaaaaaactacttatgtggaatattaaatgctaagaggaaaaggaatggtgattactggttacaaaatacccaaatgtcctcttgttttaaagcaacacgatgaaattaaagccctgatgattagaaagttgaagtatatggggaagagggaatcactgaaaattttgtgccatcatttagctaagtctgatggaacactgaaaagtttcatgtgaacgtttctgggtaactgttggaaatagtttctctgactattggaataggtgtctacctctgcagctaattgtctaagaatattgtatagatatttttcattggttctttaccctttttacaatgaactcagttgagctgctgattaaaacatctagggtatgttacagagttgtgactgtaagaaggtttgactattacaatatacacatcaatcatatttataccaattctctcttgaatgtatcaggcaaattaaaagctttgctggttaaatt

SEQ ID NO: 5956 - DNA, 318 bp, Homo sapiens
ccagcttgtaattcccactggccaagaatcaatgcactgcatctattctaggtatcatgccagctgttcaaaggatggaatacatgatatattagccaagcaatggtatgttaaaaaaagaacggttactacaacagcttggaaaaagtgttaaaactggtttatcatgatagttctagtttttgaacaaaatataatctaccaaatgcaaatcaggctagtcctatgttcaaagctctttagcaagtagagttgctgagagaattttgaatgagttattatccagctacagaagagattacagtcaagtagcttcaa

SEQ ID NO: 5957 - DNA, 334 bp, Homo sapiens
atgtacttttggaggaaggcacttgggcactgcttgtataatagagtttgagaataaccctaaattctagaagagacaagcagagaccggtggaaatttatagtgtaaaccacgcttgcagaatcataaaactcgggtgttttctgttatatagtcagagcctcatattcaattcaagggtcaagaatgtgaaatgctggcaggtttcctaggacaaatatggtggtctgaaatcctgaacatctggctctgtctctcacagacacattatgatataaaatcctgaaagagagtaactgggtcctaaggattttttccagaagaaaagtgtcat

SEQ ID NO: 5958 - DNA, 350 bp, Homo sapiens
cactagaaatggtaacacgtgaacaaatacacacatttcattttcttatttgttaaaactctttaaaagaaaattgaggccctgagcagtggctcatgctgataatcccagcactttgggaggccggagcaggtggcttgcttgaggccaggaatttgagaccagcctgggcaacatggtgaaaccctgtctctactaaaatacaaaaattacacagacatggtggtgtgcacctgtagtcccagatacttggatgaggtacaagaataatttgaacccaggagccagaggttgcagtgagttgagattgcaccactgcactccatcctgggaaacagcaagactcctca

SEQ ID NO: 5959 - DNA, 708 bp, Homo sapiens
caggtggaagctcgggaggctcacgctggacacatgctgcacactctggctcccctgtggctgcagctgcacccacctacccagcattctccccacgacctgtccagcccaagcccacggcactcccaggggagcccaggacaccctcaactttttagtggattactagagtatcagaccacccatttatctctcagttcctcactcccacccctgcacccagcaagtcaccaagtcccccaggtgagtaaactggagctaacagcagttggtacttacggcatatactggatttggctcactcacacgtggtattcctatcttcatctactgtatcttcctggactacataagctgcaaagttaaaaactgcatttctcagattcccttgagctaggttccagacgtgatttattatcagtcaatcaaacacattcgcatgagttttgtatagggaacaatgttaagtcggaagaaaggcagaatgcaagacacggttctggagccagcagctttattggtagcatcctgactcaataggcagctttcctgataatagcaggaacatcagcctccttggtggcccactcattgtgtggctctggaaatcattcctggatattccacctagtctgtttctttagctttcccaacaactctgtgagccatgtaacattctgtaataaatttctttctgcttaaattagt

SEQ ID NO: 5960 - DNA, 216 bp, Homo sapiens
ttatctggacctctaatctattacctcttcctttctagcagccctatgtattctttactttcctccctatccagctgagattttgtttcaatttagtttcttgccattaccctctcttttacatgccaatttcaagcacagctgcagaaaatcatataaccagatttgcaggaatttatgatcagcctggggcgaacggagcaagactccatctca

SEQ ID NO: 5961 - DNA, 318 bp, Homo sapiens
atcaggcacccctggacaccaaacctggattcactatttgccactttaatccttacaatggcaatgacagcatggattttgtaaattattataagaggtcaccaatgtacataagatacttggcaacagtggctgtccactaaattgtggctattacaaccatcagcacaaagtagcctccagcatatactgtaagactagttccctggaaggactgagatcaactttccaccatattcacagaaaggaccagcgccaaggcaacacttgcctggccacaggggctctgtcacaacgcagcaaggaaagttaccaggc

SEQ ID NO: 5962 - DNA, 446 bp, Homo sapiens
ttcctactgaagaggcattaggactagagcgtatttcttttgattatcaatgcgggtggtagtgaggtatcctcagctgtttggctggctctcttattatattagtatctttttactattatcttgcttctgtttcagccaaaatttggattttgtttctttgccacacccataggatcaggtacagttaacctgtttgagcctaataatcaagtattgtactgaaattccaaatagaattggaaaatgtacttttttgatgggctacctttcctctttcctgcctcatccaaacagtctccattagaaataataaaaaccctcataggattttaaagccaagttagcagccctgagtcaggacaggtgtttatttttaattcatactcagaaagcactgtttacccatttaccagacagagcaagaaaggacaaatagtatatat

SEQ ID NO: 5963 - DNA, 844 bp, Homo sapiens
aaaatcttgctaaaagtttgtcaattttcaatgaaacaaatttaggattgtgatacttgctattgtttcattgtctttagttcattgattttcagtcatatctttatcattttcttccctctattcaacttgcctatcgtggatacgtttttttttttttttttcccttctaatttcttgggttgtatgtttggctcattaattttcaactcctttatgtcaaaggcaggattttaagacaataaattttcctttaactgtaactatagctgcacctcacacatttttacaaatagtttcagttacaactcagtactagatattttttaatgtctgttatcatttatttcctgtttaattaatgatttacctaaaagcattttcaaaaacttattgccataaatgtattcagtctttttccttttctaatagcttgaaactagaagttgaataagatcttgcccagaaaaaaagcatgtttttaaatccccaaatttatagagttctttttgctttttaaaagattattgatttataacttaatagcattatggttgatgacttggtttatatgatatcagttctttgctatatgttgagatgtgttttgtggcctaaaatgtggtcaatttctgcaaacgtacaatgtgcacttaaacagaacatacattctttttttattaggtacggaaatccatatatgtcaatttatataagtggttccaatccttttaatgacatctcatatatagaaaattctaatatttgtacagcacagtagcataagttggagttgatttgaaaatgtcttgcagggcttactaaaatatttattgtacctttt

SEQ ID NO: 5964 - DNA, 790 bp, Homo sapiens
aaaatcttgctaaaagtttgtcaattttcaatgaaacaaatttaggattgtgatacttgctattgtttcattgtctttagttcattgattttcagtcatatctttatcattttcttccctctattcaacttgcctatcgtggatacgtttttttttttttttttcccttctaatttcttgggttgtatgtttggctcattaattttcaactcctttatgtcaaaggcaggattttaagacaataaattttcctttaactgtaactatagctgcacctcacacatttttacaaatagtttcagttacaactcagtactagatattttttaatgtctgttatcatttatttcctgtttaattaatgatttacctaaaagcattttcaaaaacttattgccataaatgtattcagtctttttccttttctaatagcttgaaactagaagttgaataagatcttgcccagaaaaaaagcatgtttttaaatccccaaatttatagagttctttttgcttttttgatatcagttctttgctatatgttgagatgtgttttgtggcctaaaatgtggtcaatttctgcaaacgtacaatgtgcacttaaacagaacatacattctttttttattaggtacggaaatccatatatgtcaatttatataagtggttccaatccttttaatgacatctcatatatagaaaattctaatatttgtacagcacagtagcataagttggagttgatttgaaaatgtcttgcagggcttactaaaatatttattgtacctttt

SEQ ID NO: 5965 - DNA, 586 bp, Homo sapiens
acattaaatgaggtcacagggttgggactctaatttaataggactggtgtccttatgagaagagaaagaggcaccaggcaccaggcatgtgagcccacagaggaaaggctatgatgtgaagacagagagaaggccatcacacacaagccatggagagaggcctccccagaaaccaaccccaccgacaccttgatctcggacttccaagcttcagaactgtgagaaaataaattcctattgtttaagccactcagtcagtggaattctgttatagcagccctaacagactaatacggaagtcaagtagacaagtctggtctctgtatttctattggaactggatttactctgctcctatgagttatctctatgggagtttgatataaattgttaaaaaattgaagcagataaacatgaaattgtagagcaatttaaccaggtgttgtaatggaaacatttcttcctgatgctggccccatgttgtgtttataagtggaaagtttcttcctctccaagtccacaggactcctttcctttctaagtactctacgtggctggccacatcattaaaatatgagttattttg

SEQ ID NO: 5966 - DNA, 435 bp, Homo sapiens
catcaggaccaaatatggaaggaaaaggcaagaaatgagccaatcatgacaaggcttccggactgagtaactgagaggatgaaacggccactgactaagactcaaactgtgggaggagctggtttatgggagactctcaggacttcgggtctggacaggctgtcttgagttacccatcagacactcaggcagaggagtggagcaggatacacaggccggcggctcagaggagaggtttgggctcacaatgtgaatctgggaggagccaccatgtgggtaggttgtacagacaaggaacaggctactatccccaggagacagcatgcagacaaaaaaagaaagggccatgagcagagtgctgaggcacactctgttcaagtcacggaggtaagaactgtggcaaaaactgagcagtcaggaagatgaaagtcagat

SEQ ID NO: 5967 - DNA, 444 bp, Homo sapiens
ctgctggctgacacaggcagagcccctgaccagtagtagcccctgaacacactacgtgtgggcgacgggcctagcaggtcacattccttctgaaccctctcttcttctcatttgattctcaggacaaccccacagagtaggaaacaggacaggcctggttcgattcaagttagtaaactttttatgcttacccagatgaatgagaagaggaggtaacatgtatattatctactttcaaaaacttaattacttaaactcttgaagaaggtggaagacttcaaaaaagaaattcttttgagaatttggaaaagtagatgcatttctcagaaatagttcactgaaaaaattgtgtatcagaaaagaaggatgaaaataaaaggaaatcagctagttattttgttgttaacagaataatctcaggctctttcacacctagtcatctgg

SEQ ID NO: 5968 - DNA, 671 bp, Homo sapiens
tttctctggctcactttgttatgttccctctagaatgaggctctggtaagaaacatccctgtttgctaccctagtagtggaaaaaccctagtcctggaaacccaagacacctgaattggttcttcccagctccccctcaagagagggagacacttttagcttgtattttggtttacgggttaaaagttttatattaggatcagaatgattgcatctggtttgaagactgaaatttctttggacagggtcttgctctgtcacccaggctggagtgcagtggtgtgatcacagctcaccgcagccttgacctcctggactcaagcaatcctctctcggcctcccagagtgctgggattacaggtgtgagccatacacctgggcctaagagttgaatttttaaaacctacttaaaattactgtctttgtaaaaccgtatgaaattagaaccagaagttgccttaaagatctagtctaatcagtctaatctcattttgtagggagaagatttgcttgtaatacctgtaggatatggcaaagtagaacatgtaaccctggccacattggctcgtatatgtgatcccagcactttgggaggccgaggcaggcggattgcttgagcccaggagtttgagaccagcctggccaacatggcaaaaccccatctctaaaaa

SEQ ID NO: 5969 - DNA, 162 bp, Homo sapiens
cttaggttacaaatttctggaggggaaagattgttacactatgtggagtgattaaacggatcttttaacagaagctgatgaactcattctaagcctgctgtttgcctgcacaaagtgtcatgtataagatggaacattaaacatgatggctgatgattaata

SEQ ID NO: 5970 - DNA, 690 bp, Homo sapiens
tcacacgatctgggcttgtgaagttgactggcaaggttgggggtatttggtggccagcgtgggacatttgtggtagaagggactgaaagggattcatggaagctagattttaggagtgacagaaagggatttccctccgacctcctaggagctgtctcttcatctccggagttgttactgcctagttttttttcttggaaaaatgtccatgaattccagtgggtgtttcacaatgtgagagaaagtcttccagagcgagtgaacactgatttaacttgaaaaacaacaagaaaaaagtcacaggcacaccttcgttgagtggttggttcctgtaacaattttaattgttgaataagttgtgattttatttttgatttcaaacacgtgtatggaaaacctccttaattctgacctgcaagaaaagttttgaagcaatttggcctaccaaatgaatacctgtaaaaggaacagagcttggaatgatctgtcagagggagagttttgcaggatggggaggaggggatttggaaaattggattacttggtgagtgagtggtttatgaaattaagttacttaactgacaggattaccaggattaccattttgactgttttgggaaatagagtaggcctaaattgaaggtagttttggcctgttacttgaactgcttaaatggattgaggatggag

SEQ ID NO: 5971 - DNA, 447 bp, Homo sapiens
cctaaatctcaaacacattttatagtcttgaatggtttcagactttattcagtcatatttgtcacccatatctgcaatatctccagcttaattttatcagacttgacaagtacctaataattccaaaggtcaaaaagtgattcattggaatactgaaagaaaacacagcttaaactctagtaatttgatttatttgcttaatgtgcaaaagcctcattgacccaggatgcagttaaattgacgtcttggcccagaaagctttgaagcctaggaggtaggcaaagggagttttttctctcactcctcggcaaaccttcaaatttgatgttatttatctgttatttcctgactgcccattccacagagagtgtcagattgaggctcagacctgagcctgaaccctgatcctgtcacatgtgtgtttagcatcagcttgtaaatttctgc

SEQ ID NO: 5972 - DNA, 493 bp, Homo sapiens
cctagtagagcctcaaagaaaaggtctttgttattaaaagaaattttagaggataatcacttcttaaaaagtccctctgtcaaaagtcagctgcaagagggcaagatacaaatccttccagcccttggtgacttactggaataaacactttaaatcagcagctaattaccaggaagttttaaatctactgttggtggatgtttaaattggtgtaagttgagcatggtggctcatgcctgtaatcccagtacttttggaggctcaggtgagtggatcacttgagcccaagagttcaagaccagcctggtcaacatgttgaaatcccatctctacaaaataaaacacaaaaaattagctgtgcatagaggcacttacctatagtcccagctactcaggaggctgattgaggtgggaggatcacctgagctcaggagtttgtggctatagtgagttgtgatcaccactacactccagcctgggagacatagtgaga

SEQ ID NO: 5973 - DNA, 522 bp, Homo sapiens
gctggtcccgagtggtagcaggagagagatgggtgggtttcagacgtattttcaaggtaggaccaacagggtttgctgatagattgaagtgtcaagaaaaaaatcaaggatgtctctgaggttttcagcttgagcaactacaaagatggatttgccattttctgagaaggaaactacaggaaaatgaggtccgggtgggagatgaggagaaattaagaagtcgggatttgtttggggactgagaaatttgaaatgtctctgacatctgtgatggatttaattgtgtccccccaaaaagatgttgaagtcctaacccccagtacctccgaaggtgaccttatttggaaacagagtctttagggagataatcaatttaaaatgaggcaattagggtagaccctaatccaatattttataaggacaagaacagaaaaccagacaccgcaggttctcactcataagtgggagtcgaacaatgagaacacatggacacagggaggcgaacaacacacaccagggcct

SEQ ID NO: 5974 - DNA, 291 bp, Homo sapiens
tactaaaaataaattcacggccgcgtcgacctggtggctggcagccatccctggcgttctttgtagctgcatcgcttcaatctgtcttcctcttcacatggcctttgatatggtttggctctgtgtccctgcccaaatccccagtgttggaagagggaccagtgggaggcgactggatcatggaagtgcatttcccacttggtgccattctcgtgacagtgagtgaggtcttatgagatctggttgttttaaaagtgtgcagcctgggccacagagcgagactccgtctca

SEQ ID NO: 5975 - DNA, 385 bp, Homo sapiens
acaaaacaacagaaatgtattctctcacagttctggaggcagacatccaaaatcaaggtgttggttgggccaaactccctttgaaggctctaggggagagtcctttctagcctcttcctagttcctggtggctggcagccatccctggcgttctttgtagctgcatcgcttcaatctgtcttcctcttcacatggcctttgatatggtttggctctgtgtccctgcccaaatccccagtgttggaagagggaccagtgggaggcgactggatcatggaagtgcatttcccacttggtgccattctcgtgacagtgagtgaggtcttatgagatctggttgttttaaaagtgtgcagcctgggccacagagcgagactccgtctca

SEQ ID NO: 5976 - DNA, 460 bp, Homo sapiens
tacacgggaaaagtttcatgctcatgttacaactgtagtgacccacagtttttcagggagtataagaaaaagataacacccagtgtcaggcccttataaagcctcaactttcagaatcctttcacaatgttagatttgctgatcaatgaatatataactgaacattaagagtaataatggggctgggtacggtggcccatacctgtaatcccagcacttttagaggccaaggcaggaggatcacttgagcccaggagtttgagaccagcctgggccacatggtgaaaccccgtctctataaaaaatacaaaaattagccgggtgtggtggtgtattgccagttacttgggaggctgaggtgggaggatcagctgagcccagaagtttgaggatgcagtgagctatgattgtgccactgcaccattccagcctgggtgacagagtgagaccctgtctcaaa

SEQ ID NO: 5977 - DNA, 247 bp, Homo sapiens
gtgtgagggctgaagctaaacttgaacctggagactgaggccccaccctagcttggggacaggcatcactgctgaagtggactttccacgggagctgcccaggattgggctgcccttaagccaaggcattcctgtggggaaaggagacttgtgtgtgaccaagccctcctcccctctcttactcctgggcttacctgggatggaagctcaccttctcctggagatcctccgtagggcaacaagcagg

SEQ ID NO: 5978 - DNA, 360 bp, Homo sapiens
acctgaaagccaaagtcagagagaatgtttgggacagactgcctgtaccaaaaaaagtctgaactcaggcagctctggctagagcagtgccctttaggtttctctaggaaggtcactggtaataggaagcttgattttgtgagaggagagagctgcctgtctgtccaggccatggacctttccttctagggttggtctcaatccaaaaccagccattccttggtctgccattttatgaatgctgcagtggttcaggatacagctccacaagctgaatttttttttttccatttgtagttggtacttgaaacaaatacatcactaatagtattagttgattttaagaactgttgattcctt

SEQ ID NO: 5979 - DNA, 498 bp, Homo sapiens
gcagacttcacataatggtaggcattaaaataaatggagatacaaacagaaaacagagaagcagaaacagaaacacctagagagtaggagatgcccatttaataacctattcatttataatcttattaaacatctggcaaaaatcataaggacatggcatgtggcaattgtggacataatgtcagcacttggtacttgctatttcaacctatgtattcatgtatttaaggattataacaaagcattttcacagattagaaaagttaattttcatttcagctccatgagatcaatattatttgccttgtcttgcggctggaggctgagcaaagacctgaatgccagtcaacctgcccccaagctcatgcttttagcatcacaggggacacacgggaatattactgaaaagccttcagcaaaaaaagcacaaaaggaaactacagcagcctttcattcgcgggatccctaccccagagagtccagactgggcactgcgca

SEQ ID NO: 5980 - DNA, 583 bp, Homo sapiens
  misc_feature (30)..(30): n is a, c, g, or t
  misc_feature (46)..(46): n is a, c, g, or t
  misc_feature (72)..(72): n is a, c, g, or t
  misc_feature (85)..(85): n is a, c, g, or t
ggaaccagcttggcctggattccggaaagnccttcgactcactatngggaattttgcccctcggaggcccangaattcggcacgngggctcacattgtaatcccaacacttcgagagttcaagaccagcctgagcaatatagtgagacctcatctctacaaaaaaaagtttaaaaattagctgagcatagaggtatgcatcttagtcccacctacttgggaggctggggtgggaggatcacttgagcccaggagacagaatttgctgtgagccaagatcattgccactgcattccagcctgggtaacacagtaagaccctttctcaaaacaaaacaaaatatcatatatgcattaatttacttgcatggtgaagtccaacatgtcaaaaatgaaatgatgagctgtattgtccctatgtctacccagtctactactttgtgttttaaggttcataagactttttgagtgctatgtgtcagtagtctatttacagagttcatccaaagaatttattgaattaaaggatggttctaatggaaatctattgtgttttgttattacatgcacacctaaaaaaaaaaa

SEQ ID NO: 5981 - DNA, 1062 bp, Homo sapiens
tcatcagaaaatgcttgctgtaacaagcgtttatctgcacattatgctgcagtgaatgctctactgatcaagttaaacagataagatcccttcccttgtagaaactacaacttaatacagtctaagacttgacaaattacttagtatttattttccaactgctttatctctgtaaaatgatatgctgaattattataagctaattgttgtagaaagaactttccccttaacttatgtaaacagtctggttttaaaaaatttgataattgtggcccagtaagctcaacactttgccttccccaagactggggaacctctgtcctgttcaccactgtatattcagcaccaggcagtttctttttttgtttgtttgtttttttgttttgaaaaattaatacatatacatggtaagacattccacaatacaaaagggtatacaataaatggtaagcttccccatggaggtcagcctctagtcccctctccagagttaatcactgttatctatatgttgtgtatcctttcatagcaattctatgcatttacaagtttataaatatgtatatttatatatctatttttaatacaaatagtagaattctatacacagtgttctgaagcttgctttcttatatagtattttggagattattccaaattcatacattgggtcagagtaattctttaaaagttccttgcatataacagtgattcaaaaagtatatggatgaatgagtgaatgctgcatgaatgaatgaatctgattcaattggtagctacagctgttctctcagggtctgatctgaccaagacagcaccttctagattctagaatgtgtcctcctgactaaggggttcaggatactgttcaccttctccaacagatgccaccggagccttaggaactgggcacaggaagccttgggcccctggaggaaaaagttgagactaggacgcaggtcccaagtatgggatttttttgggttcctacttaaaatgcttttttctttattggaaaatgatgtaacattttagagaaattaaaaagcacacatatttata

SEQ ID NO: 5982 - DNA, 600 bp, Homo sapiens
tcatcagaaaatgcttgctgtaacaagcgtttatctgcacattatgctgcagtgaatgctctactgatcaagttaaacagataagatcccttcccttgtagaaactacaacttaatacagtctaagacttgacaaattacttagtatttattttccaactgctttatctctgtaaaatgatatgctgaattattataagctaattgttgtagaaagaactttccccttaacttatgtaaacagtctggttttaaaaaatttgataattgtggcccagtaagctcaacactttgccttccccaagactggggaacctctgtcctgttcaccactgtatattcagcaccaggcagtttctttttttgtttgtttgtttttttgttttgaaaaattaatacatatacatggtaagacattccacaatacaaaagggtatacaataaatggtaagcttccccatggaggtcagcctctagtcccctctccagagttaatcactgttatctatatgttgtgtatcctttcatagcaattctatgcatttacaagtttataaatatgtatatttatatatctatttttaatacaaatagtagaatt

SEQ ID NO: 5983 - DNA, 307 bp, Homo sapiens
cagtgggccactgggaagcctcctggattgcctggacaaggctgacctgccctcccaggatgcaaattggcaggcccagcttcatgccttcttatggtgccccagagcccctggctaggcattcatgctttagatatgtgggccctgttagggacaatgtaggtgtcctgggcaggggctgtatctgaggcacacatccttggtagtgactggctagcaggaggaagtctggcagttagtctgtcaggcctggttggtcccatgggaggcctgaggtgccatcttagaaatagggccttgttaggag

SEQ ID NO: 5984 - DNA, 1838 bp, Homo sapiens
gaattttgtggggacacagatagtgagattatagtggttgttcatctcttccctgccatgccatgcacacacgtggcaccttgggtttgtctggggggagaatgatgttcccgttatcccgatggtgtccagcttttgtatttgtcatgtcagctgctgggcctgtcttagaagttgctaataacttccactttaatattactcttattgatgcattgggtttttttattgaccaataaataatttaggcattggcaatgttaagaccataacataaaccttttctaagtaatttttccatattgagcttattagcatcttttggtatctgctgggtttttagctttacaacaggcactcacatataaacatgtttatcctatttagatttgtagttcctgggagtcagagttctgtgagcagtcttaacttataaagcatgttcagacatgcttttcagatgattttgtttcattttaaaaggggaaatggcattaacctaataggaattctcctcctgaacctcagaggcagcagatggtacagctctctttgaactttactgcccaggtgaacgttctctgcatttagatcttcaggagttttacagactagtgtggagtggacatgtaaggacaagaggaagaggcaggtttcagctgagctcttctcctccttagagcaggacagtgttgggatgggctgattgtgagtatggagttctttctggaggagctccagcaggagctgggcaaatactgggagctttgactaaggggcatgcattgcagatgaggtttgaccagaggttttccaggatccctgaagaactctgcacttctaagcctgtaaggccacaacaggtgagatgaagggggagttgaacttccagctccttgtgtgtcccctagggttccccttttgggtccacacaaaggctcttgagcccaatctgaaggtctaaggctatggatatctcctccatttctaagttgggacaaggttgtccagcaaaaagaaaagcaaagactggtccaatcttagagacgtttgttttggaagcagagctgggctattagctttcctcaagaaggaaaaaggagtgctacaaagttaaatactgatttttaaaaaaaattggcattcacacaatttctactaccacagatgagacttctttttgtttttctcaaaaacttaggctctccgagggattggtggaggctgtggtacagtgagggagcagagttctctgccacgttggaaatcagcctcagacaggagcaggccttgggttccctatggtggtggaggcgagctgagagatgttgaggcagtgagagcgattgatagactgctacccagcattggagagatgactctctagatgtcctgggctggcattctagcttctgacatgccagtcaaacccatagattcacacgcctgaagggaccatcagtggtaagatttatcctcctgacttcagacaaagccacatccaagccatctcaggcatttaaggatctatcctatttttgaagtctccaaaaaggatcccttggtctctcagtttaatgtcataaactctgtaagtcaggaaatttaactttagagcaagctcagattctttctatggttcaaagaccattttctttggcaatcatcctctctctgagtacccttcatgtatttgaaaaccaatactaaattggctttcagctgtctcttctccccaggtggaataatttcagttctagtcacttgaattcagaagaaaaagcatgctagcaaaattcaaatcaagtaaatataagccttttttagggaaaaaaaaa

SEQ ID NO: 5985 - DNA, 566 bp, Homo sapiens
ttttctttgagatggagcccaaactgtagtgtacagtggtgcgatcctggctcactgcaacctccacctcccgggttcaagcaatcctccaacctcagcctcccgagtagctaggattacaggtgtgcaccaccaggcccggctaattttttttgtattttagaggcggggtttcaccatgttggccaggctggtctcaaactcctgaccttaagtgattcgcccacctcagcctcccaaagtgctgggattacaggcatgagccaccacctataaccaaattttctacatgttacttttcccaagaacttgccaaaagaattaaataaatcatccactgtttttttttttttttgagacggagtcttgctctgtcacccaggctgtagggcagtggtgcgatctcggctcactgcaagctccgcctcccgggttcacgccattctcctgcctcagcttcccaagtagctgggactacaggtgcctgccaccacgcctggctaatttttttgtatttttagtacagatggggtttcaccatgttagccaggatggtctcaacctcc

SEQ ID NO: 5986 - DNA, 383 bp, Homo sapiens
tggaagtgtagatggaagaatgataagtatgccatgatcctggcctttaataagttagaggtattaacacataaagacttcagaagcagtagtgtgtgaggagtattacctcctctgatcctgttggactgtcctgaaaccaaggttgacgggccattataaatccatactatctgacctcagtgaggttctccctgctgtcttctcagtcactaattcttcctgtatactgttgggatcctatttgtctcattctttccagtcccaccactgtttaggttttcttacaacagactttagtctcaatttttctagtccagcagtccccaacctttttgacatcagggaccagttttgtggaagacagttttccacagacagag

SEQ ID NO: 5987 - DNA, 358 bp, Homo sapiens
gttggttttctgcataatgtatgtatttatgcagtatgtgtaccgtcctgtgacctacactggttggtgttagttacaagggcccttggatgggtttaggagatggatgtaccctctcctgagggctgtgaatctgcagtgggaacaatgtcagacacagtcctctgaagatggaaaaaagctcagaggtcaaaaaacatacccctagcccatcaccattttttcccctttaacctctaagtgaaaaattgcacacaattttctttacgtatactttctaaaatcttgtgtctccttcaacacttcctttgatatatgtgggagatcaagatgaagaaaaggagaaatgggaatggcg

SEQ ID NO: 5988 - DNA, 348 bp, Homo sapiens
gtatggttatgccattttgtcttcaaatatacaattatgttaatgaagagaatgatcttgttaatctttttaacagattgccttttgctttctatttattgaggtaatttttcatgctgccagttcaaaactgtacaactttaaatgattcctttttcacatcttattcaggaatttaatttgcatatattttaggtgccaattaggaggttgatttatttattgaaatagaaattacgggaggctgacgcaggagaatcgctgtaacccgggaggcagaggttgcagtgagccaagattgcgccattgcattccagcctggcgacagagcaagactctgtctcaaaa

SEQ ID NO: 5989 - DNA, 622 bp, Homo sapiens
ccactttcaaactgttaattttaatattaacatatgaaaaataatcacggcaatgaagtcatttactacttattcctgatagctaagcatgaataatatatgcagaaaaacatttcatttcctaaattatggtcaaatatattatgaaggaaaaattttctggtaaagaggatggaatagtaagggctaattgcagcagaaagacactgattgagttggctgctgagaaatgaggacaggtgcaatggcttgcgcctgtaatcctagcactttgggaggctgaagcaggacagcttaagcccagtctgggcaacataaggagacacctgtctccactaaaaaaaaaaaaaaaaccaatagctggccatggtggcgtttgcttgtggtccccgctgcttcacaggctgaggcagaggaggactgcttgagcctaggaggttgaggctgcagtgagtggtgatcaagccactgctgcactctaacctgggtgacagatcgagacctcatcccaaaaagcaaacaaacaagaaatgaagaaaatcctgtgtcagatgaaagagttcaggctttacccttgctaaaacatggacagtttttcttctcaagccatgactttgtttgt

SEQ ID NO: 5990 - DNA, 483 bp, Homo sapiens
aaaactgcttgtcattaataagggacaggcccccaaactggcacagcatagcttccataatactgtttgtcattatagtcagagcataccttcagatttaaggggagaggtgtaactctctgtggaaagactattgttcaccttttggccacagatagcttacatttctcccatctttgaaaatctcatgccagcagggcacagtggctcaagcctgtaattccagcattttgggaggctgaggcagatggatcacttgaggtcagaccagcctggccaaaatggtgaaactccatctttattaaaaatacaaaaattagctgggtgtggtgactcatgcctgttattacagctacttgggaggctgagatgagagaactgcttgaactcgggaggtggaggttgcagtgagccaagatcattgtgccactgcactccagcctgggtgacggagtaagtgagactctgtctcaaaaaaaaaaa

SEQ ID NO: 5991 - DNA, 443 bp, Homo sapiens
gttggttgttttcagaatcataattagaggtttaatagcctattagaataaccaatggcatatacctcagaaccctgcaagtgtgctcatttgactatgctccaccctggcattagttagtattagtgcctagctgtgcctctcaactaaccttgcagtgagcactgccaaacctagccactattgcattcaacaaatgtacctccatcagtgcagtggcgtgatcatggctcactgcagcctcaaattgccagactggcctcaagtgatcctcccaccttggcctcccaaattgctggaattacaggcgtgagtcacaatgctggccttttcactttcttttctaagactctttttcattaggacaaattcacacctcactttttcttttctgctctaagctgtatcacttgaaataaaaaatggtaagtaatttgtcgaaa

SEQ ID NO: 5992 - DNA, 201 bp, Homo sapiens
gctggttgtcgaagccttacttatgctaaaaaatagaactaacctaaatatccaatggggattgtttaaatgaattatgattcaaccttccacagagattagaatcatgctcttgaagaacactgatgatgtaaaaagtctgctaacatattaagtgagaaagcacattacaaaatggaatatatgttctgataatttttg

SEQ ID NO: 5993 - DNA, 738 bp, Homo sapiens
ccggacggttcccccttgtgtggccctggccggggtgttcccgggccccctttggaggcctgcccttgtaggtgtgtccagtcggtgtcaattgcggcattcgcttccttgggcgcctttggagcgttcgtgggctttgtttacccgtggcaggggatttctcaggcgttaattgggtcccccggtttccagtcccacgttttaaacggggccagtaattgtaacggaccccctataggccgaattgggtacccggcccccccctcgaaggtcgacttggtttccgtgatgagttcttggcttctggggttggttgggagtcccagatccagggaacagttgagatggtccagcgttccttcattctttctaccgacaaggcctcctggggccagatggatagaggagccacaatgaattcatctccatagcaactcaagcttcctcctccatcatctggaccagtgcgtcccagtggcaacttcttgacatgagtcgattctaccttcaaatgactgactcatgccaaatgtcctggccacagaatgggcctgtgacccagtcctggtcaacgagtctgctcaggttgaggtgggaggcttttttatttttatatttttgtagaaacagggtcttgctatgttactcaggctggtcttggactcctcggcttaagcaatcctcctgccacagcctcccaaagtgctgggattacaggtgtgagccactgtgctcaga

SEQ ID NO: 5994 - DNA, 1224 bp, Homo sapiens
caccaggagggtcggagggcattcttcgatcccaaagataatagggctgaggccaaggagaccgttgcagtccccctggccaccttctgggtcatccagggacctcctcatggcagtttgcctctctgggtccaagggcaagctgtaagtggtctctgaggtcctggagccacagcttgggaaggtgttgatgggcagggtggattctgagggcttccctctggagaggaagcatgtgatgagaggtgtagacagggtcaggctgggacagaaggaaggaaaggggcagagctggggggagggggaggaagcgatcatatggggagtgtctggcaagagtagactggccagtctagggagtgcagcggggagaggggaaagggagaaagtacagaagacagatgaaggagaggaggtaagcgagaaaaaatggaaaggggagccggaaatggaggagagaggacaagcaaagagacagaaatgaagacatgaggaaaagctgggggaagcaggagaggaagggacgggatgtaggagggggaagaaaaatcggagatgagacaaaagaaatgtgtgggagacgggtagagacgaaatgcaaggggcgtggttttggtttttctccaagacctggagacatcgacccccatcgccttctgaagagagagggagggcgggcactgggggtcaggagagtctccagcaggggaggggaattgtttggactattgttcttcaggattggaataaaacaatcttattttggtttccgtgatgagttcttggcttctggggttggttgggagtcccagatccagggaacagttgagatggtccagcgttccttcattctttctaccgacaaggcctcctggggccagatggatagaggagccacaatgaattcatctccatagcaactcaagcttcctcctccatcatctggaccagtgcgtcccagtggcaacttcttgacatgagtcgattctaccttcaaatgactgactcatgccaaatgtcctggccacagaatgggcctgtgacccagtcctggtcaacgagtctgctcaggttgaggtgggaggcttttttatttttatatttttgtagaaacagggtcttgctatgttactcaggctggtcttggactcctcggcttaagcaatcctcctgccacagcctcccaaagtgctgggattacaggtgtgagccactgtgctcaga

SEQ ID NO: 5995 - DNA, 347 bp, Homo sapiens
ctgtgggtgtgcttctgcaggctttaataccagcacaactgtatttctgcatggcaggactcaatattttaattgtgtggacttaaattctagcatccagaaaaaggcagccttctagggaggtgaggaggatgatgagagcacgtggaagcttttcttcagtgctaaacatgttactctaaactcacaccaggtgacccaatgatgaagttcccacagatttaccaaaggtaggaagaaagtcccagaaagaaatgcttagatgaaggagaatgatattgtcaaagcaagcaccagccagagttcaataatttatgtcttacaaaacttattaaatatcagggttt

SEQ ID NO: 5996 - DNA, 2077 bp, Homo sapiens
aatctaagtttcacaggctcagggatgaacccaagctaccaaatgcacaggcccctcctgtatacggttacagcaggtaagggagtaacttactcagtgcaagctgctgtaacaaaatagcacaagctgggtggctaatcaacaacaggcatttatttctcacaggtctggaggctggaagcccaagatcagggtgccagtgctggcatggtcgggttctggtgagggccctcttccaggtcacagacagctgtcttctcattgcatcctcacatgacagaaaagaagtgcacaagctctctggccccctcttacaggcgctaatcccattcacaagggtcctaccgtcatgacctcattacctcccaaagaccccacctccaaataccaccacattgccattaagcttcaacatatgaatttaagggggaaacaaacatccagtccattgcagattgtcctgataatatgtgtgcccagggcattgcccccacagcaaagagagacattggaaggcaaaccaatgtcaggtttcctaatgtgcacggagtcatccctggaagagtgagtccggtgatcttaccagctaattgcattgagctaccccaccttggggatctacctgccaaggagaacagaacaccactggctttgacacccatctctcaacaatgatggaagaatgctggaaatttacctgctctggtagctctgtctaagttcatcttccttgtatggactttctttttttattgctctcaaatacttgtattattaaatatctcatttaaaatttctttaaaatacatttaaaagtacatttaaaagagtacattttaagagtgcagatgaaaacataatgaatacatctttgcttaagaaaaaatatttcggacacagcatgaactcagttgctggttccaagcccctccccttctcactacactgaacttggcatgcattctttcttcaggtgtgtttgtaatcttactacatatggacatatcccccagcaatatcagggattgttttgcttgttcctagacatcatataaatggtatcataccaattatacccctacactacttaatgtttcattcaacattgttttgggggactatccatgttgatacatgaattctgttgtgttcattttttcctcttgtgaaatagtccatcatggaaattgtccctagtgtgtctatctgcactcctaattgacaggcatttaggctgttttccattttcctaattacaagttatgctgagtgaacattcctgaacataggtgtgaggctgtctctggagcacatgccaaggaacagaattcttaggtcgtaaggaatgtgtacctccagccttagtcaatattgccaattgctgtcctatctgattttattcatttacgctcccactagcagtatatatgagtctttctttcacttcttgccaactcttaccaatctaatgaatgggaagtggtaactcattattatttcaatttgtattccctgtattaatccctgagaccttaacacttgtgtattgcacattctggttcctctttggcaaattgccttggcattaagatagtaaattttccttgccacctacgctggttgagtcaggatgcttaattacttggaggtaaaaagcacctagctgaaatagcccatccctgaggctgccctgttgaggataggagatgcttcatccatctttagatcctttcttggaaacgctgagcctggccagccatgcaggcttttccaagctctgatgctgccctgtgtccacaatagcatccccacagcctggatccatcattcccagcattatgatagctcctttgtctccttggaagagcccaaaacccacagctgaggcctcagggcttttctaatgtgcttagaacaggggtaaaggtaatgccaaccaaaatggggaaacctgtattcttgctcagtcactgcttagtcagcataaatcactccagaggatagtttgttactgacctcaaagactcagttacaaagatgatcaccatagcattgtttacagtagcaccaaaaaaaa

SEQ ID NO: 5997 - DNA, 468 bp, Homo sapiens
agataggctggacaaagggatgattcacatccccagcaggacggagcagcaggatagtgggagacttttatcacactactcagaatagtgtacaatttaaaacttaggaattattatttctggacttttccatttaatattttcagactgcagttgaccaccaataactgaaaccttagaaagcaaaacctcaaataagggggaactactgtacctaacacagaatcctttcttggtacataggatttacagtgaaattaatccctaaagatctagtccttagtttttctgtgctaagcagttaaagaagatatttcctgccattgtgccttcagaacagtgaatttggctgggaacagtggcccacacctgtaaccccagcacttttacgagaccgagacaggttgattgcttaaagctcagtagtttgagaccaccctgggcaacatggtgaaacctggtctctat

SEQ ID NO: 5998 - DNA, 317 bp, Homo sapiens
tgatccgcctgcctcggccttacaaagtgctgggattacaggcgtgagccaccgcacccggccctcccctctctgaacaggattgcctactctgtcctccgactcccagagcttttcactgacacctggggactgctgggtccctccttctctcctagcctgcccagggccaccccaagcctgcagtagattttcatttatctctgtaagaacgtttacaaggacatggagcaaattagcatcacacaaatgacgatgctgcaaatgagcggtgtacagggttggcgggtgttgcaggcaggtttcctgtcgttggc

SEQ ID NO: 5999 - DNA, 434 bp, Homo sapiens
ttgttaagtccaatggacttttctccctaatgtatttttttccagtcttacttgactccccagcagtatttgacgagttagccatgtcatcattcttaagatactctcttctgaaattttgtgatgctttgctgtcttttggccttttcttagctctgactctccagtctcattttccactttggctccactccctctgcccattccttaaatgttagggttccttacatttctgttcttattcctctggtcactcaatacattctggtgatatcccctagagtcatggcttcacctgtaatcaccatctatatgttaaaggctcccaacctttataccctgagcctacctcactactaagctttagacctgcaaatacactgatatattgactgttacttgggtgttccacccaacagatccctcaatttaaa

SEQ ID NO: 6000 - DNA, 309 bp, Homo sapiens
agaaagtggtacttggggcaccttgcttcatgtaaggtggctttcggattcccagatacttgcagttatcaggacccatctcttcacgattggtccttgaaaactgaagccccttgttttctgagattagaaaccgtcccttcccaagaacagctgtagcattaactcacgcctaattggtttttagtttccccttcgctttgggcctagaagggttttctttactttaatgtgaacttagctgtgaaataaaaaaagtatcactgtcatgttttaaccagatagattctattgcagaagcccctgttg

SEQ ID NO: 6001 - DNA, 450 bp, Homo sapiens
caagagtttgaatggatatcttcaaggggatgcattttattggagacatttattgcctggggctttctgttttcagtctgactccccagctttctgtatcattgttttaacatacatccccttttctcctttattggaagagaagctataattctcctcatttcatgataatccttttcagtctgttttgctcaaaggacaaattcttttcaacaactattgtaattattttcttagagggccatttttaattgccgtattgtttagctaagccctattgtcttggtgtccttcaaaactgtcagttgcattaaaatataggggtgggaggggagctgataagcacattgttgtaattgatttgtatgtttgaattgtcttatcagaaaacaaggttatgaatttcatctgttgagacacaaaaataaaatactttcttaaaaaaaagca

SEQ ID NO: 6002 - DNA, 455 bp, Homo sapiens
attctacttcataagtcgacctttctaagggataagatgttctccgttttccagatactagttctagatcttgactcagacatatgtttgacatgaagactagtctgtcagtcttcaagaatactgacttgttttgttttggttttattaatatattcactagtctctggctgggcacggtggctcacacctgtaatcccagcactttgggaggctaaggcaggcggatcacctgaggtcaggcgttcaagaccagcctggccaacatggtgaaaccctgtctctactaaaaatacaaaaattagccgggtgagtatggtggcttgtgcctgtagtgccagctactcgggaggctgaggcgggagaatctcttgagcccaggagacgcaggttgcagtgagctgagatcgcgccactgcactccagcctgggcgacagagcgagactccatctca

SEQ ID NO: 6003 - DNA, 1569 bp, Homo sapiens
cgggcaggcccagccttgtagtctgcaaagaccatgcaagccttggttgataaaccgggattctactggaagtttgcactttccccacatcagccaagatgggtaaactgccttaacacaaaagtcacatgccccacaaaatatttccttctatctcaaaacagtattagcttctttaatctaagaaggtaatgagaggtttttaaaactgagttaagtcagcagttcagcaagtgcttacgaaagacagtcaaaatataggcaagttactttaaatgggtattatttgtccttactttcccaatgtaggcaagtgcctgtgatataacaatttagggaataatgggagaataaaaagcatattagtttcaatcagatttcctggcatatatcacagaccctaaggaattacaaagacaaaaaagcaagctctttggtttctgcatggttctttgcagactacaaggctgcccctgcaagcacttggatgaaaagaccgggattctactggaagtttgcactttccccacatcagccaagatggatctactgtggatcctgccctccctgtggcttctcctgcttggggggcctgcctgcctgaagacccaggaacaccccagctgcccaggacccagggaactggaagccagcaaagttgtcctcctgcccagttgtcccggagctccaggaagtcctggggagaagggagccccaggtcctcaagggccacctggaccaccaggcaagatgggccccaagggtgagccaggagatccagtgaacctgctccggtgccaggaaggccccagaaactgccgggagctgttgagccagggcgccaccttgagcggctggtaccatctgtgcctacctgagggcagggccctcccagtcttttgtgacatggacaccgaggggggcggctggctggtgtttcagaggcgccaggatggttctgtggatttcttccgctcttggtcctcctacagagcaggttttgggaaccaagagtctgaattctggctgggaaatgagaatttgcaccagcttactctccagggtaactgggagctgcgggtagagctggaagactttaatggtaaccgtactttcgcccactatgcgaccttccgcctcctcggtgaggtagaccactaccagctggcactgggcaagttctcagagggcactgcaggggattccctgagcctccacagtgggaggccctttaccacctatgacgctgaccacgattcaagcaacagcaactgtgcagtgattgtccacggtgcctggtggtatgcatcctgttaccgatcaaatctcaatggtcgctatgcagtgtctgaggctgccgcccacaaatatggcattgactgggcctcaggccgtggtgtgggccacccctaccgcagggttcggatgatgcttcgatagggcactctggcagccagtgcccttatctctcctgtacagcttccggatcgtcagccaccttgcctttgccaaccacctctgcttgcctgtccacatttaaaaataaaatcattttagccctttaaaaac

SEQ ID NO: 6004 - DNA, 960 bp, Homo sapiens
tcactgcactctagcctgggcgacagagcgagactccatctcagaaaaaaaaaaaaaggcggggggagcgcagggaggcaaggaggaagttttgggtgccgcctgaggctctgttgagtgttagtgttctctgctttggaagaggaaccacggaagtcttctttcagagaaacagtgactattggggagagatttaaaagagggaagtggttatgagggagtgcctcagggaaccacctttcctggccaggcacctaagaggttcctcccagcttttcctagcagagttgctcagactggatgggagctgagagaagacaaaggagctagaggggggccggggattctggagggggtaagacagggggaaaagctgggagctttggagccagacagtcccgagttcaagtcctgccgctgcttcaaccagccgagtaaccctgcgcaaacaacctggccccttggtgttgctcgtggggcctgataaaattcaactcttagttgctctgagactcccatggcattatatctccaaaggtgccaggcatggtgctgggcaccaaggtgctttccatcccttccctgctaggggattccctgagcctccacagtgggaggccctttaccacctatgacgctgaccacgattcaagcaacagcaactgtgcagtgattgtccacggtgcctggtggtatgcatcctgttaccgatcaaatctcaatggtcgctatgcagtgtctgaggctgccgcccacaaatatggcattgactgggcctcaggccgtggtgtgggccacccctaccgcagggttcggatgatgcttcgatagggcactctggcagccagtgcccttatctctcctgtacagcttccggatcgtcagccaccttgcctttgccaaccacctctgcttgcctgtccacatttaaaaataaaatcattttagccctttaaaaac

SEQ ID NO: 6005 - DNA, 1064 bp, Homo sapiens
taatctggcatccttcccctggtgggcccagcaagatggatctactgtggatcctgccctccctgtggcttctcctgcttggggggcctgcctgcctgaagacccaggaacaccccagctgcccaggacccagggaactggaagccagcaaagttgtcctcctgcccagttgtcccggagctccaggaagtcctggggagaagggagccccaggtcctcaagggccacctggaccaccaggcaagatgggccccaagggtgagccaggagatccagtgaacctgctccggtgccaggaaggccccagaaactgccgggagctgttgagccagggcgccaccttgagcggctggtaccatctgtgcctacctgagggcagggccctcccagtcttttgtgacatggacaccgaggggggcggctggctggtgtttcagaggcgccaggatggttctgtggatttcttccgctcttggtcctcctacagagcaggttttgggaaccaagagtctgaattctggctgggaaatgagaatttgcaccagcttactctccagggtaactgggagctgcgggtagagctggaagactttaatggtaaccgtactttcgcccactatgcgaccttccgcctcctcggtgaggtagaccactaccagctggcactgggcaagttctcagagggcactgcaggggattccctgagcctccacagtgggaggccctttaccacctatgacgctgaccacgattcaagcaacagcaactgtgcagtgattgtccacggtgcctggtggtatgcatcctgttaccgatcaaatctcaatggtcgctatgcagtgtctgaggctgccgcccacaaatatggcattgactgggcctcaggccgtggtgtgggccacccctaccgcagggttcggatgatgcttcgatagggcactctggcagccagtgcccttatctctcctgtacagcttccggatcgtcagccaccttgcctttgccaaccacctctgcttgcctgtccacatttaaaaataaaatcattttagccctttaaaaac

SEQ ID NO: 6006 - DNA, 1536 bp, Homo sapiens
cgggcaggcccagccttgtagtctgcaaagaccatgcaagccttggttgataaaccgggattctactggaagtttgcactttccccacatcagccaagatgggtaaactgccttaacacaaaagtcacatgccccacaaaatatttccttctatctcaaaacagtattagcttctttaatctaagaaggtaatgagaggtttttaaaactgagttaagtcagcagttcagcaagtgcttacgaaagacagtcaaaatataggcaagttactttaaatgggtattatttgtccttactttcccaatgtaggcaagtgcctgtgatataacaatttagggaataatgggagaataaaaagcatattagtttcaatcagatttcctggcatatatcacagaccctaaggaattacaaagacaaaaaagcaagctctttggtttctgcatggttctttgcagactacaaggctgcccctgcaagcacttggatgaaaagaccgggattctactggaagtttgcactttccccacatcagccaagatggatctactgtggatcctgccctccctgtggcttctcctgcttggggggcctgcctgcctgaagacccaggaacaccccagctgcccaggacccagggaactggaagccagcaaagttgtcctcctgcccagttgtcccggagctccaggaagtcctggggagaagggagccccaggtcctcaagggccacctggaccaccaggcaagatgggccccaagggtgagccaggccccagaaactgccgggagctgttgagccagggcgccaccttgagcggctggtaccatctgtgcctacctgagggcagggccctcccagtcttttgtgacatggacaccgaggggggcggctggctggtgtttcagaggcgccaggatggttctgtggatttcttccgctcttggtcctcctacagagcaggttttgggaaccaagagtctgaattctggctgggaaatgagaatttgcaccagcttactctccagggtaactgggagctgcgggtagagctggaagactttaatggtaaccgtactttcgcccactatgcgaccttccgcctcctcggtgaggtagaccactaccagctggcactgggcaagttctcagagggcactgcaggggattccctgagcctccacagtgggaggccctttaccacctatgacgctgaccacgattcaagcaacagcaactgtgcagtgattgtccacggtgcctggtggtatgcatcctgttaccgatcaaatctcaatggtcgctatgcagtgtctgaggctgccgcccacaaatatggcattgactgggcctcaggccgtggtgtgggccacccctaccgcagggttcggatgatgcttcgatagggcactctggcagccagtgcccttatctctcctgtacagcttccggatcgtcagccaccttgcctttgccaaccacctctgcttgcctgtccacatttaaaaataaaatcattttagccctttaaaaac

SEQ ID NO: 6007 - DNA, 1793 bp, Homo sapiens
cgggcaggcccagccttgtagtctgcaaagaccatgcaagccttggttgataaaccgggattctactggaagtttgcactttccccacatcagccaagatgggtaaactgccttaacacaaaagtcacatgccccacaaaatatttccttctatctcaaaacagtattagcttctttaatctaagaaggtaatgagaggtttttaaaactgagttaagtcagcagttcagcaagtgcttacgaaagacagtcaaaatataggcaagttactttaaatgggtattatttgtccttactttcccaatgtaggcaagtgcctgtgatataacaatttagggaataatgggagaataaaaagcatattagtttcaatcagatttcctggcatatatcacagaccctaaggaattacaaagacaaaaaagcaagctctttggtttctgcatggttctttgcagactacaaggctgcccctgcaagcacttggatgaaaagaccgggattctactggaagtttgcactttccccacatcagccaagatggatctactgtggatcctgccctccctgtggcttctcctgcttggggggcctgcctgcctgaagacccaggaacaccccagctgcccaggacccagggaactggaagccagcaaagttgtcctcctgcccagttgtcccggagctccaggaagtcctggggagaagggagccccaggtcctcaagggccacctggaccaccaggcaagatgggccccaagggtgagccaggagatccagtgaacctgctccggtgccaggaaggtgaggcagcccttgcaggagccaggaacttgggatcacatggtgttgggtgttggcagacccccaagtgtggccaagatcctccccacagcctcctcagaacccttcttcagggacctgaaggagccaagagggtccctagggtcccacacttgttccagtgcctgggggtgggggtcagggaataacctgggcaccaccccagtccatctcccctttcccaggccccagaaactgccgggagctgttgagccagggcgccaccttgagcggctggtaccatctgtgcctacctgagggcagggccctcccagtcttttgtgacatggacaccgaggggggcggctggctggtgtttcagaggcgccaggatggttctgtggatttcttccgctcttggtcctcctacagagcaggttttgggaaccaagagtctgaattctggctgggaaatgagaatttgcaccagcttactctccagggtaactgggagctgcgggtagagctggaagactttaatggtaaccgtactttcgcccactatgcgaccttccgcctcctcggtgaggtagaccactaccagctggcactgggcaagttctcagagggcactgcaggggattccctgagcctccacagtgggaggccctttaccacctatgacgctgaccacgattcaagcaacagcaactgtgcagtgattgtccacggtgcctggtggtatgcatcctgttaccgatcaaatctcaatggtcgctatgcagtgtctgaggctgccgcccacaaatatggcattgactgggcctcaggccgtggtgtgggccacccctaccgcagggttcggatgatgcttcgatagggcactctggcagccagtgcccttatctctcctgtacagcttccggatcgtcagccaccttgcctttgccaaccacctctgcttgcctgtccacatttaaaaataaaatcattttagccctttaaaaac

SEQ ID NO: 6008 - DNA, 1760 bp, Homo sapiens
cgggcaggcccagccttgtagtctgcaaagaccatgcaagccttggttgataaaccgggattctactggaagtttgcactttccccacatcagccaagatgggtaaactgccttaacacaaaagtcacatgccccacaaaatatttccttctatctcaaaacagtattagcttctttaatctaagaaggtaatgagaggtttttaaaactgagttaagtcagcagttcagcaagtgcttacgaaagacagtcaaaatataggcaagttactttaaatgggtattatttgtccttactttcccaatgtaggcaagtgcctgtgatataacaatttagggaataatgggagaataaaaagcatattagtttcaatcagatttcctggcatatatcacagaccctaaggaattacaaagacaaaaaagcaagctctttggtttctgcatggttctttgcagactacaaggctgcccctgcaagcacttggatgaaaagaccgggattctactggaagtttgcactttccccacatcagccaagatggatctactgtggatcctgccctccctgtggcttctcctgcttggggggcctgcctgcctgaagacccaggaacaccccagctgcccaggacccagggaactggaagccagcaaagttgtcctcctgcccagttgtcccggagctccaggaaggccacctggaccaccaggcaagatgggccccaagggtgagccaggagatccagtgaacctgctccggtgccaggaaggtgaggcagcccttgcaggagccaggaacttgggatcacatggtgttgggtgttggcagacccccaagtgtggccaagatcctccccacagcctcctcagaacccttcttcagggacctgaaggagccaagagggtccctagggtcccacacttgttccagtgcctgggggtgggggtcagggaataacctgggcaccaccccagtccatctcccctttcccaggccccagaaactgccgggagctgttgagccagggcgccaccttgagcggctggtaccatctgtgcctacctgagggcagggccctcccagtcttttgtgacatggacaccgaggggggcggctggctggtgtttcagaggcgccaggatggttctgtggatttcttccgctcttggtcctcctacagagcaggttttgggaaccaagagtctgaattctggctgggaaatgagaatttgcaccagcttactctccagggtaactgggagctgcgggtagagctggaagactttaatggtaaccgtactttcgcccactatgcgaccttccgcctcctcggtgaggtagaccactaccagctggcactgggcaagttctcagagggcactgcaggggattccctgagcctccacagtgggaggccctttaccacctatgacgctgaccacgattcaagcaacagcaactgtgcagtgattgtccacggtgcctggtggtatgcatcctgttaccgatcaaatctcaatggtcgctatgcagtgtctgaggctgccgcccacaaatatggcattgactgggcctcaggccgtggtgtgggccacccctaccgcagggttcggatgatgcttcgatagggcactctggcagccagtgcccttatctctcctgtacagcttccggatcgtcagccaccttgcctttgccaaccacctctgcttgcctgtccacatttaaaaataaaatcattttagccctttaaaaac

SEQ ID NO: 6009 - DNA, 1491 bp, Homo sapiens
cgggcaggcccagccttgtagtctgcaaagaccatgcaagccttggttgataaaccgggattctactggaagtttgcactttccccacatcagccaagatgggtaaactgccttaacacaaaagtcacatgccccacaaaatatttccttctatctcaaaacagtattagcttctttaatctaagaaggtaatgagaggtttttaaaactgagttaagtcagcagttcagcaagtgcttacgaaagacagtcaaaatataggcaagttactttaaatgggtattatttgtccttactttcccaatgtaggcaagtgcctgtgatataacaatttagggaataatgggagaataaaaagcatattagtttcaatcagatttcctggcatatatcacagaccctaaggaattacaaagacaaaaaagcaagctctttggtttctgcatggttctttgcagactacaaggctgcccctgcaagcacttggatgaaaagaccgggattctactggaagtttgcactttccccacatcagccaagatggatctactgtggatcctgccctccctgtggcttctcctgcttggggggcctgcctgcctgaagacccaggaacaccccagctgcccaggacccagggaactggaagccagcaaagttgtcctcctgcccagttgtcccggagctccaggaagtcctggggagaagggagccccaggtcctcaaggtgagaggggctggggagcgggctgggatcttgggaatggggaaggcaggaaagtagcaatttttgtctgtgctgaggggccacgacaaaggagcaaggaacctactctgtgccagctccaggctgggcacccggcatcctaagatcaactctgccaggtaagtggtttcatccccattctgctgaggaggaaagggaggttcagagaggataagatatttgcccgcaatcacaaagtgagtgaagggtgaaactgggatttgaacctctggctccaagtctcttgtttctttttggtcctgggcatggggtgggactcaggaaatctctgcctttgtgatttcagggccacctggaccaccaggcaagatgggccccaagggtgagccaggtgagtaagtggggctggaggcctccccgctttctttgcctctgtccctggactctagggtgggatctctgcttggctgctgtgcctatgatggctctctcacaggggaatggatggctgggaggagtgggaaggattaggagaagggcctggctaccctatgatggccctcctattggggatggagggctgggaggagtggggaggattaggagaagggcctgggtaccctatgaaggccctcctacagggtttggaaggctgggaggagtggagaggattaggagaagggcctgggtaccctatgatggccctcctacagggtatggaaggctgggaggagtgggaaggattcggaaaagggcctgggtac

SEQ ID NO: 6010 - DNA, 424 bp, Homo sapiens
tgccccacccccaagaactgaggattcctccatccctgcctccccttctttccaggtaactgggagctgcgggtagagctggaagactttaatggtaaccgtactttcgcccactatgcgaccttccgcctcctcggtgaggtagaccactaccagctggcactgggcaagttctcagagggcactgcaggtgagtgagcctaaggggagcagaggaaggaggctggatcctttcccagtgctgccactgcccccatgaatgacccagggcaatcctgtctcctctgtgggccttagtttccgcatctgagaaatggcaatcatgaaacaggatggtgcaacagtgaagaatttgggatctggaggcaaacagacctgagtttgaatccatctctgccatttagtacttatgtgaccttgggca

SEQ ID NO: 6011 - DNA, 2378 bp, Homo sapiens
  misc_feature (1250)..(1250): n is a, c, g, or t
  misc_feature (1580)..(1580): n is a, c, g, or t
gcatccggcatttggcggggcttttgtctctcgctgcagccagagcttgggatcgctttctgctattcaacgtcctccacctctgcccccctctccccccagccggtgacaggctgttgccctgtgatctgcaggtcctgggacgtgcacagacagctaagatgccaggacattccagaaggtgggaaaggcacctgagtaatttgactctcctgcctggacccagcgtacagatgggattgtgcttcattgctggacccagcatttagggatcgtcactcccgtggatgatcaaagctactccgggggctgaggcaggagaatcgcttgaactcgggaagcagaagttgcagtgagccaaggtcgcaccactgcactccagcccaggcgacattgtgagactccatctcaaaaaaaaagaaaaaaagtgtactaacaagacccagcacacagaggagacttttaccattgtatgaacacccatcaaacagtacacatcatcattgtgagttctgaatctcacacatagaggaagtcaaaggtggaaaacttgactctcatatttggatccagtccacaggtgtgattttgacgcacacttctgcccagcacctgagtaatgtgattcttcagaattggcccggcccacaaataggattgtgccacactgctggacccagtgcctaagtgatgtaactctattcttctgccttggtgctactcgaaaaagacattgtaacatatctcagagccttacacccaggtaatgtgagtctcctcttctgccttgctgctgcacacagaagcggaatatgtacaggattgttaatctcatcttggatcttcctgcacttgtgattgtgacacatgcctctgtgtagaacctgagtgagtttactctcctgcctggatttaacccatagatggaatcgtgacatatcactgtaccagaaactaggtgatgtgactctattttcttgcctctgtgtttttatatggggcatcgtgacatatcactgggccttgcacccaagtgatgggagttttctctcctgctttggtgccgtccacaatgaaaattgtgaaatattgctgccctccccactaggttatgttactctcctgcctctgctttgcccacatgggtcactgtgacatattgctgggtctaaaacccaggtaatgtcactctcttgtttgggttctgcctgcaggagtcattgtcacatatctctatgctcatcacccangtaatatgattcccttttactgcttagttccttctcacaaaacaacttgtgacatattgctaggcccaatacacctagctggtgtaactcttcttttcttttctttcctttttttttttttttttgagatggagtctcactctgttgcccaggctggagtgcagcggcatgatttcagctcactacagcctctgcctcctaggttgaagcgattgtcctgacttggcctcccaagtagctgggattaaaggcatgtgccaccacgcccggctaatttttgtatttatagtagagacagggtttcgccatgttggctaggctggtttcgancttctaacctcaggtgatcctcctgcctcggcctcccaaagtactggaattacaggcatgagccactgcacctggcctgattcttctcttctttctaggtttcaactgcagcagagattgtaacaaaccactgggcccagccgcataatgatgttactcttttgccttgggcctgccctcagaaggcactgtcacatattcatgggcccaacgccaaggtgatatgtgtctccagcctggaccctgcccacagggggcattgtgacatatctcttggcccatcagatgtttgattgttatcccctcccctcttctaccctgtgtttgcctataaaagacacagtcatatgttcctgggcccagcacctaggtgttgtcttactggaatgtgtccacatggggattgtgatatgtcacgtggcccagtacttaacttgatgtgactctcctctcatgcctaggccttgtagagaatccccttccccttttgttttcctttttttctttgcagatccaggagataatcaactaagagccaggcacccgtttaggtctaataaacattttacaaactgctctctcttttaattcacctatctgagagattcctctgtacaataaaacttggtctccacaatcctttaccttaacctaaaccttccctttcattgatcccaggtcttcagattccaccacttgtcaaccacaaaatatttaaatttacctggaagccgcccgctttgagttgtcccgcctttctgaaccaaaccaatatattcctgcaaaaccggccatgat

SEQ ID NO: 6012 - DNA, 2658 bp, Homo sapiens
  misc_feature (1530)..(1530): n is a, c, g, or t
  misc_feature (1860)..(1860): n is a, c, g, or t
atcttctctccagcctggctctttcacagggggcattgtgtcatattgctgggccccacacataggttatgtgagtctcctgcctgtgccctacccatgtaggccattgtgacatattgctgggtccaacacccaggtgatgtaactctactgcctcggtcctgcctacagcggacattgtgatataaccctgcacccatcacacaggaggagactgtaacgtatccctaattgagcacccaggtggtgtgacacttctgccctgtccctgccctcagaggagattctgacatatcactgccccaaaatgcagcacctgagtaatttgactctcctgcctggacccagcgtacagatgggattgtgcttcattgctggacccagcatttaggcccactacctatgagattgcatgctcctgcctgggctgtgcccacagtgaccttgtgacatatatctgcatccatgacctaaaagatgtgacacttcttgcctgcaacctgccctgcacaggaaagattgcgacttctccctggaagcagacaccagggatcgtcactcccgtggatgatcaaagctactccgggggctgaggcaggagaatcgcttgaactcgggaagcagaagttgcagtgagccaaggtcgcaccactgcactccagcccaggcgacattgtgagactccatctcaaaaaaaaagaaaaaaagtgtactaacaagacccagcacacagaggagacttttaccattgtatgaacacccatcaaacagtacacatcatcattgtgagttctgaatctcacacatagaggaagtcaaaggtggaaaacttgactctcatatttggatccagtccacaggtgtgattttgacgcacacttctgcccagcacctgagtaatgtgattcttcagaattggcccggcccacaaataggattgtgccacactgctggacccagtgcctaagtgatgtaactctattcttctgccttggtgctactcgaaaaagacattgtaacatatctcagagccttacacccaggtaatgtgagtctcctcttctgccttgctgctgcacacagaagcggaatatgtacaggattgttaatctcatcttggatcttcctgcacttgtgattgtgacacatgcctctgtgtagaacctgagtgagtttactctcctgcctggatttaacccatagatggaatcgtgacatatcactgtaccagaaactaggtgatgtgactctattttcttgcctctgtgtttttatatggggcatcgtgacatatcactgggccttgcacccaagtgatgggagttttctctcctgctttggtgccgtccacaatgaaaattgtgaaatattgctgccctccccactaggttatgttactctcctgcctctgctttgcccacatgggtcactgtgacatattgctgggtctaaaacccaggtaatgtcactctcttgtttgggttctgcctgcaggagtcattgtcacatatctctatgctcatcacccangtaatatgattcccttttactgcttagttccttctcacaaaacaacttgtgacatattgctaggcccaatacacctagctggtgtaactcttcttttcttttctttcctttttttttttttttttgagatggagtctcactctgttgcccaggctggagtgcagcggcatgatttcagctcactacagcctctgcctcctaggttgaagcgattgtcctgacttggcctcccaagtagctgggattaaaggcatgtgccaccacgcccggctaatttttgtatttatagtagagacagggtttcgccatgttggctaggctggtttcgancttctaacctcaggtgatcctcctgcctcggcctcccaaagtactggaattacaggcatgagccactgcacctggcctgattcttctcttctttctaggtttcaactgcagcagagattgtaacaaaccactgggcccagccgcataatgatgttactcttttgccttgggcctgccctcagaaggcactgtcacatattcatgggcccaacgccaaggtgatatgtgtctccagcctggaccctgcccacagggggcattgtgacatatctcttggcccatcagatgtttgattgttatcccctcccctcttctaccctgtgtttgcctataaaagacacagtcatatgttcctgggcccagcacctaggtgttgtcttactggaatgtgtccacatggggattgtgatatgtcacgtggcccagtacttaacttgatgtgactctcctctcatgcctaggccttgtagagaatccccttccccttttgttttcctttttttctttgcagatccaggagataatcaactaagagccaggcacccgtttaggtctaataaacattttacaaactgctctctcttttaattcacctatctgagagattcctctgtacaataaaacttggtctccacaatcctttaccttaacctaaaccttccctttcattgatcccaggtcttcagattccaccacttgtcaaccacaaaatatttaaatttacctggaagccgcccgctttgagttgtcccgcctttctgaaccaaaccaatatattcctgcaaaaccggccatgat

SEQ ID NO: 6013 - DNA, 925 bp, Homo sapiens
gcatccggcatttggcggggcttttgtctctcgctgcagccagagcttgggatcgctttctgctattcaacgtcctccacctctgcccccctctccccccagccggtgacaggctgttgccctgtgatctgcaggtcctgggacgtgcacagacagctaagatgccaggacattccagaaggtgggaaaggcacctgagtaatttgactctcctgcctggacccagcgtacagatgggattgtgcttcattgctggacccagcatttagggatcgtcactcccgtggatgatcaaagctactccgggggctgaggcaggagaatcgcttgaactcgggaagcagaagttgcagtgagccaaggtcgcaccactgcactccagcccaggcgacattgtgagactccatctcaaaaaaaaagaaaaaaagtgtactaacaagacccagcacacagaggagacttttaccattgtatgaacacccatcaaacagtacacatcatcattgtgagttctgaatctcacacatagaggaagtcaaaggtggaaaacttgactctcatatttggatccagtccacaggttctgctagcaaggaagactgagacatattgtggggctctacgccaatgtgacattactgttctgccttggcctgtacctgaaaaggcattgtgacatattgctgggcccagcaacaaggtggcatgagtcttccgtatggaccctgacaacagagcattgtgacatatctttaagagcatcaactatttgatgtgactctccttttctaccaaggctttcctcatatgagagattgtgacacatcttctggcacagaaatcaagtgatgtgtttctcctgcctgagctttgctcatagaaagcattgtgacatatctctggtctcagcacccaggtaatgtga

SEQ ID NO: 6014 - DNA, 479 bp, Homo sapiens
tttaccctgatgtgattattatgtatcgtatgcctgcatgaaaatatctcatatatcccataaacatataacctatcacccataaaaattaaaaagaaaaaagaaaataacttttaaactattactcattgagtagtgtcaacattttttcagcacttgattaacttaatgatgaattgaataactattacagaattaaataataaaacataaactattttctgaattgtatatagatatgtgggcaaaaaaaaaataaaagtaacataggccaggcacagtggatcacacccataatcccaacattttgggaggccaaggcagaaggattgcttgagctcaggagttcaagaccagccctggtaacatagcgagacctcatctctacaacaaatacaaaaattagccaggtgtggtgacacatgcctatagtcccagctacttgggaggctgacgtgggaggatcgtttgagtctggg

SEQ ID NO: 6015 - DNA, 426 bp, Homo sapiens
gtccctcttattcagaatgtcctgtttaggaagaggtgctatggggatataaaaatgattaagacatgaatattgccttcaagaaatttatggtgacttaaaaagagatcgctagggtagaaataactataatttcaggtagaaagtatcaagtgttgtaaaactacaagacagcattctgtgtgtcttcaaaggaggcagaataatttccttcacctgtggctgtgatgggtgattttatgttatagatggcatttgagctaggccttgaagaacagatgaggattagatatacagagataagtacttagaaagttggagaaaggagacttgttcaagcaaaagggagcacatgtgcaaactagagacaataccagagcttatgggaggtcatgaggtcatagtatgtgggaaagggggaaagtg

SEQ ID NO: 6016 - DNA, 298 bp, Homo sapiens
actgagtcaccaacaaattcatgtgacttcacacattttctctctcctttgatacataatgaaagacatcactgctcacttcagatgcagcagaagacacagcatgtagaaatgtcaggtattttcataagcctcagaggactgaataagctttgaattttctgttcagagtggggttagtaattgggaagactcacgtgacttgataaaataatcttacacacttgcttagaagagtggcaaggttcttgtataaattgattatttttgtttgacaaatgttctttacagaaatcac

SEQ ID NO: 6017 - DNA, 1273 bp, Homo sapiens
gttaatatctgtatgagttggacaaaccatataaccatctgttgccttccttgtttcctctttaaagtgtttaatccgcaaaacaaacctgataaagtgagattaaattgaatagtacctggcccaagtaagtgttcttcagtaaatgttagtgattattacacaatggcaaggtggctatccatttgaaaaaaaattaggccgggcgtggtggctcacacctgtaatcccaacactttgggaggccaaggtgggcggatcacctgaggtcaggagcccaagaccagcctgaccaacatggagaaaccccatctctactaaaaatacaaaaaaacaattaggcaggcatggtggcaaatgcctgtattcccagctactctggaggctgaggcaggagaacgcttgaacctgggagatggaggttgtgatgagccgagatcatgccattgcactcattccagcctgggcaacaagagtgaaactctgtctcaaaaaaaaaaaaaaaaaaagagagagagaaaaaaattagtttcctacttcacatgattcataaaaatatttcaagtggatcaaagacctaagttttttttttttttgagacagtttctcactctgtcacccaggctgcagtgcgttggcacaatcatgactcactgcagccttgaccttcccaggccctgatgatccaccccagcctctcaagtagctgggatttttgtatttcttacagagatgggattttgccttattgcccaccttggccttctaaagtattgggattatgggcatgagccactgcacccaccctaaacttatttctaagctatggaagcattaggaaaataaatgtaaagaaaaacgtgtttatcacctttggatagaattcttaagcagaatctaaaaagattgaagagtttgaatatattaaaattatagatttctgtgcaagacactcccctcccctaaaaaacaagtgactgatgagattttccaatacatgtaacaagggtttagagaaatgagtactgatgtcatgctgacagaagtgcaaatatttatggccattttttacagctgttgacaagatccactaaaataaaaattgcagatatcctgtgagcccaattctatttttttggtaactttatagtatcatacaggtgattcactttaaaatacctctgcatggacaacgtgatatgtatgcgaagaaacattcacatgtgtacaaggaagcaggtagaaggatgtttactgcactgctgcttataaa

SEQ ID NO: 6018 - DNA, 438 bp, Homo sapiens
gcaaataagcaagaatctaaatgcattctaaaatacatattattatatatcaatttaagaaactggctgggtacagtggctcacgcctataatccagcactttgggagtctgaggtggaaggatttcttgagcctaggagtttgagacaagccagggcaacacaggaagaccccatctctacaaaaataaaaatggaaattaggcaggcatggtggtgcgtggttgtagtcccagctactcaggaggctaaagtgggaggattgcttgaggccaggaattcaaggcttcagtgagctgtgattacaccactgcattcctaactgggcaacagagggagaccctgtctcaaaaaaaaaagaaagaaagaaagaaagaaagaaactgcaattttttttccagagttattttagaaactttttttttaaaagtaaaagaaa

SEQ ID NO: 6019 - DNA, 350 bp, Homo sapiens
agaatcaccaatatttggggtgtttgtttaattttttagcttcctaaaccctagcacaagcccaatgaaggtgggaagaggaatctgtattttagaagcaaccctttcccctccaaattcttcatagagtgattgtgatgaataaaggttgaggaccatctggtttaggctgttctaggcagggtggagatgtagggaaggacacacaataaccctgttactcggttgtgctgtggttatgtgcctatacactatcagacagactggtcaattttgttccaaatatgttcagtgttaaacagaacccagtattgtaaactgtaattacaaattataaaacttctgtaaac

SEQ ID NO: 6020 - DNA, 473 bp, Homo sapiens
aaatggcctttcctacatttcgagtttctcaccaggcaatgccttgtggaaacccccccaggttacctgtggggacagtgttttattctctctaagggctgtgcagttttccacagtgtgggcataccatggtgtgttcatttcctctctttgtgcttatcttaataccaggatcttttagagacccttacaaagaaaaactagtgaatgaaactgcagaggctcccatttatatcaacagagacagtttctgaaccatcagtaactcacacatcagcccctacttatagtttatgtagtcatctcagaattgggtttcataagctgggtgtggtgtgtgcctataggtagtcccggctactcgggagactgaggcgggaggatcacttgagcctaggaggttgaggctgcagtgagccgtgatcgcaccactacactccagcctgggtgacagagtgagatcctgtctcaaa

SEQ ID NO: 6021 - DNA, 888 bp, Homo sapiens
caaaccaaacaaacaaacaaacaaacaaaacccactaagtatgcattggtctaggactaccatttatgaatatccttagtctttctgtgatgatccttgttgaaaatttagattgatgatgtagtttgtgatgttgatacaagtgtatttgttcacagagatttgagcatattcctttcaacatcaggaataacttttagtttttgtttgattgtaattttttagtctccattctctgtaatgtgctttacgttgaacaaagtgcttttgtagttcttgttattttgaacccataatctgagacctttttttctaagccgtctcgtgccccagcccttacttactgagccctcttattgtatatactgaacgcatttttaaattgaagagatactattctgtgtatctttgcaggcgaatgagtcctaggttggccagtgtctcactagttgagattaaatttttgcttatacttgttgatttgactgccttctgaatagtattaggaacacattgtaaatttgttgttgatggctggctgaagttttccagcacatttcttgaggttgccaagttcttctacaatgactgaatctactcttcattcattctagtcagcagtctcacacttaattccaaggtttacttaagatttttttctgaaaaagcaatgcttgctttccatatttgcatattttttctctgccttaatagcagaaacaatggcttcatcttgcatttgtatcagattctttccattgatatatcttgtccttattagctagttgtttcccagctgggtgcagtggcttatgcctgtaatcccagcactttgggaggtcaaagcgggaggattgcttgagcctaggaattcaagaccagtctggg

SEQ ID NO: 6022 - DNA, 834 bp, Homo sapiens
caaaccaaacaaacaaacaaacaaacaaaacccactaagtatgcattggtctaggactaccatttatgaatatccttagtctttctgtgatgatccttgttgagagatttgagcatattcctttcaacatcaggaataacttttagtttttgtttgattgtaattttttagtctccattctctgtaatgtgctttacgttgaacaaagtgcttttgtagttcttgttattttgaacccataatctgagacctttttttctaagccgtctcgtgccccagcccttacttactgagccctcttattgtatatactgaacgcatttttaaattgaagagatactattctgtgtatctttgcaggcgaatgagtcctaggttggccagtgtctcactagttgagattaaatttttgcttatacttgttgatttgactgccttctgaatagtattaggaacacattgtaaatttgttgttgatggctggctgaagttttccagcacatttcttgaggttgccaagttcttctacaatgactgaatctactcttcattcattctagtcagcagtctcacacttaattccaaggtttacttaagatttttttctgaaaaagcaatgcttgctttccatatttgcatattttttctctgccttaatagcagaaacaatggcttcatcttgcatttgtatcagattctttccattgatatatcttgtccttattagctagttgtttcccagctgggtgcagtggcttatgcctgtaatcccagcactttgggaggtcaaagcgggaggattgcttgagcctaggaattcaagaccagtctggg

SEQ ID NO: 6023 - DNA, 597 bp, Homo sapiens
gcagctaataaagagctgaacttggccactttgttgtgcccaggatacaagctgctgttaatttcagtacctgtttcttctgctgttagaactaggaagaaaggatttagtgaccctctttcaaaaggtggatcacaagcttagaggcattgctggataaattcaacagcaagactttatttcttccccagaggtgacgtctgatggttctgtataaataaagtcacaccacctttcttatgctgaattgatgctgctgacctgctgttagtaggacatgcacttttatggcgtttccaggagtggtgatgtgtgttgctgagctcatctaatctctgctttgagcaaaggcaatcctctatatcatggcagggattagaggtatagcctggggctgcagaatggtgtgatttaaattttcccatgcaggttcaaagcttgtaactttgcctgcgtgtacatccacactgggttccagccacatgaactgggccaccttcatagacctccctggtaaccacagcctgacgtgacaaggaatcacagttttactttctgcttactatccatgttagaaatatctaaggaaattcagga

SEQ ID NO: 6024 - DNA, 440 bp, Homo sapiens
tagggggacagaagttacaatcagagacataaatcaatagacgcaaggtgtacattgattttgcccagaaaggcaggacatctcaaaaggggaagccttgcaagtcaggtggatttaaagatttctgattggcaactggttgaaagggttaaatttgggccgggcacagtggctcacacctgtaatcccagcactttgggaggtcgaggtggggtggatcacgaggtcaagagttcaggaccagcctggccaacgtggtgaaaccctgtctctgctaagaatacaaaaattaggcaggtgtggtggcacatgcgtgtaatcccagctactcaggaggctgaggcaggagaattgcttgaacctgggaggcagaggttgcagtgagccaagattgtaccactgccctccagcctgggcaacagagcaagactctgtctcag

SEQ ID NO: 6025 - DNA, 442 bp, Homo sapiens
agtcccaaccaaagtcatcatgccttccattattcttggtcacgtccaagatggagtccaatctagttatcttttgtacttttatcccttttgtacttgtgcttctctcctaatccaatgacttgtcactgggttccctcccagacttctccactgagcactttgggagggcgaagtgggcagatttcatgagcccaggagtttgaggccagcctgggcaacatggtgaaaccccatatttacaaaaaatacaaaaattagccatatatggttgtgcacgtgtgaggtcccagctacttaggaggttgagctggaaggatcacttgtgcctaggaggttgaagctgcagtgagctgtgattgtgccactgcactccagccttggcgacaggagtaaggccctgtctcaaaacaaaacaaaatcccctgaaacaacagaaaga

SEQ ID NO: 6026 - DNA, 321 bp, Homo sapiens
ttgaattgaattccttggtaggtagctataaacatagcagatacactaaggctttctctatgcaatataaaatgtctctcagagaaattcatggcactaaaagcatatataagaaaagaagaaaattatcggatcaataatctaagctcacattcaagaacctagaaaaagcgaataaaataaacacaaagcaaatgaaggaaatataacaaagggcagaaatcaatgaaagtgaaaaacaaagaatagagaaaattaacaaaactaagagctggttctttgaaaagatcggtaaaactgataaacctctagcaggactga

SEQ ID NO: 6027 - DNA, 381 bp, Homo sapiens
ttttgtaaggcttaatacagtgtgttactctaaattaaaaattcttggactagatacagaaagaactaaccataaaagaaaaaactgggccgggtgcagtggctcatgcctgtaatcccagcactttgggtggccgaggcgggtggatcacaaggtcaggagatcacgaccttcctggctaacacggtggaaccccatcacttctaaaaaaatacaaaaaaattagccgggtgtggtggcgggcgcctgttagtcccagctattggggaggctgaggcaggagaatggcatgaacctgggaggcagagcttgcagtgagctgagatcatgccactgcactccagcctgggcaacagagcgagactccatctcaaaaataaa

SEQ ID NO: 6028 - DNA, 308 bp, Homo sapiens
cagggatttaagattgcctattccattgtaccttttgactggtataagcttgacaagcctttctctcaggtgtctaaatttttgtcatgtgttatttcatagttacatgtttataggcactttatagaccaaaacgataaattatgaactagaacgtgaacacgttgtgaagatatgcagaaaaaaaggaaacatttttagacccagaaaaatatatccctgttccaatctgagttgcattacctagttctgagttctgtatccttctatcagattccattgcaatctgccagtgagttgaacagtta

SEQ ID NO: 6029 - DNA, 662 bp, Homo sapiens
gccctggtacttgcatagtggcaaaatgtcccaagctggaggaaatggataagaattgggtacacatcacccgtactgggaataaacaaatgtgttctgattatttggaaaaagcagacattctaggggtagggagttctaaagccttggtgcacttgaatggataaacttcccaggagcagagttttccaagcatggctccctgtggttcacctctaccaagcttaacctaccttctgcttaggcagagcgaagaggcacctcagcataactcagatcaaaatggaagcatctcatttcttaaaagctgtcaaagaattggtgtgaggtttaaaaacgtctctgagcttgatggaaggaaggtaggcggtgatagttcatgctccctttcctccagacacttctcattttcctttcttaacctgctttgatattatgatttcttttgcttcatttgttaagttctcttacaacacttcttgttcacaagtgagtgaagagctgttctctgcttgtaacgttggaaatgggggagtgtttcagaaatgacacaacaaagcattaagccatgaaacaagaaggggaacttcagacagaattacaacagtcatttgagaatctcactgagagctaataaaagccacacacacacagaaggagtg

SEQ ID NO: 6030 - DNA, 586 bp, Homo sapiens
atggcatgtctctgctccaggatggccagggtctcatttggaatatttgaatgctgggggctagaatcacctgaaggctcattcactcacatctggtgatagattctggctgtcctgagacctaagattgttggctagaacacctacatgtgacctctccaagtggcttaggtttccttaaaatatagaggccaggttacaaaggtaagcactgagagagagagaaagagacaatctgtaccttgtaagtcaatagcatcatggtgccatactccttggttacggcaaccacaagccccacccaggggtgggaaaacaaaccccacccaatagtgggaagagtaccagttattgcaagaagagcatgtggaatgggataaatatactgatggaaccatctttggaaaaatacaatctcctgaagattctttgctttcatgtaagagaaaacccaaacctaaatggctttcaaaaggggcaatttattggctcacgtatgtgaaaactccaggggttgggctgactccaaataaggcttgactgagtctagagctatgtcaccagaacccactttctctttttcatc

SEQ ID NO: 6031 - DNA, 2255 bp, Homo sapiens
gcggcggggagcctcggcggtgaggcgcaaagccgcgggctcgtgggacggccacccctccgcaaaaccgccaatgggcgggcccgggccgccgatcgcccgccgcggcttccggttgcgatgacagtggcgccggaagccggggccggggctgcggggcgagttgtcggccctgggccgggagctggagtcccagactcataggtcccggcccagcccccgaagagccgcctcagccggggggagttgctcggactcaaacgtccagtcctcgtgcgaccgcgctgggtcggaagtgagcaggctgaggccaccatggagcagtgtgcgtgcgtggagagagagctggacaaggtcctgcagaagttcctgacctacgggcagcactgtgagcggagcctggaggagctgctgcactacgtgggccagctgcgggctgagctggccagcgcagccctccaggggacccctctctcagccaccctctctctggtgatgtcacagtgctgccggaagatcaaagatacggtgcagaaactggcttcggaccataaggacattcacagcagtgtatcccgagtgggcaaagccattgacaggaacttcgactctgagatctgtggtgttgtgtcagatgcggtgtgggacgcgcgggaacagcagcagcagatcctgcagatggccatcgtggaacacctgtatcagcagggcatgctcagcgtggccgaggagctgtgccaggaatcaacgctgaatgtggacttggatttcaagcagcctttcctagagttgaatcgaatcctggaagccctgcacgaacaagacctgggtcctgcgttggaatgggccgtctcccacaggcagcgcctgctggaactcaacagctccctggagttcaagctgcaccgactgcacttcatccgcctcttggcaggaggccccgcgaagcagctggaggccctcagctatgctcggcacttccagccctttgctcggctgcaccagcgggagatccaggtgatgatgggcagcctggtgtacctgcggctgggcttggagaagtcaccctactgccacctgctggacagcagccactgggcagagatctgtgagacctttacccgggacgcctgttccctgctggggctttctgtggagtccccccttagcgtcagctttgcctctggctgtgtggcgctgcctgtgttgatgaacatcaaggctgtgattgagcagcggcagtgcactggggtctggaatcacaaggacgagttaccgattgagattgaactaggcatgaagtgctggtaccactccgtgttcgcttgccccatcctccgccagcagacgtcagattccaaccctcccatcaagctcatctgtggccatgttatctcccgagatgcactcaataagctcattaatggaggaaagctgaagtgtccctactgtcccatggagcagaacccggcagatgggaaacgcatcatattctgattcctacctggaaggaattttgttgaaaggggttttcacctgtgagccttggtctgtctcggtagggtggtcaacttcagtggactgtggttggtttcagagcgcctggctgaggagttccactgaggggagcactggagcagccctttggcagaggctgaggagggagatggaccagcccacgcctggcacctggctccatggcataaggaaagggagatgctggcctctgtgctcctgctgtcttttcctgtttctgtttgcgtttgacttagtagcaaccgacagagtggcaagggatttggtcttcagcagtagacatccttccacccctgccctcagccaagtctcttgctgccatgccaatgctatgtccacccttgcccctcggcccaagagtgtccagcggtggcccacctcttcctcccactacagcctcaacagtatgtaccatctcccactgtaaatagtcccagttagaacggaatgccgttgttttataactttgaacaaatgtatttactgcccttctcatttctcctggccaacctttagcctcactgacaaattatgaccacatgtctaccacacacagggactgggcacggcctggtggctgccgcaaacaaaaacatggccagcaggtatccagtgtccaggcaggaagaacacaacttgcatccctgactgcggggagcttagatgtcagaccccgggcaaggtgcttttacatatacccataccagatcttactaact

SEQ ID NO: 6032 - DNA, 1286 bp, Homo sapiens
gcggcggggagcctcggcggtgaggcgcaaagccgcgggctcgtgggacggccacccctccgcaaaaccgccaatgggcgggcccgggccgccgatcgcccgccgcggcttccggttgcgatgacagtggcgccggaagccggggccggggctgcggggcgaggtgagagcgggcgggcttgggagccggcaggtgcgggccgagggcgggcacagcggccggcggagctgaggcgcgcggcggggaaagctcggccggcctcccgggccccagccttctccagaacccctgctacccacgactaagccccgaacaatctgcccttgggcttgttctcttcgcagttgtcggccctgggccgggagctggagtcccagactcataggtcccggcccagcccccgaagagccgcctcagccggggggagttgctcggactcaaacgtccagtcctcgtgcgaccgcgctgggtcggaagtgagcaggctgaggccaccatggagcagtgtgcgtgcgtggagagagagctggacaaggtcctgcagaagttcctgacctacgggcagcactgtgagcggagcctggaggagctgctgcactacgtgggccagctgcgggctgagctggccagcgcagccctccaggggacccctctctcagccaccctctctctggtgatgtcacagtgctgccggaagatcaaagatacggtgcagaaactggcttcggaccataaggacattcacagcagtgtatcccgagtgggcaaagccattgacaggaacttcgactctgagatctgtggtgttgtgtcagatgcggtgtgggacgcgcgggaacagcagcagcagatcctgcagatggccatcgtggaacacctgtatcagcagggcatgctcagcgtggccgaggagctgtgccagggatcaacgctggaattgggggcctggggtttcacgcgcggcctttctcaaagagtgcaaacgagacccgggaaacgccggggcgagaacaacgactggggccctctggcgttggatgtggcgccgcaccaagaggacggcctgtgtggacactacagcggccccgagaggtcagcgtgcacggagaaataaacgcgctttgggcagaggccggcaactgagcgccatatcgggaccaacctcagtggggacaggaaaagactaagaagcggacgcgcagagagacacaactgagcaggacagaatagtctcgtgatgcgcgtgcgtcgtgtgattggagtaaattgtactgagtgcgggagc

SEQ ID NO: 6033 - DNA, 1237 bp, Homo sapiens
  misc_feature (1237)..(1237): n is a, c, g, or t
gcggcggggagcctcggcggtgaggcgcaaagccgcgggctcgtgggacggccacccctccgcaaaaccgccaatgggcgggcccgggccgccgatcgcccgccgcggcttccggttgcgatgacagtggcgccggaagccggggccggggctgcggggcgaggctgaggccaccatggagcagtgtgcgtgcgtggagagagagctggacaaggtcctgcagaagttcctgacctacgggcagcactgtgagcggagcctggaggagctgctgcactacgtgggccagctgcgggctgagctggccagcgcagccctccaggggacccctctctcagccaccctctctctggtgatgtcacagtgctgccggaagatcaaagatacggtgcagaaactggcttcggaccataaggacattcacagcagtgtatcccgagtgggcaaagccattgacaggaacttcgactctgagatctgtggtgttgtgtcagatgcggtgtgggacgcgcgggaacagcagcagcagatcctgcagatggccatcgtggaacacctgtatcagcagggcatgctcagcgtggccgaggagctgtgccaggaatcaacgctgaatgtggacttggatttcaagcagcctttcctagagttgaatcgaatcctggaagccctgcacgaacaagacctgggtcctgcgttggaatgggccgtctcccacaggcagcgcctgctggaactcaacagctccctggagttcaagctgcaccgactgcacttcatccgcctcttggcaggaggccccgcgaagcagctggaggccctcagctatgctcggcacttccagccctttgctcggctgcaccagcgggaaatccaggtgatgatgcgcagctggtggtcctgcggtggctggaaaatcaacctaatgcaactggtgggcaaggcggcacggggcagagattcgggagaacctttaccgggaagccggtcccggcgcggcaactggtgagtccccctaacggagatagacctggagggagggcggcggtgaacacacagggtgcatgagcggcatgccggggtcggccaaggaagagcaggaataacaggaaagagagacacgagtgggcaccgcgagagagaacaccacagacgtaaggaggagcaaaaaggagaacgaacggaaacgcagatacgaaacgagcaataatcaggagcagcgacacggcacaggcgn

SEQ ID NO: 6034 - DNA, 470 bp, Homo sapiens
ttccaaagcggagatgctgactaacgcatgaagcccaatccgtggccatcattaacaacactggagccaggacactgactaacgtctgaaacctgatcggtgacactcattaacaacactggagctggggttacaggctgactggtcattcctctcttgggctcacatcagcggaccctcagagccagcatctccgctttggaaatttccaaagcggagatgctggcctctgtgctcctgctgtcttttcctgtttctgtttgcgtttgacttagtagcaaccgacagagtggcaagggatttggtcttcagcagtagacatccttccacccctgccctcagccaagtctcttgctgccatgccaatgctatgtccacccttgcccctcggcccaagagtgtccagcggtggcccacctcttcctcccactacagcatctccgctttggaaaggtaccgagctgattctc

SEQ ID NO: 6035 - DNA, 571 bp, Homo sapiens
accttatgccggggctgtggagtccccccttagcgtcagctttgcctctggctgtgtggcgctgcctgtgttgatgaacatcaaggctgtgattgagcagcggcagtgcactggggtctggaatcacaaggacgagttaccgattgagattgaactaggcatgaagtgctggtaccactccgtgttcgcacccttgcccctcggcccaagagtgtccagcggtggcccacctcttcctcccactacagcctcaacagtatgtaccatctcccactgtaaatagtcccagttagaacggaatgccgttgttttataactttgaacaaatgtatttactgcccttctcatttctcctggccaacctttagcctcactgacaaattatgaccacatgtctaccacacacagggactgggcacggcctggtggctgccgcaaacaaaaacatggccagcaggtatccagtgtccaggcaggaagaacacaacttgcatccctgactgcggggagcttagatgtcagaccccgggcaaggtgcttttacatatacccataccagatcttactaact

SEQ ID NO: 6036 - DNA, 423 bp, Homo sapiens
ccctactgtactaggaggattgaagaggagtaattttctcgccatgcaactcagtgcgtagcctggggactgtctccactgctacggttgtggggtggggtctgcagtctgcactcgaggtcagcatgtcatactcagcctccccaggactgagatgggaacaagagaggcccaagtggctggcaggagaccaagctcctcaagcaaagcccagctctctggcctgtctttggcgggtgagcttttattatgtgcatagcagagaactttggaaacaccatcttccagtggtgggatctcttctctctctccttgtaggaatcaacgctgaatgtggacttggatttcaagcagcctttcctagagttgaatcgaatccccccacatatcaagcttatcgatacaaacgacctcgagagcgga

SEQ ID NO: 6037 - DNA, 263 bp, Homo sapiens
atgtgtttggtgtatatcttctttttgttttttgtttttttgagacagggtctcactctgttgctcaggctggaatgcatctgcctgccttgacctcccaaaatgctgagattacaggtgtgagccactgctcccagcctatatgcatatacttttaatttacataaatggattctgcctagacctcatttttttccacctcagtgccatgtgtggagcttgtcgatgttgctctgggtatatttgggatgcagtttctaaat

SEQ ID NO: 6038 - DNA, 2142 bp, Homo sapiens
ggctggtactggctggaattttgggcatggggccggggctgcggggcgagttgtcggccctgggccgggagctggagtcccagactcataggtcccggcccagcccccgaagagccgcctcagccggggggagttgctcggactcaaacgtccagtcctcgtgcgaccgcgctgggtcggaagtgagcaggctgaggccaccatggagcagtgtgcgtgcgtggagagagagctggacaaggtcctgcagaagttcctgacctacgggcagcactgtgagcggagcctggaggagctgctgcactacgtgggccagctgcgggctgagctggccagcgcagccctccaggggacccctctctcagccaccctctctctggtgatgtcacagtgctgccggaagatcaaagatacggtgcagaaactggcttcggaccataaggacattcacagcagtgtatcccgagtgggcaaagccattgacaggaacttcgactctgagatctgtggtgttgtgtcagatgcggtgtgggacgcgcgggaacagcagcagcagatcctgcagatggccatcgtggaacacctgtatcagcagggcatgctcagcgtggccgaggagctgtgccaggaatcaacgctgaatgtggacttggatttcaagcagcctttcctagagttgaatcgaatcctggaagccctgcacgaacaagacctgggtcctgcgttggaatgggccgtctcccacaggcagcgcctgctggaactcaacagctccctggagttcaagctgcaccgactgcacttcatccgcctcttggcaggaggccccgcgaagcagctggaggccctcagctatgctcggcacttccagccctttgctcggctgcaccagcgggagatccaggtgatgatgggcagcctggtgtacctgcggctgggcttggagaagtcaccctactgccacctgctggacagcagccactgggcagagatctgtgagacctttacccgggacgcctgttccctgctggggctttctgtggagtccccccttagcgtcagctttgcctctggctgtgtggcgctgcctgtgttgatgaacatcaaggctgtgattgagcagcggcagtgcactggggtctggaatcacaaggacgagttaccgattgagattgaactaggcatgaagtgctggtaccactccgtgttcgcttgccccatcctccgccagcagacgtcagattccaaccctcccatcaagctcatctgtggccatgttatctcccgagatgcactcaataagctcattaatggaggaaagctgaagtgtccctactgtcccatggagcagaacccggcagatgggaaacgcatcatattctgattcctacctggaaggaattttgttgaaaggggttttcacctgtgagccttggtctgtctcggtagggtggtcaacttcagtggactgtggttggtttcagagcgcctggctgaggagttccactgaggggagcactggagcagccctttggcagaggctgaggagggagatggaccagcccacgcctggcacctggctccatggcataaggaaagggagatgctggcctctgtgctcctgctgtcttttcctgtttctgtttgcgtttgacttagtagcaaccgacagagtggcaagggatttggtcttcagcagtagacatccttccacccctgccctcagccaagtctcttgctgccatgccaatgctatgtccacccttgcccctcggcccaagagtgtccagcggtggcccacctcttcctcccactacagcctcaacagtatgtaccatctcccactgtaaatagtcccagttagaacggaatgccgttgttttataactttgaacaaatgtatttactgcccttctcatttctcctggccaacctttagcctcactgacaaattatgaccacatgtctaccacacacagggactgggcacggcctggtggctgccgcaaacaaaaacatggccagcaggtatccagtgtccaggcaggaagaacacaacttgcatccctgactgcggggagcttagatgtcagaccccgggcaaggtgcttttacatatacccataccagatcttactaact

SEQ ID NO: 6039 - DNA, 2148 bp, Homo sapiens
  misc_feature (51)..(51): n is a, c, g, or t
tacgaggctgggtttgaattcggccgaggggaagcggggcggggctgcggngcgagttgtcggccctgggccgggagctggagtcccagactcataggtcccggcccagcccccgaagagccgcctcagccggggggagttgctcggactcaaacgtccagtcctcgtgcgaccgcgctgggtcggaagtgagcaggctgaggccaccatggagcagtgtgcgtgcgtggagagagagctggacaaggtcctgcagaagttcctgacctacgggcagcactgtgagcggagcctggaggagctgctgcactacgtgggccagctgcgggctgagctggccagcgcagccctccaggggacccctctctcagccaccctctctctggtgatgtcacagtgctgccggaagatcaaagatacggtgcagaaactggcttcggaccataaggacattcacagcagtgtatcccgagtgggcaaagccattgacaggaacttcgactctgagatctgtggtgttgtgtcagatgcggtgtgggacgcgcgggaacagcagcagcagatcctgcagatggccatcgtggaacacctgtatcagcagggcatgctcagcgtggccgaggagctgtgccaggaatcaacgctgaatgtggacttggatttcaagcagcctttcctagagttgaatcgaatcctggaagccctgcacgaacaagacctgggtcctgcgttggaatgggccgtctcccacaggcagcgcctgctggaactcaacagctccctggagttcaagctgcaccgactgcacttcatccgcctcttggcaggaggccccgcgaagcagctggaggccctcagctatgctcggcacttccagccctttgctcggctgcaccagcgggagatccaggtgatgatgggcagcctggtgtacctgcggctgggcttggagaagtcaccctactgccacctgctggacagcagccactgggcagagatctgtgagacctttacccgggacgcctgttccctgctggggctttctgtggagtccccccttagcgtcagctttgcctctggctgtgtggcgctgcctgtgttgatgaacatcaaggctgtgattgagcagcggcagtgcactggggtctggaatcacaaggacgagttaccgattgagattgaactaggcatgaagtgctggtaccactccgtgttcgcttgccccatcctccgccagcagacgtcagattccaaccctcccatcaagctcatctgtggccatgttatctcccgagatgcactcaataagctcattaatggaggaaagctgaagtgtccctactgtcccatggagcagaacccggcagatgggaaacgcatcatattctgattcctacctggaaggaattttgttgaaaggggttttcacctgtgagccttggtctgtctcggtagggtggtcaacttcagtggactgtggttggtttcagagcgcctggctgaggagttccactgaggggagcactggagcagccctttggcagaggctgaggagggagatggaccagcccacgcctggcacctggctccatggcataaggaaagggagatgctggcctctgtgctcctgctgtcttttcctgtttctgtttgcgtttgacttagtagcaaccgacagagtggcaagggatttggtcttcagcagtagacatccttccacccctgccctcagccaagtctcttgctgccatgccaatgctatgtccacccttgcccctcggcccaagagtgtccagcggtggcccacctcttcctcccactacagcctcaacagtatgtaccatctcccactgtaaatagtcccagttagaacggaatgccgttgttttataactttgaacaaatgtatttactgcccttctcatttctcctggccaacctttagcctcactgacaaattatgaccacatgtctaccacacacagggactgggcacggcctggtggctgccgcaaacaaaaacatggccagcaggtatccagtgtccaggcaggaagaacacaacttgcatccctgactgcggggagcttagatgtcagaccccgggcaaggtgcttttacatatacccataccagatcttactaact

SEQ ID NO: 6040 - DNA, 2437 bp, Homo sapiens
gcggcggggagcctcggcggtgaggcgcaaagccgcgggctcgtgggacggccacccctccgcaaaaccgccaatgggcgggcccgggccgccgatcgcccgccgcggcttccggttgcgatgacagtggcgccggaagccggggccggggctgcggggcgaggtgagagcgggcgggcttgggagccggcaggtgcgggccgagggcgggcacagcggccggcggagctgaggcgcgcggcggggaaagctcggccggcctcccgggccccagccttctccagaacccctgctacccacgactaagccccgaacaatctgcccttgggcttgttctcttcgcagttgtcggccctgggccgggagctggagtcccagactcataggtcccggcccagcccccgaagagccgcctcagccggggggagttgctcggactcaaacgtccagtcctcgtgcgaccgcgctgggtcggaagtgagcaggctgaggccaccatggagcagtgtgcgtgcgtggagagagagctggacaaggtcctgcagaagttcctgacctacgggcagcactgtgagcggagcctggaggagctgctgcactacgtgggccagctgcgggctgagctggccagcgcagccctccaggggacccctctctcagccaccctctctctggtgatgtcacagtgctgccggaagatcaaagatacggtgcagaaactggcttcggaccataaggacattcacagcagtgtatcccgagtgggcaaagccattgacaggaacttcgactctgagatctgtggtgttgtgtcagatgcggtgtgggacgcgcgggaacagcagcagcagatcctgcagatggccatcgtggaacacctgtatcagcagggcatgctcagcgtggccgaggagctgtgccaggaatcaacgctgaatgtggacttggatttcaagcagcctttcctagagttgaatcgaatcctggaagccctgcacgaacaagacctgggtcctgcgttggaatgggccgtctcccacaggcagcgcctgctggaactcaacagctccctggagttcaagctgcaccgactgcacttcatccgcctcttggcaggaggccccgcgaagcagctggaggccctcagctatgctcggcacttccagccctttgctcggctgcaccagcgggagatccaggtgatgatgggcagcctggtgtacctgcggctgggcttggagaagtcaccctactgccacctgctggacagcagccactgggcagagatctgtgagacctttacccgggacgcctgttccctgctggggctttctgtggagtccccccttagcgtcagctttgcctctggctgtgtggcgctgcctgtgttgatgaacatcaaggctgtgattgagcagcggcagtgcactggggtctggaatcacaaggacgagttaccgattgagattgaactaggcatgaagtgctggtaccactccgtgttcgcttgccccatcctccgccagcagacgtcagattccaaccctcccatcaagctcatctgtggccatgttatctcccgagatgcactcaataagctcattaatggaggaaagctgaagtgtccctactgtcccatggagcagaacccggcagatgggaaacgcatcatattctgattcctacctggaaggaattttgttgaaaggggttttcacctgtgagccttggtctgtctcggtagggtggtcaacttcagtggactgtggttggtttcagagcgcctggctgaggagttccactgaggggagcactggagcagccctttggcagaggctgaggagggagatggaccagcccacgcctggcacctggctccatggcataaggaaagggagatgctggcctctgtgctcctgctgtcttttcctgtttctgtttgcgtttgacttagtagcaaccgacagagtggcaagggatttggtcttcagcagtagacatccttccacccctgccctcagccaagtctcttgctgccatgccaatgctatgtccacccttgcccctcggcccaagagtgtccagcggtggcccacctcttcctcccactacagcctcaacagtatgtaccatctcccactgtaaatagtcccagttagaacggaatgccgttgttttataactttgaacaaatgtatttactgcccttctcatttctcctggccaacctttagcctcactgacaaattatgaccacatgtctaccacacacagggactgggcacggcctggtggctgccgcaaacaaaaacatggccagcaggtatccagtgtccaggcaggaagaacacaacttgcatccctgactgcggggagcttagatgtcagaccccgggcaaggtgcttttacatatacccataccagatcttactaact

SEQ ID NO: 6041 - DNA, 2775 bp, Homo sapiens
gggacatttgcgttgagaccctaattaggaggcaggcttagtgaagatacgggaagagagtggtccaggcagcgggaacagccagtgtgaaggccctagggcagaaatcaactgagagtatagtcaaggaacagaaagcaagctagtgtggctaaagtatggtaagaaagggaaagagtggtaggagatgaggtcggataattggggtttggtcacatagagtctgtaggtcagagagaggaatgtggagtttttttctaagtacagtggaaatcttttggttttaagcagaggagtgacatgtagggtagagagtggatgttggtcaggctggtctcaaactcctgaccttgtgatccgcctgcctcggcctcccaaagtgctgggattacaggcatgagccaccacgcccagccgatgttgtctaatctttgtcaggcaaaagggacctttatgatttgctcaaacttcctttctccttacacaggagccccttgtttcaggatgctaaatactccaggataaacctccatacatgcctttgtggagattttaatatttcactcatgtctcttttctacccactcctacacatttgagctcaggttctccagcgcagttaggaaatggatgtgtcatttaatcagcaaatgtgtgtgtgtgtttttttaaatttgagacggagtttttgctcttgttgcccaggatggagtgcaatggcgtggtcttggctcactgcaacctccacctcctaggttcaagcgattgtcctgcctcagcctcctgagtagctgggattacaggtgcccgccaccacacctcggctgaggccaccatggagcagtgtgcgtgcgtggagagagagctggacaaggtcctgcagaagttcctgacctacgggcagcactgtgagcggagcctggaggagctgctgcactacgtgggccagctgcgggctgagctggccagcgcagccctccaggggacccctctctcagccaccctctctctggtgatgtcacagtgctgccggaagatcaaagatacggtgcagaaactggcttcggaccataaggacattcacagcagtgtatcccgagtgggcaaagccattgacaggaacttcgactctgagatctgtggtgttgtgtcagatgcggtgtgggacgcgcgggaacagcagcagcagatcctgcagatggccatcgtggaacacctgtatcagcagggcatgctcagcgtggccgaggagctgtgccaggaatcaacgctgaatgtggacttggatttcaagcagcctttcctagagttgaatcgaatcctggaagccctgcacgaacaagacctgggtcctgcgttggaatgggccgtctcccacaggcagcgcctgctggaactcaacagctccctggagttcaagctgcaccgactgcacttcatccgcctcttggcaggaggccccgcgaagcagctggaggccctcagctatgctcggcacttccagccctttgctcggctgcaccagcgggagatccaggtgatgatgggcagcctggtgtacctgcggctgggcttggagaagtcaccctactgccacctgctggacagcagccactgggcagagatctgtgagacctttacccgggacgcctgttccctgctggggctttctgtggagtccccccttagcgtcagctttgcctctggctgtgtggcgctgcctgtgttgatgaacatcaaggctgtgattgagcagcggcagtgcactggggtctggaatcacaaggacgagttaccgattgagattgaactaggcatgaagtgctggtaccactccgtgttcgcttgccccatcctccgccagcagacgtcagattccaaccctcccatcaagctcatctgtggccatgttatctcccgagatgcactcaataagctcattaatggaggaaagctgaagtgtccctactgtcccatggagcagaacccggcagatgggaaacgcatcatattctgattcctacctggaaggaattttgttgaaaggggttttcacctgtgagccttggtctgtctcggtagggtggtcaacttcagtggactgtggttggtttcagagcgcctggctgaggagttccactgaggggagcactggagcagccctttggcagaggctgaggagggagatggaccagcccacgcctggcacctggctccatggcataaggaaagggagatgctggcctctgtgctcctgctgtcttttcctgtttctgtttgcgtttgacttagtagcaaccgacagagtggcaagggatttggtcttcagcagtagacatccttccacccctgccctcagccaagtctcttgctgccatgccaatgctatgtccacccttgcccctcggcccaagagtgtccagcggtggcccacctcttcctcccactacagcctcaacagtatgtaccatctcccactgtaaatagtcccagttagaacggaatgccgttgttttataactttgaacaaatgtatttactgcccttctcatttctcctggccaacctttagcctcactgacaaattatgaccacatgtctaccacacacagggactgggcacggcctggtggctgccgcaaacaaaaacatggccagcaggtatccagtgtccaggcaggaagaacacaacttgcatccctgactgcggggagcttagatgtcagaccccgggcaaggtgcttttacatatacccataccagatcttactaact

SEQ ID NO: 6042 - DNA, 2889 bp, Homo sapiens
ggtgaaaccctgtctgtactaaaaaatacaaaaattagctgggcgtggtgtcatgtacctgtaatcccagctatttgggaacttgaggcgggtagattgcttgagtccgggagtttgagaccagtctgggtaatatggtaaccctgtctaccaaaaatacaggtattagccagtctcataactcggtctcaaaataaataaatacatacatacatagatgaaaatttaaaaaataaagtccaactcagcggttttcagcatatttacagagttgtacaatcttcaccactatctaatttcagaacattttcatcacccccaaaagaaacctaacccattgactatctctccatttcctccctctccctagcctctggcaaccactaatctcttttttgtctctatagatttgcctattttggacagttcatatacaaggaatcataccacatgtagccttttgtgtccggcttctttgattaatagaatgttttcaaggctcatctatgctgtagcctgtatcagcacttcattcctttctatggctgaataatagtccactgtagggatgtgccatgtttttccactagctgatggacatttgggttgtttccaccttctggctattataaatattgctgctataaatattcacttacaagtttttgtgtggacatatgtttttatttcttctggtatatccttcggagtggaactgctggatcaggtggtaactctaggtctaacctggcagttaaacagaatcctatgcatgctgtagtccatgagttgaaataaacacttgacccatagtaagtgccagatcatcttcatttcacagcaaccagtaatttcacagatgaggaaatgaaggctcccagaggtgaactggcttttcccatttgagcagttccaagtcagacagttaaaaagtggcaggacctggaagagaagctagttctttcaccctggcattcagggctgcctcctgggctacggggctggcatttagaatagagctaaggtctgctgccaaggcaggtgccccagtctgcctcctctgtgtccttattccactttctctgcagccctccaggggacccctctctcagccaccctctctctggtgatgtcacagtgctgccggaagatcaaagatacggtgcagaaactggcttcggaccataaggacattcacagcagtgtatcccgagtgggcaaagccattgacaggaacttcgactctgagatctgtggtgttgtgtcagatgcggtgtgggacgcgcgggaacagcagcagcagatcctgcagatggccatcgtggaacacctgtatcagcagggcatgctcagcgtggccgaggagctgtgccaggaatcaacgctgaatgtggacttggatttcaagcagcctttcctagagttgaatcgaatcctggaagccctgcacgaacaagacctgggtcctgcgttggaatgggccgtctcccacaggcagcgcctgctggaactcaacagctccctggagttcaagctgcaccgactgcacttcatccgcctcttggcaggaggccccgcgaagcagctggaggccctcagctatgctcggcacttccagccctttgctcggctgcaccagcgggagatccaggtgatgatgggcagcctggtgtacctgcggctgggcttggagaagtcaccctactgccacctgctggacagcagccactgggcagagatctgtgagacctttacccgggacgcctgttccctgctggggctttctgtggagtccccccttagcgtcagctttgcctctggctgtgtggcgctgcctgtgttgatgaacatcaaggctgtgattgagcagcggcagtgcactggggtctggaatcacaaggacgagttaccgattgagattgaactaggcatgaagtgctggtaccactccgtgttcgcttgccccatcctccgccagcagacgtcagattccaaccctcccatcaagctcatctgtggccatgttatctcccgagatgcactcaataagctcattaatggaggaaagctgaagtgtccctactgtcccatggagcagaacccggcagatgggaaacgcatcatattctgattcctacctggaaggaattttgttgaaaggggttttcacctgtgagccttggtctgtctcggtagggtggtcaacttcagtggactgtggttggtttcagagcgcctggctgaggagttccactgaggggagcactggagcagccctttggcagaggctgaggagggagatggaccagcccacgcctggcacctggctccatggcataaggaaagggagatgctggcctctgtgctcctgctgtcttttcctgtttctgtttgcgtttgacttagtagcaaccgacagagtggcaagggatttggtcttcagcagtagacatccttccacccctgccctcagccaagtctcttgctgccatgccaatgctatgtccacccttgcccctcggcccaagagtgtccagcggtggcccacctcttcctcccactacagcctcaacagtatgtaccatctcccactgtaaatagtcccagttagaacggaatgccgttgttttataactttgaacaaatgtatttactgcccttctcatttctcctggccaacctttagcctcactgacaaattatgaccacatgtctaccacacacagggactgggcacggcctggtggctgccgcaaacaaaaacatggccagcaggtatccagtgtccaggcaggaagaacacaacttgcatccctgactgcggggagcttagatgtcagaccccgggcaaggtgcttttacatatacccataccagatcttactaact

SEQ ID NO: 6043 - DNA, 3037 bp, Homo sapiens
attttttgtatttttttagtagagatggggtttcaccgtgttagccaggatggtcttgatctcctgacctcatgatccactcgcctcggcctcccaaagtgttgggattacaggcgtgagccaactccagcctgggtgacagagcaagactctgtatcaaaataaataaataaagtacaactctggatgggcatggtggcttatgtctgtaatcccagcactttgggaacttgaggcgggtagattgcttgagtccgggagtttgagaccagtctgggtaatatggtaaccctgtctaccaaaaatacaggtattagccagtctcataactcggtctcaaaataaataaatacatacatacatagatgaaaatttaaaaaataaagtccaactcagcggttttcagcatatttacagagttgtacaatcttcaccactatctaatttcagaacattttcatcacccccaaaagaaacctaacccattgactatctctccatttcctccctctccctagcctctggcaaccactaatctcttttttgtctctatagatttgcctattttggacagttcatatacaaggaatcataccacatgtagccttttgtgtccggcttctttgattaatagaatgttttcaaggctcatctatgctgtagcctgtatcagcacttcattcctttctatggctgaataatagtccactgtagggatgtgccatgtttttccactagctgatggacatttgggttgtttccaccttctggctattataaatattgctgctataaatattcacttacaagtttttgtgtggacatatgtttttatttcttctggtatatccttcggagtggaactgctggatcaggtggtaactctaggtctaacctggcagttaaacagaatcctatgcatgctgtagtccatgagttgaaataaacacttgacccatagtaagtgccagatcatcttcatttcacagcaaccagtaatttcacagatgaggaaatgaaggctcccagaggtgaactggcttttcccatttgagcagttccaagtcagacagttaaaaagtggcaggacctggaagagaagctagttctttcaccctggcattcagggctgcctcctgggctacggggctggcatttagaatagagctaaggtctgctgccaaggcaggtgccccagtctgcctcctctgtgtccttattccactttctctgcagccctccaggggacccctctctcagccaccctctctctggtgatgtcacagtgctgccggaagatcaaagatacggtgcagaaactggcttcggaccataaggacattcacagcagtgtatcccgagtgggcaaagccattgacaggaacttcgactctgagatctgtggtgttgtgtcagatgcggtgtgggacgcgcgggaacagcagcagcagatcctgcagatggccatcgtggaacacctgtatcagcagggcatgctcagcgtggccgaggagctgtgccaggaatcaacgctgaatgtggacttggatttcaagcagcctttcctagagttgaatcgaatcctggaagccctgcacgaacaagacctgggtcctgcgttggaatgggccgtctcccacaggcagcgcctgctggaactcaacagctccctggagttcaagctgcaccgactgcacttcatccgcctcttggcaggaggccccgcgaagcagctggaggccctcagctatgctcggcacttccagccctttgctcggctgcaccagcgggagatccaggtgatgatgggcagcctggtgtacctgcggctgggcttggagaagtcaccctactgccacctgctggacagcagccactgggcagagatctgtgagacctttacccgggacgcctgttccctgctggggctttctgtggagtccccccttagcgtcagctttgcctctggctgtgtggcgctgcctgtgttgatgaacatcaaggctgtgattgagcagcggcagtgcactggggtctggaatcacaaggacgagttaccgattgagattgaactaggcatgaagtgctggtaccactccgtgttcgcttgccccatcctccgccagcagacgtcagattccaaccctcccatcaagctcatctgtggccatgttatctcccgagatgcactcaataagctcattaatggaggaaagctgaagtgtccctactgtcccatggagcagaacccggcagatgggaaacgcatcatattctgattcctacctggaaggaattttgttgaaaggggttttcacctgtgagccttggtctgtctcggtagggtggtcaacttcagtggactgtggttggtttcagagcgcctggctgaggagttccactgaggggagcactggagcagccctttggcagaggctgaggagggagatggaccagcccacgcctggcacctggctccatggcataaggaaagggagatgctggcctctgtgctcctgctgtcttttcctgtttctgtttgcgtttgacttagtagcaaccgacagagtggcaagggatttggtcttcagcagtagacatccttccacccctgccctcagccaagtctcttgctgccatgccaatgctatgtccacccttgcccctcggcccaagagtgtccagcggtggcccacctcttcctcccactacagcctcaacagtatgtaccatctcccactgtaaatagtcccagttagaacggaatgccgttgttttataactttgaacaaatgtatttactgcccttctcatttctcctggccaacctttagcctcactgacaaattatgaccacatgtctaccacacacagggactgggcacggcctggtggctgccgcaaacaaaaacatggccagcaggtatccagtgtccaggcaggaagaacacaacttgcatccctgactgcggggagcttagatgtcagaccccgggcaaggtgcttttacatatacccataccagatcttactaact

SEQ ID NO: 6044 - DNA, 2579 bp, Homo sapiens
gcggcggggagcctcggcggtgaggcgcaaagccgcgggctcgtgggacggccacccctccgcaaaaccgccaatgggcgggcccgggccgccgatcgcccgccgcggcttccggttgcgatgacagtggcgccggaagccggggccggggctgcggggcgaggtgagagcgggcgggcttgggagccggcaggtgcgggccgagggcgggcacagcggccggcggagctgaggcgcgcggcggggaaagctcggccggcctcccgggccccagccttctccagaacccctgctacccacgactaagccccgaacaatctgcccttgggcttgttctcttcgcagttgtcggccctgggccgggagctggagtcccagactcataggtcccggcccagcccccgaagagccgcctcagccggggggagttgctcggactcaaacgtccagtcctcgtgcgaccgcgctgggtcggaagtgagcagggtctcactctgttgctcaggctggaatgcagtggcataatcatggctgactgcagccttgacctcccgggctcaagcaatcctccgtcccacctcagccttctgaggagctgggaccacaggcgtgtgccaccatgcccaggctgaggccaccatggagcagtgtgcgtgcgtggagagagagctggacaaggtcctgcagaagttcctgacctacgggcagcactgtgagcggagcctggaggagctgctgcactacgtgggccagctgcgggctgagctggccagcgcagccctccaggggacccctctctcagccaccctctctctggtgatgtcacagtgctgccggaagatcaaagatacggtgcagaaactggcttcggaccataaggacattcacagcagtgtatcccgagtgggcaaagccattgacaggaacttcgactctgagatctgtggtgttgtgtcagatgcggtgtgggacgcgcgggaacagcagcagcagatcctgcagatggccatcgtggaacacctgtatcagcagggcatgctcagcgtggccgaggagctgtgccaggaatcaacgctgaatgtggacttggatttcaagcagcctttcctagagttgaatcgaatcctggaagccctgcacgaacaagacctgggtcctgcgttggaatgggccgtctcccacaggcagcgcctgctggaactcaacagctccctggagttcaagctgcaccgactgcacttcatccgcctcttggcaggaggccccgcgaagcagctggaggccctcagctatgctcggcacttccagccctttgctcggctgcaccagcgggagatccaggtgatgatgggcagcctggtgtacctgcggctgggcttggagaagtcaccctactgccacctgctggacagcagccactgggcagagatctgtgagacctttacccgggacgcctgttccctgctggggctttctgtggagtccccccttagcgtcagctttgcctctggctgtgtggcgctgcctgtgttgatgaacatcaaggctgtgattgagcagcggcagtgcactggggtctggaatcacaaggacgagttaccgattgagattgaactaggcatgaagtgctggtaccactccgtgttcgcttgccccatcctccgccagcagacgtcagattccaaccctcccatcaagctcatctgtggccatgttatctcccgagatgcactcaataagctcattaatggaggaaagctgaagtgtccctactgtcccatggagcagaacccggcagatgggaaacgcatcatattctgattcctacctggaaggaattttgttgaaaggggttttcacctgtgagccttggtctgtctcggtagggtggtcaacttcagtggactgtggttggtttcagagcgcctggctgaggagttccactgaggggagcactggagcagccctttggcagaggctgaggagggagatggaccagcccacgcctggcacctggctccatggcataaggaaagggagatgctggcctctgtgctcctgctgtcttttcctgtttctgtttgcgtttgacttagtagcaaccgacagagtggcaagggatttggtcttcagcagtagacatccttccacccctgccctcagccaagtctcttgctgccatgccaatgctatgtccacccttgcccctcggcccaagagtgtccagcggtggcccacctcttcctcccactacagcctcaacagtatgtaccatctcccactgtaaatagtcccagttagaacggaatgccgttgttttataactttgaacaaatgtatttactgcccttctcatttctcctggccaacctttagcctcactgacaaattatgaccacatgtctaccacacacagggactgggcacggcctggtggctgccgcaaacaaaaacatggccagcaggtatccagtgtccaggcaggaagaacacaacttgcatccctgactgcggggagcttagatgtcagaccccgggcaaggtgcttttacatatacccataccagatcttactaact

SEQ ID NO: 6045 - DNA, 2257 bp, Homo sapiens
gcggcggggagcctcggcggtgaggcgcaaagccgcgggctcgtgggacggccacccctccgcaaaaccgccaatgggcgggcccgggccgccgatcgcccgccgcggcttccggttgcgatgacagtggcgccggaagccggggccggggctgcggggcgagggtctcactctgttgctcaggctggaatgcagtggcataatcatggctgactgcagccttgacctcccgggctcaagcaatcctccgtcccacctcagccttctgaggagctgggaccacaggcgtgtgccaccatgcccaggctgaggccaccatggagcagtgtgcgtgcgtggagagagagctggacaaggtcctgcagaagttcctgacctacgggcagcactgtgagcggagcctggaggagctgctgcactacgtgggccagctgcgggctgagctggccagcgcagccctccaggggacccctctctcagccaccctctctctggtgatgtcacagtgctgccggaagatcaaagatacggtgcagaaactggcttcggaccataaggacattcacagcagtgtatcccgagtgggcaaagccattgacaggaacttcgactctgagatctgtggtgttgtgtcagatgcggtgtgggacgcgcgggaacagcagcagcagatcctgcagatggccatcgtggaacacctgtatcagcagggcatgctcagcgtggccgaggagctgtgccaggaatcaacgctgaatgtggacttggatttcaagcagcctttcctagagttgaatcgaatcctggaagccctgcacgaacaagacctgggtcctgcgttggaatgggccgtctcccacaggcagcgcctgctggaactcaacagctccctggagttcaagctgcaccgactgcacttcatccgcctcttggcaggaggccccgcgaagcagctggaggccctcagctatgctcggcacttccagccctttgctcggctgcaccagcgggagatccaggtgatgatgggcagcctggtgtacctgcggctgggcttggagaagtcaccctactgccacctgctggacagcagccactgggcagagatctgtgagacctttacccgggacgcctgttccctgctggggctttctgtggagtccccccttagcgtcagctttgcctctggctgtgtggcgctgcctgtgttgatgaacatcaaggctgtgattgagcagcggcagtgcactggggtctggaatcacaaggacgagttaccgattgagattgaactaggcatgaagtgctggtaccactccgtgttcgcttgccccatcctccgccagcagacgtcagattccaaccctcccatcaagctcatctgtggccatgttatctcccgagatgcactcaataagctcattaatggaggaaagctgaagtgtccctactgtcccatggagcagaacccggcagatgggaaacgcatcatattctgattcctacctggaaggaattttgttgaaaggggttttcacctgtgagccttggtctgtctcggtagggtggtcaacttcagtggactgtggttggtttcagagcgcctggctgaggagttccactgaggggagcactggagcagccctttggcagaggctgaggagggagatggaccagcccacgcctggcacctggctccatggcataaggaaagggagatgctggcctctgtgctcctgctgtcttttcctgtttctgtttgcgtttgacttagtagcaaccgacagagtggcaagggatttggtcttcagcagtagacatccttccacccctgccctcagccaagtctcttgctgccatgccaatgctatgtccacccttgcccctcggcccaagagtgtccagcggtggcccacctcttcctcccactacagcctcaacagtatgtaccatctcccactgtaaatagtcccagttagaacggaatgccgttgttttataactttgaacaaatgtatttactgcccttctcatttctcctggccaacctttagcctcactgacaaattatgaccacatgtctaccacacacagggactgggcacggcctggtggctgccgcaaacaaaaacatggccagcaggtatccagtgtccaggcaggaagaacacaacttgcatccctgactgcggggagcttagatgtcagaccccgggcaaggtgcttttacatatacccataccagatcttactaact

SEQ ID NO: 6046 - DNA, 2115 bp, Homo sapiens
gcggcggggagcctcggcggtgaggcgcaaagccgcgggctcgtgggacggccacccctccgcaaaaccgccaatgggcgggcccgggccgccgatcgcccgccgcggcttccggttgcgatgacagtggcgccggaagccggggccggggctgcggggcgaggctgaggccaccatggagcagtgtgcgtgcgtggagagagagctggacaaggtcctgcagaagttcctgacctacgggcagcactgtgagcggagcctggaggagctgctgcactacgtgggccagctgcgggctgagctggccagcgcagccctccaggggacccctctctcagccaccctctctctggtgatgtcacagtgctgccggaagatcaaagatacggtgcagaaactggcttcggaccataaggacattcacagcagtgtatcccgagtgggcaaagccattgacaggaacttcgactctgagatctgtggtgttgtgtcagatgcggtgtgggacgcgcgggaacagcagcagcagatcctgcagatggccatcgtggaacacctgtatcagcagggcatgctcagcgtggccgaggagctgtgccaggaatcaacgctgaatgtggacttggatttcaagcagcctttcctagagttgaatcgaatcctggaagccctgcacgaacaagacctgggtcctgcgttggaatgggccgtctcccacaggcagcgcctgctggaactcaacagctccctggagttcaagctgcaccgactgcacttcatccgcctcttggcaggaggccccgcgaagcagctggaggccctcagctatgctcggcacttccagccctttgctcggctgcaccagcgggagatccaggtgatgatgggcagcctggtgtacctgcggctgggcttggagaagtcaccctactgccacctgctggacagcagccactgggcagagatctgtgagacctttacccgggacgcctgttccctgctggggctttctgtggagtccccccttagcgtcagctttgcctctggctgtgtggcgctgcctgtgttgatgaacatcaaggctgtgattgagcagcggcagtgcactggggtctggaatcacaaggacgagttaccgattgagattgaactaggcatgaagtgctggtaccactccgtgttcgcttgccccatcctccgccagcagacgtcagattccaaccctcccatcaagctcatctgtggccatgttatctcccgagatgcactcaataagctcattaatggaggaaagctgaagtgtccctactgtcccatggagcagaacccggcagatgggaaacgcatcatattctgattcctacctggaaggaattttgttgaaaggggttttcacctgtgagccttggtctgtctcggtagggtggtcaacttcagtggactgtggttggtttcagagcgcctggctgaggagttccactgaggggagcactggagcagccctttggcagaggctgaggagggagatggaccagcccacgcctggcacctggctccatggcataaggaaagggagatgctggcctctgtgctcctgctgtcttttcctgtttctgtttgcgtttgacttagtagcaaccgacagagtggcaagggatttggtcttcagcagtagacatccttccacccctgccctcagccaagtctcttgctgccatgccaatgctatgtccacccttgcccctcggcccaagagtgtccagcggtggcccacctcttcctcccactacagcctcaacagtatgtaccatctcccactgtaaatagtcccagttagaacggaatgccgttgttttataactttgaacaaatgtatttactgcccttctcatttctcctggccaacctttagcctcactgacaaattatgaccacatgtctaccacacacagggactgggcacggcctggtggctgccgcaaacaaaaacatggccagcaggtatccagtgtccaggcaggaagaacacaacttgcatccctgactgcggggagcttagatgtcagaccccgggcaaggtgcttttacatatacccataccagatcttactaact

SEQ ID NO: 6047 - DNA, 2372 bp, Homo sapiens
gcggcggggagcctcggcggtgaggcgcaaagccgcgggctcgtgggacggccacccctccgcaaaaccgccaatgggcgggcccgggccgccgatcgcccgccgcggcttccggttgcgatgacagtggcgccggaagccggggccggggctgcggggcgagttgtcggccctgggccgggagctggagtcccagactcataggtcccggcccagcccccgaagagccgcctcagccggggggagttgctcggactcaaacgtccagtcctcgtgcgaccgcgctgggtcggaagtgagcagatggagtgcaatggcgtggtcttggctcactgcaacctccacctcctaggttcaagcgattgtcctgcctcagcctcctgagtagctgggattacaggtgcccgccaccacacctcggctgaggccaccatggagcagtgtgcgtgcgtggagagagagctggacaaggtcctgcagaagttcctgacctacgggcagcactgtgagcggagcctggaggagctgctgcactacgtgggccagctgcgggctgagctggccagcgcagccctccaggggacccctctctcagccaccctctctctggtgatgtcacagtgctgccggaagatcaaagatacggtgcagaaactggcttcggaccataaggacattcacagcagtgtatcccgagtgggcaaagccattgacaggaacttcgactctgagatctgtggtgttgtgtcagatgcggtgtgggacgcgcgggaacagcagcagcagatcctgcagatggccatcgtggaacacctgtatcagcagggcatgctcagcgtggccgaggagctgtgccaggaatcaacgctgaatgtggacttggatttcaagcagcctttcctagagttgaatcgaatcctggaagccctgcacgaacaagacctgggtcctgcgttggaatgggccgtctcccacaggcagcgcctgctggaactcaacagctccctggagttcaagctgcaccgactgcacttcatccgcctcttggcaggaggccccgcgaagcagctggaggccctcagctatgctcggcacttccagccctttgctcggctgcaccagcgggagatccaggtgatgatgggcagcctggtgtacctgcggctgggcttggagaagtcaccctactgccacctgctggacagcagccactgggcagagatctgtgagacctttacccgggacgcctgttccctgctggggctttctgtggagtccccccttagcgtcagctttgcctctggctgtgtggcgctgcctgtgttgatgaacatcaaggctgtgattgagcagcggcagtgcactggggtctggaatcacaaggacgagttaccgattgagattgaactaggcatgaagtgctggtaccactccgtgttcgcttgccccatcctccgccagcagacgtcagattccaaccctcccatcaagctcatctgtggccatgttatctcccgagatgcactcaataagctcattaatggaggaaagctgaagtgtccctactgtcccatggagcagaacccggcagatgggaaacgcatcatattctgattcctacctggaaggaattttgttgaaaggggttttcacctgtgagccttggtctgtctcggtagggtggtcaacttcagtggactgtggttggtttcagagcgcctggctgaggagttccactgaggggagcactggagcagccctttggcagaggctgaggagggagatggaccagcccacgcctggcacctggctccatggcataaggaaagggagatgctggcctctgtgctcctgctgtcttttcctgtttctgtttgcgtttgacttagtagcaaccgacagagtggcaagggatttggtcttcagcagtagacatccttccacccctgccctcagccaagtctcttgctgccatgccaatgctatgtccacccttgcccctcggcccaagagtgtccagcggtggcccacctcttcctcccactacagcctcaacagtatgtaccatctcccactgtaaatagtcccagttagaacggaatgccgttgttttataactttgaacaaatgtatttactgcccttctcatttctcctggccaacctttagcctcactgacaaattatgaccacatgtctaccacacacagggactgggcacggcctggtggctgccgcaaacaaaaacatggccagcaggtatccagtgtccaggcaggaagaacacaacttgcatccctgactgcggggagcttagatgtcagaccccgggcaaggtgcttttacatatacccataccagatcttactaact

SEQ ID NO: 6048 - DNA, 2397 bp, Homo sapiens
gcggcggggagcctcggcggtgaggcgcaaagccgcgggctcgtgggacggccacccctccgcaaaaccgccaatgggcgggcccgggccgccgatcgcccgccgcggcttccggttgcgatgacagtggcgccggaagccggggccggggctgcggggcgagttgtcggccctgggccgggagctggagtcccagactcataggtcccggcccagcccccgaagagccgcctcagccggggggagttgctcggactcaaacgtccagtcctcgtgcgaccgcgctgggtcggaagtgagcagggtctcactctgttgctcaggctggaatgcagtggcataatcatggctgactgcagccttgacctcccgggctcaagcaatcctccgtcccacctcagccttctgaggagctgggaccacaggcgtgtgccaccatgcccaggctgaggccaccatggagcagtgtgcgtgcgtggagagagagctggacaaggtcctgcagaagttcctgacctacgggcagcactgtgagcggagcctggaggagctgctgcactacgtgggccagctgcgggctgagctggccagcgcagccctccaggggacccctctctcagccaccctctctctggtgatgtcacagtgctgccggaagatcaaagatacggtgcagaaactggcttcggaccataaggacattcacagcagtgtatcccgagtgggcaaagccattgacaggaacttcgactctgagatctgtggtgttgtgtcagatgcggtgtgggacgcgcgggaacagcagcagcagatcctgcagatggccatcgtggaacacctgtatcagcagggcatgctcagcgtggccgaggagctgtgccaggaatcaacgctgaatgtggacttggatttcaagcagcctttcctagagttgaatcgaatcctggaagccctgcacgaacaagacctgggtcctgcgttggaatgggccgtctcccacaggcagcgcctgctggaactcaacagctccctggagttcaagctgcaccgactgcacttcatccgcctcttggcaggaggccccgcgaagcagctggaggccctcagctatgctcggcacttccagccctttgctcggctgcaccagcgggagatccaggtgatgatgggcagcctggtgtacctgcggctgggcttggagaagtcaccctactgccacctgctggacagcagccactgggcagagatctgtgagacctttacccgggacgcctgttccctgctggggctttctgtggagtccccccttagcgtcagctttgcctctggctgtgtggcgctgcctgtgttgatgaacatcaaggctgtgattgagcagcggcagtgcactggggtctggaatcacaaggacgagttaccgattgagattgaactaggcatgaagtgctggtaccactccgtgttcgcttgccccatcctccgccagcagacgtcagattccaaccctcccatcaagctcatctgtggccatgttatctcccgagatgcactcaataagctcattaatggaggaaagctgaagtgtccctactgtcccatggagcagaacccggcagatgggaaacgcatcatattctgattcctacctggaaggaattttgttgaaaggggttttcacctgtgagccttggtctgtctcggtagggtggtcaacttcagtggactgtggttggtttcagagcgcctggctgaggagttccactgaggggagcactggagcagccctttggcagaggctgaggagggagatggaccagcccacgcctggcacctggctccatggcataaggaaagggagatgctggcctctgtgctcctgctgtcttttcctgtttctgtttgcgtttgacttagtagcaaccgacagagtggcaagggatttggtcttcagcagtagacatccttccacccctgccctcagccaagtctcttgctgccatgccaatgctatgtccacccttgcccctcggcccaagagtgtccagcggtggcccacctcttcctcccactacagcctcaacagtatgtaccatctcccactgtaaatagtcccagttagaacggaatgccgttgttttataactttgaacaaatgtatttactgcccttctcatttctcctggccaacctttagcctcactgacaaattatgaccacatgtctaccacacacagggactgggcacggcctggtggctgccgcaaacaaaaacatggccagcaggtatccagtgtccaggcaggaagaacacaacttgcatccctgactgcggggagcttagatgtcagaccccgggcaaggtgcttttacatatacccataccagatcttactaact

SEQ ID NO: 6049 - DNA, 2280 bp, Homo sapiens
ggctggtactggctggaattttgggcatggggccggggctgcggggcgagttgtcggccctgggccgggagctggagtcccagactcataggtcccggcccagcccccgaagagccgcctcagccggggggagttgctcggactcaaacgtccagtcctcgtgcgaccgcgctgggtcggaagtgagcaggctgaggccaccatggagcagtgtgcgtgcgtggagagagagctggacaaggtcctgcagaagttcctgacctacgggcagcactgtgagcggagcctggaggagctgctgcactacgtgggccagctgcgggctgagctggccagcgcaggtgggtggccacccttgcaagtgccctgcgacagcctccctgaggacatgggagacccgaagctactgagtgacagggttccggaaggacgatgatgaggatgttggtacctgcatctgtaggcctccttgaaaccggccctccaggggacccctctctcagccaccctctctctggtgatgtcacagtgctgccggaagatcaaagatacggtgcagaaactggcttcggaccataaggacattcacagcagtgtatcccgagtgggcaaagccattgacaggaacttcgactctgagatctgtggtgttgtgtcagatgcggtgtgggacgcgcgggaacagcagcagcagatcctgcagatggccatcgtggaacacctgtatcagcagggcatgctcagcgtggccgaggagctgtgccaggaatcaacgctgaatgtggacttggatttcaagcagcctttcctagagttgaatcgaatcctggaagccctgcacgaacaagacctgggtcctgcgttggaatgggccgtctcccacaggcagcgcctgctggaactcaacagctccctggagttcaagctgcaccgactgcacttcatccgcctcttggcaggaggccccgcgaagcagctggaggccctcagctatgctcggcacttccagccctttgctcggctgcaccagcgggagatccaggtgatgatgggcagcctggtgtacctgcggctgggcttggagaagtcaccctactgccacctgctggacagcagccactgggcagagatctgtgagacctttacccgggacgcctgttccctgctggggctttctgtggagtccccccttagcgtcagctttgcctctggctgtgtggcgctgcctgtgttgatgaacatcaaggctgtgattgagcagcggcagtgcactggggtctggaatcacaaggacgagttaccgattgagattgaactaggcatgaagtgctggtaccactccgtgttcgcttgccccatcctccgccagcagacgtcagattccaaccctcccatcaagctcatctgtggccatgttatctcccgagatgcactcaataagctcattaatggaggaaagctgaagtgtccctactgtcccatggagcagaacccggcagatgggaaacgcatcatattctgattcctacctggaaggaattttgttgaaaggggttttcacctgtgagccttggtctgtctcggtagggtggtcaacttcagtggactgtggttggtttcagagcgcctggctgaggagttccactgaggggagcactggagcagccctttggcagaggctgaggagggagatggaccagcccacgcctggcacctggctccatggcataaggaaagggagatgctggcctctgtgctcctgctgtcttttcctgtttctgtttgcgtttgacttagtagcaaccgacagagtggcaagggatttggtcttcagcagtagacatccttccacccctgccctcagccaagtctcttgctgccatgccaatgctatgtccacccttgcccctcggcccaagagtgtccagcggtggcccacctcttcctcccactacagcctcaacagtatgtaccatctcccactgtaaatagtcccagttagaacggaatgccgttgttttataactttgaacaaatgtatttactgcccttctcatttctcctggccaacctttagcctcactgacaaattatgaccacatgtctaccacacacagggactgggcacggcctggtggctgccgcaaacaaaaacatggccagcaggtatccagtgtccaggcaggaagaacacaacttgcatccctgactgcggggagcttagatgtcagaccccgggcaaggtgcttttacatatacccataccagatcttactaact

SEQ ID NO: 6050 - DNA, 1854 bp, Homo sapiens
ggctggtactggctggaattttgggcatggggccggggctgcggggcgagttgtcggccctgggccgggagctggagtcccagactcataggtcccggcccagcccccgaagagccgcctcagccggggggagttgctcggactcaaacgtccagtcctcgtgcgaccgcgctgggtcggaagtgagcaggctgaggccaccatggagcagtgtgcgtgcgtggagagagagctggacaaggtcctgcagaagttcctgacctacgggcagcactgtgagcggagcctggaggagctgctgcactacgtgggccagctgcgggctgagctggccagcgcagccctccaggggacccctctctcagccaccctctctctggtgatgtcacagtgctgccggaagatcaaagatacggtgcagaaactggcttcggaccataaggacattcacagcagtgtatcccgagtgggcaaagccattgacaggaacttcgactctgagatctgtggtgttgtgtcagatgcggtgtgggacgcgcgggaacagcagcagcagatcctgcagatggccatcgtggaacacctgtatcagcagggcatgctcagcgtggccgaggagctgtgccaggaatcaacgctgaatgtggacttggatttcaagcagcctttcctagagttgaatcgaatcctggaagccctgcacgaacaagacctgggtcctgcgttggaatgggccgtctcccacaggcagcgcctgctggaactcaacagctccctggagttcaagctgcaccgactgcacttcatccgcctcttggcaggaggccccgcgaagcagctggaggccctcagctatgctcggcacttccagccctttgctcggctgcaccagcgggagatccaggtgatgatgggcagcctggtgtacctgcggctgggcttggagaagtcaccctactgccacctgctggacagcagccactgggcagagatctgtgagacctttacccgggacgcctgttccctgctggggctttctgtggagtccccccttagcgtcagctttgcctctggctgtgtggcgctgcctgtgttgatgaacatcaaggctgtgattgagcagcggcagtgcactggggtctggaatcacaaggacgagttaccgattgagattgaactaggcatgaagtgctggtaccactccgtgttcgcttgccccatcctccgccagcagacgtcagattccaaccctcccatcaagctcatctgtggccatgttatctcccgagatgcactcaataagctcattaatggaggaaagctgaagtgtccctactgtcccatggagcagaacccggcagatgggaaacgcatcatattctgattcctacctggaaggaattttgttgaaaggggttttcacctgtgagccttggtctgtctcggtagggtggtcaacttcagtggactgtggttggtttcagagcgcctggctgaggagttccactgaggggagcactggagcagccctttggcagaggctgaggagggagatggaccagcccacgcctggcacctggctccatggcataaggaaagggagatgctggcctctgtgctcctgctgtcttttcctgtttctgtttgcgtttgacttagtagcaaccgacagagtggcaagggatttggtcttcagcagtagacatccttccacccctgccctcagccaagtctcttgctgccatgccaatgctatgtccacccttgcccctcggcccaagagtgtccagcggtggcccacctcttcctcccactacagcatctccgctttggaaaggtaccgagctgattctc

SEQ ID NO: 6051 - DNA, 2060 bp, Homo sapiens
ggctggtactggctggaattttgggcatggggccggggctgcggggcgagttgtcggccctgggccgggagctggagtcccagactcataggtcccggcccagcccccgaagagccgcctcagccggggggagttgctcggactcaaacgtccagtcctcgtgcgaccgcgctgggtcggaagtgagcaggctgaggccaccatggagcagtgtgcgtgcgtggagagagagctggacaaggtcctgcagaagttcctgacctacgggcagcactgtgagcggagcctggaggagctgctgcactacgtgggccagctgcgggctgagctggccagcgcagccctccaggggacccctctctcagccaccctctctctggtgatgtcacagtgctgccggaagatcaaagatacggtgcagaaactggcttcggaccataaggacattcacagcagtgtatcccgagtgggcaaagccattgacaggaacttcgactctgagatctgtggtgttgtgtcagatgcggtgtgggacgcgcgggaacagcagcagcagatcctgcagatggccatcgtggaacacctgtatcagcagggcatgctcagcgtggccgaggagctgtgccaggaatcaacgctgaatgtggacttggatttcaagcagcctttcctagagttgaatcgaatcctggaagccctgcacgaacaagacctgggtcctgcgttggaatgggccgtctcccacaggcagcgcctgctggaactcaacagctccctggagttcaagctgcaccgactgcacttcatccgcctcttggcaggaggccccgcgaagcagctggaggccctcagctatgctcggcacttccagccctttgctcggctgcaccagcgggagatccaggtgatgatgggcagcctggtgtacctgcggctgggcttggagaagtcaccctactgccacctgctggacagcagccactgggcagagatctgtgagacctttacccgggacgcctgttccctgctggggctttctgtggagtccccccttagcgtcagctttgcctctggctgtgtggcgctgcctgtgttgatgaacatcaaggctgtgattgagcagcggcagtgcactggggtctggaatcacaaggacgagttaccgattgagattgaactaggcatgaagtgctggtaccactccgtgttcgcttgccccatcctccgccagcagacgtcagattccaaccctcccatcaagctcatctgtggccatgttatctcccgagatgcactcaataagctcattaatggaggaaagctgaagtgtccctactgtcccatggagcagaacccggcagatgggaaacgcatcatattctgattcctacctggaaggaattttgttgaaaggggttttcacctgtgagccttggtctgtctcggtagggtggtcaacttcagtggactgtggttggtttcagagcgcctggctgaggagttccactgaggggagcactggagcagccctttggcagaggctgaggagggagatggaccagcccacgcctggcacctggctccatggcataaggaaagggagatgctggcctctgtgctcctgctgtcttttcctgtttctgtttgcgtttgacttagtagcaaccgacagagtggcaagggatttggtcttcagcagtagacatccttccaccccacctcttcctcccactacagcctcaacagtatgtaccatctcccactgtaaatagtcccagttagaacggaatgccgttgttttataactttgaacaaatgtatttactgcccttctcatttctcctggccaacctttagcctcactgacaaattatgaccacatgtctaccacacacagggactgggcacggcctggtggctgccgcaaacaaaaacatggccagcaggtatccagtgtccaggcaggaagaacacaacttgcatccctgactgcggggagcttagatgtcagaccccgggcaaggtgcttttacatatacccataccagatcttactaact

SEQ ID NO: 6052 - DNA, 2103 bp, Homo sapiens
ggctggtactggctggaattttgggcatggggccggggctgcggggcgagttgtcggccctgggccgggagctggagtcccagactcataggtcccggcccagcccccgaagagccgcctcagccggggggagttgctcggactcaaacgtccagtcctcgtgcgaccgcgctgggtcggaagtgagcaggctgaggccaccatggagcagtgtgcgtgcgtggagagagagctggacaaggtcctgcagaagttcctgacctacgggcagcactgtgagcggagcctggaggagctgctgcactacgtgggccagctgcgggctgagctggccagcgcagccctccaggggacccctctctcagccaccctctctctggtgatgtcacagtgctgccggaagatcaaagatacggtgcagaaactggcttcggaccataaggacattcacagcagtgtatcccgagtgggcaaagccattgacaggaacttcgactctgagatctgtggtgttgtgtcagatgcggtgtgggacgcgcgggaacagcagcagcagatcctgcagatggccatcgtggaacacctgtatcagcagggcatgctcagcgtggccgaggagctgtgccaggaatcaacgctgaatgtggacttggatttcaagcagcctttcctagagttgaatcgaatcctggaagccctgcacgaacaagacctgggtcctgcgttggaatgggccgtctcccacaggcagcgcctgctggaactcaacagctccctggagttcaagctgcaccgactgcacttcatccgcctcttggcaggaggccccgcgaagcagctggaggccctcagctatgctcggcacttccagccctttgctcggctgcaccagcgggagatccaggtgatgatgggcagcctggtgtacctgcggctgggcttggagaagtcaccctactgccacctgctggacagcagccactgggcagagatctgtgagacctttacccgggacgcctgttccctgctggggctttctgtggagtccccccttagcgtcagctttgcctctggctgtgtggcgctgcctgtgttgatgaacatcaaggctgtgattgagcagcggcagtgcactggggtctggaatcacaaggacgagttaccgattgagattgaactaggcatgaagtgctggtaccactccgtgttcgcttgccccatcctccgccagcagacgtcagattccaaccctcccatcaagctcatctgtggccatgttatctcccgagatgcactcaataagctcattaatggaggaaagctgaagtgtccctactgtcccatggagcagaacccggcagatgggaaacgcatcatattctgattcctacctggaaggaattttgttgaaaggggttttcacctgtgagccttggtctgtctcggtagggtggtcaacttcagtggactgtggttggtttcagagcgcctggctgaggagttccactgaggggagcactggagcagccctttggcagaggctgaggagggagatggaccagcccacgcctggcacctggctccatggcataaggaaagggagatgctggcctctgtgctcctgctgtcttttcctgtttctgtttgcgtttgacttagtagcaaccgacagagtggcaagggatttggtcttcagcagtagacatccttccacccctgccctcagccaagtctcttgctgccatgccaatgctatgtccacctcttcctcccactacagcctcaacagtatgtaccatctcccactgtaaatagtcccagttagaacggaatgccgttgttttataactttgaacaaatgtatttactgcccttctcatttctcctggccaacctttagcctcactgacaaattatgaccacatgtctaccacacacagggactgggcacggcctggtggctgccgcaaacaaaaacatggccagcaggtatccagtgtccaggcaggaagaacacaacttgcatccctgactgcggggagcttagatgtcagaccccgggcaaggtgcttttacatatacccataccagatcttactaact

SEQ ID NO: 6053 - DNA, 2469 bp, Homo sapiens
gcggcggggagcctcggcggtgaggcgcaaagccgcgggctcgtgggacggccacccctccgcaaaaccgccaatgggcgggcccgggccgccgatcgcccgccgcggcttccggttgcgatgacagtggcgccggaagccggggccggggctgcggggcgagttgtcggccctgggccgggagctggagtcccagactcataggtcccggcccagcccccgaagagccgcctcagccggggggagttgctcggactcaaacgtccagtcctcgtgcgaccgcgctgggtcggaagtgagcaggctgaggccaccatggagcagtgtgcgtgcgtggagagagagctggacaaggtcctgcagaagttcctgacctacgggcagcactgtgagcggagcctggaggagctgctgcactacgtgggccagctgcgggctgagctggccagcgcagccctccaggggacccctctctcagccaccctctctctggtgatgtcacagtgctgccggaagatcaaagatacggtgcagaaactggcttcggaccataaggacattcacagcagtgtatcccgagtgggcaaagccattgacaggaacttcgactctgagatctgtggtgttgtgtcagatgcggtgtgggacgcgcgggaacagcagcagcagatcctgcagatggccatcgtggaacacctgtatcagcagggcatgctcagcgtggccgaggagctgtgccaggaatcaacgctgaatgtggacttggatttcaagcagcctttcctagagttgaatcgaatcctggaagccctgcacgaacaagacctgggtcctgcgttggagtaaggaggcccttgggtgggccagcagcactctgcttcgacctctcagggcacagggcttgactgtggtcttcatttcacccagatgtacttgacttgcctgcagccctgtctcaagagcctcacacaggcttttggggccctcctctcaggtgctggctctcaggtcctagcccccaccagctctacactaaactggcccctttcttcccagatgggccgtctcccacaggcagcgcctgctggaactcaacagctccctggagttcaagctgcaccgactgcacttcatccgcctcttggcaggaggccccgcgaagcagctggaggccctcagctatgctcggcacttccagccctttgctcggctgcaccagcgggagatccaggtgatgatgggcagcctggtgtacctgcggctgggcttggagaagtcaccctactgccacctgctggacagcagccactgggcagagatctgtgagacctttacccgggacgcctgttccctgctggggctttctgtggagtccccccttagcgtcagctttgcctctggctgtgtggcgctgcctgtgttgatgaacatcaaggctgtgattgagcagcggcagtgcactggggtctggaatcacaaggacgagttaccgattgagattgaactaggcatgaagtgctggtaccactccgtgttcgcttgccccatcctccgccagcagacgtcagattccaaccctcccatcaagctcatctgtggccatgttatctcccgagatgcactcaataagctcattaatggaggaaagctgaagtgtccctactgtcccatggagcagaacccggcagatgggaaacgcatcatattctgattcctacctggaaggaattttgttgaaaggggttttcacctgtgagccttggtctgtctcggtagggtggtcaacttcagtggactgtggttggtttcagagcgcctggctgaggagttccactgaggggagcactggagcagccctttggcagaggctgaggagggagatggaccagcccacgcctggcacctggctccatggcataaggaaagggagatgctggcctctgtgctcctgctgtcttttcctgtttctgtttgcgtttgacttagtagcaaccgacagagtggcaagggatttggtcttcagcagtagacatccttccacccctgccctcagccaagtctcttgctgccatgccaatgctatgtccacccttgcccctcggcccaagagtgtccagcggtggcccacctcttcctcccactacagcctcaacagtatgtaccatctcccactgtaaatagtcccagttagaacggaatgccgttgttttataactttgaacaaatgtatttactgcccttctcatttctcctggccaacctttagcctcactgacaaattatgaccacatgtctaccacacacagggactgggcacggcctggtggctgccgcaaacaaaaacatggccagcaggtatccagtgtccaggcaggaagaacacaacttgcatccctgactgcggggagcttagatgtcagaccccgggcaaggtgcttttacatatacccataccagatcttactaact

SEQ ID NO: 6054 - DNA, 1773 bp, Homo sapiens
cacgtggccggctccaggcgtggggtgggagcaccctgaagctgggatgtacaaggactcgaaggagagccagcaagagtgcccgcatcaccaggccctgtctctcctccttcgtcagaacttcgactctgagatctgtggtgttgtgtcagatgcggtgtgggacgcgcgggaacagcagcagcagatcctgcagatggccatcgtggaacacctgtatcagcagggcatgctcagcgtggccgaggagctgtgccaggaatcaacgctgaatgtggacttggatttcaagcagcctttcctagagttgaatcgaatcctggaagccctgcacgaacaagacctgggtcctgcgttggaatgggccgtctcccacaggcagcgcctgctggaactcaacagctccctggagttcaagctgcaccgactgcacttcatccgcctcttggcaggaggccccgcgaagcagctggaggccctcagctatgctcggcacttccagccctttgctcggctgcaccagcgggagatccaggtgatgatgggcagcctggtgtacctgcggctgggcttggagaagtcaccctactgccacctgctggacagcagccactgggcagagatctgtgagacctttacccgggacgcctgttccctgctggggctttctgtggagtccccccttagcgtcagctttgcctctggctgtgtggcgctgcctgtgttgatgaacatcaaggctgtgattgagcagcggcagtgcactggggtctggaatcacaaggacgagttaccgattgagattgaactaggcatgaagtgctggtaccactccgtgttcgcttgccccatcctccgccagcagacgtcagattccaaccctcccatcaagctcatctgtggccatgttatctcccgagatgcactcaataagctcattaatggaggaaagctgaagtgtccctactgtcccatggagcagaacccggcagatgggaaacgcatcatattctgattcctacctggaaggaattttgttgaaaggggttttcacctgtgagccttggtctgtctcggtagggtggtcaacttcagtggactgtggttggtttcagagcgcctggctgaggagttccactgaggggagcactggagcagccctttggcagaggctgaggagggagatggaccagcccacgcctggcacctggctccatggcataaggaaagggagatgctggcctctgtgctcctgctgtcttttcctgtttctgtttgcgtttgacttagtagcaaccgacagagtggcaagggatttggtcttcagcagtagacatccttccacccctgccctcagccaagtctcttgctgccatgccaatgctatgtccacccttgcccctcggcccaagagtgtccagcggtggcccacctcttcctcccactacagcctcaacagtatgtaccatctcccactgtaaatagtcccagttagaacggaatgccgttgttttataactttgaacaaatgtatttactgcccttctcatttctcctggccaacctttagcctcactgacaaattatgaccacatgtctaccacacacagggactgggcacggcctggtggctgccgcaaacaaaaacatggccagcaggtatccagtgtccaggcaggaagaacacaacttgcatccctgactgcggggagcttagatgtcagaccccgggcaaggtgcttttacatatacccataccagatcttactaact

SEQ ID NO: 6055 - DNA, 2185 bp, Homo sapiens
ggctggtactggctggaattttgggcatggggccggggctgcggggcgagttgtcggccctgggccgggagctggagtcccagactcataggtcccggcccagcccccgaagagccgcctcagccggggggagttgctcggactcaaacgtccagtcctcgtgcgaccgcgctgggtcggaagtgagcaggctgaggccaccatggagcagtgtgcgtgcgtggagagagagctggacaaggtcctgcagaagttcctgacctacgggcagcactgtgagcggagcctggaggagctgctgcactacgtgggccagctgcgggctgagctggccagcgcagccctccaggggacccctctctcagccaccctctctctggtgatgtcacagtgctgccggaagatcaaagatacggtgcagaaactggcttcggaccataaggacattcacagcagtgtatcccgagtgggcaaagccattgacaggaacttcgactctgagatctgtggtgttgtgtcagatgcggtgtgggacgcgcgggaacagcagcagcagatcctgcagatggccatcgtggaacacctgtatcagcagggcatgctcagcgtggccgaggagctgtgccaggaatcaacgctgaatgtggacttggatttcaagcagcctttcctagagttgaatcgaatcctggaagccctgcacgaacaagacctgggtcctgcgttggaatgggccgtctcccacaggcagcgcctgctggaactcaacagctccctggagttcaagctgcaccgactgcacttcatccgcctcttggcaggaggccccgcgaagcagctggaggccctcagctatgctcggcacttccagccctttgctcggctgcaccagcgggagatccaggtgatgatgggcagcctggtgtacctgcggctgggcttggagaagtcaccctactgccacctgctggacagcagccactgggcagagatctgtgagacctttacccgggacgcctgttccctgctggggctttctgtggagtccccccttagcgtcagctttgcctctggctgtgtggcgctgcctgtgttgatgaacatcaaggctgtgattgagcagcggcagtgcactggggtctggaatcacaaggacgagttaccgattgagattgaactaggcatgaagtgctggtaccactccgtgttcgcttgccccatcctccgccagcagacgtcagattccaaccctcccatcaagctcatctgtggccatgttatctcccgagatgcactcaataagctcattaatggaggaaagctgaagtgtccctactgtcccatggagcagaacccggcagatgggaaacgcatcatattctgattcctacctggaaggaattttgttgaaaggggttttcacctgtgagccttggtctgtctcggtagggtggtcaacttcagtggactgtggttggtttcagagcgcctggctgaggagttccactgaggggagcactggagcagccctttggcagaggctgaggagggagttgctcggactcaaacgtccagtcctcgtgcgaccgcgctgggtcggaagtgagcaggctgaggccaccatggagcagtgtgcgtgcgtggagagagagctggacaaggtcctgctgtcttttcctgtttctgtttgcgtttgacttagtagcaaccgacagagtggcaagggatttggtcttcagcagtagacatccttccacccctgccctcagccaagtctcttgctgccatgccaatgctatgtccacccttgcccctcggcccaagagtgtccagcggtggcccacctcttcctcccactacagcctcaacagtatgtaccatctcccactgtaaatagtcccagttagaacggaatgccgttgttttataactttgaacaaatgtatttactgcccttctcatttctcctggccaacctttagcctcactgacaaattatgaccacatgtctaccacacacagggactgggcacggcctggtggctgccgcaaacaaaaacatggccagcaggtatccagtgtccaggcaggaagaacacaacttgcatccctgactgcggggagcttagatgtcagaccccgggcaaggtgcttttacatatacccataccagatcttactaact

SEQ ID NO: 6056 - DNA, 2046 bp, Homo sapiens
ccctactgtactaggaggattgaagaggagtaattttctcgccatgcaactcagtgcgtagcctggggactgtctccactgctacggttgtggggtggggtctgcagtctgcactcgaggtcagcatgtcatactcagcctccccaggactgagatgggaacaagagaggcccaagtggctggcaggagaccaagctcctcaagcaaagcccagctctctggcctgtctttggcgggtgagcttttattatgtgcatagcagagaactttggaaacaccatcttccagtggtgggatctcttctctctctccttgtaggaatcaacgctgaatgtggacttggatttcaagcagcctttcctagagttgaatcgaatcctggaagccctgcacgaacaagacctgggtcctgcgttggagtaaggaggcccttgggtgggccagcagcactctgcttcgacctctcagggcacagggcttgactgtggtcttcatttcacccagatgtacttgacttgcctgcagccctgtctcaagagcctcacacaggcttttggggccctcctctcaggtgctggctctcaggtcctagcccccaccagctctacactaaactggcccctttcttcccagatgggccgtctcccacaggcagcgcctgctggaactcaacagctccctggagttcaagctgcaccgactgcacttcatccgcctcttggcaggaggccccgcgaagcagctggaggccctcagctatgctcggcacttccagccctttgctcggctgcaccagcgggagatccaggtgatgatgggcagcctggtgtacctgcggctgggcttggagaagtcaccctactgccacctgctggacagcagccactgggcagagatctgtgagacctttacccgggacgcctgttccctgctggggctttctgtggagtccccccttagcgtcagctttgcctctggctgtgtggcgctgcctgtgttgatgaacatcaaggctgtgattgagcagcggcagtgcactggggtctggaatcacaaggacgagttaccgattgagattgaactaggcatgaagtgctggtaccactccgtgttcgcttgccccatcctccgccagcagacgtcagattccaaccctcccatcaagctcatctgtggccatgttatctcccgagatgcactcaataagctcattaatggaggaaagctgaagtgtccctactgtcccatggagcagaacccggcagatgggaaacgcatcatattctgattcctacctggaaggaattttgttgaaaggggttttcacctgtgagccttggtctgtctcggtagggtggtcaacttcagtggactgtggttggtttcagagcgcctggctgaggagttccactgaggggagcactggagcagccctttggcagaggctgaggagggagatggaccagcccacgcctggcacctggctccatggcataaggaaagggagatgctggcctctgtgctcctgctgtcttttcctgtttctgtttgcgtttgacttagtagcaaccgacagagtggcaagggatttggtcttcagcagtagacatccttccacccctgccctcagccaagtctcttgctgccatgccaatgctatgtccacccttgcccctcggcccaagagtgtccagcggtggcccacctcttcctcccactacagcctcaacagtatgtaccatctcccactgtaaatagtcccagttagaacggaatgccgttgttttataactttgaacaaatgtatttactgcccttctcatttctcctggccaacctttagcctcactgacaaattatgaccacatgtctaccacacacagggactgggcacggcctggtggctgccgcaaacaaaaacatggccagcaggtatccagtgtccaggcaggaagaacacaacttgcatccctgactgcggggagcttagatgtcagaccccgggcaaggtgcttttacatatacccataccagatcttactaact

SEQ ID NO: 6057 - DNA, 1305 bp, Homo sapiens
  misc_feature (29)..(29): n is a, c, g, or t
  misc_feature (73)..(74): n is a, c, g, or t
  misc_feature (81)..(81): n is a, c, g, or t
  misc_feature (89)..(89): n is a, c, g, or t
  misc_feature (98)..(98): n is a, c, g, or t
  misc_feature (101)..(101): n is a, c, g, or t
agtgacatgattatcgctttgagagcccngagagtgagcctagtatgtcgattcagccttgtcgtgacagcgnnatcagtntgtggcanctgtgtacncgntggcttgagagtcaccctactgccacctgctggacagcagccactgggcagagatctgtgagacctttacccgggacgcctgttccctgctggggctttctgtggagtccccccttagcgtcagctttgcctctggctgtgtggcgctgcctgtgttgatgaacatcaaggctgtgattgagcagcggcagtgcactggggtctggaatcacaaggacgagttaccgattgagattgaactaggcatgaagtgctggtaccactccgtgttcgcttgccccatcctccgccagcagacgtcagattccaaccctcccatcaagctcatctgtggccatgttatctcccgagatgcactcaataagctcattaatggaggaaagctgaagtgtccctactgtcccatggagcagaacccggcagatgggaaacgcatcatattctgattcctacctggaaggaattttgttgaaaggggttttcacctgtgagccttggtctgtctcggtagggtggtcaacttcagtggactgtggttggtttcagagcgcctggctgaggagttccactgaggggagcactggagcagccctttggcagaggctgaggagggagatggaccagcccacgcctggcacctggctccatggcataaggaaagggagatgctggcctctgtgctcctgctgtcttttcctgtttctgtttgcgtttgacttagtagcaaccgacagagtggcaagggatttggtcttcagcagtagacatccttccacccctgccctcagccaagtctcttgctgccatgccaatgctatgtccacccttgcccctcggcccaagagtgtccagcggtggcccacctcttcctcccactacagcctcaacagtatgtaccatctcccactgtaaatagtcccagttagaacggaatgccgttgttttataactttgaacaaatgtatttactgcccttctcatttctcctggccaacctttagcctcactgacaaattatgaccacatgtctaccacacacagggactgggcacggcctggtggctgccgcaaacaaaaacatggccagcaggtatccagtgtccaggcaggaagaacacaacttgcatccctgactgcggggagcttagatgtcagaccccgggcaaggtgcttttacatatacccataccagatcttactaact

SEQ ID NO: 6058 - DNA, 1119 bp, Homo sapiens
accttatgccggggctgtggagtccccccttagcgtcagctttgcctctggctgtgtggcgctgcctgtgttgatgaacatcaaggctgtgattgagcagcggcagtgcactggggtctggaatcacaaggacgagttaccgattgagattgaactaggcatgaagtgctggtaccactccgtgttcgcttgccccatcctccgccagcagacgtcagattccaaccctcccatcaagctcatctgtggccatgttatctcccgagatgcactcaataagctcattaatggaggaaagctgaagtgtccctactgtcccatggagcagaacccggcagatgggaaacgcatcatattctgattcctacctggaaggaattttgttgaaaggggttttcacctgtgagccttggtctgtctcggtagggtggtcaacttcagtggactgtggttggtttcagagcgcctggctgaggagttccactgaggggagcactggagcagccctttggcagaggctgaggagggagatggaccagcccacgcctggcacctggctccatggcataaggaaagggagatgctggcctctgtgctcctgctgtcttttcctgtttctgtttgcgtttgacttagtagcaaccgacagagtggcaagggatttggtcttcagcagtagacatccttccacccctgccctcagccaagtctcttgctgccatgccaatgctatgtccacccttgcccctcggcccaagagtgtccagcggtggcccacctcttcctcccactacagcctcaacagtatgtaccatctcccactgtaaatagtcccagttagaacggaatgccgttgttttataactttgaacaaatgtatttactgcccttctcatttctcctggccaacctttagcctcactgacaaattatgaccacatgtctaccacacacagggactgggcacggcctggtggctgccgcaaacaaaaacatggccagcaggtatccagtgtccaggcaggaagaacacaacttgcatccctgactgcggggagcttagatgtcagaccccgggcaaggtgcttttacatatacccataccagatcttactaact

SEQ ID NO: 6059 - DNA, 1264 bp, Homo sapiens
  misc_feature (1264)..(1264): n is a, c, g, or t
ggctggtactggctggaattttgggcatggggccggggctgcggggcgagttgtcggccctgggccgggagctggagtcccagactcataggtcccggcccagcccccgaagagccgcctcagccggggggagttgctcggactcaaacgtccagtcctcgtgcgaccgcgctgggtcggaagtgagcaggctgaggccaccatggagcagtgtgcgtgcgtggagagagagctggacaaggtcctgcagaagttcctgacctacgggcagcactgtgagcggagcctggaggagctgctgcactacgtgggccagctgcgggctgagctggccagcgcagccctccaggggacccctctctcagccaccctctctctggtgatgtcacagtgctgccggaagatcaaagatacggtgcagaaactggcttcggaccataaggacattcacagcagtgtatcccgagtgggcaaagccattgacaggaacttcgactctgagatctgtggtgttgtgtcagatgcggtgtgggacgcgcgggaacagcagcagcagatcctgcagatggccatcgtggaacacctgtatcagcagggcatgctcagcgtggccgaggagctgtgccaggaatcaacgctgaatgtggacttggatttcaagcagcctttcctagagttgaatcgaatcctggaagccctgcacgaacaagacctgggtcctgcgttggaatgggccgtctcccacaggcagcgcctgctggaactcaacagctccctggagttcaagctgcaccgactgcacttcatccgcctcttggcaggaggccccgcgaagcagctggaggccctcagctatgctcggcacttccagccctttgctcggctgcaccagcgggaaatccaggtgatgatgcgcagctggtggtcctgcggtggctggaaaatcaacctaatgcaactggtgggcaaggcggcacggggcagagattcgggagaacctttaccgggaagccggtcccggcgcggcaactggtgagtccccctaacggagatagacctggagggagggcggcggtgaacacacagggtgcatgagcggcatgccggggtcggccaaggaagagcaggaataacaggaaagagagacacgagtgggcaccgcgagagagaacaccacagacgtaaggaggagcaaaaaggagaacgaacggaaacgcagatacgaaacgagcaataatcaggagcagcgacacggcacaggcgn

SEQ ID NO: 6060 - DNA, 840 bp, Homo sapiens
  misc_feature (21)..(21): n is a, c, g, or t
atgagagcttgttcctgcttnttcctcagctcattttcctcttctgctggcttatatgctttcccaaacgggcatgagacaggaaagaagtcagagggtggtgttgtcttggggttttcacctgtgagccttggtctgtctcggtagggtggtcaacttcagtggactgtggttggtttcagagcgcctggctgaggagttccactgaggggagcactggagcagccctttggcagaggctgaggagggagatggaccagcccacgcctggcacctggctccatggcataaggaaagggagatgctggcctctgtgctcctgctgtcttttcctgtttctgtttgcgtttgacttagtagcaaccgacagagtggcaagggatttggtcttcagcagtagacatccttccacccctgccctcagccaagtctcttgctgccatgccaatgctatgtccacccttgcccctcggcccaagagtgtccagcggtggcccacctcttcctcccactacagcctcaacagtatgtaccatctcccactgtaaatagtcccagttagaacggaatgccgttgttttataactttgaacaaatgtatttactgcccttctcatttctcctggccaacctttagcctcactgacaaattatgaccacatgtctaccacacacagggactgggcacggcctggtggctgccgcaaacaaaaacatggccagcaggtatccagtgtccaggcaggaagaacacaacttgcatccctgactgcggggagcttagatgtcagaccccgggcaaggtgcttttacatatacccataccagatcttactaact

SEQ ID NO: 6061 - DNA, 1445 bp, Homo sapiens
gcggcggggagcctcggcggtgaggcgcaaagccgcgggctcgtgggacggccacccctccgcaaaaccgccaatgggcgggcccgggccgccgatcgcccgccgcggcttccggttgcgatgacagtggcgccggaagccggggccggggctgcggggcgagttgtcggccctgggccgggagctggagtcccagactcataggtcccggcccagcccccgaagagccgcctcagccggggggagttgctcggactcaaacgtccagtcctcgtgcgaccgcgctgggtcggaagtgagcaggctgaggccaccatggagcagtgtgcgtgcgtggagagagagctggacaaggtcctgcagaagttcctgacctacgggcagcactgtgagcggagcctggaggagctgctgcactacgtgggccagctgcgggctgagctggccagcgcagccctccaggggacccctctctcagccaccctctctctggtgatgtcacagtgctgccggaagatcaaagatacggtgcagaaactggcttcggaccataaggacattcacagcagtgtatcccgagtgggcaaagccattgacaggaacttcgactctgagatctgtggtgttgtgtcagatgcggtgtgggacgcgcgggaacagcagcagcagatcctgcagatggccatcgtggaacacctgtatcagcagggcatgctcagcgtggccgaggagctgtgccaggaatcaacgctgaatgtggacttggatttcaagcagcctttcctagagttgaatcgaatcctggaagccctgcacgaacaagacctgggtcctgcgttggaatgggccgtctcccacaggcagcgcctgctggaactcaacagtccatggcataaggaaagggagatgctggcctctgtgctcctgctgtcttttcctgtttctgtttgcgtttgacttagtagcaaccgacagagtggcaagggatttggtcttcagcagtagacatccttccacccctgccctcagccaagtctcttgctgccatgccaatgctatgtccacccttgcccctcggcccaagagtgtccagcggtggcccacctcttcctcccactacagcctcaacagtatgtaccatctcccactgtaaatagtcccagttagaacggaatgccgttgttttataactttgaacaaatgtatttactgcccttctcatttctcctggccaacctttagcctcactgacaaattatgaccacatgtctaccacacacagggactgggcacggcctggtggctgccgcaaacaaaaacatggccagcaggtatccagtgtccaggcaggaagaacacaacttgcatccctgactgcggggagcttagatgtcagaccccgggcaaggtgcttttacatatacccataccagatcttactaact

SEQ ID NO: 6062 - DNA, 1219 bp, Homo sapiens
gggacatttgcgttgagaccctaattaggaggcaggcttagtgaagatacgggaagagagtggtccaggcagcgggaacagccagtgtgaaggccctagggcagaaatcaactgagagtatagtcaaggaacagaaagcaagctagtgtggctaaagtatggtaagaaagggaaagagtggtaggagatgaggtcggataattggggtttggtcacatagagtctgtaggtcagagagaggaatgtggagtttttttctaagtacagtggaaatcttttggttttaagcagaggagtgacatgtagggtagagagtggatgttggtcaggctggtctcaaactcctgaccttgtgatccgcctgcctcggcctcccaaagtgctgggattacaggcatgagccaccacgcccagccgatgttgtctaatctttgtcaggcaaaagggacctttatgatttgctcaaacttcctttctccttacacaggagccccttgtttcaggatgctaaatactccaggataaacctccatacatgcctttgtggagattttaatatttcactcatgtctcttttctacccactcctacacatttgagctcaggttctccaccgcgccctgccccaatcaacaaatgtttactgagcatctaccatggaccaggccctagtctgggcactgagggggagaaaggacaagactacattccagccatcgagcagctcacagaccaatggaggaggctgacgtggacaggctgttactgtgctgcagtagctgaggactcgatgggtgtggtgtgccactcttgccaggttatgaagcagaaaaggaggcagggagatttcactgagggctcaaggggaggtgataatttaactacagcttacgtactctatacaaagaagtgcagagggcactctaaaaatgggaaaaactgtgcaaaggaagcaaatacattatgcaaagggtttatatgtcaaccatggtagtgttgggcaaaaggtaacaggatctgctatgtgtttcggagggtcatcctggtggataatttctgtatatgtgagaccttggggaggaaggcttaggaccagtggacatgaaatttcaatctattaatcatgaagttggtcaaagacaaacacaattccttgcgcctggtgaagatgactgactgattcaggcagagtggcttgctctagacagccatttaggta

SEQ ID NO: 6063 - DNA, 922 bp, Homo sapiens
gggacatttgcgttgagaccctaattaggaggcaggcttagtgaagatacgggaagagagtggtccaggcagcgggaacagccagtgtgaaggccctagggcagaaatcaactgagagtatagtcaaggaacagaaagcaagctagtgtggctaaagtatggtaagaaagggaaagagtggtaggagatgaggtcggataattggggtttggtcacatagagtctgtaggtcagagagaggaatgtggagtttttttctaagtacagtggaaatcttttggttttaagcagaggagtgacatgtagggtagagagtggatgttggtcaggctggtctcaaactcctgaccttgtgatccgcctgcctcggcctcccaaagtgctgggattacaggcatgagccaccacgcccagccgatgttgtctaatctttgtcaggcaaaagggacctttatgatttgctcaaacttcctttctccttacacaggagccccttgtttcaggatgctaaatactccaggataaacctccatacatgcctttgtggagattttaatatttcactcatgtctcttttctacccactcctacacatttgagctcaggttctccagcgcagttaggaaatggatgtgtcatttaatcagcaaatgtgtgtgtgtgtttttttaaatttgagacggagtttttgctcttgttgcccaggcgtgccactgtactccagcctgggcgacagagtaagactctgtctcaaaaacaaacaacaaaaaaattagccaggtgtggtggggagagaggggaagaatagggacaaaagggaatacataaataaacacaaaggagaaaaggccctgcatggaccacttacatgtgtcatgaactcaggagtgttcatggtgggactacatggtgcacctgtagt

SEQ ID NO: 6064 - DNA, 656 bp, Homo sapiens
ggaaagagaactggaaaagaactgtcctcattcctgattctgtgttagtaatgcctgttctcatcctgcagaagcagcctggacttccacctccccagtggattttacagtcaaatttgcctgagggcattttcatccctgctcagtctcctcaggggcttgggagccaccgggctcagcatattgtgctgtgctgcacagtcctgctgcccgcttgggggtggacccagagccctgcaccccctgagctgccccctctggttgccttgtagagatccaggtgatgatgggcagcctggtgtacctgcggctgggcttggagaagtcaccctactgccacctgctggacagcagccactgggcagagatctgtgagacctttacccgggacgcctgttccctgctggggctttctgtggagtccccccttagcgtcaggtacaacccagccctgtgagggcagcacaggtgggagggtagagaggtaatcatcatttgccaaggccctgccatgtgccaggaacagtgctcggtgctttcagagaccgaaactggctttcttagtcattcttcaggagaggaattacctgtttttacagttaaactgagactaggaagagttatggcccgaggtcaccatgaggtcagtggcatgg

SEQ ID NO: 6065 - DNA, 403 bp, Homo sapiens
acacatctaacacagaagctgtagtgtttttataacctaatgtcaaaatccatgtcccatcacttctgtcttttatttgctagatacaagtcactaagtctagcccacacttaaggggagaggtattaagttccacgtctgagtgtagtagtatcacagaatttgtgacccatctttaaagcacaattagtaaatggctgagttgaggtttaagcctaggatgactggcccgaggccctgtgctctgaactgttttattatattgcttccaaatgtcacaaaagcattatagccgaatgctgtgttgaaagaaacctgattcctgccctttggggacttttaattttaagaagtctctctgagaaagtaagatagacatatatgaacaaccaaataagtagag

SEQ ID NO: 6066 - DNA, 402 bp, Homo sapiens
ttttttttttgagatggagtcttattgtctcccaggctggagtgcagtggcataatctcacctcactgtagtctctacctccccggttcaaatgattctcctgccagtctccccactagttaggattacaggaacgtgcttgccatgcgccaggctaatttttgtatatttggtagagacagggttttaccatgctggccaagctggtcttgaactcctggcctcaagtaatccacacaccttggcctctcaaagtgctagcgtgaccagaattagcgtgttcttggtctagacttccaaaatgaagctatggaacctcacagtgagtgttacagttcttaaaggcagcgtgtccaccagcgtttctccctactgatagctcagctgcgttcagtttttttg

SEQ ID NO: 6067 - DNA, 663 bp, Homo sapiens
caaataaaacttcaggaaatagaaaaactcactaaaattacaatctcagaaataaagtttaaaatagtaggtgagataaactaaaagaattctgaaatgaatagaatttcccaggattcaacaaataaattaaatgatgaaaaatataaacaagatgctgagacatggagaaaaaatgagtccactccatcaaaggttctggcagacaacatggactgagcacaaagtcgggttcccatcctcaccgcctttgcctgcctgtgccatagagactggagactaaaagcctcatgctcccagtgttgcatttagctgggggcggccagattccttgcctctgagacacgagtggaagtgcaatagtgctgccttctccttccaccacagggtccgatgtggtcgatggctgtacttgcttccatgttatggtgatgagagaaagaccaagtgcggcatgtaggctttggtgctgacatatgcttcccgcaggacttcttgctatgtggaaaatcaatcccaatttatttaagccactgtagttggcttttccattacatgtagctgaaaatatttctaactgatattaaagtttatttgttcctaaaagagacaattagatagcatggtggagagggaacaaaatcattttgcaaacatacagac

SEQ ID NO: 6068 - DNA, 199 bp, Homo sapiens
aatctcaagccatgaatttagtttcaagttttctggatgagtaggactcctaagtgcctggcagaagcaaatataaatcctccccagaggaagacagcttcatctttgcccgcagaggatctccataaataattgctcaagggcagccggcagcagtcagtcaaagctggagtcaatccaccaggtgacagggcatccc

SEQ ID NO: 6069 - DNA, 511 bp, Homo sapiens
cctacagtgagtactttgttgtgtctgccttctttcacttaacatgttagttttgcaattcatccatgttgttcctttttctccccctgaggtatattcgattgtatggatataacacagtttacttatccattcatgcaaatattgatggacatttgagttgtctccaatttttggctattaaaaataaagctgttctggctgggtatggtggctcacacctgtaatgtccgaactttgggaggccaaggctgggtggatcacttgaggtcaggatttcgagaccagcctggctaacgtagtgaaaccccatctctactaaaaataacagaaattagcgaggtgtggtggtgcacacctgtaatcccagctacttgggaggctgagaaactgaggcacaagaatcactttgaacccgtgtggtggaggttgcagttagcccagatcatgccagcctgggtgacagaacaagactgcttcttaaaaaaaaaaaaaaaaagatgttctgaac

SEQ ID NO: 6070 - DNA, 380 bp, Homo sapiens
ttttttttttttgtagagacaggatttcctcatgttgcccaggctggtcttgaactcctgggctcaagcaatccactcatctcagcctctgaaagtgtaagaattacaggcatgagccaccatgcccggcctgtctatcacttagttcagtaaatgcttggtgaatgaatgaatcatatacatttagtggttgttttgaagttgactctgctgagtgagattttctttgcattcatgcatcttcattaatgtcaactttgttgcagtttttaaaaaagtaatctttgtttacattatcttaagttacttgatttaaaaaagttaaaagtgactatttgcagaattctaaagtcccattactgtcaacatgcataatattt

SEQ ID NO: 6071 - DNA, 436 bp, Homo sapiens
tctcataaacctagtcttagctttctttcaattgtgaagactgactttgcacagtgtcttgatggcagctctccgtttcctcacctgacaatttcactgttttaatagtgagtggaacttagcattgcacgccttcattgcttttctgcttgaaatcttctagttttatttcagattctgagaaacaaataggcaaccctttactctgccactttaatgttgatggtaaaagtggaacttcttccatcaaggagttgtacaggctaaatactgttaagaataagaaattgcttacttatttcatactcaaacatttaggggagggaagcccaggtagaagaatcgcttgagcccaggaggtctaggctgcagtgagtcacattcatgccactgcactccagcctgagcaacagactgagatcctgtctggaaaaaa

SEQ ID NO: 6072 - DNA, 795 bp, Homo sapiens
ccacattgccaaaccttagaggcagagtcatggatgtctcctaattaagttatctgaagcccacatcctctgcctgtcttcagttagatgcctagtgtactcatgggaggggacagatgacaagagtttcagggccaggctttgatgtctgcatcgtgccatttccagaaacccaaggttttcagtcctatcggttatgtgctattccctctaccaaatttataatcttaggtatatttattgtattttttaaaagacttctctctttgtaagcattatttttctagatttggcttttttagttacggtgtaacgtaaatttttagtctgaatctgctaaagttatgatgcttgtggatatcaattattttgagaccaagtaaatctcaatgacatttgaataaaatgtccagcatacctttgcacaggcttgttttgcttgcaaacattaaagtaattctggggtgttgccttgtgttgagatttcttgtgggtaacagttaggggagaccatcccaaattcctgtgggtaatcccaaagagaggcagatctaaaatcttaatgaagttctgagtctgtcttctacaaggcttctttcatggtttggggccctgcccgttggctgttagtaagggatatcctggggggtgctaaatgtgactttaaaaagactgttctttgtatgataaatgatctcttaaaaagaaaactagtcactccctcctgccagcctctaaccacttcctgtaaatgacagcacacagatcttagtttcaccaagtgaaaaaattatt

SEQ ID NO: 6073 - DNA, 460 bp, Homo sapiens
gaatccctggtttgctcaaaaaattctacattctgacccaggtatacacctaccactacaaattgctattctgacttacaaacctttctttagacctttcggttaacgtgatctcttttctcagaattttatctcttgtgggtaagcagtttctgaaacaccaaataatgacagggtccatactgaactgatcctgtagaggccacactaatgcacatccacaacagagtagccagccacaccctgtctctgacaccttatttggctactacacatcagtcaacaactactctagcagccaaggcagaaggtctcacagaattctccaaaccacccacccccagagaatcaagctctggtctccatctgactaccctgaaaacgtgaatcaggtgactggtatgccagactgaacctctatcacagtctaaataaatggaatgtacttccttctgaaaga

SEQ ID NO: 6074 - DNA, 683 bp, Homo sapiens
tctgggttgatgattttggctggtatgttgatagaggtgtgagtttaacaaaccctaatctatatgatgtttcactaccctaatatttatttatttatttatttttaaatctagcttcctcttaagttttatttccctctgttgagggtttaacctagtcacaatcatcttacctttgtggtagtgctaatttatagtttatggaaacctgctgctactgactagtacctcgctaaaggtagaagccgacacacagaatagtaaagctcaggtttgatggtgatctgtaaggagtcacggttcttgctaatcgatgagaaaccatgataactggcagactgcagaagcttttctcttgtcaccggaaccagcagaggctcctgaacgacatttgcaaggctattagtactgcggagaagttactagatggaataatactggtcctgactgaggaaatgaaaaggaacatgcaagttcacgaggttaaatgaggaatggctgattcaaaaaaattaaaaagaaataacgtgatcaacaatattggtttgaaggaatgggagaggttgtctttatgttaagtcttgttgctagaggatctctattttatgttactgttttttgcatactagagtcttctacagatatttgtatgaatgttgtcagtcattctggaaataagcata

SEQ ID NO: 6075 - DNA, 345 bp, Homo sapiens
ggattctggcctatccaaagcatttgggccaaaagtgagggcttccggcttgtttcttacacctgcccctggctcagggccgatgacggtgtccctgtgtccctctgtggcctctcacagtggtcttctcctgggcttcctgttggctgccctgctcatggctgtgctgtggctgctggcagccccacggggctctgaggagcccatgccagcaccttagggcttctgctcttgagccggggctcccacgcagcagcctggggtctgagagtgctggtagaactaaggaaggcaaaacagcaagactgaatggagatgcatgccgagaaatttcacctatttgga

SEQ ID NO: 6076 - DNA, 291 bp, Homo sapiens
ggccactcttacctctgtgataggctatgatgtaaccttagagcataaaagcaataagcgaagtagtaaagagagatctttgaaataagtattgttgaaagagactaggatgatgcatgttttaacactgatcccaaagcatcactctgctttcgaaaataacatcattcaagccttgctatctcttgattggatgatgagtggtggcaatggttttctccatctctcttcctgtgctaaagattaaatgtggccatagcagtggatcagtgcacactgcacatgagtgct

SEQ ID NO: 6077 - DNA, 753 bp, Homo sapiens
ccagaaacatccagaatacatttccaacaagagcactggccaagtcagcttcttctgagagagtctctagaagacatgatgctacactcagctttgggtctctgcctcttactcgtcacagtttcttccaaccttgccattgcaataaaaaaggaaaagaggcctcctcagacactctcaagaggatggggagatgacatcacttgggtacaaacttatgaagaaggtctcttttatgctcaaaaaagtaagaagccattaatggttattcatcacctggaggattgtcaatactctcaagcactaaagaaagtatttgcccaaaatgaagaaatacaagaaatggctcagaataagttcatcatgctaaaccttatgcatgaaaccactgataagaatttatcacctgatgggcaatatgtgcctagaatcatgtttgtagacccttctttaacagttagagctgacatagctggaagatactctaacagattgtacacatatgagcctcgggatttacccctattgatagaaaacatgaagaaagcattaagacttattcagtcagagctataagagatgatagaaaaaagccttcacttcaaagaagtcaaatttcatgaagaaaacctctggcacattgacaaatactaaatgtgcaagtatatagattttgtaatattactatttagtttttttaatgtgtttgcaatagtcttattaaaataaatgttttttaaatctgaaaaaaaa

SEQ ID NO: 6078 - DNA, 381 bp, Homo sapiens
  misc_feature (379)..(379): n is a, c, g, or t
ccagaaacatccagaatacatttccaacaagagcactggccaagtcagcttcttctgagagagtctctagaagacatgatgctacactcagctttgggtctctgcctcttactcgtcacagtttcttccaaccttgccattgcaataaaaaaggaaaagaggcctcctcagacactctcaagaggatggggagatgacatcacttgggtacaaacttatgaagaaggtctcttttatgctcaaaaaagtaagaagccattaatggttattcatcacctggaggattgtcaatactctcaagcactaaagaaagtatttgcccaaaatgaagaaatacaagaaatggctcagaataagtggtttcatgcataagtttagnca

SEQ ID NO: 6079 - DNA, 379 bp, Homo sapiens
ttcatggcagaagccactctgaactcctccttggtcaactttctcagtctattcagatcatattgacaaatttgattagattgtgcaggtatgaaaaagaatggggaagctcttgaagtgctgatccaggactaatctccaaatacgaggttaagtgaaaagaaaacccaggtgcgcagcaatccatcaatccatgttactgcacttttgcaaaaagcacagtggggggggtgaccttaaacaaatctcccacacatattttggctcacacatgcacaatgtatttgtagaagaatacaccatcagctgatcacaatggatgtcttcaggaaagtaaacttagttgccaggggacagacaagaaaaagacttcacttat

SEQ ID NO: 6080 - DNA, 849 bp, Homo sapiens
tgttttattttgcattctttacttttattatttagagtctgaagatgctcatggtaaatgcagattatagagctaactttttgcacaaaaagcccacaaaacagtctttgagagagcatgtcagtgttacgtttggattttaaaagacagtgaagcttagctgagattctgttttacagattttgcgaataaataaaaagacagattccgtttgctctggactgtgttagctgcagtgcggagggcggaaccggctgaaggaactgctgtgtattttcagcacatctcagtcagcttccgtttcagtcttctgtttccatcacccacacaggcatattcaagagttcctgctacatcgatgtacgctggtttccctttgatgtgcagcactgcaaactgaagtttgggtcctggtcttacggaggctggtccttggatctgcagatgcaggaggcagatatcagtggctatatccccaatggagaatgggacctagtgggtaagccatgagactaaccgcctggaagaaagctttcctattcctgggcaagctttaaaagtttgggattttccactgtcctttccggtgcgagcatttattgaattttgcagtagtctccataatttactgagagctacaggaggagaaacagaaaacagttaggatatgccatgctttccaagaggaactggcaactgcagtgaggatgcatttaaacaaaccagtgtgaggatagatctctctacgttatgcagatccactccatttctaaaagcaagttgaacagcaaatttcagttgatgggaacctatatttgattattttaaaataggaaaacagtgattaca

SEQ ID NO: 6081 - DNA, 2071 bp, Homo sapiens
  misc_feature (4)..(4): n is a, c, g, or t
  misc_feature (7)..(7): n is a, c, g, or t
ggcncgngagccgagcggcgaggtgcctctgtggccgcaggcgcaggcccgggcgacagccgagacgtggagcgcgccggctcgctgcagctccgggactcaacatgcgctgctcgccgggaggcgtctggctggcgctggccgcgtcgctcctgcacgtgtccctgcaaggcgagttccagaggaagctttacaaggagctggtcaagaactacaatcccttggagaggcccgtggccaatgactcgcaaccactcaccgtctacttctccctgagcctcctgcagatcatggacgtggatgagaagaaccaagttttaaccaccaacatttggctgcaaatgtcttggacagatcactatttacagtggaatgtgtcagaatatccaggggtgaagactgttcgtttcccagatggccagatttggaaaccagacattcttctctataacagtgctgatgagcgctttgacgccacattccacactaacgtgttggtgaattcttctgggcattgccagtacctgcctccaggcatattcaagagttcctgctacatcgatgtacgctggtttccctttgatgtgcagcactgcaaactgaagtttgggtcctggtcttacggaggctggtccttggatctgcagatgcaggaggcagatatcagtggctatatccccaatggagaatgggacctagtgggaatccccggcaagaggagtgaaaggttctatgagtgctgcaaagagccctaccccgatgtcaccttcacagtgaccatgcgccgcaggacactctactatggcctcaacctgctgatcccctgtgtgctcatctccgccctcgccctgctggtgttcctgcttcctgcagattccggggagaagatttccctggggataacagtcttactctctcttaccgtcttcatgctgctcgtggctgagatcatgcccgcaacatccgattcggtaccattgatagcccagtacttcgccagcaccatgatcatcgtgggcctctcggtggtggtgacggtgatcgtgctgcagtaccaccaccacgaccccgacgggggcaagatgcccaagtggaccagagtcatccttctgaactggtgcgcgtggttcctgcgaatgaagaggcccggggaggacaaggtgcgcccggcctgccagcacaagcagcggcgctgcagcctggccagtgtggagatgagcgccgtggcgccgccgcccgccagcaacgggaacctgctgtacatcggcttccgcggcctggacggcgtgcactgtgtcccgacccccgactctggggtagtgtgtggccgcatggcctgctcccccacgcacgatgagcacctcctgcacggcgggcaaccccccgagggggacccggacttggccaagatcctggaggaggtccgctacattgccaaccgcttccgctgccaggacgaaagcgaggcggtctgcagcgagtggaagttcgccgcctgtgtggtggaccgcctgtgcctcatggccttctcggtcttcaccatcatctgcaccatcggcatcctgatgtcggctcccaacttcgtggaggccgtgtccaaagactttgcgtaaccacgcctggttctgtacatgtggaaaactcacagatgggcaaggcctttggcttggcgagatttgggggtgctaatccaggacagcattacacgccacaactccagtgttcccttctggctgtcagtcgtgttgcttacggtttctttgttactttaggtagtagaatctcagcactttgtttcatattctcagatgggctgatagatatccttggcacatccgtaccatcggtcagcagggccactgagtagtcattttgcccattagcccactgcctggaaagcccttcggagagctccccatggctcctcaccaccgagacagttggttttgcatgtctgcatgaaggtctacctgaaaattcaacatttgctttttgcttgtgtacaaacccagattgaagctaaaataaaccagactcactaaatcctttccaataattgactggtggaagg

SEQ ID NO: 6082 - DNA, 2006 bp, Homo sapiens
  misc_feature (4)..(4): n is a, c, g, or t
  misc_feature (7)..(7): n is a, c, g, or t
  misc_feature (1934)..(1934): n is a, c, g, or t
  misc_feature (1954)..(1954): n is a, c, g, or t
ggcncgngagccgagcggcgaggtgcctctgtggccgcaggcgcaggcccgggcgacagccgagacgtggagcgcgccggctcgctgcagctccgggactcaacatgcgctgctcgccgggaggcgtctggctggcgctggccgcgtcgctcctgcacgtgtccctgcaaggcgagttccagaggaagctttacaaggagctggtcaagaactacaatcccttggagaggcccgtggccaatgactcgcaaccactcaccgtctacttctccctgagcctcctgcagatcatggacgtggatgagaagaaccaagttttaaccaccaacatttggctgcaaatgtcttggacagatcactatttacagtggaatgtgtcagaatatccaggggtgaagactgttcgtttcccagatggccagatttggaaaccagacattcttctctataacagtgctgatgagcgctttgacgccacattccacactaacgtgttggtgaattcttctgggcattgccagtacctgcctccaggcatattcaagagttcctgctacatcgatgtacgctggtttccctttgatgtgcagcactgcaaactgaagtttgggtcctggtcttacggaggctggtccttggatctgcagatgcaggaggcagatatcagtggctatatccccaatggagaatgggacctagtgggaatccccggcaagaggagtgaaaggttctatgagtgctgcaaagagccctaccccgatgtcaccttcacagtgaccatgcgccgcaggacactctactatggcctcaacctgctgatcccctgtgtgctcatctccgccctcgccctgctggtgttcctgcttcctgcagattccggggagaagatttccctggggataacagtcttactctctcttaccgtcttcatgctgctcgtggctgagatcatgcccgcaacatccgattcggtaccattgatagcccagtacttcgccagcaccatgatcatcgtgggcctctcggtggtggtgacggtgatcgtgctgcagtaccaccaccacgaccccgacgggggcaagatgcccaagtggaccagagtcatccttctgaactggtgcgcgtggttcctgcgaatgaagaggcccggggaggacaaggtgcgcccggcctgccagcacaagcagcggcgctgcagcctggccagtgtggagatgagcgccgtggcgccgccgcccgccagcaacgggaacctgctgtacatcggcttccgcggcctggacggcgtgcactgtgtcccgacccccgactctggggtagtgtgtggccgcatggcctgctcccccacgcacgatgagcacctcctgcacggcgggcaaccccccgagggggacccggacttggccaagatcctggaggaggtccgctacattgccaaccgcttccgctgccaggacgaaagcgaggcggtctgcagcgagtggaagttcgccgcctgtgtggtggaccgcctgtgcctcatggccttctcggtcttcaccatcatctgcaccatcggcatcctgatgtcggctcccaacttcgtggaggccgtgtccaaagactttgcgtaaccacgcctggttctgtacatgtggaaaactcacagatgggcaaggcctttggcttggcgagatttgggggtgctaatccaggacagcattacacgccacaactccagtgttcccttctggctgtcagtcgtgttgcttacggtttctttgttactttaggtagtagaatctcagcactttgtttcatattctcagatgggctgatagatatccttggcacatccgtaccatcggtcagcagggccactgagtagtcattttgcccattagcccactgcctggaaagcccttcggagagctccccatggctcctcttcaaancccactactacttattttgnggcaacaaactcctccatttggcttacccgcttcatgctgctcgaaaggcaa

SEQ ID NO: 6083 - DNA, 1954 bp, Homo sapiens
  misc_feature (5)..(5): n is a, c, g, or t
  misc_feature (7)..(7): n is a, c, g, or t
ttcgnanacaagtgcctttgtaatttagcaaatatcatttttggtgtacagtataaatttcctttttataaagatctgagtttttaactttgctgtcactttctgtgtttcatgacttaaatattttaattttttctttttttacatttacattttttattctagttccaattgctaatccagcatttgtggatagctgcaaactgcgatattgctgatgagcgctttgacgccacattccacactaacgtgttggtgaattcttctgggcattgccagtacctgcctccaggcatattcaagagttcctgctacatcgatgtacgctggtttccctttgatgtgcagcactgcaaactgaagtttgggtcctggtcttacggaggctggtccttggatctgcagatgcaggaggcagatatcagtggctatatccccaatggagaatgggacctagtgggaatccccggcaagaggagtgaaaggttctatgagtgctgcaaagagccctaccccgatgtcaccttcacagtgaccatgcgccgcaggacactctactatggcctcaacctgctgatcccctgtgtgctcatctccgccctcgccctgctggtgttcctgcttcctgcagattccggggagaagatttccctggggataacagtcttactctctcttaccgtcttcatgctgctcgtggctgagatcatgcccgcaacatccgattcggtaccattgatagcccagtacttcgccagcaccatgatcatcgtgggcctctcggtggtggtgacggtgatcgtgctgcagtaccaccaccacgaccccgacgggggcaagatgcccaagtggaccagagtcatccttctgaactggtgcgcgtggttcctgcgaatgaagaggcccggggaggacaaggtgcgcccggcctgccagcacaagcagcggcgctgcagcctggccagtgtggagatgagcgccgtggcgccgccgcccgccagcaacgggaacctgctgtacatcggcttccgcggcctggacggcgtgcactgtgtcccgacccccgactctggggtagtgtgtggccgcatggcctgctcccccacgcacgatgagcacctcctgcacggcgggcaaccccccgagggggacccggacttggccaagatcctggaggaggtccgctacattgccaaccgcttccgctgccaggacgaaagcgaggcggtctgcagcgagtggaagttcgccgcctgtgtggtggaccgcctgtgcctcatggccttctcggtcttcaccatcatctgcaccatcggcatcctgatgtcggctcccaacttcgtggaggccgtgtccaaagactttgcgtaaccacgcctggttctgtacatgtggaaaactcacagatgggcaaggcctttggcttggcgagatttgggggtgctaatccaggacagcattacacgccacaactccagtgttcccttctggctgtcagtcgtgttgcttacggtttctttgttactttaggtagtagaatctcagcactttgtttcatattctcagatgggctgatagatatccttggcacatccgtaccatcggtcagcagggccactgagtagtcattttgcccattagcccactgcctggaaagcccttcggagagctccccatggctcctcaccaccgagacagttggttttgcatgtctgcatgaaggtctacctgaaaattcaacatttgctttttgcttgtgtacaaacccagattgaagctaaaataaaccagactcactaaatcctttccaataattgactggtggaaggaaaacaaaaaacaaaaactaaaaacctcttagcttttctgcaattcaactttttatttttatttttatttctatcaaagacggtagagagaaacagcttgatgctgtttctacattaaaaaaaaa

SEQ ID NO: 6084 - DNA, 2196 bp, Homo sapiens
  misc_feature (4)..(4): n is a, c, g, or t
  misc_feature (7)..(7): n is a, c, g, or t
ggcncgngagccgagcggcgaggtgcctctgtggccgcaggcgcaggcccgggcgacagccgagacgtggagcgcgccggctcgctgcagctccgggactcaacatgcgctgctcgccgggaggcgtctggctggcgctggccgcgtcgctcctgcacgtgtccctgcaaggcgagttccagaggaagctttacaaggagctggtcaagaactacaatcccttggagaggcccgtggccaatgactcgcaaccactcaccgtctacttctccctgagcctcctgcagatcatggacgtggatgagaagaaccaagttttaaccaccaacatttggctgcaaatgtcttggacagatcactatttacagtggaatgtgtcagaatatccaggggtgaagactgttcgtttcccagatggccagatttggaaaccagacattcttctctataacagtgctgatgagcgctttgacgccacattccacactaacgtgttggtgaattcttctgggcattgccagtacctgcctccaggcatattcaagagttcctgctacatcgatgtacgctggtttccctttgatgtgcagcactgcaaactgaagtttgggtcctggtcttacggaggctggtccttggatctgcagatgcaggaggcagatatcagtggctatatccccaatggagaatgggacctagtgggaatccccggcaagaggagtgaaaggttctatgagtgctgcaaagagccctaccccgatgtcaccttcacagtgaccatgcgccgcaggacactctactatggcctcaacctgctgatcccctgtgtgctcatctccgccctcgccctgctggtgttcctgcttcctgcagattccggggagaagatttccctggggataacagtcttactctctcttaccgtcttcatgctgctcgtggctgagatcatgcccgcaacatccgattcggtaccattgatagcccagtacttcgccagcaccatgatcatcgtgggcctctcggtggtggtgacggtgatcgtgctgcagtaccaccaccacgaccccgacgggggcaagatgcccaagtggaccagagtcatccttctgaactggtgcgcgtggttcctgcgaatgaagaggcccggggaggacaaggtgcgcccggcctgccagcacaagcagcggcgctgcagcctggccagtgtggagatgagcgccgtggcgccgccgcccgccagcaacgggaacctgctgtacatcggcttccgcggcctggacggcgtgcactgtgtcccgacccccgactctggggtagtgtgtggccgcatggcctgctcccccacgcacgatgagcacctcctgcacggcgggcaaccccccgagggggacccggacttggccaagatcctggaggaggtccgctacattgccaaccgcttccgctgccaggacgaaagcgaggcggtctgcagcgagtggaagttcgccgcctgtgtggtggaccgcctgtgcctcatggccttctcggtcttcaccatcatctgcaccatcggcatcctgatgtcggctcccaacttcgtggaggccgtgtccaaagactttgcgtaaccacgcctggttctgtacatgtggaaaactcacagatgggcaaggcctttggcttggcgagatttgggggtgctaatccaggacagcattacacgccacaactccagtgttcccttctggctgtcagtcgtgttgcttacggtttctttgttactttaggtagtagaatctcagcactttgtttcatattctcagatgggctgatagatatccttggcacatccgtaccatcggtcagcagggccactgagtagtcattttgcccattagcccactgcctggaaagcccttcggagagctccccatggctcctcaccaccgagacagttggttttgcatgtctgcatgaaggtctacctgaaaattcaacatttgctttttgcttgtgtacaaacccagattgaagctaaaataaaccagactcactaaatcctttccaataattgactggtggaaggaaaacaaaaaacaaaaactaaaaacctcttagcttttctgcaattcaactttttatttttatttttatttctatcaaagacggtagagagaaacagcttgatgctgtttctacattaaaaaaaaa

SEQ ID NO: 6085 - DNA, 2067 bp, Homo sapiens
  misc_feature (3)..(4): n is a, c, g, or t
  misc_feature (6)..(8): n is a, c, g, or t
  misc_feature (17)..(17): n is a, c, g, or t
  misc_feature (20)..(20): n is a, c, g, or t
  misc_feature (22)..(22): n is a, c, g, or t
  misc_feature (25)..(27): n is a, c, g, or t
  misc_feature (29)..(29): n is a, c, g, or t
ganncnnntgcccgggnctncnccnnnangtgtccctgcaaggcgagttccagaggaagctttacaaggagctggtcaagaactacaatcccttggagaggcccgtggccaatgactcgcaaccactcaccgtctacttctccctgagcctcctgcagatcatggacgtggatgagaagaaccaagttttaaccaccaacatttggctgcaaatgtcttggacagatcactatttacagtggaatgtgtcagaatatccaggggtgaagactgttcgtttcccagatggccagatttggaaaccagacattcttctctataacagtgctgatgagcgctttgacgccacattccacactaacgtgttggtgaattcttctgggcattgccagtacctgcctccaggcatattcaagagttcctgctacatcgatgtacgctggtttccctttgatgtgcagcactgcaaactgaagtttgggtcctggtcttacggaggctggtccttggatctgcagatgcaggaggcagatatcagtggctatatccccaatggagaatgggacctagtgggaatccccggcaagaggagtgaaaggttctatgagtgctgcaaagagccctaccccgatgtcaccttcacagtgaccatgcgccgcaggacactctactatggcctcaacctgctgatcccctgtgtgctcatctccgccctcgccctgctggtgttcctgcttcctgcagattccggggagaagatttccctggggataacagtcttactctctcttaccgtcttcatgctgctcgtggctgagatcatgcccgcaacatccgattcggtaccattgatagcccagtacttcgccagcaccatgatcatcgtgggcctctcggtggtggtgacggtgatcgtgctgcagtaccaccaccacgaccccgacgggggcaagatgcccaagtggaccagagtcatccttctgaactggtgcgcgtggttcctgcgaatgaagaggcccggggaggacaaggtgcgcccggcctgccagcacaagcagcggcgctgcagcctggccagtgtggagatgagcgccgtggcgccgccgcccgccagcaacgggaacctgctgtacatcggcttccgcggcctggacggcgtgcactgtgtcccgacccccgactctggggtagtgtgtggccgcatggcctgctcccccacgcacgatgagcacctcctgcacggcgggcaaccccccgagggggacccggacttggccaagatcctggaggaggtccgctacattgccaaccgcttccgctgccaggacgaaagcgaggcggtctgcagcgagtggaagttcgccgcctgtgtggtggaccgcctgtgcctcatggccttctcggtcttcaccatcatctgcaccatcggcatcctgatgtcggctcccaacttcgtggaggccgtgtccaaagactttgcgtaaccacgcctggttctgtacatgtggaaaactcacagatgggcaaggcctttggcttggcgagatttgggggtgctaatccaggacagcattacacgccacaactccagtgttcccttctggctgtcagtcgtgttgcttacggtttctttgttactttaggtagtagaatctcagcactttgtttcatattctcagatgggctgatagatatccttggcacatccgtaccatcggtcagcagggccactgagtagtcattttgcccattagcccactgcctggaaagcccttcggagagctccccatggctcctcaccaccgagacagttggttttgcatgtctgcatgaaggtctacctgaaaattcaacatttgctttttgcttgtgtacaaacccagattgaagctaaaataaaccagactcactaaatcctttccaataattgactggtggaaggaaaacaaaaaacaaaaactaaaaacctcttagcttttctgcaattcaactttttatttttatttttatttctatcaaagacggtagagagaaacagcttgatgctgtttctacattaaaaaaaaa

SEQ ID NO: 6086 - DNA, 2388 bp, Homo sapiens
agccctttcccaggcggtagcgggggcagtggtgctgttgcccttttaaactgcggcttgacgggagccgcgcctcctgtcggtggagtcggttataaagggagcagccccgcaggccgccacatagctcccgccaagtcctcggtgccccttgccattttccagccgcgctcccacgagggtcacggcggcggggagaggtggagccgcgagagctcggccgggggccccgcctggtggccgcggccatgacagcggctcgggactggctccttttccgcgcccctcccgccggaggtgaggggaagatgtccatgtcagggttcaaggccaaaccgaagttactggcctctatcttccaggagaaccaggagccacagccgcggctcacgccccaccgcaacattaagattacaagtggacacctgagtcagcaggacctggaatcccagatgagagagcttatctacacgactcagatcttgttgtcacccccattattgacaatccaaaggtgcagaaagcactctgacaaataatgaaacaaccaccatcggttaaatttgatgcaaaaatattgcatctaccagcattttcagttccaattgctaatccagcatttgtggatagctgcaaactgcgatattgctgatgagcgctttgacgccacattccacactaacgtgttggtgaattcttctgggcattgccagtacctgcctccaggcatattcaagagttcctgctacatcgatgtacgctggtttccctttgatgtgcagcactgcaaactgaagtttgggtcctggtcttacggaggctggtccttggatctgcagatgcaggaggcagatatcagtggctatatccccaatggagaatgggacctagtgggaatccccggcaagaggagtgaaaggttctatgagtgctgcaaagagccctaccccgatgtcaccttcacagtgaccatgcgccgcaggacactctactatggcctcaacctgctgatcccctgtgtgctcatctccgccctcgccctgctggtgttcctgcttcctgcagattccggggagaagatttccctggggataacagtcttactctctcttaccgtcttcatgctgctcgtggctgagatcatgcccgcaacatccgattcggtaccattgatagcccagtacttcgccagcaccatgatcatcgtgggcctctcggtggtggtgacggtgatcgtgctgcagtaccaccaccacgaccccgacgggggcaagatgcccaagtggaccagagtcatccttctgaactggtgcgcgtggttcctgcgaatgaagaggcccggggaggacaaggtgcgcccggcctgccagcacaagcagcggcgctgcagcctggccagtgtggagatgagcgccgtggcgccgccgcccgccagcaacgggaacctgctgtacatcggcttccgcggcctggacggcgtgcactgtgtcccgacccccgactctggggtagtgtgtggccgcatggcctgctcccccacgcacgatgagcacctcctgcacggcgggcaaccccccgagggggacccggacttggccaagatcctggaggaggtccgctacattgccaaccgcttccgctgccaggacgaaagcgaggcggtctgcagcgagtggaagttcgccgcctgtgtggtggaccgcctgtgcctcatggccttctcggtcttcaccatcatctgcaccatcggcatcctgatgtcggctcccaacttcgtggaggccgtgtccaaagactttgcgtaaccacgcctggttctgtacatgtggaaaactcacagatgggcaaggcctttggcttggcgagatttgggggtgctaatccaggacagcattacacgccacaactccagtgttcccttctggctgtcagtcgtgttgcttacggtttctttgttactttaggtagtagaatctcagcactttgtttcatattctcagatgggctgatagatatccttggcacatccgtaccatcggtcagcagggccactgagtagtcattttgcccattagcccactgcctggaaagcccttcggagagctccccatggctcctcaccaccgagacagttggttttgcatgtctgcatgaaggtctacctgaaaattcaacatttgctttttgcttgtgtacaaacccagattgaagctaaaataaaccagactcactaaatcctttccaataattgactggtggaaggaaaacaaaaaacaaaaactaaaaacctcttagcttttctgcaattcaactttttatttttatttttatttctatcaaagacggtagagagaaacagcttgatgctgtttctacattaaaaaaaaa

SEQ ID NO: 6087 - DNA, 2143 bp, Homo sapiens
  misc_feature (4)..(4): n is a, c, g, or t
  misc_feature (7)..(7): n is a, c, g, or t
ggcncgngagccgagcggcgaggtgcctctgtggccgcaggcgcaggcccgggcgacagccgagacgtggagcgcgccggctcgctgcagctccgggactcaacatgcgctgctcgccgggaggcgtctggctggcgctggccgcgtcgctcctgcacgtgtccctgcaaggcgagttccagaggaagctttacaaggagctggtcaagaactacaatcccttggagaggcccgtggccaatgactcgcaaccactcaccgtctacttctccctgagcctcctgcagatcatggacgtggatgagaagaaccaagttttaaccaccaacatttggctgcaaatgtcttggacagatcactatttacagtggaatgtgtcagaatatccaggggtgaagactgttcgtttcccagatggccagatttggaaaccagacattcttctctataacagtgctgatgagcgctttgacgccacattccacactaacgtgttggtgaattcttctgggcattgccagtacctgcctccaggcatattcaagagttcctgctacatcgatgtacgctggtttccctttgatgtgcagcactgcaaactgaagtttgggtcctggtcttacggaggctggtccttggatctgcagatgcaggaggcagatatcagtggctatatccccaatggagaatgggacctagtgggaatccccggcaagaggagtgaaaggttctatgagtgctgcaaagagccctaccccgatgtcaccttcacagtgaccatgcgccgcaggacactctactatggcctcaacctgctgatcccctgtgtgctcatctccgccctcgccctgctggtgttcctgcttcctgcagattccggggagaagatttccctggggataacagtcttactctctcttaccgtcttcatgctgctcgtggctgagatcatgcccgcaacatccgattcggtaccattgatagcccagtacttcgccagcaccatgatcatcgtgggcctctcggtggtggtgacggtgatcgtgctgcagtaccaccaccacgaccccgacgggggcaagatgcccaagtggaccagagtcatccttctgaactggtgcgcgtggttcctgcgaatgaagaggcccggggaggacaaggtgcgcccggcctgccagcacaagcagcggcgctgcagcctggccagtgtggagatgagcgccgtggcgccgccgcccgccagcaacgggaacctgctgtacatcggcttccgcggcctggacggcgtgcactgtgtcccgacccccgactctggggtagtgtgtggccgcatggcctgctcccccacgcacgatgagcacctcctgcacggcgggcaaccccccgagggggacccggacttggccaagatcctggaggaggtccgctacattgccaaccgcttccgctgccaggacgaaagcgaggcggtctgcagcgagtggaagttcgccgcctgtgtggtggaccgcctgtgcctcatggccttctcggtcttcaccatcatctgcaccatcggcatcctgatgtcggctcccaacttcgtggaggccgtgtccaaagactttgcgtaaccacgcctggttctgtacatgtggaaaagacagcattacacgccacaactccagtgttcccttctggctgtcagtcgtgttgcttacggtttctttgttactttaggtagtagaatctcagcactttgtttcatattctcagatgggctgatagatatccttggcacatccgtaccatcggtcagcagggccactgagtagtcattttgcccattagcccactgcctggaaagcccttcggagagctccccatggctcctcaccaccgagacagttggttttgcatgtctgcatgaaggtctacctgaaaattcaacatttgctttttgcttgtgtacaaacccagattgaagctaaaataaaccagactcactaaatcctttccaataattgactggtggaaggaaaacaaaaaacaaaaactaaaaacctcttagcttttctgcaattcaactttttatttttatttttatttctatcaaagacggtagagagaaacagcttgatgctgtttctacattaaaaaaaaa

SEQ ID NO: 6088 - DNA, 1993 bp, Homo sapiens
tgttttattttgcattctttacttttattatttagagtctgaagatgctcatggtaaatgcagattatagagctaactttttgcacaaaaagcccacaaaacagtctttgagagagcatgtcagtgttacgtttggattttaaaagacagtgaagcttagctgagattctgttttacagattttgcgaataaataaaaagacagattccgtttgctctggactgtgttagctgcagtgcggagggcggaaccggctgaaggaactgctgtgtattttcagcacatctcagtcagcttccgtttcagtcttctgtttccatcacccacacaggcatattcaagagttcctgctacatcgatgtacgctggtttccctttgatgtgcagcactgcaaactgaagtttgggtcctggtcttacggaggctggtccttggatctgcagatgcaggaggcagatatcagtggctatatccccaatggagaatgggacctagtgggaatccccggcaagaggagtgaaaggttctatgagtgctgcaaagagccctaccccgatgtcaccttcacagtgaccatgcgccgcaggacactctactatggcctcaacctgctgatcccctgtgtgctcatctccgccctcgccctgctggtgttcctgcttcctgcagattccggggagaagatttccctggggataacagtcttactctctcttaccgtcttcatgctgctcgtggctgagatcatgcccgcaacatccgattcggtaccattgatagcccagtacttcgccagcaccatgatcatcgtgggcctctcggtggtggtgacggtgatcgtgctgcagtaccaccaccacgaccccgacgggggcaagatgcccaagtggaccagagtcatccttctgaactggtgcgcgtggttcctgcgaatgaagaggcccggggaggacaaggtgcgcccggcctgccagcacaagcagcggcgctgcagcctggccagtgtggagatgagcgccgtggcgccgccgcccgccagcaacgggaacctgctgtacatcggcttccgcggcctggacggcgtgcactgtgtcccgacccccgactctggggtagtgtgtggccgcatggcctgctcccccacgcacgatgagcacctcctgcacggcgggcaaccccccgagggggacccggacttggccaagatcctggaggaggtccgctacattgccaaccgcttccgctgccaggacgaaagcgaggcggtctgcagcgagtggaagttcgccgcctgtgtggtggaccgcctgtgcctcatggccttctcggtcttcaccatcatctgcaccatcggcatcctgatgtcggctcccaacttcgtggaggccgtgtccaaagactttgcgtaaccacgcctggttctgtacatgtggaaaactcacagatgggcaaggcctttggcttggcgagatttgggggtgctaatccaggacagcattacacgccacaactccagtgttcccttctggctgtcagtcgtgttgcttacggtttctttgttactttaggtagtagaatctcagcactttgtttcatattctcagatgggctgatagatatccttggcacatccgtaccatcggtcagcagggccactgagtagtcattttgcccattagcccactgcctggaaagcccttcggagagctccccatggctcctcaccaccgagacagttggttttgcatgtctgcatgaaggtctacctgaaaattcaacatttgctttttgcttgtgtacaaacccagattgaagctaaaataaaccagactcactaaatcctttccaataattgactggtggaaggaaaacaaaaaacaaaaactaaaaacctcttagcttttctgcaattcaactttttatttttatttttatttctatcaaagacggtagagagaaacagcttgatgctgtttctacattaaaaaaaaa

SEQ ID NO: 6089 - DNA, 2324 bp, Homo sapiens
agccctttcccaggcggtagcgggggcagtggtgctgttgcccttttaaactgcggcttgacgggagccgcgcctcctgtcggtggagtcggttataaagggagcagccccgcaggccgccacatagctcccgccaagtcctcggtgccccttgccattttccagccgcgctcccacgagggtcacggcggcggggagaggtggagccgcgagagctcggccgggggccccgcctggtggccgcggccatgacagcggctcgggactggctccttttccgcgcccctcccgccggaggtgaggggaagatgtccatgtcagggttcaaggccaaaccgaagttactggcctctatcttccaggagaaccaggagccacagccgcggctcacgccccaccgcaacattaagattacaagtggacacctgagtcagcaggacctggaatcccagatgagagagcttatctacacgactcagatcttgttgtcacccccattattgacaatccaaaggtgcagaaagcactctgacaattccaattgctaatccagcatttgtggatagctgcaaactgcgatattgctgatgagcgctttgacgccacattccacactaacgtgttggtgaattcttctgggcattgccagtacctgcctccaggcatattcaagagttcctgctacatcgatgtacgctggtttccctttgatgtgcagcactgcaaactgaagtttgggtcctggtcttacggaggctggtccttggatctgcagatgcaggaggcagatatcagtggctatatccccaatggagaatgggacctagtgggaatccccggcaagaggagtgaaaggttctatgagtgctgcaaagagccctaccccgatgtcaccttcacagtgaccatgcgccgcaggacactctactatggcctcaacctgctgatcccctgtgtgctcatctccgccctcgccctgctggtgttcctgcttcctgcagattccggggagaagatttccctggggataacagtcttactctctcttaccgtcttcatgctgctcgtggctgagatcatgcccgcaacatccgattcggtaccattgatagcccagtacttcgccagcaccatgatcatcgtgggcctctcggtggtggtgacggtgatcgtgctgcagtaccaccaccacgaccccgacgggggcaagatgcccaagtggaccagagtcatccttctgaactggtgcgcgtggttcctgcgaatgaagaggcccggggaggacaaggtgcgcccggcctgccagcacaagcagcggcgctgcagcctggccagtgtggagatgagcgccgtggcgccgccgcccgccagcaacgggaacctgctgtacatcggcttccgcggcctggacggcgtgcactgtgtcccgacccccgactctggggtagtgtgtggccgcatggcctgctcccccacgcacgatgagcacctcctgcacggcgggcaaccccccgagggggacccggacttggccaagatcctggaggaggtccgctacattgccaaccgcttccgctgccaggacgaaagcgaggcggtctgcagcgagtggaagttcgccgcctgtgtggtggaccgcctgtgcctcatggccttctcggtcttcaccatcatctgcaccatcggcatcctgatgtcggctcccaacttcgtggaggccgtgtccaaagactttgcgtaaccacgcctggttctgtacatgtggaaaactcacagatgggcaaggcctttggcttggcgagatttgggggtgctaatccaggacagcattacacgccacaactccagtgttcccttctggctgtcagtcgtgttgcttacggtttctttgttactttaggtagtagaatctcagcactttgtttcatattctcagatgggctgatagatatccttggcacatccgtaccatcggtcagcagggccactgagtagtcattttgcccattagcccactgcctggaaagcccttcggagagctccccatggctcctcaccaccgagacagttggttttgcatgtctgcatgaaggtctacctgaaaattcaacatttgctttttgcttgtgtacaaacccagattgaagctaaaataaaccagactcactaaatcctttccaataattgactggtggaaggaaaacaaaaaacaaaaactaaaaacctcttagcttttctgcaattcaactttttatttttatttttatttctatcaaagacggtagagagaaacagcttgatgctgtttctacattaaaaaaaaa

SEQ ID NO: 6090 - DNA, 2006 bp, Homo sapiens
  misc_feature (4)..(4): n is a, c, g, or t
  misc_feature (7)..(7): n is a, c, g, or t
ggcncgngagccgagcggcgaggtgcctctgtggccgcaggcgcaggcccgggcgacagccgagacgtggagcgcgccggctcgctgcagctccgggactcaacatgcgctgctcgccgggaggcgtctggctggcgctggccgcgtcgctcctgcacgtgtccctgcaaggcgagttccagaggaagctttacaaggagctggtcaagaactacaatcccttggagaggcccgtggccaatgactcgcaaccactcaccgtctacttctccctgagcctcctgcagatcatggacgtggatgagaagaaccaagttttaaccaccaacatttggctgcaaatggcatattcaagagttcctgctacatcgatgtacgctggtttccctttgatgtgcagcactgcaaactgaagtttgggtcctggtcttacggaggctggtccttggatctgcagatgcaggaggcagatatcagtggctatatccccaatggagaatgggacctagtgggaatccccggcaagaggagtgaaaggttctatgagtgctgcaaagagccctaccccgatgtcaccttcacagtgaccatgcgccgcaggacactctactatggcctcaacctgctgatcccctgtgtgctcatctccgccctcgccctgctggtgttcctgcttcctgcagattccggggagaagatttccctggggataacagtcttactctctcttaccgtcttcatgctgctcgtggctgagatcatgcccgcaacatccgattcggtaccattgatagcccagtacttcgccagcaccatgatcatcgtgggcctctcggtggtggtgacggtgatcgtgctgcagtaccaccaccacgaccccgacgggggcaagatgcccaagtggaccagagtcatccttctgaactggtgcgcgtggttcctgcgaatgaagaggcccggggaggacaaggtgcgcccggcctgccagcacaagcagcggcgctgcagcctggccagtgtggagatgagcgccgtggcgccgccgcccgccagcaacgggaacctgctgtacatcggcttccgcggcctggacggcgtgcactgtgtcccgacccccgactctggggtagtgtgtggccgcatggcctgctcccccacgcacgatgagcacctcctgcacggcgggcaaccccccgagggggacccggacttggccaagatcctggaggaggtccgctacattgccaaccgcttccgctgccaggacgaaagcgaggcggtctgcagcgagtggaagttcgccgcctgtgtggtggaccgcctgtgcctcatggccttctcggtcttcaccatcatctgcaccatcggcatcctgatgtcggctcccaacttcgtggaggccgtgtccaaagactttgcgtaaccacgcctggttctgtacatgtggaaaactcacagatgggcaaggcctttggcttggcgagatttgggggtgctaatccaggacagcattacacgccacaactccagtgttcccttctggctgtcagtcgtgttgcttacggtttctttgttactttaggtagtagaatctcagcactttgtttcatattctcagatgggctgatagatatccttggcacatccgtaccatcggtcagcagggccactgagtagtcattttgcccattagcccactgcctggaaagcccttcggagagctccccatggctcctcaccaccgagacagttggttttgcatgtctgcatgaaggtctacctgaaaattcaacatttgctttttgcttgtgtacaaacccagattgaagctaaaataaaccagactcactaaatcctttccaataattgactggtggaaggaaaacaaaaaacaaaaactaaaaacctcttagcttttctgcaattcaactttttatttttatttttatttctatcaaagacggtagagagaaacagcttgatgctgtttctacattaaaaaaaaa

SEQ ID NO: 6091 - DNA, 1012 bp, Homo sapiens
agccctttcccaggcggtagcgggggcagtggtgctgttgcccttttaaactgcggcttgacgggagccgcgcctcctgtcggtggagtcggttataaagggagcagccccgcaggccgccacatagctcccgccaagtcctcggtgccccttgccattttccagccgcgctcccacgagggtcacggcggcggggagaggtggagccgcgagagctcggccgggggccccgcctggtggccgcggccatgacagcggctcgggactggctccttttccgcgcccctcccgccggaggtgaggggaagatgtccatgtcagggttcaaggccaaaccgaagttactggcctctatcttccaggagaaccaggagccacagccgcggctcacgccccaccgcaacattaagattacaagtggacacctgagtcagcaggacctggaatcccagatgagagagcttatctacacgactcagatcttgttgtcacccccattattgacaatccaaaggtgcagaaagcactctgacaaataatgaaacaaccaccatcggttaaatttgatgcaaaaatattgcatctaccagcattttcaggtaggatcataaaggagttatcgaacatgtagactgtctgtatacagatacgaatatgaaatttattcacaaatggaatatttgtatgtgaacaactaaatttattttgtcttgacaattggttatattcttgggtcagtgttatgtgaattgtaaataatctgtaattcatttgtgccagctgttgacatttctcagctgagtctgggctgccctgtcctcttgtgagtggggaggttcctgtagatctgggcaagttttcctgtagagtgggtggggggcctcctcccttccgttcatagagctggttgaatttccaccatttatggcaggtgtaggtgcacagggttggggacaagaaggaaggattgggattctattggcgggaccaggacatttgagaacgggactag

SEQ ID NO: 6092 - DNA, 439 bp, Homo sapiens
cctggcatttatttcccccactgacacgagaccattaaaaggtagaaatccccccctcaaaactagcatggtgatctgaacacaagaaggcacgtttcacagttactgtgtgtactgaggaataaaagaaactgatggagaagattgatcttttttaaccctctgggctccaatttttttcactttgcctgacccctctcccaagaggaatctttctcaactttttgatggattgtctcaccagacagtatatatgtgaaactgtgccaagaagtgatgggacaaacaacagggaaataaatggacgatttagctagagagaattttgttgtcagttgctagtcagagttgcagctcataggccacagttcgggtgtctgacatgcttgctgaataagtgtatgctcaataaactgcccagtagtctttagaaaaattg

SEQ ID NO: 6093 - DNA, 485 bp, Homo sapiens
tcctcaatgaatgaggacggtactgttattattcccattttacagtgaggaaattgagacacagagggcctatgtaaatagcccaaggtcaaggggctataaaatagcaagccaagcccaggacttagaactcaggctgtctggtctgagtcccagcgtctgaatcacatgcccttctatcatgttactgttgttagtgacaatctccacatgccctaaactaataccactctcctgaaagaacaaggggtagcagaactttgctgccaaaatcctgcataatcatagaaacggagtatatcatccgtgttttgacttattcagaagagaagtcatgaggaaataggaaaataataatcacatttaaaaaaattatacagatcttcattgtagagaacaggcaattttatttgaacaaaattcttctgaaactgaaacatcaagggaatgtttgaccaaataaaccattaatactttggtcctga

SEQ ID NO: 6094 - DNA, 412 bp, Homo sapiens
cacatggggtgtgtatgtatataagtgtatgtgtttttcctgctatatttatttgaggcagctgttttatagctttcagctttaaagttatagctaagtgtgtatttgtttgatagaaggctcgagaacctcttttactgccagtacacgtaaagcttggctaagcagacgcatcaggagcaaaccatttgtgttcaccaatctgtctcggcaagtcccagggccactatcttgctagaagccactgtgtgcttttgaaagcatgaaattagttttatactgagcacatggtttctcgtttagcagctctttttatggtaatggtcaatttatggttcactgccaggatttcggtgtactgtcaaagccgatagcttctgctaaggcgtctctatgaagatttaaaaaaaaa

SEQ ID NO: 6095 - DNA, 476 bp, Homo sapiens
gtttaatttacagatttctggattccccacctggacacacatgctgaatccaaaggtctgggtaggacatggtatctcaaaaaaacaaagcaaattaaagaattaaaaatgggttctgccactgcgcccggccttgagtacagaggtttgctgaggttccaatttgactgatgtggcaagactgcctcataggaggtgtagcgtcctcccgtcaggatgcgcataatgtctgattgtcacagacattatgtcacaggatgcgcataatgctgatggcagcagctgtgggtgtgcagtgcctggatccacggattcatttggggttgcaaagtgatggtattctcattctgttattccttttcatttattacatggaggagttctatgcacacaaactttccctcatctcccatttgattactcagcggtgcaatttgcaaagaaaaggaaggataaatacttgattctttccccca

SEQ ID NO: 6096 - DNA, 355 bp, Homo sapiens
ggtagcatctaccaaactctgggtgtgtgccaagcactgttctgagggcttaacgtgcatcagtactcatttaaaatcctccacacatccctataatgtaggatctactactgtccccatttgacagatgagaaaaggaaggctcagaggaggtaaccggcatggcttcttgccactgcctagcagtggaggccctcttctcaccagacagtggagcttccctgctgggtgacctcttgaactcaggcatgcctggagtttagctttggaaaggaggttgttatatgacatgttttatttagtctgcaatgtacaccagtggaggacatgaattctatacctgtaggacagtgca

SEQ ID NO: 6097 - DNA, 397 bp, Homo sapiens
tttttttttcagacagagttttgctctgtcgcccaggcagaccagttgcaccaatacaatggtgcaatcttggctcactgcaacctctgcctcctgggttcaagcgattaccctgcctcagcctcccgagtagctggaattacaggcgtctgcgaccacgcccagctcatttttgtagttttagtagagacaggatttcaccatgttggtgaggctggtcttgaactcctgacctcaggtgatccacccgcctaggcctcccaaagtgatgggattacaggtgtgagccactgcccctggccaaaattcacctattttaaacgtacaattcaatgctcttcaataaatttgttagatagtgcaaccatcaccccaatacagtactaggatattttca

SEQ ID NO: 6098 - DNA, 501 bp, Homo sapiens
atgtctgcttttcaatgcaatggcaataaccggaggttcagcagcaatctggaggccatgaggcacccctgatggtaaagagtcaatgagaggaagatgttgaggtagagggatgggcagagtgtgagtctgttcttagtgacctcagacctcactttctggacttattatatgcacaggtaaacgtctccaaagctgaagctaccataaatcagattttccatcacttgaagccaaaagcattcctaaccaacacagatagagaccccaggccgccaaagccatacttgttcatagcatcttgctgccttttactgtcaggttagagcctctctatttagatcaaagtgaaggagacagactaactccagccccttcttaccaaggcctggggaggtgagaacccggcactgagacccagcctatttcaaggcctgggccaaagtcttgccaccaactccttctgtgagtttgggggaaaattctaggactttcctgggc

SEQ ID NO: 6099 - DNA, 542 bp, Homo sapiens
  misc_feature (3)..(3): n is a, c, g, or t
  misc_feature (56)..(56): n is a, c, g, or t
  misc_feature (70)..(70): n is a, c, g, or t
aanattttgggtaaacatttttattttctcccttgttatgccagagtccagattgnaaagtcaagatatncagggttaaataaaacccaccttgatgagaatttatgatttgtagggcatgactctctaggccccttagacaggaatttgggcaagatttaacaaatcagagctgagtcctcaaaatcctattattgtttcatgaatatggtttaagaatattaattacggagggcacggtggctcatacctttcgtcccggctacttgggaggctgaggcacaagaatcgcttgaacctaggaggcagaggttacagtgagccaagatcatgctactgcactccagcctgggtgacagactgagactctgtctcaaaaaagaaaatgaaagaaaaggacaaagtaacaggaagaaaagaaaaccgtcatgtcaaagagctaatgcccttcatatatgaaaagttcttccaaattcgtaagaaaaatgttcaaaaatgatcacttcaatagaaaaataggcaaaggacatgagccaatttac

SEQ ID NO: 6100 - DNA, 481 bp, Homo sapiens
acagtgctttaagaaaaaggtaatggtcaggtgcagtggctcatgcctgtaatccctaattccagcactttgggaggctgaggcaggcagatctcttgaggttaggagttcgagaccagcctggccaacgtagtgaaacactatctctactggggaaaaaaaaaattagtcaggggtggtggctcatacctttcgtcccggctacttgggaggctgaggcacaagaatcgcttgaacctaggaggcagaggttacagtgagccaagatcatgctactgcactccagcctgggtgacagactgagactctgtctcaaaaaagaaaatgaaagaaaaggacaaagtaacaggaagaaaagaaaaccgtcatgtcaaagagctaatgcccttcatatatgaaaagttcttccaaattcgtaagaaaaatgttcaaaaatgatcacttcaatagaaaaataggcaaaggacatgagccaatttac

SEQ ID NO: 6101 - DNA, 579 bp, Homo sapiens
taggatctctcaagaaaatccatcctctgaattggggttttgtctacattcaggaggtcaggaagaactccactagccatcataagttgtcctctttaccactccgagggaactatgctagctgtcttattcctctccaaataagaaagtctgattgctatctgaggaagaagcccccatcaaatacagtttctcaaatataaattctattttagtgggcaaaggctgcttatttgagcaatcacgattaaagcaacagcatttcctggaaataaaagtgcatgcagaggtgtttggggagcccaaagcattattgacaccagccgggaaattaatctctagaggaagctcttcttcaagtgtctctgttaagggctaaacacaccctaaatgtaacttcagcatagccatgctaactgttcctcacactccctgagctaccagcctgagacaggcatcagcccagcagagcttggcattataggacatccatggaggcagggcctgactctattaggtcatctgcccaacttctccagactctgcatatttaaaacacacaaatttcctttccctcca

SEQ ID NO: 6102 - DNA, 544 bp, Homo sapiens
gtctctgggcttgagtgcaactgccaaccgtgctgggaagggctgggaggaagagccccggccccactcccctgggtcccacggggctgacacgtgccctgatgaccaggaaagcaccatgtctgggctcagcgtgggcggctggggcaccccgtcctgcccagggtgatcttgagctgtccctctgtgtccttcagcagagtgagtggctgagcgtccaggctgcgcgatgagcacacactactactgatggcctttcgggggtccctgccccagccggagaggccggtgcacagggccccgccaggggctgggggcatcccggcttccacaatgcagctgctctgggcctcgggagaggagagaccccagtcccctgggctcgcttcccgggcctcgtctgtctgggtcctttggtcaatgttgcacagtttttattgctcccatccctttttgtagtgggctgggttttaagttataaatgttaactgcctctgggtgaaaaagtttttaataaacacctattacctcttgactggtccac

SEQ ID NO: 6103 - DNA, 694 bp, Homo sapiens
ttgcccccactccccaggcttctacctgatctcaccctcggagtttgagcgcttctctctctccaccaagtggctggtggagccccggtgtctggtggattcagcagaaaccaagaaccaccgccctggtaacggtgcgggccccaagaaggccccgagccgagccaggaactcagggactcagagtgatggcgaggagaagcagcccggcctggtgatggagcgcgctctgctcagtgatgagagagtcctgaaggaaatccagagcacactggagggagaccgcgggagcggcaactggcgttcacatcgagcggccgtggggtgcagcctcagcaatggcggagcagagtgagtggctgagcgtccaggctgcgcgatgagcacacactactactgatggcctttcgggggtccctgccccagccggagaggccggtgcacagggccccgccaggggctgggggcatcccggcttccacaatgcagctgctctgggcctcgggagaggagagaccccagtcccctgggctcgcttcccgggcctcgtctgtctgggtcctttggtcaatgttgcacagtttttattgctcccatccctttttgtagtgggctgggttttaagttataaatgttaactgcctctgggtgaaaaagtttttaataaacacctattacctcttgactggtccac

SEQ ID NO: 6104 - DNA, 651 bp, Homo sapiens
ttgcccccactccccaggcttctacctgatctcaccctcggagtttgagcgcttctctctctccaccaagtggctggtggagccccggtgtctggtggattcagcagaaaccaagaaccaccgccctggtaacggtgcgggccccaagaaggccccgagccgagccaggaactcagggactcagagtgatggcgaggagaagcagcccggcctggtgatggagcgcgctctgctcagtgatgagagagcggcaactggcgttcacatcgagcggccgtggggtgcagcctcagcaatggcggagcagagtgagtggctgagcgtccaggctgcgcgatgagcacacactactactgatggcctttcgggggtccctgccccagccggagaggccggtgcacagggccccgccaggggctgggggcatcccggcttccacaatgcagctgctctgggcctcgggagaggagagaccccagtcccctgggctcgcttcccgggcctcgtctgtctgggtcctttggtcaatgttgcacagtttttattgctcccatccctttttgtagtgggctgggttttaagttataaatgttaactgcctctgggtgaaaaagtttttaataaacacctattacctcttgactggtccac

SEQ ID NO: 6105 - DNA, 2753 bp, Homo sapiens
cctcaaattgctgggacaaaaagtacaacagtgtagcactaaaggaaccttctagaatgtacatagtctgtacaataaatacaacagaaaattgcacagtcaatttctgctggctggactgaactgaagatcaatcctcacaattcagactgagggttgagacaaaactttaaggatacatcttggaccatatcgtatttcattcttctaatggtggtttgggcttgtcttctagtctgggccgctctaaacatttataattccaacattgtggatttcatcttatatctgtggaccatcctagtttattctcccataagtcttagaagctttatggtgattattttgaggttttcattctcgcataaagcacaatgctgtcttcatcagaaaacagttggcataagaattaaacatatgaacatcacaaaacaatttataaaaacttcttaaatatacgctttgggctagttgcaaagactatgctaatagcacttccagtgagagtgatatatttaagtgtactggatctggaatggtgttttggtttggggggaatttttttttttcctggcaaatcacatgtgttgttgatgtgagtatctgatgaaaaaacaatgtcagaataaccgacatgaaaattttttaggataacttggtgcctacctgaaaaatgtattgtgttttagactcttgatttcaaaaggttccacagaactagtctgcgcttaccttacccatgtttatatatagctgtcctacagggagcttttatttagaaaatgtctgcataatgttagattcttctcctgtctacattatgcactacataattggacttcattatgcttttgaaatgcttatctgcctgtcacataagttaaactatttaatttgttttgaatgttttggattgctacacaatacaatattctaaatttaggcatgagggtttttttgttttatttttactttttttttgtcatcgcactatggaacacaaatggaattctcttaatttataagaagatagttgcagttaaattttgaaaatggttgtaatgagccatgaagttcaatctttataatataggtactgctctttcagacaaatagtccattttcgatgacttattattttgttgaaattgctttaactgctaatcactgtggttgccaaatatttacttcaggagcaaagattttcaaacaagcatacacgatgcaaaataccaatctggcttctagtctctttactgttttcgtttcactcagattagctcagttttctcatcaaagcagaatgctatcttgtatgtatttttttcattacaagccccatgagctgcttttatgctgaaaatggtcatttccctgttcacttactgacatgtgaagaagggtttcttgctttcttaaacatttccgtaaggcaggctagaaatgtaatacttcaaatgtttgatgattatggtcttttgataggaatagattctgcttgggatatatatccaggcactctctaaggtctagggttgatattaacaaaggaatgtacttagaatagcagtacattttatgcaaatatggaaattattttaagaaacaatgacatatcaaaactgctttttacatgattttgaaatagactagaaagctttccctatagacatattaatattccaatcataactttaattcaagaatgcagttttaccaaaagaaaaatttgaaaatttctattcaggctactggaattggttattaaaagaaaaaggaaaaagaagaatcttgctgctttcagtatttcctgatttttttgtaaatataaagaggaacttcaattatgaaaaatttttaaaagatatatatatctatatatctatatatatgtactgttttgtttcctgtcttgaagattttgagttatggttattggtttcagattgattaattcacatatgctgtgttttgaaatgagatcccattagctttttttttttttttttttttcaatataaagtgttttctttaaaagtcatattggttcgtggcctagtgccttggattttacatatttttctttttaaatgcaaaaccttttcaacaaaatagtgtttgtcatcaggttggtactaaacatttataattactgtgtaattataaacaaaaatacataaagctttgaatataattatgtagcataaaagttaaggttgttcactatgatggcatcttagaattaaacaaaacttttactagggctgaaaagagaagactgatttaatgtggtgtgattattctgaagataaatgtctggctacagggaatattttgtactaaaaaatgattacacatatggctgtgtgtgtttgagtctgtgtctgtgagagagccagagagagtgagagagattgacagagaaagggagagacacacacacgccccttgaattgctttaactcctaagtgtttcagtcctcattccggtaaactccccatgctgattctttgttttaaactgaaccataggtacagtttcctttttgccaaatgtcaaaacaggtacaaattttaaaatgtaatgctttttaaatagaaaaatgtataaaattagaagtgcccacatataaaaaatacttgagatgaagattatctttagtgaatatcatctgcatatctctgtaagttcaattgtgtttcttacagtccctgtcatattaccaacagaggcaataaaagctgcagtgaaa

SEQ ID NO: 6106 - DNA, 2699 bp, Homo sapiens
cctcaaattgctgggacaaaaagtacaacagtgtagcactaaaggaaccttctagaatgtacatagtctgtacaataaatacaacagaaaattgcacagtcaatttctgctggctggactgaactgaagatcaatcctcacaattcagactgagggttgagacaaaactttaaggatacatcttggaccatatcgtatttcattcttctaatggtggtttgggcttgtcttctagtctgggccgctctaaacatttataattccaacattgtggatttcatcttatatctgtggaccatcctagtttattctcccataagtcttagaagctttatggtgattattttgaggttttcattctcgcataaagcacaatgctgtcttcatcagaaaacagttggcataagaattaaacatatgaacatcacaaaacaatttataaaaacttcttaaatatacgctttgggctagttgcaaagactatgctaatagcacttccagtgagagtgatatatttaagtgtactggatctggaatggtgttttggtttggggggaatttttttttttcctggcaaatcacatgtgttgttgatgtgagtatctgatgaaaaaacaatgtcagaataaccgacatgaaaattttttaggataacttggtgcctacctgaaaaatgtattgtgttttagactcttgatttcaaaaggttccacagaactagtctgcgcttaccttacccatgtttatatatagctgtcctacagggagcttttatttagaaaatgtctgcataatgttagattcttctcctgtctacattatgcactacataattggacttcattatgcttttgaaatgcttatctgcctgtcacataagttaaactatttaatttgttttgaatgttttggattgctacacaatacaatattctaaatttaggcatgagggtttttttgttttatttttactttttttttgtcatcgcactatggaacacaaatggaattctcttaatttataagaagatagttgcagttaaattttgaaaatggttgtaatgagccatgaagttcaatctttataatataggtactgctctttcagacaaatagtccattttcgatgacttattattttgttgaaattgctttaactgctaatcactgtggttgccaaatatttacttcaggagcaaagattttcaaacaagcatacacgatgcctcagttttctcatcaaagcagaatgctatcttgtatgtatttttttcattacaagccccatgagctgcttttatgctgaaaatggtcatttccctgttcacttactgacatgtgaagaagggtttcttgctttcttaaacatttccgtaaggcaggctagaaatgtaatacttcaaatgtttgatgattatggtcttttgataggaatagattctgcttgggatatatatccaggcactctctaaggtctagggttgatattaacaaaggaatgtacttagaatagcagtacattttatgcaaatatggaaattattttaagaaacaatgacatatcaaaactgctttttacatgattttgaaatagactagaaagctttccctatagacatattaatattccaatcataactttaattcaagaatgcagttttaccaaaagaaaaatttgaaaatttctattcaggctactggaattggttattaaaagaaaaaggaaaaagaagaatcttgctgctttcagtatttcctgatttttttgtaaatataaagaggaacttcaattatgaaaaatttttaaaagatatatatatctatatatctatatatatgtactgttttgtttcctgtcttgaagattttgagttatggttattggtttcagattgattaattcacatatgctgtgttttgaaatgagatcccattagctttttttttttttttttttttcaatataaagtgttttctttaaaagtcatattggttcgtggcctagtgccttggattttacatatttttctttttaaatgcaaaaccttttcaacaaaatagtgtttgtcatcaggttggtactaaacatttataattactgtgtaattataaacaaaaatacataaagctttgaatataattatgtagcataaaagttaaggttgttcactatgatggcatcttagaattaaacaaaacttttactagggctgaaaagagaagactgatttaatgtggtgtgattattctgaagataaatgtctggctacagggaatattttgtactaaaaaatgattacacatatggctgtgtgtgtttgagtctgtgtctgtgagagagccagagagagtgagagagattgacagagaaagggagagacacacacacgccccttgaattgctttaactcctaagtgtttcagtcctcattccggtaaactccccatgctgattctttgttttaaactgaaccataggtacagtttcctttttgccaaatgtcaaaacaggtacaaattttaaaatgtaatgctttttaaatagaaaaatgtataaaattagaagtgcccacatataaaaaatacttgagatgaagattatctttagtgaatatcatctgcatatctctgtaagttcaattgtgtttcttacagtccctgtcatattaccaacagaggcaataaaagctgcagtgaaa

SEQ ID NO: 6107 - DNA, 2597 bp, Homo sapiens
cctcaaattgctgggacaaaaagtacaacagtgtagcactaaaggaaccttctagaatgtacatagtctgtacaataaatacaacagaaaattgcacagtcaatttctgctggctggactgaactgaagatcaatcctcacaattcagactgagggttgagacaaaactttaaggatacatcttggaccatatcgtatttcattcttctaatggtggtttgggcttgtcttctagtctgggccgctctaaacatttataattccaacattgtggatttcatcttatatctgtggaccatcctagtttattctcccataagtcttagaagctttatggtgattattttgaggttttcattctcgcataaagcacaatgctgtcttcatcagaaaacagttggcataagaattaaacatatgaacatcacaaaacaatttataaaaacttcttaaatatacgctttgggctagttgcaaagactatgctaatagcacttccagtgagagtgatatatttaagtgtactggatctggaatggtgttttggtttggggggaatttttttttttcctggcaaatcacatgtgttgttgatgtgagtatctgatgaaaaaacaatgtcagaataaccgacatgaaaattttttaggataacttggtgcctacctgaaaaatgtattgtgttttagactcttgatttcaaaaggttccacagaactagtctgcgcttaccttacccatgtttatatatagctgtcctacagggagcttttatttagaaaatgtctgcataatgttagattcttctcctgtctacattatgcactacataattggacttcattatgcttttgaaatgcttatctgcctgtcacataagttaaactatttaatttgttttgaatgttttggattgctacacaatacaatattctaaatttaggcatgagggtttttttgttttatttttactttttttttgtcatcgcactatggaacacaaatggaattctcttaatttataagaagatagttgcagttaaattttgaaaatggttgtaatgagccatgaagttcaatctttataatataggtactgctctttcagacaaatagtccattttcgatgacttattattttgttgaaattgctttaactgctaatcactgtggttgccaaatatttacttcaggagcaaagattttcaaacaagcatacacgatgcaaaataccaatctggcttctagtctctttactgttttcgtttcactcagattagctcagttttctcatcaaagcagaatgctatcttgtatgtatttttttcattacaagccccatgagctgcttttatgctgaaaatggtcatttccctgttcacttactgacatgtgaagaagggtttcttgctttcttaaacatttccgtaaggcaggctagaaatgtaatacttcaaatgtttgatgattatggtcttttgataggaatagattctgcttgggatatatatccaggcactctctaaggtctagggttgatattaacaaaggaatgtacttagaatagcagtacattttatgcaaatatggaaattattttaagaaacaatgacatatcaaaactgctttttacatgattttgaaatagactagaaagctttccctatagacatattaatattccaatcataactttaattcaagaatgcagttttaccaaaagaaaaatttgaaaatttctattcaggctactggaattggttattaaaagaaaaaggaaaaagaagaatcttgctgctttcagtatttcctgatttttttgtaaatataaagaggaacttcaattatgaaaaatttttaaaagatatatatatctatatatctatatatatgtactgttttgtttcctgtcttgaagattttgagttatggttattggtttcagattgattaattcacatatgctgtgttttgaaatgagatcccattagctttttttttttttttttttttcaatataaagtgttttctttaaaagtcatattggttcgtggcctagtgccttggattttacatatttttctttttaaatgcaaaaccttttcaggctgaaaagagaagactgatttaatgtggtgtgattattctgaagataaatgtctggctacagggaatattttgtactaaaaaatgattacacatatggctgtgtgtgtttgagtctgtgtctgtgagagagccagagagagtgagagagattgacagagaaagggagagacacacacacgccccttgaattgctttaactcctaagtgtttcagtcctcattccggtaaactccccatgctgattctttgttttaaactgaaccataggtacagtttcctttttgccaaatgtcaaaacaggtacaaattttaaaatgtaatgctttttaaatagaaaaatgtataaaattagaagtgcccacatataaaaaatacttgagatgaagattatctttagtgaatatcatctgcatatctctgtaagttcaattgtgtttcttacagtccctgtcatattaccaacagaggcaataaaagctgcagtgaaa

SEQ ID NO: 6108 - DNA, 2487 bp, Homo sapiens
cctcaaattgctgggacaaaaagtacaacagtgtagcactaaaggaaccttctagaatgtacatagtctgtacaataaatacaacagaaaattgcacagtcaatttctgctggctggactgaactgaagatcaatcctcacaattcagactgagggttgagacaaaactttaaggatacatcttggaccatatcgtatttcattcttctaatggtggtttgggcttgtcttctagtctgggccgctctaaacatttataattccaacattgtggatttcatcttatatctgtggaccatcctagtttattctcccataagtcttagaagctttatggtgattattttgaggttttcattctcgcataaagcacaatgctgtcttcatcagaaaacagttggcataagaattaaacatatgaacatcacaaaacaatttataaaaacttcttaaatatacgctttgggctagttgcaaagactatgctaatagcacttccagtgagagtgatatatttaagtgtactggatctggaatggtgttttggtttggggggaatttttttttttcctggcaaatcacatgtgttgttgatgtgagtatctgatgaaaaaacaatgtcagaataaccgacatgaaaattttttaggataacttggtgcctacctgaaaaatgtattgtgttttagactcttgatttcaaaaggttccacagaactagtctgcgcttaccttacccatgtttatatatagctgtcctacagggagcttttatttagaaaatgtctgcataatgttagattcttctcctgtctacattatgcactacataattggacttcattatgcttttgaaatgcttatctgcctgtcacataagttaaactatttaatttgttttgaatgttttggattgctacacaatacaatattctaaatttaggcatgagggtttttttgttttatttttactttttttttgtcatcgcactatggaacacaaatggaattctcttaatttataagaagatagttgcagttaaattttgaaaatggttgtaatgagccatgaagttcaatctttataatataggtactgctctttcagacaaatagtccattttcgatgacttattattttgttgaaattgctttaactgctaatcactgtggttgccaaatatttacttcaggagcaaagattttcaaacaagcatacacgatgcaaaataccaatctggcttctagtctctttactgttttcgtttcactcagattagctcagttttctcatcaaagcagaatgctatcttgtatgtatttttttcattacaagccccatgagctgcttttatgctgaaaatggtcatttccctgttcacttactgacatgtgaagaagggtttcttgctttcttaaacatttccgtaaggcaggctagaaatgtaatacttcaaatgtttgatgattatggtcttttgataggaatagattctgcttgggatatatatccaggcactctctaaggtctagggttgatattaacaaaggaatgtacttagaatagcagtacattttatgcaaatatggaaattattttaagaaacaatgacatatcaaaactgctttttacatgattttgaaatagactagaaagctttccctatagacatattaatattccaatcataactttaattcaagaatgcagttttaccaaaagaaaaatttgaaaatttctattcaggctactggaattggttattaaaagaaaaaggaaaaagaagaatcttgctgctttcagtatttcctgatttttttgtaaatataaagaggaacttcaattatgaaaaatttttaaaagatatatatatctatatatctatatatatgtactgttttgtttcctgtcttgaagattttgagttatggttattggtttcagattgattaattcacatatgctgtgttttgaaatgagatcccattagctttttttttttttttttttttcaatataaagtgttttctttaaaagtcatattggttcgtggcctagtgccttggattttacatatttttctttttaaatgcaaaaccttttcaacaaaatagtgtttgtcatcaggttggtactaaacatttataattactgtgtaattataaacaaaaatacataaagctttgaatataattatgtagcataaaagttaaggttgttcactatgatggcatcttagaattaaacaaaacttttactagggctgaaaagagaagactgatttaatgtggtgtgattattctgaagataaatgtctggctacagggaatattttgtactaaaaaatgattacacatatggctgtgtgtgtttgagtctgtgtctgtgagagagccagagagagtgagagagattgacagagaaagggagagacacacacacgccccttgaaacacttaggagttaaagcaattcaagggtcgagc

SEQ ID NO: 6109 - DNA, 435 bp, Homo sapiens
gcttagtggataatcccttagcctccaggcagaaaatgcaacttccacattactctggctgagtctctcggcagccgttctcagccagtggctaagactgcttaggagatttgactatattttttctgcatcaactataaaaagcagatgtcttacaattacatagacatagcttctgaagagataagtaaaactatcatttaataataagtgaatgaccgaggcaggcggatcacgaggtcaagagatcgagaccatcctggccaacgtagtgaaaccccatctctactaaaaatacgaaaattagctgggcgtggtggcgcacgcctatagtcccagatactcgggagactgaggcaggagaattgcttgaacctgggagatggaggttgcagtaagccaagattgcaccactgcactccagcctggcaacag

SEQ ID NO: 6110 - DNA, 381 bp, Homo sapiens
ctgagcaacatagtgagactccatttctgtaaaaataaaaaataaaaaaaaatcagcccaggcatggcggtgcatgcctgtagccccgagctattgattattgtgaataaaggcaatataaatattcacatacagctttttgtgtgaatataaacctctatttcacttaggtaaatacctagaagtaagagtgctatgtcatatggtaagtttagctttatcaaaaactggtagccagacacagtggcttgcccctgtaatcccagctactgaggaggctgaggtgggaggatggcttgagcccagaagttggaggctaccatgagctatgatcatgaccctgtactccagcctgggtgacagggtgagatcctgtctcta

SEQ ID NO: 6111 - DNA, 410 bp, Homo sapiens
taacaccatccccccttggtgctgtcttcaggatagtgaattctcatgatatctagttgtataaaagtgtatggcctctcccacctctctctcttcctcctgttccagccatgtgaagtgctggtttcccctttgccttccaccttgattgtaagttccctgaggcctccccagaagctgatgctgccatgcttcctatacagcctacagaaccatgagccaattaaacctcttttctttataaattacccagactcaggtatttctttatagaagtgcaagaatggactagtacgggtgtctacatgagaaattactctttctgttttattacatctttctttctcaggttttgtccttcacctaaaagtaattaaagctgattagtttcaaaataaattatgtacttg

SEQ ID NO: 6112 - DNA, 475 bp, Homo sapiens
attgtcacaaaatatgaaaaccacatctgtaattgttctcagaactgcttagcaacctcagctttaattgtcagccagcttatcagaacatgcagttaattatcgtgtctcatacctagaatgttcggcatgtgaaagagttctggagatggatcttccctgcagtgaaattgagtcagatggatcacctgcaggggagttcaccctgggagaatatttcagaatttgcctgcttcttcctggaaccagcctctgttagaatgcatgattccgtgatgaaaacttacagattttccatggaggagaagacctcttcctgatcatatgtccattgttatgggactgtctattagtggtacagttgctgagccagcccaggtttagtattctcattaataacaggtatttggatgctcttaacagttctaggggaaatttatgagtgatgaggtaaaataaaatgctggatctgaga

SEQ ID NO: 6113 - DNA, 424 bp, Homo sapiens
aacatagactgtgggaaaatatataagataaacaacccaatttcttcaaaagaaattttgtaatgaatgaaaaaggaaagatggaaggagaacctgtagtttagagactcaagagatatatctacaatcataatgtataagccaggcacggtggctcacgcctgtaatcccagcactttgggaggccgaggcagacagatgacttgcggtcaggaaattccagaccagccagggcaacatagtgaaaccccatctctaccagaagtataaaaattggccgggtgtggtggtgcacgcctgtagtcctaaggcaggaggctaaggcaggagaacagcttgaacctgggaggcagaggttgcagtgagccaagatcacgtaactgcactccggcctgggtgacagagtgaagaccctgtctcaaaa

SEQ ID NO: 6114 - DNA, 509 bp, Homo sapiens
attcaagatagcgtcgacgtcctagccagagcaattagacaagaaaataaaaggcatccacattggatagggagtaaaattatattttttcaccaatgacatgatcttatagcgattctataaaaacagaataattaacaaattcagcaaagttgtcaaatacaaaatcaacacacagaaatcagttgcatttctatatagtactagcagtgaacacttcatgaaggaaattagcagtttcatttaaatagcatcaaaaagaataaaatacataggaattaaccaaggaggtgaaagacttgtacacagaaaactacaaaatattgttgaaagaaattaaagaagacataattaaatggaaagacatcctgtgttcaattatatccatttaaagacacaattaaatggaaagacatcctgtgttggaaagtttaatattgttcacatgtcagtactacccaaagtggtcatcagaggcaatgcaatcctattaacatcccaacagtgtt

SEQ ID NO: 6115 - DNA, 190 bp, Homo sapiens
cctggaagtttaggaatgcaaatccgtgtctcccagcccagacctaatgagtcacaaactctggctggagcacgaagtatgtgtttgaataaattctccaggtgattttgatgcacgcagcatgctaacatttaagaaatcctggtctataatgtttcacttatgccaaactaagacattttacagaggg

SEQ ID NO: 6116 - DNA, 1214 bp, Homo sapiens
atattcatcagtaagagtataaaaacacatgagaatggccgacttcaacttgatgacagtggtaacttctggaaagggaaggagatgagtgcaaaatgggaaggacttacatggaggatttcagctatatcagtaatactttattcttgggggaaaaacaggcaactaaggtaaaatgttatggttttatatgagggtgaatataggtttttaattatttttttataaattgtgtgtttagaatgatttataattttttaattctacaaattaagtacataaatgtttggctgctagcttggctagttcagacttggcttaattttatgtggatttttcacctactctttaaaatatattctaattgtttttcattacttagctaagaaacaacattttaaagtaacttttaggcaagatggcagaggcagaaaggggaaagttccaaaagaaaagatttcaaacatgctgaatggatctgtgtcacagatcatgataaacaaaagcctgctatgtggtgagtggttcaggccaaagcctatggatttgggaaatactagctgggtagaggccagagtcatgagagtaggaagctgtcctgggaaaatgagtaagagtagggatttcaacttgggtggcggaagcaagaagagaaacttcttttggggtgtctcacaattacctaggaacaattttaaactaggcataacctaccaccaacctaccccccaccgttaagaatcactacccctataagcagtgaatgttgagttaaaataagcttgcaaaccatttgtctctagaaaaaaagatcaaagggcttagaacttatacccacattttggggataggaagaagagatggaaaagaacttgatagaaggctgttggaagtgatggacaagcaaaggagtaatactaacatgaggccgaataacataaacccactaacagagcggcaaggctgctacctcagactgtgaaaggagttaggcagaaaaggctgaaaaaagatacgaagggtttcataggtaaagaagtaagggaagaaaactcaagcttgaaagaatatcataacacagtggggtttagggctgggtgaccctcccaacaccccagcaaggaccatatcctacagccaccacatgaggtaccagtgacatggggctcatttctaattaacatgctccagaatcttgcaaaaaggtttttgaa

SEQ ID NO: 6117 - DNA, 152 bp, Homo sapiens
ttaggatgagttcttgggggcctgcaaattaaataaacaagagacgtggccaggtgcctaactcttttgagaggccagggtggaaagatcgcttgagcccaggagtttgagaccagcttgggcaacataaacgggaccccaatctctacgga

SEQ ID NO: 6118 - DNA, 516 bp, Homo sapiens
gctctccttagctgccacgtgctgcttgcctttctgtttatgtttctgccaggcttttcagcatctacccctatactgctcaagagctggcaaataacccaagggagaagaccagaatgctaagtgtcaggttacctccatgaagtcctttctccggatttttggcacttcaagttacttgtgccaaggcagctcttgaatgtcttagaacagatgaagtaacttaccagcttttctcctcctcttggcagggacattggtttcctaaaagttgctcagttttggccggaagtggaggtctaaagtttttggttttgttttcctgaattatctgtgttgattttggaatcagagtttgcaagccacaaaatagattgatagattcctatatttttctataatgtaaaatgagttgagcagcttttacattatcttttgaaagtttgaagtaactttttttttttaagatggaatcccactgccctccagcctgagcgacagtgtggactcagtcac

SEQ ID NO: 6119 - DNA, 277 bp, Homo sapiens
ttggccctgatctgccagtcagtgtaggtcacagcaagtcagcagcaggctaagctgtgctgagtgtgtgagaaatgggagcaaagtcatatgttcaaaaatgtgcaagacttggcatctccaccacagttttctttcacctttgaaatatgggaaggttagaaatggagtggaaaaatatcagcccagtctagttttgaaagattgagtttttttaggaagaagcaagcttgttatcatttttaaataagacaaaacatgaccttgaattagatta

SEQ ID NO: 6120 - DNA, 287 bp, Homo sapiens
gaataggaataattccacaccggcagtgtcagccttgggattccaaccttcaccgcctgctcccgctgccgcagtgcctccagggccctaccgcagtgaaatgtgaaattcaatctaaccctgacggaggtgcaagcaggcgcttgacattttcagagttctacaaaagggtttcgccccttcctgtttttgaggatgacatttttgtcaggctctacctgccccatgtctcagttgccagtgagttcctggagctcggttaacaggatggcagctcccctggtgac

SEQ ID NO: 6121 - DNA, 873 bp, Homo sapiens
ggctgcctactcaagtataacagaaaaaaattctgggtctggtagccagaaacctgatttgaatcaccacagcagagagtcacggcctctcccctagctcttaggactgagtcagttcacagccccagggcccctttatgaactggggtgtgagggtgtggggggatttcccccaaagaatgaactctgcagccctgctgcaagtacctactgtaagtctccctctaggccctactcagaagacctgtgctatttacagagtgactgtgcactggggaaagcaaactacccaggccttctgagatgactgaagcattggctctgaattgatgttcatgcacggggacccaaagtgacagcgtggccactagtcaaaatgggagattaatggtggttaggtgacagataccttactaaaagttttttttgttgttttgttttgttttcctaatctggatgcgtactcaattagggaaaaaaaaaaaagaaaaacagtttttttgtccattgagttattttttctcctttaatatgttaataaagtagaatacattgagagagttgctgatttgagtcatctttaaattcctgggataaaccctactaggtcataacgtgtttggccagcaggaatcctcctgcgcggtctcagtaaaacgtgtgggtggacaagtgcggccgggtgtcccacccacataccgctggcagccgcactctggtgaccggacagtgagacgccctcctgtcgtgtgcctccagcgccctctactgacacagcttagcattttgtcagctggcaagaaaaacgttcacagcaagcatccactttcacaaagcaaagaggtggatttggagctgacaggcagtaaattg

SEQ ID NO: 6122 - DNA, 202 bp, Homo sapiens
aggatcacttgagcccagcagtttgagaacagcctgaacaacatgccaagaccccatgtctatgaaaaataaaaaattagccaggtacagtggcatatgcctgtagtcccaactattttggaggttgatgcaggagggtcacttgagcacagttggttgaggctgcagcagggagccatgttcgtaccactgcactccagcc

SEQ ID NO: 6123 - DNA, 424 bp, Homo sapiens
ccagtaggtgacttcctttgcattttaaacattctgaacaagtcagtgatattatgcaatttgctaccattactgaaagtaggtaattagcagtgttattatgtgtttcagatgttattaaaaaggctataaacaaaatgtactttgtagaatctttgacatgaaagacagataggaggagacaagtcatgtttcgagataactaagaaagtaagtgatgtggattacatactggagttgacaacttgtgaagctagacattattaataattaaaagttatgaccggtcatgtactggacaaccaacagtaattaatttctaacgactgtgtgccgaatgagaatggggaggaaattaacagtatttcttcatgaagtgtgttcttattagctgagatgctttaaatgtagcaggttgtatcat

SEQ ID NO: 6124 - DNA, 471 bp, Homo sapiens
acactgtgtctacacgcggagggtacagcggtgaacaaaacagacaatgcccctgacttcacagggcttacattctacttggggagacaatgaaaacactaaatatgtgattagccatgtgctgacaagtgctttggagaaaaatattgcagggtgagggggcagggagtgcgggggaggcctggctgataaggtggcattccagccaagacctcgagtcgtgaggttgcaggccacggatctggagaaggaagcctctcgacagcagaaactggaggcggcacaggccccttttgttttatctgtgcctgctttgaagaagtggatgtgctcttggaaaattctgtgtgctaatcaaatatttgtaaatcaaatcatattttaaatgcatcaaagaaacttccatttaaagtgaccctggagtaaatgagtctgcaaagtaaataaaatgttctgatgtgaataatttat

SEQ ID NO: 6125 - DNA, 1243 bp, Homo sapiens
ggtttgctgcacccattaactcgtcatttacattaggtatttctcctaatgctatccctcccccagccctcaccccatgacaggccctggtgtgtgatgttccccgtcctgtgtccaagtgttctcattgttcagttcccacccatgagtgagaacatgctcgcaccgccgcttctaaatgttttaaaaacaaagacaccaatgcccttcattggggaaatgaaagacttttaagtaaaacgattttgagtgaaataatatttgttgttttaaaaagttaatattaaccactctccatcatatgttgaaattatcttaagatgtgaaagttaaaattagaaaccttgtaaaggaaaaataggaaatagtttcatgaacttgacacaggaaaatatttcttagactagatactgtagcactcaccacaataagaaatcaagcgaattgcacttcatttttaaaaagcttctccttattatgttgttgtttaacaacttaaacgctatctctagaccaggaataattatttgctatataatacagcaaaaaaatatgtatgtataaatggactcattcaaaatatataaagaactcctattacaaagaaattgacaaacagcccagtatatcaatgaatataaaaatttgagaagatattttccataagaagatatctaaatgaacattaggcatgagaaaaccaaattttatgatatcactacacacctggcatagtttaaaagactgaaaatattagtgtgtgggaatgtagagcaactggaaatggcctacatctttcatagaaatgtaaagcaatacaaatactttgcaaaactctgtccaacattttctacccattcaccaagcaactccatccctagctatagatacccaggaaaataagtatgtatcttcacagaaataattgtatgagaatattcatagttacttatgcacagtagttatcaagtaaacctgtctcccatcagaaaaatggatataaaattgtgtgataagtgcagtacaaggcaactatggatagttaacattaggccagaaacacacacactgttatcaaggagaaaaaacacaatacaaaacaaaataagatggcaaaaataacgcacgcgcggatgatacgcggatgtcgtgcagtgcccaaggctagctcaggcgacgttgtaagtgccacgagagacattagcgagaaccgagggcaggcaaaacccgacgggcgagcaga

SEQ ID NO: 6126 - DNA, 1245 bp, Homo sapiens
ggtttgctgcacccattaactcgtcatttacattaggtatttctcctaatgctatccctcccccagccctcaccccatgacaggccctggtgtgtgatgttccccgtcctgtgtccaagtgttctcattgttcagttcccacccatgagtgagaacatgctcgcaccgccgcttctaaatgttttaaaaacaaagacaccaatgcccttcattggggaaatgaaagacttttaagtaaaacgattttgagtgaaataatatttgttgttttaaaaagttaatattaaccactctccatcatatgttgaaattatcttaagatgtgaaagttaaaattagaaaccttgtaaaggaaaaataggaaatagtttcatgaacttgacacaggaaaatatttcttagactagatactgtagcactcaccacaataagaaatcaagcgaattgcacttcatttttaaaaagcttctccttattatgttgttgtttaacaacttaaacgctatctctagaccaggaataattatttgctatataatacagcaaaaaaatatgtatgtataaatggactcattcaaaatatataaagaactcctattacaaagaaattgacaaacagcccagtatatcaatgaatataaaaatttgagaagatattttccataagaagatatctaaatgaacattaggcatgagaaaaccaaattttatgatatcactacacacctggcatagtttaaaagactgaaaatattagtgtgtgggaatgtagagcaactggaaatggcctacatctttcatagaaatgtaaagcaatacaaatactttgcaaaactctgtccaacattttctacccattcaccaagcaactccatccctagctatagatacccaggaaaataagtatgtatcttcacagaaataattgtatgagaatattcatagttacttatgcacagtagttatcaagtaaacctgtctcccatcagaaaaatggatataaaattgtgtgataatcatacaatcaataggatattacttggccaaaacaaaatgaaacaagggaaaaacacaatcaaacaaattagtggcatatatacccacctgagtaaagagaagtcggccgggcgcgggtgtcacgcctgtaatcccagtactttgggagccgaggcggcagatcacgaggtcaggagatcgagaccatcgtggctaacacagtgaaaccccgtctctactaaaaataca

SEQ ID NO: 6127 - DNA, 415 bp, Homo sapiens
cactctaagtttgaatagtagaatttcttatcttttgaccaagatgtgttacataaacttgggttagcataaaaaaacaaaaattttttaaaccctcatgtgtcttaaagataatagtagactagaaatattaagagctgaaccaagagttttaatgtatggtaatttgaaataattttaatttactgataattttattttaccagtatattacaagttgagttgactgaaaggatagtttcaaacccaaagctgtaatatcagtttcaaggagcatcaattaaacagcttggacttatgattcctacaagtgccataataatctgtgaaagcctattgtatacaatctttaataattggttgctgtaattaacctcagaaataaaagcagcttcactgaaggcataatattata

SEQ ID NO: 6128 - DNA, 454 bp, Homo sapiens
ggccgcctgcctctccgcagccttgggctacctggacgtgcgcatcgtggacacagactacagctccttcgccgtcctttacatctacaaggagctggagggggccctcagcaccatggtgcagctctacagccggacccaggatgtgagtccccaggctctgaagtccttccaggacttctacccgaccctggggctccccaaggacatgatggtcatgctgccccagtcagatgcatgcaaccctgagagcaaggaggcgccctgacacctccggagccccacccccgcccttcccaggtggagccaaagcagcaggcgcctttgcccctggagtcaagacccacagccctcggggaccacctggagtctctccatcctccaccccccgcctgtgggatgccttgtgggacgtctctttctattcaataaacagatgctgcagcctcatggc

SEQ ID NO: 6129 - DNA, 293 bp, Homo sapiens
atcctgaccctgctctgggcgcccacggctcaggctgaggttctgctgcagcctgacttcaatgctgaaaagggtcttcctgggcaagaaggaccacctgtccatgtccaccagggccatcaggcccacagaggagggcggcctccacgtccacatggagttcccgggggcggacggctgtaaccaggtggatgccgagtacctggagtctctccatcctccaccccccgcctgtgggatgccttgtgggacgtctctttctattcaataaacagatgctgcagcctcatggc

SEQ ID NO: 6130 - DNA, 1993 bp, Homo sapiens
cttttcttaaattcctcattaaatatgaacctaaggcatacccatcatttaccttgattcccatataatttgtataagtcatatataagtccattgacaaaataaaaaaataaataattggattccttgtatcaacagaaagccttgtgcttaaaacctgttattcttctttgagccagactaaacagtaacatttacaaaatggtatcagctcaacattaaatctaaggttacttctcacatacatcataaagtcagccatcatctttcatttaggatttcttggggttttctttttgcatatatagattatgtattacttaaatccaaaatacatgtgtgtatatatatacatatatatgtaacttaatataaatgtttgatgagttatctcaattgactataatcttctaagtcaaaaagaaaacatttaagtacataatataaaaagaactgaacattaacagtaatgggaaattcataatggctaaatatgaaataagctttgtctttgcagttacaaactaattcttgtacattttccttttcactaaaaaaataactaattgatagtttccattcacatgaacaagttataatcaggtttgggatagtatgcccaaaacctatgtttctttactttatattcttaaaatctgagacatgatttttctggaacaaattaagatttcatgtacaatagagtccctttcctaatactgttatgaagaaaccaagttgactaccttatgagagatcagatatttcccttatctcattatattcacagcatatgtttggacatgcgtttcaccaagaaccatgtagtaataagataaatggtaactgaggtactatggaatttttagaacttgattccccaggacatgctacagtaaactaaactatttattcaaaagtaacccaactaattaaagtgaaaaaaaattgttgaatcacaatgaacaaacataaaacaatacttaaatgagaattctgtgtcttttttggttttatctgtgatttattttgtccagtattaaggaatggttatctttatcattcttctaacatgttttggtttctctaatggttcattttcctttagcttgtgaaaattagggcagtttgtccagagccttactcgcaggagacaccagacccaacccatgcttagatttctgttaataaaagggagaagggtatttgaataggtagtaaaggcaggtacaagtttaagggagcagggctatcatatgtactaggtgagatttctataaatgtctgaaaagttacatgcatagtcattggctcaggtaatttctctgaatttgaacttatttgatttatttaaccaagttattataatatgcagttctctttaatcaatcttctattattcaatcatctatccatttattaattcaacaaatatttattaaagtgcctaccatgattatgtgctgtagaaaagacaaggacatttactaggggggattgtgggcccaatcggcatcataagcatgtctgaagcaaaagacaataatcacatccaacggcaccagttcagctcaactttagaattcagcagtaacagtacagatggcctaaagtacatctgtgtgtatctgtacgtgtgcacacacccatgtatatatatttatctatctgtacaaacactacatatgtatacacactatctatgtaaaatataatatatgtataatgcatataaattctaacaagtgtatttgtgttatctttaaaatagaacaattgtatcttgaagtggtaaatgcagagaattggttttattgttgatctgtggatttaatgatttctaggtgaaaaggacgtttaagtgtacaatttcttttcttaatttaatatatttatgtaaatgcatgcctgaaatttggttagattggctgtgttttgtgtcttttaacatgatcaaatgattaaactttatcttatgacttgaaaaaaaaaa

SEQ ID NO: 6131 - DNA, 1959 bp, Homo sapiens
cttttcttaaattcctcattaaatatgaacctaaggcatacccatcatttaccttgattcccatataatttgtataagtcatatataagtccattgacaaaataaaaaaataaataattggattccttgtatcaacagaaagccttgtgcttaaaacctgttattcttctttgagccagactaaacagtaacatttacaaaatggtatcagctcaacattaaatctaaggttacttctcacatacatcataaagtcagccatcatctttcatttaggatttcttggggttttctttttgcatatatagattatgtattacttaaatccaaaatacatgtgtgtatatatatacatatatatgtaacttaatataaatgtttgatgagttatctcaattgactataatcttctaagtcaaaaagaaaacatttaagtacataatataaaaagaactgaacattaacagtaatgggaaattcataatggctaaatatgaaataagctttgtctttgcagttacaaactaattcttgtacattttccttttcactaaaaaaataactaattgatagtttccattcacatgaacaagttataatcaggtttgggatagtatgcccaaaacctatgtttctttactttatattcttaaaatctgagacatgatttttctggaacaaattaagatttcatgtacaatagagtccctttcctaatactgttatgaagaaaccaagttgactaccttatgagagatcagatatttcccttatctcattatattcacagcatatgtttggacatgcgtttcaccaagaaccatgtagtaataagataaatggtaactgaggtactatggaatttttagaacttgattccccaggacatgctacagtaaactaaactatttattcaaaagtaacccaactaattaaagtgaaaaaaaattgttgaatcacaatgaacaaacataaaacaatacttaaatgagaattctgtgtcttttttggttttatctgtgatttattttgtccagtattaaggaatggttatctttatcattcttctaacatgttttggtttctctaatggttcattttcctttagcttgtgaaaattagggcaacccaacccatgcttagatttctgttaataaaagggagaagggtatttgaataggtagtaaaggcaggtacaagtttaagggagcagggctatcatatgtactaggtgagatttctataaatgtctgaaaagttacatgcatagtcattggctcaggtaatttctctgaatttgaacttatttgatttatttaaccaagttattataatatgcagttctctttaatcaatcttctattattcaatcatctatccatttattaattcaacaaatatttattaaagtgcctaccatgattatgtgctgtagaaaagacaaggacatttactaggggggattgtgggcccaatcggcatcataagcatgtctgaagcaaaagacaataatcacatccaacggcaccagttcagctcaactttagaattcagcagtaacagtacagatggcctaaagtacatctgtgtgtatctgtacgtgtgcacacacccatgtatatatatttatctatctgtacaaacactacatatgtatacacactatctatgtaaaatataatatatgtataatgcatataaattctaacaagtgtatttgtgttatctttaaaatagaacaattgtatcttgaagtggtaaatgcagagaattggttttattgttgatctgtggatttaatgatttctaggtgaaaaggacgtttaagtgtacaatttcttttcttaatttaatatatttatgtaaatgcatgcctgaaatttggttagattggctgtgttttgtgtcttttaacatgatcaaatgattaaactttatcttatgacttgaaaaaaaaaa

SEQ ID NO: 6132 - DNA, 578 bp, Homo sapiens
tccgtgacgtcaaggcaagtacattgattgaagtaacatgagagagaaggggtgggtgtagcaaaaacattctcaaggccaagtcatcagcccttacccttaggagggggcagtgattaagaggtggtatgagagcctcgtttctcatttctataagtgctggtaaaggacctgaccccacttccttacctactgcctgcccaggtaactgatgcctacagcatcacaggaattgccaaaatgcagaaaacaaatcctaaattgctctaatttcataacacaaaggctggtttttggcttgaaataatcaggcaaatatataatgttctgtcacccaggctgaagtgcagtggcacaatcttgctcactgcaagctccacctcccaggttcacgccattctcctgcctcagcctcctgagtatctgggactacaggcacccgccaccacagcttttttttttttttttttttttgagacagagtctcgctctgtcgcccaggctggagtgcagtggcgcgatctcagctcactgcaagctccgcctcctgggttcacgccattctcctgcttcagcct

SEQ ID NO: 6133 - DNA, 528 bp, Homo sapiens
tccgtgacgtcaaggcaagtacattgattgaagtaacatgagagagaaggggtgggtgtagcaaaaacattctcaaggccaagtcatcagcccttacccttaggagggggcagtgattaagaggtggtatgagagcctcgtttctcatttctataagtgctggtaaaggacctgaccccacttccttacctactgcctgcccaggtaactgatgcctacagcatcacaggaattgccaaaatgcagaaaacaaatcctaaattgctctaatttcataacacaaaggctggtttttggcttgaaataatcaggcaaatatataatgttctgtcacccaggctgaagtgcagtggcacaatcttggcttactacagcctcaacctcctgcactcaagcaatcctccaacctcctgagtagctgagactatatgcacatgccactatatctggttaaattttttattttctgtaaaaacgaggtcttaccatgttgcccaagctggtctcaaactcctcgcctcaagtgat

SEQ ID NO: 6134 - DNA, 472 bp, Homo sapiens
gggaagatcacttgagcctaggagtttgaggctgcagtgagctatgattgtgccactgcactccagcctgggtgacagagtgagactctgtctctgaaaaaataagtaaacaaaagataaatgaaaatatttaaggctttataagaaactagattttactgaatactgaggaagataatccacatggagcgaggaagaaaaatatttgttgactgtccactctgtgcttttactctcagactgaccgtagaagcagacatgtgctagttgcctgcctagttacttttcccttcctctagttgttgactggtatttctacaggaaattcacctcagccatgaggtttgagaagattattcccctcaggttcagggtaactcttgattggcttgcacttgcctcttccccctggccacagtgatgagtcatggatgggcacacaacccaattcaggccaatgagagagagagag

SEQ ID NO: 6135 - DNA, 337 bp, Homo sapiens
ggtacaagaaaattgaatctcatgataaatattcttctgtaccagtgctcactcctctcttagttactttaaaaaatcattagcaaacatttccatctctagaagtctgaaggaaggagcaagggctttagaatgacttgcattcagttcagaaccatgccctgccacttattaggtgttttaaatttgggcaagttacttaatatcttgacttcagttgcctcatccataaaaaagaaaacattgttagtaggactaaaaacaacttgaagaattcattatgttgcataaggtgtttataaatgtccattattattaccatcaaaattaaaagtgg

SEQ ID NO: 6136 - DNA, 293 bp, Homo sapiens
ctccctgatcagcctttgtaatataagtaagcctattgtttaatctttcatttaaagtgtgttcagtgttttctatgggacgaacatacttatgacttacattttgaagttgatttcatccttttagattctaaatgccttgaaagtgagtgctttaaaagtaagaatagcataagttgtttatatgtatccataaaatcctagttggtaacacagagtttttataaggagtaaaggggtctcaaatccctttgggttggaatcatttgttactttgagttttccttagcagg

SEQ ID NO: 6137 - DNA, 380 bp, Homo sapiens
tttttttatttttgagacagagtctactctgttgcccagggttgggggtggtggggaagagagagaaggcacaatgaaaacatggttttgtaatcttaagggactgctctgacatatgcagtctgttgttgaacggaattgttaatgcagctcatgaccgtaatcaagcatgcataatgtttcccttttctccattatttataaaatgctattaaatatggcaaccaaatctagccagaattgtaaagggtcttgaagtgcttatcatactaattaaaaaatgaaacacaaattacttttgaaaaggattcaaaagtatctttttgagcggagatcgcaccattgcactccagcctgggcagcaagagtgaaactccatc

SEQ ID NO: 6138 - DNA, 573 bp, Homo sapiens
gtttcagtaagccgagatcgtgccactgcactctagcttgggctacagagtgagactccatctcacacacacacacacaaaagaaatgaaaacaacaatttgtacatgagttcaaaacagaattatttatttcccaaactagaaacaatccaaatgtctatcaacagataaatggataagcaaatgatgacacaattgcattaatggaataccactcagcaatgaaaaggaacaaaccactcatacctacaacacagatgagcctcagaaacgtgatgctaagtgaaagaagccagaccaaaaaaattatatgctattattccatttctatgaaatttctggaaaaggcaaaaaccatgcaaagtagatcagaggttggctgggggtgagagcagagactgactacaaataggcccaagggaacgttttggggtgatggaagttttctataagtggattatggtgatggctacacaacagtataaattaaaggtcatccaaatgtgtacttacaatgtttgaattgtatgacatgtaaattatctcattaaatctgtattttaaaaaaagaac

SEQ ID NO: 6139 - DNA, 202 bp, Homo sapiens
ttaatatgggctaaattgtccttaagttcctgattgtaaaaatcatgtggaaaaagtactttgatcatgcttttgttggactataaaccttctttgaaagcagatttcagcaatttcattatgtaattcattgttgttggttttgtttgaaagattattacttatagaaagaaagactgtaaaatcttagcactatcttgca

SEQ ID NO: 6140 - DNA, 383 bp, Homo sapiens
tcgacggttcacgctattctccttcttcagcctcccgattagctgggactacaggcggcggagcttgcagtgagccgagatcgcaccactgcactccagcctgggcgacagagcgagagtctcgaaaaaacaaaaacaaaacaaaaaaacaaaaacaaacagccagtacctacaaggcagagtttatatttcactcttagttttgagaggcagaatagtaggaagaacatggactccagactgattgcctgagttcaaatctcagctccaccacttacgagctgtgggaccctgagcaaattacttaaattttcagtgtctcggtgaaacacggaaaatagtacctctttctcttggtataaccaccagggatgtggtcgacc

SEQ ID NO: 6141 - DNA, 461 bp, Homo sapiens
tacatagtgaataaaacccagtatgatagcaaagggtctctcttacgaaaatataacacaatattactttttttgtatgaaaataagtttctatcttggatagccaaggccttaacaggtaacattataagagtactataaacaaatttaaaacccaaatgttttgtgataagtcagggcttctacctcctgtgaactctgggcattttgcaaatttgaataatcagtcatctcgagtctcctctttttacagatgagagtattgaggctcagatgggacacaggttttcttctgggtcaccaaactcaacagcagagctgagtttggggcccttgggcctctagggagatctagcttttctgtctgatacgggaactcctaagagcacctccatccaccccagccagctttcctttcttctggtcatttctctttaacagttgttgctcctgcactcatc

SEQ ID NO: 6142 - DNA, 436 bp, Homo sapiens
  misc_feature (393)..(393): n is a, c, g, or t
gacgcgtctgatctcgattagtcctttcccttttgactcgtagtcagcgcgtggtagcacatatctctattccaagctactaaagaggctgaggcgagatggggagcgggttacatgagcccaggagttctaggccatagtgtgcaatgaagatgcctgtgaataaccactgtactctaccctgggcaacacagcaagaccctatctcttaacaaaaaaatgatggtacagttttggatgtgcagacacatgtcaatacattcttgccccttgcaatcctaggaaaatgctgtcctggcttttccttcccctgaccttgtgccatttcatgccagcttgggcaacaggagcgaaactccatctcaaaaaaaataataataaaataaaaaaaancccacccacagtctcttctctcctatttgaaacacaggactcg

SEQ ID NO: 6143 - DNA, 631 bp, Homo sapiens
gacgcgtctgatctcgattagtcctttcccttttgactcgtagtcagcgcgtggtagcacatatctctattccaagctactaaagaggctgaggcgagatggggagcgggttacatgagcccaggagttctaggccatagtgtgcaatgaagatgcctgtgaataaccactgtactctaccctgggcaacacagcaagaccctatctcttaacaaaaaaatgatggtacagttttggatgtgcagacacatgtcaatacattcttgccccttgcaatcctaggaaaatgctgtcctggcttttccttcccctgaccttgtgcatatttccatagcactgggaaatctaatttctctttcctccttcactcatcttgacccaggagtggtaacttggaaatggccatgtcagagaaacaggcttaccaatatggggcatatcttgctctagcaccctccacttaatggctgttttgctccaccacttggctttgtaagagtcttactgctcattgggcaggcgtggtggctcacgcctgtaatctcagcacctggggaggccgaggcgggcagatcatgaggtcaggagattgagatcatcctggctaacacggtaaaaccccgtctctact

SEQ ID NO: 6144 - DNA, 781 bp, Homo sapiens
agaattgcttgaacctgggaggcggagattgcagtgagccgagattgtgccactgcactccaccccgggcaacagaatgggactccatctcaaaaaaaaaaaaattaaacttctgtgcatcaaaggacactattaccgtgaaaagtcagtccacagaatcagagaaaatatttgcaaatcatgtatctaataagagattaatatccagaatgtataaactcaataaaaagtaaacaacccagtcaaaaaatgggcaaaggacttaaatagacatttctccaaagaagatatacaattggccagcaaacacaagatgctcaacatcactattcattaggaaaatggaagtgaaaaccacaatgagataccacttcattttcattagaatggctattatcaaaaacaaaaacagaaaataacatgttggcaacgatgggagaagttgtaaattgctggtgagaatgtaaaatgctgtagccactgtagaacacagtatggcagtttctcaaaaaaatgaaaaatagaattactgtaagatccagcaattccacttggacatatacccaaaataattgaaagaaggatttcaaagatatttgtacaccatgttcatggcagcattattcataatagtccaaagacagaaacaacctaaatgcccatcatcacatgaatggacaaacaaaatgtatacacacacaatggaaaactattcaactgtaaagaggaaaattttgttgcatgctacaacatggatgaatcttgaaaaagttatgctaag

SEQ ID NO: 6145 - DNA, 777 bp, Homo sapiens
gatgcataagaagattgtgaggcactgctgagccccttcccttcaagggttgtggtcagaaatccaagccaacgctgtcagctcagttgtctgatattctccagcagtgttcagctgtgtgggcaccaggaagaaaagctgcagcatggattcacaagggccaaggttttacacagcaagtaccactggactttagaaaagggggcaagccagggagatgagggtgttttcaaagggatgattatttaagcctggcagaatatttatcaaatgcatgatctgctcctagtgaatgtatttagtaaagcacacatttccaggtctgtgtatctacatatttctgtatacattcttatagatacggtttaatgccatggtttcattcaggcttattttctaaagccttttggttttggtttttgggaagcctactctatttcccccccctggaactaatgagcgagcaagcaagaggttctgtaagcaaaagtaaaagctgcagactttgttatggttggacctgtgtgtggaaattctgtgaattgtgttctgtcagcatcctgctcacggaataggctatgtaaacaacgggcgctgggagggtctgtgaatgagcagccttccttcccactcacagacttaaccactgcaattctccaggtttctgagtgtttatttcatagtaaaaagggctctaaaaataccagggcagttaggtttttattgtagatcatttcacttaaactgcaatgggacatataaattttaaaaaaaaaa

SEQ ID NO: 6146 - DNA, 2390 bp, Homo sapiens
tattaaggcagtgtttcctaaatgtatttgacctcagtagcctttctatttacatcccacagaactggtgactatgaaacactctggtgaacactgggttagagagtaacaaggaaacaagagatagtgatcaggcatccagagcccccttttttatccatatgaaagccaggggggccagaccttgttcatgtgtgggtctgtcttccttatgccaatcagcagtatatacatcacctctcaccctcacctgctgaaaaaataacctttttacccattattcctactcccttcatcctgcacatacatatatccagctgagagatcacactacaaggctaagagatgatctaatacccccaaatagccctggcccacacagaaaaacagaaaaacaaaaaaaactttatccccttgaacagtcccctctctcctcttgactgtctttatgtgtctgtgtatttgtgtgcagggtctttgaagacagcatgctatgtgcaaactgtacaagctaggttttctaggggctgtgttctggggatgagggtagtggggattatatggggttttttctttgtttcaagacaggaagcagtctggttaagggagaactagtggaaagggttaaatgacaggttaagttgagtacaaagctttcccagtactgctgagattaagacaattgtggatgtgtatgtctaggtttgaatctctgggctgcagattgcttttgccctggcagagaaagaggagtctttgggcaggtgagctgtttcttgttgatttcaggcaagaggcacatagaaactttgtattgagtggggattttgttttaagtgctggaaaattagggcaggaattacgtgtttgcaagttgttgccatcactggtttgaatttgactgcctcatcaaggggcaagagttattcttgaagatctcattctcccagaaacagaactttagggaaaatggctgtggcttagcttttcagctgatgcagggtaataagctttctggttggttttccttccaattctggaaaggtgtccacactaagacccttaactctagggcttgcataagtattctagcatcgttagctaatgagttggtcattgtttctctttatcaataattgtgttaataccaatcttataatttaaaaattatcttgtatgtaagagaagttcggggttagggaggaagaggagcaaagtgggatattttctctttaatgcttagatactgtttcttccctaagatgtgtttctcaaccacaattggtggaatgaaccagagaggcaagaggaagtgaattgcaccaatttagtttagcgactgtgccttttgcaggaaaaactgggtgaatcacagctcctcagagtcctggactcaactagaattgaagatagacttattttgctgactgggcttcttagagtttatgtgacttgaacagcttggcccctgcctcccttctgctactgtgagcagccttccttcttccttcattcttcctggaatgcagttctcttgcttatgatcctatgaataaggcaaaatggctggtctttgtaaggcaggtcttgccctagcttctcagaaacaggagcattttaggatcagtattaggagatgccccagggagtaagaaagtattgggttcagtgataaatctggactctgacacttcttttactctccctctttaatactaaaagctctgcataagcaatggttcagaacctgtcttgggtacagacctgttgaatctgacagaaaccagaaacgcacttttgagaaaaagacatttgtaattcactcagttttccatacacatttagcaggttcaaagcccatctgtggaatccctaaactgccttcaaagaaagggagttccccgatctaaaatggtcattatatatttgtgtcaagaattagaaggcaagggtcactaaatattttaaggattaaggtaccagaggcatcagtggtataaggatggagtctggtctttaattacgacaagggtattgcttacattctactctctggttttcaaaaagatctgacatgctgacaaatccagctcctcacaaatcttgtttgaaggacttgtgggaagtgatattccttactattagatcacgccccttataactacatgttaacatccagccttttatctgtttgagtaattgtagggatagaaagtgaagcccccagagttaggtgcaagtatagcacccagctgaaaggcatcatggagtctaagggccttctacagaaggggcaatcctttgggttatttctggtgtaccactgtcttctctacctcggtccaacaccacctctcttggacaaaaaataaaacaagcaacagccatca

SEQ ID NO: 6147 - DNA, 2589 bp, Homo sapiens
tattaaggcagtgtttcctaaatgtatttgacctcagtagcctttctatttacatcccacagaactggtgactatgaaacactctggtgaacactgggttagagagtaacaaggaaacaagagatagtgatcaggcatccagagcccccttttttatccatatgaaagccaggggggccagaccttgttcatgtgtgggtctgtcttccttatgccaatcagcagtatatacatcacctctcaccctcacctgctgaaaaaataacctttttacccattattcctactcccttcatcctgcacatacatatatccagctgagagatcacactacaaggctaagagatgatctaatacccccaaatagccctggcccacacagaaaaacagaaaaacaaaaaaaactttatccccttgaacagtcccctctctcctcttgactgtctttatgtgtctgtgtatttgtgtgcagggtctttgaagacagcatgctatgtgcaaactgtacaagctaggttttctaggggctgtgttctggggatgagggtagtggggattatatggggttttttctttgtttcaagacaggaagcagtctggttaagggagaactagtggaaagggttaaatgacaggttaagttgagtacaaagctttcccagtactgctgagattaagacaattgtggatgtgtatgtctaggtttgaatctctgggctgcagattgcttttgccctggcagagaaagaggagtctttgggcaggtgagctgtttcttgttgatttcaggcaagaggcacatagaaactttgtattgagtggggattttgttttaagtgctggaaaattagggcaggaattacgtgtttgcaagttgttgccatcactggtttgaatttgactgcctcatcaaggggcaagagttattcttgaagatctcattctcccagaaacagaactttagggaaaatggctgtggcttagcttttcagctgatgcagggtaataagctttctggttggttttccttccaattctggaaaggtgtccacactaagacccttaactctagggcttgcataagtattctagcatcgttagctaatgagttggtcattgtttctctttatcaataattgtgttaataccaatcttataatttaaaaattatcttgtatgtaagagaagttcggggttagggaggaagaggagcaaagtgggatattttctctttaatgcttagatactgtttcttccctaagatgtgtttctcaaccacaattggtggaatgaaccagagaggcaagaggaagtgaattgcaccaatttagtttagcgactgtgccttttgcaggaaaaactgggtgaatcacagctcctcagagtcctggactcaactagaattgaagatagacttattttgctgactgggcttcttagagtttatgtgacttgaacagcttggcccctgcctcccttctgctactgtgagcagccttccttcttccttcattcttcctggaatgcagttctcttgcttatgatcctatgaataaggcaaaatggctggtctttgtaaggcaggtcttgccctagcttctcagaaacaggagcattttaggatcagtattaggagatgccccagggagtaagaaagtattgggttcagtgataaatctggactctgacacttcttttactctccctctttaatactaaaagctctgcataagcaatggttcagaacctgtcttgggtacagacctgttgaatctgacagaaaccagaaacgcacttttgagaaaaagacatttgtaattcactcagttttccatacacatttagcaggttcaaagcccatctgtggaatccctaaactgccttcaaagaaagggagttccccgatctaaaatggtcattatatatttgtgtcaagaattagaaggcaagggtcactaaatattttaaggattaaggtaccagaggcatcagtggtataaggatggagtctggtctttaattacgacaagggtattgcttacattctactctctggttttcaaaaagatctgacatgctgacaaatccagctcctcacaaatcttgtttgaaggacttgtgggaagtgatattccttactattagatcacgccccttataactacatgttaacatccagccttttatctgtttgagtaattgtagggatagaaagtgaagcccccagagttaggtgcaagtatagcacccagctgaaaggcatcatggagtctaagggccttctacagaaggggcaatcctttgggttatttctggtgtaccactgtcttctctacctcggtccaacaccacctctcttggacaaaaaataaaacaagcaacagccatcagatgagtgaatagatttgaatgatttttcccacagggaatcagcctcaaatgttcatgtttcaccccgtcccctttaaataaaaagaatctctgtgttctctttgggcaaaatgtaaaacagggatatcatcttcaggaacctgtcacatttttccatctggtacctccaccctattctgagtatcctcccctttccac

SEQ ID NO: 6148 - DNA, 2595 bp, Homo sapiens
tattaaggcagtgtttcctaaatgtatttgacctcagtagcctttctatttacatcccacagaactggtgactatgaaacactctggtgaacactgggttagagagtaacaaggaaacaagagatagtgatcaggcatccagagcccccttttttatccatatgaaagccaggggggccagaccttgttcatgtgtgggtctgtcttccttatgccaatcagcagtatatacatcacctctcaccctcacctgctgaaaaaataacctttttacccattattcctactcccttcatcctgcacatacatatatccagctgagagatcacactacaaggctaagagatgatctaatacccccaaatagccctggcccacacagaaaaacagaaaaacaaaaaaaactttatccccttgaacagtcccctctctcctcttgactgtctttatgtgtctgtgtatttgtgtgcagggtctttgaagacagcatgctatgtgcaaactgtacaagctaggttttctaggggctgtgttctggggatgagggtagtggggattatatggggttttttctttgtttcaagacaggaagcagtctggttaagggagaactagtggaaagggttaaatgacaggttaagttgagtacaaagctttcccagtactgctgagattaagacaattgtggatgtgtatgtctaggtttgaatctctgggctgcagattgcttttgccctggcagagaaagaggagtctttgggcaggtgagctgtttcttgttgatttcaggcaagaggcacatagaaactttgtattgagtggggattttgttttaagtgctggaaaattagggcaggaattacgtgtttgcaagttgttgccatcactggtttgaatttgactgcctcatcaaggggcaagagttattcttgaagatctcattctcccagaaacagaactttagggaaaatggctgtggcttagcttttcagctgatgcagggtaataagctttctggttggttttccttccaattctggaaaggtgtccacactaagacccttaactctagggcttgcataagtattctagcatcgttagctaatgagttggtcattgtttctctttatcaataattgtgttaataccaatcttataatttaaaaattatcttgtatgtaagagaagttcggggttagggaggaagaggagcaaagtgggatattttctctttaatgcttagatactgtttcttccctaagatgtgtttctcaaccacaattggtggaatgaaccagagaggcaagaggaagtgaattgcaccaatttagtttagcgactgtgccttttgcaggaaaaactgggtgaatcacagctcctcagagtcctggactcaactagaattgaagatagacttattttgctgactgggcttcttagagtttatgtgacttgaacagcttggcccctgcctcccttctgctactgtgagcagccttccttcttccttcattcttcctggaatgcagttctcttgcttatgatcctatgaataaggcaaaatggctggtctttgtaaggcaggtcttgccctagcttctcagaaacaggagcattttaggatcagtattaggagatgccccagggagtaagaaagtattgggttcagtgataaatctggactctgacacttcttttactctccctctttaatactaaaagctctgcataagcaatggttcagaacctgtcttgggtacagacctgttgaatctgacagaaaccagaaacgcacttttgagaaaaagacatttgtaattcactcagttttccatacacatttagcaggttcaaagcccatctgtggaatccctaaactgccttcaaagaaagggagttccccgatctaaaatggtcattatatatttgtgtcaagaattagaaggcaagggtcactaaatattttaaggattaaggtaccagaggcatcagtggtataaggatggagtctggtctttaattacgacaagggtattgcttacattctactctctggttttcaaaaagatctgacatgctgacaaatccagctcctcacaaatcttgtttgaaggacttgtgggaagtgatattccttactattagatcacgccccttataactacatgttaacatccagccttttatctgtttgagtaattgtagggatagaaagtgaagcccccagagttaggtgcaagtatagcacccagctgaaaggcatcatggagtctaagggccttctacagaaggggcaatcctttgggttatttctggtgtaccactgtcttctctacctcggtgctataacgaaatggcaacagtacagacaataaaaagatcaatggctgctagaagttgttagggaggagggggaagggacagagggaagaataaaacatgagattttcaggtcagtgaagctactctgtatgatactgtactggtggatatatatcattatatatttgccaaaatcaatggaatgtacaacatgaagagcgaaccttaatgtaaactatggactttaattaataataatgtatcaacagtgct

SEQ ID NO: 6149 - DNA, 4758 bp, Homo sapiens
gggggataggctcagacacaaggagaggcttggagagagcagacgccttctggattcaagaagacgaggctcacctgttactcggcctcccagaaagatggataggagaaatgactacggatatagggtgcctctatttcagatatacagactgagaccacagaagaggacagtgtcctgctgatgcataccctgttggcggcaaccaaggactccctggccatggacccaccagttgtcaaccggcctaagaaaagcaagaccaagaaggcccctataaagactattactaaggctgcacctgctgcccctccagtcccagctgccaatgagattgccaccaacaagcccaaaataacttggcaggctttaaacctgccagtcattacccagatcagccaggctttacctaccactgaggtaaccaatactcaggcttcttcagtcactgctcagcctaagaaagccaacaagatgaagagagttactgccaaggcagcccaaggctcccaatccccaactggccatgagggtggcactatacagctgaagtcacccttgcaggtcctaaagctaccagtcatctcacagaatattcacgctccaattgccaatgagtcagccagttcccaagccttgataacctctatcaagcctaagaaagcttccaaggctaagaaggctgcaaataaggccatagctagtgccaccgaggtctcgctggctgcaactgccacccatacagctaccacccaaggccaaattaccaatgagacagccagtatccacaccacagcagcctccatccgaaccaagaaagcctccaaagccaggaagacaattgctaaggtcataaatactgacactgagcatatagaggctctaaatgtcactgacgcagctaccaggcagattgaggcctcagtagtggctatcaggcccaaaaaatccaagggcaagaaggctgccagcaggggcccaaattctgtctctgagatctctgaggccccacttgccactcagatagtcacaaaccaagccctggcagccaccctgcgggtcaagagagggtctagggctcggaaggctgccactaaggctcgggcaactgaaagccagactccaaatgctgaccaaggggcccaggccaagatagcctctgctcagaccaacgtaagtgcccttgagactcaggttgctgctgctgtccaggccctggcagatgactatctggctcagttgagcctggagcccacaaccaggacccggggcaaaagaaaccgaaagtccaagcatctgaatggggatgagagaagtggcagtaattacaggcggatcccatggggccggaggcctgcaccaccgcgagatgtggccattttacaagaaagggctaataagttggtgaaatacctgttggttaaggaccagacaaagatccccatcaaacgctcagacatgctgagggatgtcatccaagaatatgatgaatatttcccagaaatcattgaacgagcaagctacactctggagaagatgtttcgagtcaatctgaaagaaattgataagcaaagtagcttgtatattctcatcagcactcaggaatcctctgcaggcatactgggaacgaccaaggacacacccaagctgggtctcctcatggtgattctgagtgtcatttttatgaatggcaacaaggccagtgaggctgtcatctgggaggtgctgcgcaagttggggctgcgccctggggtgaggcattcactctttggggaagtgaggaagctcatcacagacgagtttgtgaagcagaagtacctggagtacaagagggtccctaacagcagaccacctgaatatgagttcttctggggcttgcgctcctaccacgagactagcaagatgaaagtcctcaagtttgcatgcagggtgcagaagaaagaccccaaggactgggctgtgcagtaccgcgaggcagtggagatggaagtccaagctgcagctgtggctgtggctgaggctgaagccagggctgaggcaagagcccaaatggggattggagaggaagctgtggctgggccctggaattgggatgacatggatatcgactgcctaacaagggaagagttaggcgatgatgctcaggcctggagcagattttcatttgaaattgaggccagagcccaagaaaatgcagatgccagcaccaacgtcaacttcagcagaggagctagtaccagggctggcttcagcgatggtgctagtattagcttcaatggtgcacccagctccagtggtggcttcagtggtggacctggcattacctttggtgttgcacccagcaccagtgccagcttcagcaatacagccagcattagctttggtggtacactgagcactagctccagcttcagcagcgcagccagcattagctttggttgtgcacacagcaccagcactagtttcagcagtgaagccagcattagctttggtggcatgccttgtaccagtgccagctttagtggtggagtcagctctagttttagtggcccactcagcaccagtgccactttcagtggtggagccagctctggctttggaggcacactcagcaccacggctggctttagtggtgtactcagcactagcaccagctttggcagtgcacccacaacgagcacagtcttcagtagtgcgcttagcaccagcactggctttggaggcatactcagcaccagtgtctgttttggtggctctcccagctccagtggtagctttggtggtacactcagtaccagtatctgcttcggtggctctccctgcaccagcactggctttggaggcacacttagcaccagtgtctcctttggtggctcttccagcaccagtgccaattttggtggtacactaagtaccagcatctgctttgatggctctcccagcactggtgctggctttggtggtgctctcaacaccagtgccagctttggcagtgtgctcaacaccagtactggttttggtggtgctatgagcaccagtgctgactttggcggtacactaagcaccagtgtctgctttggtggctctcctggcaccagtgtcagctttggcagtgcactcaacaccaatgctggttatggtggtgctgtcagcaccaacactgactttggtggtacactaagcaccagcgtctgttttggtggctctcccagcaccagtgctggctttggtggtgcactcaacaccaatgccagctttggctgtgccgtcagcaccagtgccagcttcagtggtgctgtcagcaccagtgcttgcttcagtggtgcaccaatcaccaaccctggctttggcggtgcatttagcaccagtgctggcttcggtggggcacttagtaccgctgctgacttcggtggtactcccagcaacagcattggctttggtgctgctcccagcaccagtgtcagctttggtggtgctcatggcaccagcctctgttttggtggagctcccagcaccagcctctgctttggcagtgcatctaatactaacctatgctttggtggccctcctagcaccagtgcctgctttagtggtgctaccagccctagtttttgtgatggacccagcaccagtaccggtttcagctttggcaatgggttaagcaccaatgctggatttggtggtggactgaacaccagtgctggctttggtggtggcctaggcaccagtgctggcttcagtggtggcctaagcacaagttctggctttgatggtgggctaggtaccagcgctggcttcggtggaggaccaggcaccagcactggttttggtggtggactgggcaccagtgctggcttcagtggcggactgggcaccagtgctggctttggtggtggactggtcactagtgatggctttggtggtggactgggcaccaatgctagtttcggcagcacacttggcaccagtgctggctttagtggtggcctcagcaccagcgatggctttggcagtaggcctaatgccagcttcgacagaggactgagtaccatcattggctttggcagtggttccaacaccagcactggctttactggcgaacccagcaccagcacgggcttcagtagtggacccagttctattgttggcttcagcggtggaccaagcactggtgttggcttctgcagtggaccaagcaccagtggcttcagcggtggaccgagcacaggagctggcttcggcggtggaccaaacactggtgctggctttggtggtggaccgagcaccagtgctggctttggcagtggagccgccagtcttggtgcctgtggcttctcgtatggctagtgaggtttcaggtaactgcaatatttccatagccaggacccacagggatgggtacaagagctgggagatgttgtaagaaacactaaggcaggacagcagggtggaaaggtgagggcaattaaggaattatgagaagacagtgtatttggtgctaaaatgtgttcctatttgttttgttttcagatttattccccatgtttacagataccgctaataaattgcagtagtccttcccatggagccaaagtacatccttggaatctttgtccacacagcagtcaaggcagttatggccaatcagctgagggtgtcatgtgatggaaaaatctgtttgctgttcctgctttattgtttgctttctgtgtgctgtcatattttggtatcagagttacattaaatttgcaaaatgaa

SEQ ID NO: 6150 - DNA, 2311 bp, Homo sapiens
gggggataggctcagacacaaggagaggcttggagagagcagacgccttctggattcaagaagacgaggctcacctgttactcggcctcccagaaagatggataggagaaatgactacggatatagggtgcctctatttcagggccctctgcctcccccggggagcctggggcttcccttccctccagatatacagactgagaccacagaagaggacagtgtcctgctgatgcataccctgttggcggcaaccaaggactccctggccatggacccaccagttgtcaaccggcctaagaaaagcaagaccaagaaggcccctataaagactattactaaggctgcacctgctgcccctccagtcccagctgccaatgagattgccaccaacaagcccaaaataacttggcaggctttaaacctgccagtcattacccagatcagccaggctttacctaccactgaggtaaccaatactcaggcttcttcagtcactgctcagcctaagaaagccaacaagatgaagagagttactgccaaggcagcccaaggctcccaatccccaactggccatgagggtggcactatacagctgaagtcacccttgcaggtcctaaagctaccagtcatctcacagaatattcacgctccaattgccaatgagtcagccagttcccaagccttgataacctctatcaagcctaagaaagcttccaaggctaagaaggctgcaaataaggccatagctagtgccaccgaggtctcgctggctgcaactgccacccatacagctaccacccaaggccaaattaccaatgagacagccagtatccacaccacagcagcctccatccgaaccaagaaagcctccaaagccaggaagacaattgctaaggtcataaatactgacactgagcatatagaggctctaaatgtcactgacgcagctaccaggcagattgaggcctcagtagtggctatcaggcccaaaaaatccaagggcaagaaggctgccagcaggggcccaaattctgtctctgagatctctgaggccccacttgccactcagatagtcacaaaccaagccctggcagccaccctgcgggtcaagagagggtctagggctcggaaggctgccactaaggctcgggcaactgaaagccagactccaaatgctgaccaaggggcccaggccaagatagcctctgctcagaccaacgtaagtgcccttgagactcaggttgctgctgctgtccaggccctggcagatgactatctggctcagttgagcctggagcccacaaccaggacccggggcaaaagaaaccgaaagtccaagcatctgaatggggatgagagaagtggcagtaattacaggcggatcccatggggccggaggcctgcaccaccgcgagatgtggccattttacaagaaagggctaataagttggtgaaatacctgttggttaaggaccagacaaagatccccatcaaacgctcagacatgctgagggatgtcatccaagaatatgatgaatatttcccagaaatcattgaacgagcaagctacactctggagaagatgtttcgagtcaatctgaaagaaattgataagcaaagtagcttgtatattctcatcagcactcaggaatcctctgcaggcatactgggaacgaccaaggacacacccaagctgggtctcctcatggtgattctgagtgtcatttttatgaatggcaacaaggccagtgaggctgtcatctgggaggtgctgcgcaagttggggctgcgccctggggtgaggcattcactctttggggaagtgaggaagctcatcacagacgagtttgtgaagcagaagtacctggagtacaagagggtccctaacagcagaccacctgaatatgagttcttctggggcttgcgctcctaccacgagactagcaagatgaaagtcctcaagtttgcatgcagggtgcagaagaaagaccccaaggactgggctgtgcagtaccgcgaggcagtggagatggaagtccaagctgcagctgtggctgtggctgaggctgaagccagggctgagatttattccccatgtttacagataccgctaataaattgcagtagtccttcccatggagccaaagtacatccttggaatctttgtccacacagcagtcaaggcagttatggccaatcagctgagggtgtcatgtgatggaaaaatctgtttgctgttcctgctttattgtttgctttctgtgtgctgtcatattttggtatcagagttacattaaatttgcaaaatgaa

SEQ ID NO: 6151 - DNA, 2602 bp, Homo sapiens
gggggataggctcagacacaaggagaggcttggagagagcagacgccttctggattcaagaagacgaggctcacctgttactcggcctcccagaaagatggataggagaaatgactacggatatagggtgcctctatttcagggccctctgcctcccccggggagcctggggcttcccttccctccagatatacagactgagaccacagaagaggacagtgtcctgctgatgcataccctgttggcggcaaccaaggactccctggccatggacccaccagttgtcaaccggcctaagaaaagcaagaccaagaaggcccctataaagactattactaaggctgcacctgctgcccctccagtcccagctgccaatgagattgccaccaacaagcccaaaataacttggcaggctttaaacctgccagtcattacccagatcagccaggctttacctaccactgaggtaaccaatactcaggcttcttcagtcactgctcagcctaagaaagccaacaagatgaagagagttactgccaaggcagcccaaggctcccaatccccaactggccatgagggtggcactatacagctgaagtcacccttgcaggtcctaaagctaccagtcatctcacagaatattcacgctccaattgccaatgagtcagccagttcccaagccttgataacctctatcaagcctaagaaagcttccaaggctaagaaggctgcaaataaggccatagctagtgccaccgaggtctcgctggctgcaactgccacccatacagctaccacccaaggccaaattaccaatgagacagccagtatccacaccacagcagcctccatccgaaccaagaaagcctccaaagccaggaagacaattgctaaggtcataaatactgacactgagcatatagaggctctaaatgtcactgacgcagctaccaggcagattgaggcctcagtagtggctatcaggcccaaaaaatccaagggcaagaaggctgccagcaggggcccaaattctgtctctgagatctctgaggccccacttgccactcagatagtcacaaaccaagccctggcagccaccctgcgggtcaagagagggtctagggctcggaaggctgccactaaggctcgggcaactgaaagccagactccaaatgctgaccaaggggcccaggccaagatagcctctgctcagaccaacgtaagtgcccttgagactcaggttgctgctgctgtccaggccctggcagatgactatctggctcagttgagcctggagcccacaaccaggacccggggcaaaagaaaccgaaagtccaagcatctgaatggggatgagagaagtggcagtaattacaggcggatcccatggggccggaggcctgcaccaccgcgagatgtggccattttacaagaaagggctaataagttggtgaaatacctgttggttaaggaccagacaaagatccccatcaaacgctcagacatgctgagggatgtcatccaagaatatgatgaatatttcccagaaatcattgaacgagcaagctacactctggagaagatgtttcgagtcaatctgaaagaaattgataagcaaagtagcttgtatattctcatcagcactcaggaatcctctgcaggcatactgggaacgaccaaggacacacccaagctgggtctcctcatggtgattctgagtgtcatttttatgaatggcaacaaggccagtgaggctgtcatctgggaggtgctgcgcaagttggggctgcgccctggggtgaggcattcactctttggggaagtgaggaagctcatcacagacgagtttgtgaagcagaagtacctggagtacaagagggtccctaacagcagaccacctgaatatgagttcttctggggcttgcgctcctaccacgagactagcaagatgaaagtcctcaagtttgcatgcagggtgcagaagaaagaccccaaggactgggctgtgcagtaccgcgaggcagtggagatggaagtccaagctgcagctgtggctgtggctgaggctgaagccagggctgagtggttccaacaccagcactggctttactggcgaacccagcaccagcacgggcttcagtagtggacccagttctattgttggcttcagcggtggaccaagcactggtgttggcttctgcagtggaccaagcaccagtggcttcagcggtggaccgagcacaggagctggcttcggcggtggaccaaacactggtgctggctttggtggtggaccgagcaccagtgctggctttggcagtggagccgccagtcttggtgcctgtggcttctcgtatggctagtgaggtttcagatttattccccatgtttacagataccgctaataaattgcagtagtccttcccatggagccaaagtacatccttggaatctttgtccacacagcagtcaaggcagttatggccaatcagctgagggtgtcatgtgatggaaaaatctgtttgctgttcctgctttattgtttgctttctgtgtgctgtcatattttggtatcagagttacattaaatttgcaaaatgaa

SEQ ID NO: 6152 - DNA, 1411 bp, Homo sapiens
gggggataggctcagacacaaggagaggcttggagagagcagacgccttctggattcaagaagacgaggctcacctgttactcggcctcccagaaagatggataggagaaatgactacggatatagggtgcctctatttcagtccaagcatctgaatggggatgagagaagtggcagtaattacaggcggatcccatggggccggaggcctgcaccaccgcgagatgtggccattttacaagaaagggctaataagttggtgaaatacctgttggttaaggaccagacaaagatccccatcaaacgctcagacatgctgagggatgtcatccaagaatatgatgaatatttcccagaaatcattgaacgagcaagctacactctggagaagatgtttcgagtcaatctgaaagaaattgataagcaaagtagcttgtatattctcatcagcactcaggaatcctctgcaggcatactgggaacgaccaaggacacacccaagctgggtctcctcatggtgattctgagtgtcatttttatgaatggcaacaaggccagtgaggctgtcatctgggaggtgctgcgcaagttggggctgcgccctggggtgaggcattcactctttggggaagtgaggaagctcatcacagacgagtttgtgaagcagaagtacctggagtacaagagggtccctaacagcagaccacctgaatatgagttcttctggggcttgcgctcctaccacgagactagcaagatgaaagtcctcaagtttgcatgcagggtgcagaagaaagaccccaaggactgggctgtgcagtaccgcgaggcagtggagatggaagtccaagctgcagctgtggctgtggctgaggctgaagccagggctgagtggttccaacaccagcactggctttactggcgaacccagcaccagcacgggcttcagtagtggacccagttctattgttggcttcagcggtggaccaagcactggtgttggcttctgcagtggaccaagcaccagtggcttcagcggtggaccgagcacaggagctggcttcggcggtggaccaaacactggtgctggctttggtggtggaccgagcaccagtgctggctttggcagtggagccgccagtcttggtgcctgtggcttctcgtatggctagtgaggtttcagatttattccccatgtttacagataccgctaataaattgcagtagtccttcccatggagccaaagtacatccttggaatctttgtccacacagcagtcaaggcagttatggccaatcagctgagggtgtcatgtgatggaaaaatctgtttgctgttcctgctttattgtttgctttctgtgtgctgtcatattttggtatcagagttacattaaatttgcaaaatgaa

SEQ ID NO: 6153 - DNA, 1120 bp, Homo sapiens
gggggataggctcagacacaaggagaggcttggagagagcagacgccttctggattcaagaagacgaggctcacctgttactcggcctcccagaaagatggataggagaaatgactacggatatagggtgcctctatttcagtccaagcatctgaatggggatgagagaagtggcagtaattacaggcggatcccatggggccggaggcctgcaccaccgcgagatgtggccattttacaagaaagggctaataagttggtgaaatacctgttggttaaggaccagacaaagatccccatcaaacgctcagacatgctgagggatgtcatccaagaatatgatgaatatttcccagaaatcattgaacgagcaagctacactctggagaagatgtttcgagtcaatctgaaagaaattgataagcaaagtagcttgtatattctcatcagcactcaggaatcctctgcaggcatactgggaacgaccaaggacacacccaagctgggtctcctcatggtgattctgagtgtcatttttatgaatggcaacaaggccagtgaggctgtcatctgggaggtgctgcgcaagttggggctgcgccctggggtgaggcattcactctttggggaagtgaggaagctcatcacagacgagtttgtgaagcagaagtacctggagtacaagagggtccctaacagcagaccacctgaatatgagttcttctggggcttgcgctcctaccacgagactagcaagatgaaagtcctcaagtttgcatgcagggtgcagaagaaagaccccaaggactgggctgtgcagtaccgcgaggcagtggagatggaagtccaagctgcagctgtggctgtggctgaggctgaagccagggctgagatttattccccatgtttacagataccgctaataaattgcagtagtccttcccatggagccaaagtacatccttggaatctttgtccacacagcagtcaaggcagttatggccaatcagctgagggtgtcatgtgatggaaaaatctgtttgctgttcctgctttattgtttgctttctgtgtgctgtcatattttggtatcagagttacattaaatttgcaaaatgaa

SEQ ID NO: 6154 - DNA, 5049 bp, Homo sapiens
gggggataggctcagacacaaggagaggcttggagagagcagacgccttctggattcaagaagacgaggctcacctgttactcggcctcccagaaagatggataggagaaatgactacggatatagggtgcctctatttcagggccctctgcctcccccggggagcctggggcttcccttccctccagatatacagactgagaccacagaagaggacagtgtcctgctgatgcataccctgttggcggcaaccaaggactccctggccatggacccaccagttgtcaaccggcctaagaaaagcaagaccaagaaggcccctataaagactattactaaggctgcacctgctgcccctccagtcccagctgccaatgagattgccaccaacaagcccaaaataacttggcaggctttaaacctgccagtcattacccagatcagccaggctttacctaccactgaggtaaccaatactcaggcttcttcagtcactgctcagcctaagaaagccaacaagatgaagagagttactgccaaggcagcccaaggctcccaatccccaactggccatgagggtggcactatacagctgaagtcacccttgcaggtcctaaagctaccagtcatctcacagaatattcacgctccaattgccaatgagtcagccagttcccaagccttgataacctctatcaagcctaagaaagcttccaaggctaagaaggctgcaaataaggccatagctagtgccaccgaggtctcgctggctgcaactgccacccatacagctaccacccaaggccaaattaccaatgagacagccagtatccacaccacagcagcctccatccgaaccaagaaagcctccaaagccaggaagacaattgctaaggtcataaatactgacactgagcatatagaggctctaaatgtcactgacgcagctaccaggcagattgaggcctcagtagtggctatcaggcccaaaaaatccaagggcaagaaggctgccagcaggggcccaaattctgtctctgagatctctgaggccccacttgccactcagatagtcacaaaccaagccctggcagccaccctgcgggtcaagagagggtctagggctcggaaggctgccactaaggctcgggcaactgaaagccagactccaaatgctgaccaaggggcccaggccaagatagcctctgctcagaccaacgtaagtgcccttgagactcaggttgctgctgctgtccaggccctggcagatgactatctggctcagttgagcctggagcccacaaccaggacccggggcaaaagaaaccgaaagtccaagcatctgaatggggatgagagaagtggcagtaattacaggcggatcccatggggccggaggcctgcaccaccgcgagatgtggccattttacaagaaagggctaataagttggtgaaatacctgttggttaaggaccagacaaagatccccatcaaacgctcagacatgctgagggatgtcatccaagaatatgatgaatatttcccagaaatcattgaacgagcaagctacactctggagaagatgtttcgagtcaatctgaaagaaattgataagcaaagtagcttgtatattctcatcagcactcaggaatcctctgcaggcatactgggaacgaccaaggacacacccaagctgggtctcctcatggtgattctgagtgtcatttttatgaatggcaacaaggccagtgaggctgtcatctgggaggtgctgcgcaagttggggctgcgccctgggtatgactgggctctctcagcgcttgctgtccgtgttgtcctttggcaagagaggatggtcctaggattgcatcagtctggtggtctggtggagcgggtggggtgctggactgggtagagggcccagggttctgacctgggtggatgacgggcaaatggtcctgaactctctgctgtctctctccttaatgtcctctgtctgttctaagctgagatgttagatagaccttcagggatccctgacaaagaggcatctggtcttaactgcttgcttctagtggccatgtgctcattactttcttcacttcattgagactgccccatgtgctagagaggtctcttccatgttgggaaatgcctctgccctcatctgggcagttctgatctgtgttcatgggttatttttcccattgtcagggtgaggcattcactctttggggaagtgaggaagctcatcacagacgagtttgtgaagcagaagtacctggagtacaagagggtccctaacagcagaccacctgaatatgagttcttctggggcttgcgctcctaccacgagactagcaagatgaaagtcctcaagtttgcatgcagggtgcagaagaaagaccccaaggactgggctgtgcagtaccgcgaggcagtggagatggaagtccaagctgcagctgtggctgtggctgaggctgaagccagggctgaggcaagagcccaaatggggattggagaggaagctgtggctgggccctggaattgggatgacatggatatcgactgcctaacaagggaagagttaggcgatgatgctcaggcctggagcagattttcatttgaaattgaggccagagcccaagaaaatgcagatgccagcaccaacgtcaacttcagcagaggagctagtaccagggctggcttcagcgatggtgctagtattagcttcaatggtgcacccagctccagtggtggcttcagtggtggacctggcattacctttggtgttgcacccagcaccagtgccagcttcagcaatacagccagcattagctttggtggtacactgagcactagctccagcttcagcagcgcagccagcattagctttggttgtgcacacagcaccagcactagtttcagcagtgaagccagcattagctttggtggcatgccttgtaccagtgccagctttagtggtggagtcagctctagttttagtggcccactcagcaccagtgccactttcagtggtggagccagctctggctttggaggcacactcagcaccacggctggctttagtggtgtactcagcactagcaccagctttggcagtgcacccacaacgagcacagtcttcagtagtgcgcttagcaccagcactggctttggaggcatactcagcaccagtgtctgttttggtggctctcccagctccagtggtagctttggtggtacactcagtaccagtatctgcttcggtggctctccctgcaccagcactggctttggaggcacacttagcaccagtgtctcctttggtggctcttccagcaccagtgccaattttggtggtacactaagtaccagcatctgctttgatggctctcccagcactggtgctggctttggtggtgctctcaacaccagtgccagctttggcagtgtgctcaacaccagtactggttttggtggtgctatgagcaccagtgctgactttggcggtacactaagcaccagtgtctgctttggtggctctcctggcaccagtgtcagctttggcagtgcactcaacaccaatgctggttatggtggtgctgtcagcaccaacactgactttggtggtacactaagcaccagcgtctgttttggtggctctcccagcaccagtgctggctttggtggtgcactcaacaccaatgccagctttggctgtgccgtcagcaccagtgccagcttcagtggtgctgtcagcaccagtgcttgcttcagtggtgcaccaatcaccaaccctggctttggcggtgcatttagcaccagtgctggcttcggtggggcacttagtaccgctgctgacttcggtggtactcccagcaacagcattggctttggtgctgctcccagcaccagtgtcagctttggtggtgctcatggcaccagcctctgttttggtggagctcccagcaccagcctctgctttggcagtgcatctaatactaacctatgctttggtggccctcctagcaccagtgcctgctttagtggtgctaccagccctagtttttgtgatggacccagcaccagtaccggtttcagctttggcaatgggttaagcaccaatgctggatttggtggtggactgaacaccagtgctggctttggtggtggcctaggcaccagtgctggcttcagtggtggcctaagcacaagttctggctttgatggtgggctaggtaccagcgctggcttcggtggaggaccaggcaccagcactggttttggtggtggactgggcaccagtgctggcttcagtggcggactgggcaccagtgctggctttggtggtggactggtcactagtgatggctttggtggtggactgggcaccaatgctagtttcggcagcacacttggcaccagtgctggctttagtggtggcctcagcaccagcgatggctttggcagtaggcctaatgccagcttcgacagaggactgagtaccatcattggctttggcagtggttccaacaccagcactggctttactggcgaacccagcaccagcacgggcttcagtagtggacccagttctattgttggcttcagcggtggaccaagcactggtgttggcttctgcagtggaccaagcaccagtggcttcagcggtggaccgagcacaggagctggcttcggcggtggaccaaacactggtgctggctttggtggtggaccgagcaccagtgctggctttggcagtggagccgccagtcttggtgcctgtggcttctcgtatggctagtgaggtttcagatttattccccatgtttacagataccgctaataaattgcagtagtccttcccatggagccaaagtacatccttggaatctttgtccacacagcagtcaaggcagttatggccaatcagctgagggtgtcatgtgatggaaaaatctgtttgctgttcctgctttattgtttgctttctgtgtgctgtcatattttggtatcagagttacattaaatttgcaaaatgaa

SEQ ID NO: 6155 - DNA, 4975 bp, Homo sapiens
gggggataggctcagacacaaggagaggcttggagagagcagacgccttctggattcaagaagacgagggccctctgcctcccccggggagcctggggcttcccttccctccagatatacagactgagaccacagaagaggacagtgtcctgctgatgcataccctgttggcggcaaccaaggactccctggccatggacccaccagttgtcaaccggcctaagaaaagcaagaccaagaaggcccctataaagactattactaaggctgcacctgctgcccctccagtcccagctgccaatgagattgccaccaacaagcccaaaataacttggcaggctttaaacctgccagtcattacccagatcagccaggctttacctaccactgaggtaaccaatactcaggcttcttcagtcactgctcagcctaagaaagccaacaagatgaagagagttactgccaaggcagcccaaggctcccaatccccaactggccatgagggtggcactatacagctgaagtcacccttgcaggtcctaaagctaccagtcatctcacagaatattcacgctccaattgccaatgagtcagccagttcccaagccttgataacctctatcaagcctaagaaagcttccaaggctaagaaggctgcaaataaggccatagctagtgccaccgaggtctcgctggctgcaactgccacccatacagctaccacccaaggccaaattaccaatgagacagccagtatccacaccacagcagcctccatccgaaccaagaaagcctccaaagccaggaagacaattgctaaggtcataaatactgacactgagcatatagaggctctaaatgtcactgacgcagctaccaggcagattgaggcctcagtagtggctatcaggcccaaaaaatccaagggcaagaaggctgccagcaggggcccaaattctgtctctgagatctctgaggccccacttgccactcagatagtcacaaaccaagccctggcagccaccctgcgggtcaagagagggtctagggctcggaaggctgccactaaggctcgggcaactgaaagccagactccaaatgctgaccaaggggcccaggccaagatagcctctgctcagaccaacgtaagtgcccttgagactcaggttgctgctgctgtccaggccctggcagatgactatctggctcagttgagcctggagcccacaaccaggacccggggcaaaagaaaccgaaagtccaagcatctgaatggggatgagagaagtggcagtaattacaggcggatcccatggggccggaggcctgcaccaccgcgagatgtggccattttacaagaaagggctaataagttggtgaaatacctgttggttaaggaccagacaaagatccccatcaaacgctcagacatgctgagggatgtcatccaagaatatgatgaatatttcccagaaatcattgaacgagcaagctacactctggagaagatgtttcgagtcaatctgaaagaaattgataagcaaagtagcttgtatattctcatcagcactcaggaatcctctgcaggcatactgggaacgaccaaggacacacccaagctgggtctcctcatggtgattctgagtgtcatttttatgaatggcaacaaggccagtgaggctgtcatctgggaggtgctgcgcaagttggggctgcgccctgggtatgactgggctctctcagcgcttgctgtccgtgttgtcctttggcaagagaggatggtcctaggattgcatcagtctggtggtctggtggagcgggtggggtgctggactgggtagagggcccagggttctgacctgggtggatgacgggcaaatggtcctgaactctctgctgtctctctccttaatgtcctctgtctgttctaagctgagatgttagatagaccttcagggatccctgacaaagaggcatctggtcttaactgcttgcttctagtggccatgtgctcattactttcttcacttcattgagactgccccatgtgctagagaggtctcttccatgttgggaaatgcctctgccctcatctgggcagttctgatctgtgttcatgggttatttttcccattgtcagggtgaggcattcactctttggggaagtgaggaagctcatcacagacgagtttgtgaagcagaagtacctggagtacaagagggtccctaacagcagaccacctgaatatgagttcttctggggcttgcgctcctaccacgagactagcaagatgaaagtcctcaagtttgcatgcagggtgcagaagaaagaccccaaggactgggctgtgcagtaccgcgaggcagtggagatggaagtccaagctgcagctgtggctgtggctgaggctgaagccagggctgaggcaagagcccaaatggggattggagaggaagctgtggctgggccctggaattgggatgacatggatatcgactgcctaacaagggaagagttaggcgatgatgctcaggcctggagcagattttcatttgaaattgaggccagagcccaagaaaatgcagatgccagcaccaacgtcaacttcagcagaggagctagtaccagggctggcttcagcgatggtgctagtattagcttcaatggtgcacccagctccagtggtggcttcagtggtggacctggcattacctttggtgttgcacccagcaccagtgccagcttcagcaatacagccagcattagctttggtggtacactgagcactagctccagcttcagcagcgcagccagcattagctttggttgtgcacacagcaccagcactagtttcagcagtgaagccagcattagctttggtggcatgccttgtaccagtgccagctttagtggtggagtcagctctagttttagtggcccactcagcaccagtgccactttcagtggtggagccagctctggctttggaggcacactcagcaccacggctggctttagtggtgtactcagcactagcaccagctttggcagtgcacccacaacgagcacagtcttcagtagtgcgcttagcaccagcactggctttggaggcatactcagcaccagtgtctgttttggtggctctcccagctccagtggtagctttggtggtacactcagtaccagtatctgcttcggtggctctccctgcaccagcactggctttggaggcacacttagcaccagtgtctcctttggtggctcttccagcaccagtgccaattttggtggtacactaagtaccagcatctgctttgatggctctcccagcactggtgctggctttggtggtgctctcaacaccagtgccagctttggcagtgtgctcaacaccagtactggttttggtggtgctatgagcaccagtgctgactttggcggtacactaagcaccagtgtctgctttggtggctctcctggcaccagtgtcagctttggcagtgcactcaacaccaatgctggttatggtggtgctgtcagcaccaacactgactttggtggtacactaagcaccagcgtctgttttggtggctctcccagcaccagtgctggctttggtggtgcactcaacaccaatgccagctttggctgtgccgtcagcaccagtgccagcttcagtggtgctgtcagcaccagtgcttgcttcagtggtgcaccaatcaccaaccctggctttggcggtgcatttagcaccagtgctggcttcggtggggcacttagtaccgctgctgacttcggtggtactcccagcaacagcattggctttggtgctgctcccagcaccagtgtcagctttggtggtgctcatggcaccagcctctgttttggtggagctcccagcaccagcctctgctttggcagtgcatctaatactaacctatgctttggtggccctcctagcaccagtgcctgctttagtggtgctaccagccctagtttttgtgatggacccagcaccagtaccggtttcagctttggcaatgggttaagcaccaatgctggatttggtggtggactgaacaccagtgctggctttggtggtggcctaggcaccagtgctggcttcagtggtggcctaagcacaagttctggctttgatggtgggctaggtaccagcgctggcttcggtggaggaccaggcaccagcactggttttggtggtggactgggcaccagtgctggcttcagtggcggactgggcaccagtgctggctttggtggtggactggtcactagtgatggctttggtggtggactgggcaccaatgctagtttcggcagcacacttggcaccagtgctggctttagtggtggcctcagcaccagcgatggctttggcagtaggcctaatgccagcttcgacagaggactgagtaccatcattggctttggcagtggttccaacaccagcactggctttactggcgaacccagcaccagcacgggcttcagtagtggacccagttctattgttggcttcagcggtggaccaagcactggtgttggcttctgcagtggaccaagcaccagtggcttcagcggtggaccgagcacaggagctggcttcggcggtggaccaaacactggtgctggctttggtggtggaccgagcaccagtgctggctttggcagtggagccgccagtcttggtgcctgtggcttctcgtatggctagtgaggtttcagatttattccccatgtttacagataccgctaataaattgcagtagtccttcccatggagccaaagtacatccttggaatctttgtccacacagcagtcaaggcagttatggccaatcagctgagggtgtcatgtgatggaaaaatctgtttgctgttcctgctttattgtttgctttctgtgtgctgtcatattttggtatcagagttacattaaatttgcaaaatgaa

SEQ ID NO: 6156 - DNA, 4995 bp, Homo sapiens
ggcgtgtaaaggggtggggtcgtagaactgactctctcggaggcaaaaggagctgggccttggaaaccagatggcctgggttttttagggccctctgcctcccccggggagcctggggcttcccttccctccagatatacagactgagaccacagaagaggacagtgtcctgctgatgcataccctgttggcggcaaccaaggactccctggccatggacccaccagttgtcaaccggcctaagaaaagcaagaccaagaaggcccctataaagactattactaaggctgcacctgctgcccctccagtcccagctgccaatgagattgccaccaacaagcccaaaataacttggcaggctttaaacctgccagtcattacccagatcagccaggctttacctaccactgaggtaaccaatactcaggcttcttcagtcactgctcagcctaagaaagccaacaagatgaagagagttactgccaaggcagcccaaggctcccaatccccaactggccatgagggtggcactatacagctgaagtcacccttgcaggtcctaaagctaccagtcatctcacagaatattcacgctccaattgccaatgagtcagccagttcccaagccttgataacctctatcaagcctaagaaagcttccaaggctaagaaggctgcaaataaggccatagctagtgccaccgaggtctcgctggctgcaactgccacccatacagctaccacccaaggccaaattaccaatgagacagccagtatccacaccacagcagcctccatccgaaccaagaaagcctccaaagccaggaagacaattgctaaggtcataaatactgacactgagcatatagaggctctaaatgtcactgacgcagctaccaggcagattgaggcctcagtagtggctatcaggcccaaaaaatccaagggcaagaaggctgccagcaggggcccaaattctgtctctgagatctctgaggccccacttgccactcagatagtcacaaaccaagccctggcagccaccctgcgggtcaagagagggtctagggctcggaaggctgccactaaggctcgggcaactgaaagccagactccaaatgctgaccaaggggcccaggccaagatagcctctgctcagaccaacgtaagtgcccttgagactcaggttgctgctgctgtccaggccctggcagatgactatctggctcagttgagcctggagcccacaaccaggacccggggcaaaagaaaccgaaagtccaagcatctgaatggggatgagagaagtggcagtaattacaggcggatcccatggggccggaggcctgcaccaccgcgagatgtggccattttacaagaaagggctaataagttggtgaaatacctgttggttaaggaccagacaaagatccccatcaaacgctcagacatgctgagggatgtcatccaagaatatgatgaatatttcccagaaatcattgaacgagcaagctacactctggagaagatgtttcgagtcaatctgaaagaaattgataagcaaagtagcttgtatattctcatcagcactcaggaatcctctgcaggcatactgggaacgaccaaggacacacccaagctgggtctcctcatggtgattctgagtgtcatttttatgaatggcaacaaggccagtgaggctgtcatctgggaggtgctgcgcaagttggggctgcgccctgggtatgactgggctctctcagcgcttgctgtccgtgttgtcctttggcaagagaggatggtcctaggattgcatcagtctggtggtctggtggagcgggtggggtgctggactgggtagagggcccagggttctgacctgggtggatgacgggcaaatggtcctgaactctctgctgtctctctccttaatgtcctctgtctgttctaagctgagatgttagatagaccttcagggatccctgacaaagaggcatctggtcttaactgcttgcttctagtggccatgtgctcattactttcttcacttcattgagactgccccatgtgctagagaggtctcttccatgttgggaaatgcctctgccctcatctgggcagttctgatctgtgttcatgggttatttttcccattgtcagggtgaggcattcactctttggggaagtgaggaagctcatcacagacgagtttgtgaagcagaagtacctggagtacaagagggtccctaacagcagaccacctgaatatgagttcttctggggcttgcgctcctaccacgagactagcaagatgaaagtcctcaagtttgcatgcagggtgcagaagaaagaccccaaggactgggctgtgcagtaccgcgaggcagtggagatggaagtccaagctgcagctgtggctgtggctgaggctgaagccagggctgaggcaagagcccaaatggggattggagaggaagctgtggctgggccctggaattgggatgacatggatatcgactgcctaacaagggaagagttaggcgatgatgctcaggcctggagcagattttcatttgaaattgaggccagagcccaagaaaatgcagatgccagcaccaacgtcaacttcagcagaggagctagtaccagggctggcttcagcgatggtgctagtattagcttcaatggtgcacccagctccagtggtggcttcagtggtggacctggcattacctttggtgttgcacccagcaccagtgccagcttcagcaatacagccagcattagctttggtggtacactgagcactagctccagcttcagcagcgcagccagcattagctttggttgtgcacacagcaccagcactagtttcagcagtgaagccagcattagctttggtggcatgccttgtaccagtgccagctttagtggtggagtcagctctagttttagtggcccactcagcaccagtgccactttcagtggtggagccagctctggctttggaggcacactcagcaccacggctggctttagtggtgtactcagcactagcaccagctttggcagtgcacccacaacgagcacagtcttcagtagtgcgcttagcaccagcactggctttggaggcatactcagcaccagtgtctgttttggtggctctcccagctccagtggtagctttggtggtacactcagtaccagtatctgcttcggtggctctccctgcaccagcactggctttggaggcacacttagcaccagtgtctcctttggtggctcttccagcaccagtgccaattttggtggtacactaagtaccagcatctgctttgatggctctcccagcactggtgctggctttggtggtgctctcaacaccagtgccagctttggcagtgtgctcaacaccagtactggttttggtggtgctatgagcaccagtgctgactttggcggtacactaagcaccagtgtctgctttggtggctctcctggcaccagtgtcagctttggcagtgcactcaacaccaatgctggttatggtggtgctgtcagcaccaacactgactttggtggtacactaagcaccagcgtctgttttggtggctctcccagcaccagtgctggctttggtggtgcactcaacaccaatgccagctttggctgtgccgtcagcaccagtgccagcttcagtggtgctgtcagcaccagtgcttgcttcagtggtgcaccaatcaccaaccctggctttggcggtgcatttagcaccagtgctggcttcggtggggcacttagtaccgctgctgacttcggtggtactcccagcaacagcattggctttggtgctgctcccagcaccagtgtcagctttggtggtgctcatggcaccagcctctgttttggtggagctcccagcaccagcctctgctttggcagtgcatctaatactaacctatgctttggtggccctcctagcaccagtgcctgctttagtggtgctaccagccctagtttttgtgatggacccagcaccagtaccggtttcagctttggcaatgggttaagcaccaatgctggatttggtggtggactgaacaccagtgctggctttggtggtggcctaggcaccagtgctggcttcagtggtggcctaagcacaagttctggctttgatggtgggctaggtaccagcgctggcttcggtggaggaccaggcaccagcactggttttggtggtggactgggcaccagtgctggcttcagtggcggactgggcaccagtgctggctttggtggtggactggtcactagtgatggctttggtggtggactgggcaccaatgctagtttcggcagcacacttggcaccagtgctggctttagtggtggcctcagcaccagcgatggctttggcagtaggcctaatgccagcttcgacagaggactgagtaccatcattggctttggcagtggttccaacaccagcactggctttactggcgaacccagcaccagcacgggcttcagtagtggacccagttctattgttggcttcagcggtggaccaagcactggtgttggcttctgcagtggaccaagcaccagtggcttcagcggtggaccgagcacaggagctggcttcggcggtggaccaaacactggtgctggctttggtggtggaccgagcaccagtgctggctttggcagtggagccgccagtcttggtgcctgtggcttctcgtatggctagtgaggtttcagatttattccccatgtttacagataccgctaataaattgcagtagtccttcccatggagccaaagtacatccttggaatctttgtccacacagcagtcaaggcagttatggccaatcagctgagggtgtcatgtgatggaaaaatctgtttgctgttcctgctttattgtttgctttctgtgtgctgtcatattttggtatcagagttacattaaatttgcaaaatgaa

SEQ ID NO: 6157 - DNA, 3808 bp, Homo sapiens
agggactttctgtctggagcaggcaaggtgaggagacagagccatctctttcacctggtgactctggaccttccttctttctgatgatgaagtccaagcatctgaatggggatgagagaagtggcagtaattacaggcggatcccatggggccggaggcctgcaccaccgcgagatgtggccattttacaagaaagggctaataagttggtgaaatacctgttggttaaggaccagacaaagatccccatcaaacgctcagacatgctgagggatgtcatccaagaatatgatgaatatttcccagaaatcattgaacgagcaagctacactctggagaagatgtttcgagtcaatctgaaagaaattgataagcaaagtagcttgtatattctcatcagcactcaggaatcctctgcaggcatactgggaacgaccaaggacacacccaagctgggtctcctcatggtgattctgagtgtcatttttatgaatggcaacaaggccagtgaggctgtcatctgggaggtgctgcgcaagttggggctgcgccctgggtatgactgggctctctcagcgcttgctgtccgtgttgtcctttggcaagagaggatggtcctaggattgcatcagtctggtggtctggtggagcgggtggggtgctggactgggtagagggcccagggttctgacctgggtggatgacgggcaaatggtcctgaactctctgctgtctctctccttaatgtcctctgtctgttctaagctgagatgttagatagaccttcagggatccctgacaaagaggcatctggtcttaactgcttgcttctagtggccatgtgctcattactttcttcacttcattgagactgccccatgtgctagagaggtctcttccatgttgggaaatgcctctgccctcatctgggcagttctgatctgtgttcatgggttatttttcccattgtcagggtgaggcattcactctttggggaagtgaggaagctcatcacagacgagtttgtgaagcagaagtacctggagtacaagagggtccctaacagcagaccacctgaatatgagttcttctggggcttgcgctcctaccacgagactagcaagatgaaagtcctcaagtttgcatgcagggtgcagaagaaagaccccaaggactgggctgtgcagtaccgcgaggcagtggagatggaagtccaagctgcagctgtggctgtggctgaggctgaagccagggctgaggcaagagcccaaatggggattggagaggaagctgtggctgggccctggaattgggatgacatggatatcgactgcctaacaagggaagagttaggcgatgatgctcaggcctggagcagattttcatttgaaattgaggccagagcccaagaaaatgcagatgccagcaccaacgtcaacttcagcagaggagctagtaccagggctggcttcagcgatggtgctagtattagcttcaatggtgcacccagctccagtggtggcttcagtggtggacctggcattacctttggtgttgcacccagcaccagtgccagcttcagcaatacagccagcattagctttggtggtacactgagcactagctccagcttcagcagcgcagccagcattagctttggttgtgcacacagcaccagcactagtttcagcagtgaagccagcattagctttggtggcatgccttgtaccagtgccagctttagtggtggagtcagctctagttttagtggcccactcagcaccagtgccactttcagtggtggagccagctctggctttggaggcacactcagcaccacggctggctttagtggtgtactcagcactagcaccagctttggcagtgcacccacaacgagcacagtcttcagtagtgcgcttagcaccagcactggctttggaggcatactcagcaccagtgtctgttttggtggctctcccagctccagtggtagctttggtggtacactcagtaccagtatctgcttcggtggctctccctgcaccagcactggctttggaggcacacttagcaccagtgtctcctttggtggctcttccagcaccagtgccaattttggtggtacactaagtaccagcatctgctttgatggctctcccagcactggtgctggctttggtggtgctctcaacaccagtgccagctttggcagtgtgctcaacaccagtactggttttggtggtgctatgagcaccagtgctgactttggcggtacactaagcaccagtgtctgctttggtggctctcctggcaccagtgtcagctttggcagtgcactcaacaccaatgctggttatggtggtgctgtcagcaccaacactgactttggtggtacactaagcaccagcgtctgttttggtggctctcccagcaccagtgctggctttggtggtgcactcaacaccaatgccagctttggctgtgccgtcagcaccagtgccagcttcagtggtgctgtcagcaccagtgcttgcttcagtggtgcaccaatcaccaaccctggctttggcggtgcatttagcaccagtgctggcttcggtggggcacttagtaccgctgctgacttcggtggtactcccagcaacagcattggctttggtgctgctcccagcaccagtgtcagctttggtggtgctcatggcaccagcctctgttttggtggagctcccagcaccagcctctgctttggcagtgcatctaatactaacctatgctttggtggccctcctagcaccagtgcctgctttagtggtgctaccagccctagtttttgtgatggacccagcaccagtaccggtttcagctttggcaatgggttaagcaccaatgctggatttggtggtggactgaacaccagtgctggctttggtggtggcctaggcaccagtgctggcttcagtggtggcctaagcacaagttctggctttgatggtgggctaggtaccagcgctggcttcggtggaggaccaggcaccagcactggttttggtggtggactgggcaccagtgctggcttcagtggcggactgggcaccagtgctggctttggtggtggactggtcactagtgatggctttggtggtggactgggcaccaatgctagtttcggcagcacacttggcaccagtgctggctttagtggtggcctcagcaccagcgatggctttggcagtaggcctaatgccagcttcgacagaggactgagtaccatcattggctttggcagtggttccaacaccagcactggctttactggcgaacccagcaccagcacgggcttcagtagtggacccagttctattgttggcttcagcggtggaccaagcactggtgttggcttctgcagtggaccaagcaccagtggcttcagcggtggaccgagcacaggagctggcttcggcggtggaccaaacactggtgctggctttggtggtggaccgagcaccagtgctggctttggcagtggagccgccagtcttggtgcctgtggcttctcgtatggctagtgaggtttcagatttattccccatgtttacagataccgctaataaattgcagtagtccttcccatggagccaaagtacatccttggaatctttgtccacacagcagtcaaggcagttatggccaatcagctgagggtgtcatgtgatggaaaaatctgtttgctgttcctgctttattgtttgctttctgtgtgctgtcatattttggtatcagagttacattaaatttgcaaaatgaa

SEQ ID NO: 6158 - DNA, 4569 bp, Homo sapiens
gggggataggctcagacacaaggagaggcttggagagagcagacgccttctggattcaagaagacgaggctcacctgttactcggcctcccagaaagatggataggagaaatgactacggatatagggtgcctctatttcagggccctctgcctcccccggggagcctggggcttcccttccctccagatatacagactgagaccacagaagaggacagtgtcctgctgatgcataccctgttggcggcaaccaaggactccctggccatggacccaccagttgtcaaccggcctaagaaaagcaagaccaagaaggcccctataaagactattactaaggctgcacctgctgcccctccagtcccagctgccaatgagattgccaccaacaagcccaaaataacttggcaggctttaaacctgccagtcattacccagatcagccaggctttacctaccactgaggtaaccaatactcaggcttcttcagtcactgctcagcctaagaaagccaacaagatgaagagagttactgccaaggcagcccaaggctcccaatccccaactggccatgagggtggcactatacagctgaagtcacccttgcaggtcctaaagctaccagtcatctcacagaatattcacgctccaattgccaatgagtcagccagttcccaagccttgataacctctatcaagcctaagaaagcttccaaggctaagaaggctgcaaataaggccatagctagtgccaccgaggtctcgctggctgcaactgccacccatacagctaccacccaaggccaaattaccaatgagacagccagtatccacaccacagcagcctccatccgaaccaagaaagcctccaaagccaggaagacaattgctaaggtcataaatactgacactgagcatatagaggctctaaatgtcactgacgcagctaccaggcagattgaggcctcagtagtggctatcaggcccaaaaaatccaagggcaagaaggctgccagcaggggcccaaattctgtctctgagatctctgaggccccacttgccactcagatagtcacaaaccaagccctggcagccaccctgcgggtcaagagagggtctagggctcggaaggctgccactaaggctcgggcaactgaaagccagactccaaatgctgaccaaggggcccaggccaagatagcctctgctcagaccaacgtaagtgcccttgagactcaggttgctgctgctgtccaggccctggcagatgactatctggctcagttgagcctggagcccacaaccaggacccggggcaaaagaaaccgaaagtccaagcatctgaatggggatgagagaagtggcagtaattacaggcggatcccatggggccggaggcctgcaccaccgcgagatgtggccattttacaagaaagggctaataagttggtgaaatacctgttggttaaggaccagacaaagatccccatcaaacgctcagacatgctgagggatgtcatccaagaatatgatgaatatttcccagaaatcattgaacgagcaagctacactctggagaagatgtttcgagtcaatctgaaagaaattgataagcaaagtagcttgtatattctcatcagcactcaggaatcctctgcaggcatactgggaacgaccaaggacacacccaagctgggtctcctcatggtgattctgagtgtcatttttatgaatggcaacaaggccagtgaggctgtcatctgggaggtgctgcgcaagttggggctgcgccctgggtacctggagtacaagagggtccctaacagcagaccacctgaatatgagttcttctggggcttgcgctcctaccacgagactagcaagatgaaagtcctcaagtttgcatgcagggtgcagaagaaagaccccaaggactgggctgtgcagtaccgcgaggcagtggagatggaagtccaagctgcagctgtggctgtggctgaggctgaagccagggctgaggcaagagcccaaatggggattggagaggaagctgtggctgggccctggaattgggatgacatggatatcgactgcctaacaagggaagagttaggcgatgatgctcaggcctggagcagattttcatttgaaattgaggccagagcccaagaaaatgcagatgccagcaccaacgtcaacttcagcagaggagctagtaccagggctggcttcagcgatggtgctagtattagcttcaatggtgcacccagctccagtggtggcttcagtggtggacctggcattacctttggtgttgcacccagcaccagtgccagcttcagcaatacagccagcattagctttggtggtacactgagcactagctccagcttcagcagcgcagccagcattagctttggttgtgcacacagcaccagcactagtttcagcagtgaagccagcattagctttggtggcatgccttgtaccagtgccagctttagtggtggagtcagctctagttttagtggcccactcagcaccagtgccactttcagtggtggagccagctctggctttggaggcacactcagcaccacggctggctttagtggtgtactcagcactagcaccagctttggcagtgcacccacaacgagcacagtcttcagtagtgcgcttagcaccagcactggctttggaggcatactcagcaccagtgtctgttttggtggctctcccagctccagtggtagctttggtggtacactcagtaccagtatctgcttcggtggctctccctgcaccagcactggctttggaggcacacttagcaccagtgtctcctttggtggctcttccagcaccagtgccaattttggtggtacactaagtaccagcatctgctttgatggctctcccagcactggtgctggctttggtggtgctctcaacaccagtgccagctttggcagtgtgctcaacaccagtactggttttggtggtgctatgagcaccagtgctgactttggcggtacactaagcaccagtgtctgctttggtggctctcctggcaccagtgtcagctttggcagtgcactcaacaccaatgctggttatggtggtgctgtcagcaccaacactgactttggtggtacactaagcaccagcgtctgttttggtggctctcccagcaccagtgctggctttggtggtgcactcaacaccaatgccagctttggctgtgccgtcagcaccagtgccagcttcagtggtgctgtcagcaccagtgcttgcttcagtggtgcaccaatcaccaaccctggctttggcggtgcatttagcaccagtgctggcttcggtggggcacttagtaccgctgctgacttcggtggtactcccagcaacagcattggctttggtgctgctcccagcaccagtgtcagctttggtggtgctcatggcaccagcctctgttttggtggagctcccagcaccagcctctgctttggcagtgcatctaatactaacctatgctttggtggccctcctagcaccagtgcctgctttagtggtgctaccagccctagtttttgtgatggacccagcaccagtaccggtttcagctttggcaatgggttaagcaccaatgctggatttggtggtggactgaacaccagtgctggctttggtggtggcctaggcaccagtgctggcttcagtggtggcctaagcacaagttctggctttgatggtgggctaggtaccagcgctggcttcggtggaggaccaggcaccagcactggttttggtggtggactgggcaccagtgctggcttcagtggcggactgggcaccagtgctggctttggtggtggactggtcactagtgatggctttggtggtggactgggcaccaatgctagtttcggcagcacacttggcaccagtgctggctttagtggtggcctcagcaccagcgatggctttggcagtaggcctaatgccagcttcgacagaggactgagtaccatcattggctttggcagtggttccaacaccagcactggctttactggcgaacccagcaccagcacgggcttcagtagtggacccagttctattgttggcttcagcggtggaccaagcactggtgttggcttctgcagtggaccaagcaccagtggcttcagcggtggaccgagcacaggagctggcttcggcggtggaccaaacactggtgctggctttggtggtggaccgagcaccagtgctggctttggcagtggagccgccagtcttggtgcctgtggcttctcgtatggctagtgaggtttcagatttattccccatgtttacagataccgctaataaattgcagtagtccttcccatggagccaaagtacatccttggaatctttgtccacacagcagtcaaggcagttatggccaatcagctgagggtgtcatgtgatggaaaaatctgtttgctgttcctgctttattgtttgctttctgtgtgctgtcatattttggtatcagagttacattaaatttgcaaaatgaa

SEQ ID NO: 6159 - DNA, 5028 bp, Homo sapiens
gggggataggctcagacacaaggagaggcttggagagagcagacgccttctggattcaagaagacgaggctcacctgttactcggcctcccagaaagatggataggagaaatgactacggatatagggtgcctctatttcagggccctctgcctcccccggggagcctggggcttcccttccctccagatatacagactgagaccacagaagaggacagtgtcctgctgatgcataccctgttggcggcaaccaaggactccctggccatggacccaccagttgtcaaccggcctaagaaaagcaagaccaagaaggcccctataaagactattactaaggctgcacctgctgcccctccagtcccagctgccaatgagattgccaccaacaagcccaaaataacttggcaggctttaaacctgccagtcattacccagatcagccaggctttacctaccactgaggtaaccaatactcaggcttcttcagtcactgctcagcctaagaaagccaacaagatgaagagagttactgccaaggcagcccaaggctcccaatccccaactggccatgagggtggcactatacagctgaagtcacccttgcaggtcctaaagctaccagtcatctcacagaatattcacgctccaattgccaatgagtcagccagttcccaagccttgataacctctatcaagcctaagaaagcttccaaggctaagaaggctgcaaataaggccatagctagtgccaccgaggtctcgctggctgcaactgccacccatacagctaccacccaaggccaaattaccaatgagacagccagtatccacaccacagcagcctccatccgaaccaagaaagcctccaaagccaggaagacaattgctaaggtcataaatactgacactgagcatatagaggctctaaatgtcactgacgcagctaccaggcagattgaggcctcagtagtggctatcaggcccaaaaaatccaagggcaagaaggctgccagcaggggcccaaattctgtctctgagatctctgaggccccacttgccactcagatagtcacaaaccaagccctggcagccaccctgcgggtcaagagagggtctagggctcggaaggctgccactaaggctcgggcaactgaaagccagactccaaatgctgaccaaggggcccaggccaagatagcctctgctcagaccaacgtaagtgcccttgagactcaggttgctgctgctgtccaggccctggcagatgactatctggctcagttgagcctggagcccacaaccaggacccggggcaaaagaaaccgaaagtccaagcatctgaatggggatgagagaagtggcagtaattacaggcggatcccatggggccggaggcctgcaccaccgcgagatgtggccattttacaagaaagggctaataagttggtgaaatacctgttggttaaggaccagacaaagatccccatcaaacgctcagacatgctgagggatgtcatccaagaatatgatgaatatttcccagaaatcattgaacgagcaagctacactctggagaagatgtttcgagtcaatctgaaagaaattgataagcaaagtagcttgtatattctcatcagcactcaggaatcctctgcaggcatactgggaacgaccaaggacacacccaagctgggtctcctcatggtgattctgagtgtcatttttatgaatggcaacaaggccagtgaggctgtcatctgggaggtgctgcgcaagttggggctgcgccctgggtatgactgggctctctcagcgcttgctgtccgtgttgtcctttggcaagagaggatggtcctaggattgcatcagtctggtggtctggtggagcgggtggggtgctggactgggtagagggcccagggttctgacctgggtggatgacgggcaaatggtcctgaactctctgctgtctctctccttaatgtcctctgtctgttctaagctgagatgttagatagaccttcagggatccctgacaaagaggcatctggtcttaactgcttgcttctagtggccatgtgctcattactttcttcacttcattgagactgccccatgtgctagagaggtctcttccatgttgggaaatgcctctgccctcatctgggcagttctgatctgtgttcatgggttatttttcccattgtcagggtgaggcattcactctttggggaagtgaggaagctcatcacagacgagtttgtgaagcagaagtacctggagtacaagagggtccctaacagcagaccacctgaatatgagttcttctggggcttgcgctcctaccacgagactagcaagatgaaagtcctcaagtttgcatgcagggtgcagaagaaagaccccaaggactgggctgtgcagtaccgcgaggcagtggagatggaagtccaagctgcagctgtggctgtggctgaggctgaagccagggctgaggcaagagcccaaatggggattggagaggaagctgtggctgggccctggaattgggatgacatggatatcgactgcctaacaagggaagagttaggcgatgatgctcaggcctggagcagattttcatttgaaattgaggccagagcccaagaaaatgcagatgccagcaccaacgtcaacttcagcagaggagctagtaccagggctggcttcagcgatggtgctagtattagcttcaatggtgcacccagctccagtggtggcttcagtggtggacctggcattacctttggtgttgcacccagcaccagtgccagcttcagcaatacagccagcattagctttggtggtacactgagcactagctccagcttcagcagcgcagccagcattagctttggttgtgcacacagcaccagcactagtttcagcagtgaagccagcattagctttggtggcatgccttgtaccagtgccagctttagtggtggagtcagctctagttttagtggcccactcagcaccagtgccactttcagtggtggagccagctctggctttggaggcacactcagcaccacggctggctttagtggtgtactcagcactagcaccagctttggcagtgcacccacaacgagcacagtcttcagtagtgcgcttagcaccagcactggctttggaggcatactcagcaccagtgtctgttttggtggctctcccagctccagtggtagctttggtggtacactcagtaccagtatctgcttcggtggctctccctgcaccagcactggctttggaggcacacttagcaccagtgtctcctttggtggctcttccagcaccagtgccaattttggtggtacactaagtaccagcatctgctttgatggctctcccagcactggtgctggctttggtggtgctctcaacaccagtgccagctttggcagtgtgctcaacaccagtactggttttggtggtgctatgagcaccagtgctgactttggcggtacactaagcaccagtgtctgctttggtggctctcctggcaccagtgtcagctttggcagtgcactcaacaccaatgctggttatggtggtgctgtcagcaccaacactgactttggtggtacactaagcaccagcgtctgttttggtggctctcccagcaccagtgctggctttggtggtgcactcaacaccaatgccagctttggctgtgccgtcagcaccagtgccagcttcagtggtgctgtcagcaccagtgcttgcttcagtggtgcaccaatcaccaaccctggctttggcggtgcatttagcaccagtgctggcttcggtggggcacttagtaccgctgctgacttcggtggtactcccagcaacagcattggctttggtgctgctcccagcaccagtgtcagctttggtggtgctcatggcaccagcctctgttttggtggagctcccagcaccagcctctgctttggcagtgcatctaatactaacctatgctttggtggccctcctagcaccagtgcctgctttagtggtgctaccagccctagtttttgtgatggacccagcaccagtaccggtttcagctttggcaatgggttaagcaccaatgctggatttggtggtggactgaacaccagtgctggctttggtggtggcctaggcaccagtgctggcttcagtggtggcctaagcacaagttctggctttgatggtgggctaggtaccagcgctggcttcggtggaggaccaggcaccagcactggttttggtggtggactgggcaccagtgctggcttcagtggcggactgggcaccagtgctggctttggtggtggactggtcactagtgatggctttggtggtggactgggcaccaatgctagtttcggcagcacacttggcaccagtgctggctttagtggtggcctcagcaccagcgatggctttggcagtaggcctaatgccagcttcgacagaggactgagtaccatcattggctttggcagtggttccaacaccagcactggctttactggcgaacccagcaccagcacgggcttcagtagtggacccagttctattgttggcttcagcggtggaccaagcactggtgttggcttctgcagtggaccaagcaccagtggcttcagcggtggaccgagcacaggagctggcttcggcggtggaccaaacactggtgctggctttggtggtggaccgagcaccagtgctggctttggcagtggagccgccagtcttggtgcctgtggcttctcgtatggctagtgaggtttcagataccgctaataaattgcagtagtccttcccatggagccaaagtacatccttggaatctttgtccacacagcagtcaaggcagttatggccaatcagctgagggtgtcatgtgatggaaaaatctgtttgctgttcctgctttattgtttgctttctgtgtgctgtcatattttggtatcagagttacattaaatttgcaaaatgaa

SEQ ID NO: 6160 - DNA, 3246 bp, Homo sapiens
gttggattaaaaaacaaatttattttctcatagttcttgagggcgagaatcctaggtcagggtccacgagggtcagttcctgttgaaggctctcttcctggcttgcagatggctgccttcttgctgtgtcctcacatggctttgtgtgtgagagagaagagagcaagctttctggtgtctcttcttataaggacactaatcctgttgatcaggaccccacccttatggcctcatttaaccttaattatctccataaaggccctatctccaagtacaatcacactgggtgttagggattcaacatacgaatttgggggcgggcacaacccttcagttcataacatatttacgctctatcatttcctgtaattataaagacacttaggctaagtgaggttaagtaacttgtccaaggtcatatagcacgtaagtcagcagagctgaaactggagttcagaactgacccatgatagagccccaataactgagaagtttaaaaaagtattgctactagtttaatacaaagcccgtaggttaatacatgattactagggttgttttcttattatgattatcatccccatttcaggtgcagaagaaagaccccaaggactgggctgtgcagtaccgcgaggcagtggagatggaagtccaagctgcagctgtggctgtggctgaggctgaagccagggctgaggcaagagcccaaatggggattggagaggaagctgtggctgggccctggaattgggatgacatggatatcgactgcctaacaagggaagagttaggcgatgatgctcaggcctggagcagattttcatttgaaattgaggccagagcccaagaaaatgcagatgccagcaccaacgtcaacttcagcagaggagctagtaccagggctggcttcagcgatggtgctagtattagcttcaatggtgcacccagctccagtggtggcttcagtggtggacctggcattacctttggtgttgcacccagcaccagtgccagcttcagcaatacagccagcattagctttggtggtacactgagcactagctccagcttcagcagcgcagccagcattagctttggttgtgcacacagcaccagcactagtttcagcagtgaagccagcattagctttggtggcatgccttgtaccagtgccagctttagtggtggagtcagctctagttttagtggcccactcagcaccagtgccactttcagtggtggagccagctctggctttggaggcacactcagcaccacggctggctttagtggtgtactcagcactagcaccagctttggcagtgcacccacaacgagcacagtcttcagtagtgcgcttagcaccagcactggctttggaggcatactcagcaccagtgtctgttttggtggctctcccagctccagtggtagctttggtggtacactcagtaccagtatctgcttcggtggctctccctgcaccagcactggctttggaggcacacttagcaccagtgtctcctttggtggctcttccagcaccagtgccaattttggtggtacactaagtaccagcatctgctttgatggctctcccagcactggtgctggctttggtggtgctctcaacaccagtgccagctttggcagtgtgctcaacaccagtactggttttggtggtgctatgagcaccagtgctgactttggcggtacactaagcaccagtgtctgctttggtggctctcctggcaccagtgtcagctttggcagtgcactcaacaccaatgctggttatggtggtgctgtcagcaccaacactgactttggtggtacactaagcaccagcgtctgttttggtggctctcccagcaccagtgctggctttggtggtgcactcaacaccaatgccagctttggctgtgccgtcagcaccagtgccagcttcagtggtgctgtcagcaccagtgcttgcttcagtggtgcaccaatcaccaaccctggctttggcggtgcatttagcaccagtgctggcttcggtggggcacttagtaccgctgctgacttcggtggtactcccagcaacagcattggctttggtgctgctcccagcaccagtgtcagctttggtggtgctcatggcaccagcctctgttttggtggagctcccagcaccagcctctgctttggcagtgcatctaatactaacctatgctttggtggccctcctagcaccagtgcctgctttagtggtgctaccagccctagtttttgtgatggacccagcaccagtaccggtttcagctttggcaatgggttaagcaccaatgctggatttggtggtggactgaacaccagtgctggctttggtggtggcctaggcaccagtgctggcttcagtggtggcctaagcacaagttctggctttgatggtgggctaggtaccagcgctggcttcggtggaggaccaggcaccagcactggttttggtggtggactgggcaccagtgctggcttcagtggcggactgggcaccagtgctggctttggtggtggactggtcactagtgatggctttggtggtggactgggcaccaatgctagtttcggcagcacacttggcaccagtgctggctttagtggtggcctcagcaccagcgatggctttggcagtaggcctaatgccagcttcgacagaggactgagtaccatcattggctttggcagtggttccaacaccagcactggctttactggcgaacccagcaccagcacgggcttcagtagtggacccagttctattgttggcttcagcggtggaccaagcactggtgttggcttctgcagtggaccaagcaccagtggcttcagcggtggaccgagcacaggagctggcttcggcggtggaccaaacactggtgctggctttggtggtggaccgagcaccagtgctggctttggcagtggagccgccagtcttggtgcctgtggcttctcgtatggctagtgaggtttcagatttattccccatgtttacagataccgctaataaattgcagtagtccttcccatggagccaaagtacatccttggaatctttgtccacacagcagtcaaggcagttatggccaatcagctgagggtgtcatgtgatggaaaaatctgtttgctgttcctgctttattgtttgctttctgtgtgctgtcatattttggtatcagagttacattaaatttgcaaaatgaa

SEQ ID NO: 6161 - DNA, 3019 bp, Homo sapiens
gggggataggctcagacacaaggagaggcttggagagagcagacgccttctggattcaagaagacgaggctcacctgttactcggcctcccagaaagatggataggagaaatgactacggatatagggtgcctctatttcagggccctctgcctcccccggggagcctggggcttcccttccctccagatatacagactgagaccacagaagaggacagtgtcctgctgatgcataccctgttggcggcaaccaaggactccctggccatggacccaccagttgtcaaccggcctaagaaaagcaagaccaagaaggcccctataaagactattactaaggctgcacctgctgcccctccagtcccagctgccaatgagattgccaccaacaagcccaaaataacttggcaggctttaaacctgccagtcattacccagatcagccaggctttacctaccactgaggtaaccaatactcaggcttcttcagtcactgctcagcctaagaaagccaacaagatgaagagagttactgccaaggcagcccaaggctcccaatccccaactggccatgagggtggcactatacagctgaagtcacccttgcaggtcctaaagctaccagtcatctcacagaatattcacgctccaattgccaatgagtcagccagttcccaagccttgataacctctatcaagcctaagaaagcttccaaggctaagaaggctgcaaataaggccatagctagtgccaccgaggtctcgctggctgcaactgccacccatacagctaccacccaaggccaaattaccaatgagacagccagtatccacaccacagcagcctccatccgaaccaagaaagcctccaaagccaggaagacaattgctaaggtcataaatactgacactgagcatatagaggctctaaatgtcactgacgcagctaccaggcagattgaggcctcagtagtggctatcaggcccaaaaaatccaagggcaagaaggctgccagcaggggcccaaattctgtctctgagatctctgaggccccacttgccactcagatagtcacaaaccaagccctggcagccaccctgcgggtcaagagagggtctagggctcggaaggctgccactaaggctcgggcaactgaaagccagactccaaatgctgaccaaggggcccaggccaagatagcctctgctcagaccaacgtaagtgcccttgagactcaggttgctgctgctgtccaggccctggcagatgactatctggctcagttgagcctggagcccacaaccaggacccggggcaaaagaaaccgaaagtccaagcatctgaatggggatgagagaagtggcagtaattacaggcggatcccatggggccggaggcctgcaccaccgcgagatgtggccattttacaagaaagggctaataagttggtgaaatacctgttggttaaggaccagacaaagatccccatcaaacgctcagacatgctgagggatgtcatccaagaatatgatgaatatttcccagaaatcattgaacgagcaagctacactctggagaagatgtttcgagtcaatctgaaagaaattgataagcaaagtagcttgtatattctcatcagcactcaggaatcctctgcaggcatactgggaacgaccaaggacacacccaagctgggtctcctcatggtgattctgagtgtcatttttatgaatggcaacaaggccagtgaggctgtcatctgggaggtgctgcgcaagttggggctgcgccctgggtatgactgggctctctcagcgcttgctgtccgtgttgtcctttggcaagagaggatggtcctaggattgcatcagtctggtggtctggtggagcgggtggggtgctggactgggtagagggcccagggttctgacctgggtggatgacgggcaaatggtcctgaactctctgctgtctctctccttaatgtcctctgtctgttctaagctgagatgttagatagaccttcagggatccctgacaaagaggcatctggtcttaactgcttgcttctagtggccatgtgctcattactttcttcacttcattgagactgccccatgtgctagagaggtctcttccatgttgggaaatgcctctgccctcatctgggcagttctgatctgtgttcatgggttatttttcccattgtcagggtgaggcattcactctttggggaagtgaggaagctcatcacagacgagtttgtgaagcagaagtacctggagtacaagagggtccctaacagcagaccacctgaatatgagttcttctggggcttgcgctcctaccacgagactagcaagatgaaagtcctcaagtttgcatgcagggtgcagaagaaagaccccaaggactgggctgtgcagtaccgcgaggcagtggagatggaagtccaagctgcagctgtggctgtggctgaggctgaagccagggctgagtggttccaacaccagcactggctttactggcgaacccagcaccagcacgggcttcagtagtggacccagttctattgttggcttcagcggtggaccaagcactggtgttggcttctgcagtggaccaagcaccagtggcttcagcggtggaccgagcacaggagctggcttcggcggtggaccaaacactggtgctggctttggtggtggaccgagcaccagtgctggctttggcagtggagccgccagtcttggtgcctgtggcttctcgtatggctagtgaggtttcagatttattccccatgtttacagataccgctaataaattgcagtagtccttcccatggagccaaagtacatccttggaatctttgtccacacagcagtcaaggcagttatggccaatcagctgagggtgtcatgtgatggaaaaatctgtttgctgttcctgctttattgtttgctttctgtgtgctgtcatattttggtatcagagttacattaaatttgcaaaatgaa

SEQ ID NO: 6162 - DNA, 1676 bp, Homo sapiens
gggggataggctcagacacaaggagaggcttggagagagcagacgccttctggattcaagaagacgaggctcacctgttactcggcctcccagaaagatggataggagaaatgactacggatatagggtgcctctatttcagggccctctgcctcccccggggagcctggggcttcccttccctccagatatacagactgagaccacagaagaggacagtgtcctgctgatgcataccctgttggcggcaaccaaggactccctggccatggacccaccagttgtcaaccggcctaagaaaagcaagaccaagaaggcccctataaagactattactaaggctgcacctgctgcccctccagtcccagctgccaatgagattgccaccaacaagcccaaaataacttggcaggctttaaacctgccagtcattacccagatcagccaggctttacctaccactgaggtaaccaatactcaggcttcttcagtcactgctcagcctaagaaagccaacaagatgaagagagttactgccaaggcagcccaaggctcccaatccccaactggccatgagggtggcactatacagctgaagtcacccttgcaggtcctaaagctaccagtcatctcacagaatattcacgctccaattgccaatgagtcagccagttcccaagccttgataacctctatcaagcctaagaaagcttccaaggctaagaaggctgcaaataaggccatagctagtgccaccgaggtctcgctggctgcaactgccacccatacagctaccacccaaggccaaattaccaatgagacagccagtatccacaccacagcagcctccatccgaaccaagaaagcctccaaagccaggaagacaattgctaaggtcataaatactgacactgagcatatagaggctctaaatgtcactgacgcagctaccaggcagattgaggcctcagtagtggctatcaggcccaaaaaatccaagggcaagaaggctgccagcaggggcccaaattctgtctctgagatctctgaggccccacttgccactcagatagtcacaaaccaagccctggcagccaccctgcgggtcaagagagggtctagggctcggaaggctgccactaaggctcgggcaactgaaagccagactccaaatgctgaccaaggggcccaggccaagatagcctctgctcagaccaacgtaagtgcccttgagactcaggttgctgctgctgtccaggccctggcagatgactatctggctcagttgagcctggagcccacaaccaggacccggggcaaaagaaaccgaaagtccaagcatctgaatggggatgagagaagtggcagtaattacaggcggatcccatggggccggaggcctgcaccaccgcgagatgtggcttctcgtatggctagtgaggtttcagatttattccccatgtttacagataccgctaataaattgcagtagtccttcccatggagccaaagtacatccttggaatctttgtccacacagcagtcaaggcagttatggccaatcagctgagggtgtcatgtgatggaaaaatctgtttgctgttcctgctttattgtttgctttctgtgtgctgtcatattttggtatcagagttacattaaatttgcaaaatgaa

SEQ ID NO: 6163 - DNA, 613 bp, Homo sapiens
gggggataggctcagacacaaggagaggcttggagagagcagacgccttctggattcaagaagacgaggctcacctgttactcggcctcccagaaagatggataggagaaatgactacggatatagggtgcctctatttcagggccctctgcctcccccggggagcctggggcttcccttccctccagatatacagactgagaccacagaagaggacagtgtcctgctgatgcataccctgttggcggcaaccaaggactccctggccatggacccaccagttgtcaaccggcctaagaaaagcaagaccaagaaggcccctataaagactattactaaggctgcacctgctgcccctccagtcccagctgccaatgagattgccaccaacaagcccaaaataacttggcaggctttaaacctgccagtcattacccagatcaccaaagtacatccttggaatctttgtccacacagcagtcaaggcagttatggccaatcagctgagggtgtcatgtgatggaaaaatctgtttgctgttcctgctttattgtttgctttctgtgtgctgtcatattttggtatcagagttacattaaatttgcaaaatgaa

SEQ ID NO: 6164 - DNA, 270 bp, Homo sapiens
tagaagcatcaactgagcaccaaacaaaaataattctgatagttctctctctagcctcatttaactagggtaggatattggtgtggggatatagggagttgctttagtgttactctagtcagtgttactcaaaatgtagtccacaaacaagctagttcacagacaggtaccagtccacaaactattcattaccagtccacagtgagataagagaccaatgccagaatgtaaatccacacactgcttctttcattgaggaagtcttactta

SEQ ID NO: 6165 - DNA, 421 bp, Homo sapiens
tgtatcaggctgcctaaatgaaccctattgtttccagttcttaaaaatttaagggctatctaagaaaagtttaagcaaaaccctcattccaaacatgcgaccttataataagaacttcctttaaagatgagcagcaaggttgggtatctgatttcactaagtaatattctattgtggtcagaaatgggtaatttgcatcatttggtcactatcaatatttgtgttggagtctgcaagatatttcaacaaagtaagccaaaccactatcttaggggattgttgctggactttggaatataaggctgaacagtgatgtgaagtcatgtttgggggctggaagaagtgataaatgcaaaggttggtgctaaattaggaaccccttgaaggagcaagctgattaaaaaaaaaagctggcagacaa

SEQ ID NO: 6166 - DNA, 447 bp, Homo sapiens
aatgctggcacaataactactacagggaagcagaagagaatgttttctgaatttaggcaaactagatgcagttctgactatgctattacttatctaaataaccagcaaatagcaacttgtctttgcaaagcaaaagattatttttcaaaaactttcatatatatatgattttgattcctcaatcactttttattgaaatgattactatttgccatgtgtgactatttacatgtgtaggttattaagggccaatatatatttttgtttgtgttaaaatgtccaaaagaaatttactcacatagggcatttatagaactgaaggaccatggattatcgaaacgattttggagaatatgagtgatggaccatagccattcatgcaataactatttattgattatgtaatatatgttagtctttgtgctaggctcagacattgtgagacag

SEQ ID NO: 6167 - DNA, 483 bp, Homo sapiens
ctgggcacaggtttgtctgagaaccagctgaggcctgtgttgcgcatgggacctactattattctttataatattaataccaaggacatttaacacctgcaacaacaagaacaagcacagtctcagaaggaaagcccgtcctctaaaagagtgtctgtagagcagagaagcccccagtgccatccttctctttctgccaagctcctgtgccagtgctgtcgtggggggccctgcctgcaggtgtggggatactggttcagggccagtggcccctggcaactggtttgtcttttagagaaggcaggactgaaatgatcagctttccatgtagggccagactctgggcaggtttctttttaaattttttaaatttttttgagacaggagaatcacttgaactcaagaggcggaggttgcagtgagccgagatcgctccactgcactccagcctgcacgacagagcaagactccatctcaaaaaac

SEQ ID NO: 6168 - DNA, 403 bp, Homo sapiens
aaaatcttaaccttcttacaacagatgttgggatattcacggattgtccacaacttccttctcccaacattacttttattcttacatctcaactgccacaaaaacctagaagcatgaaatactacaaattagaaacaaattccctgctatacacaaattgtaaaagtaaaccaagaagaaagagaatatatgcgtacttatacagcaagtaaatagattagactaatgagaactcttcttcagtctagcccaggctcacatagcttcactagtgaattctattaaacacttaatgaataaccaatccttcacaaacacttgcaaaacagagaagcaggaaaacatcaattcatttttgaggccagtattacccagataacaaatcagacaaaagcagcacaag

SEQ ID NO: 6169 - DNA, 573 bp, Homo sapiens
gcagaaacatccagcttgtttgtgcttcttaccttttttcatacacataggctgtagaaaattcatgtagaattttgtataataccatgttgggatgttaaatcatgaaacaagcatttaagtagaggaaagcaaagttttggtatatggatatagatgtcatgaataaagagatatttcccaatgagagataaccatttagaagcaaaaccctctgtacttttttgtcttaagactattgaaagatcttttactgattttgaggttgctgtaaacattatgtcatgttgtatgtttttaaatactaattgtttcagtactattgttttctttttctagcttgtccacgtggtggtattttgtatctattattctttctactcattattacttttcctttcccttagaaataatagcaaaataaaggctataaaatggccacttgtttcatactaaatgccactcagagggtctcaaattactttgagaagacctttttgcctcttcttcctctctaaaaccacccataaacaagagaatgagaaagaaatacaaattctattttgaaattag

SEQ ID NO: 6170 - DNA, 256 bp, Homo sapiens
gcgtcgaccacctattgagctctgcccacatgccaggccccacgtggtgcaccttatgaaaagacacctgtgacactgtgcaatgttactaggtgccctacaagctcactgagggcctgagttcaaatccagcccaaccagaccacacctttttatccttcaggctaagcccttcacagaaccaggagaatcaccaccctatagcaagctccagggtctgcagatggatgggcactttctcgtgcaatgcacacag

SEQ ID NO: 6171 - DNA, 857 bp, Homo sapiens
gcggctccggctccggctccggctcccgggcatttaaaggggacgcggcggctgcccgggggggatgaggggcaagtggaggggacggctcagacgcacatcatcctcagtccctcgggactggagggactcgtgagccggagcccagaaatccgggggtggataagacaccgcgtcccctccaattcccgtaagcaccccttgctccatcctgcgccccaatacctcagctagcccccttccccacttcttacactccaaactcagccgggacagacctctgctgccgccgcccccacgaacgtgtgacgacggctggaggccaacagagtccctacaggtggtgctcacggtaatgcaccgacaatgagtggctgttttccagtttctggcctccgctgcctatctagggtgttggatgtgccagcgcctctggccgtggcccgctaaccagcctctcccgggcgggctcctgccgcgccccctctcgcttgccccctcctcctcctcctcctgctgctctcccccctgctcccaggacggcaggatggccgcgcagggcgcgccgcgcttcctcctgaccttcgacttcgacgagactatcgtggacgaaaacagcgacgattcgatcgtgcgcgccgcgccgggccagcggctcccggagagcctgcgagccacctaccgcgagggcttctacaacgagtacatgcagcgcgtcttcaagtacctgggcgagcagggcgtgcggccgcgggacctgagcgccatctacgaagccatccctttgtcgccaggcatgagcgacctgctgcagtttgtggcaaaacagggcgcctgcttcgaggtgattctcatct

SEQ ID NO: 6172 - DNA, 500 bp, Homo sapiens
gggaagaaacccaagatgcctgactttctgccttggagactgaaagaaacaagggcaactcaccaaacagaacgtgtgacgacggctggaggccaacagagtccctacaggtggtgctcacggtaatgcaccgacaatgagtggctgttttccagtttctggcctccgctgcctatctagggacggcaggatggccgcgcagggcgcgccgcgcttcctcctgaccttcgacttcgacgagactatcgtggacgaaaacagcgacgattcgatcgtgcgcgccgcgccgggccagcggctcccggagagcctgcgagccacctaccgcgagggcttctacaacgagtacatgcagcgcgtcttcaagtacctgggcgagcagggcgtgcggccgcgggacctgagcgccatctacgaagccatccctttgtcgccaggcatgagcgacctgctgcagtttgtggcaaaacagggcgcctgcttcgaggtgattctcatct

SEQ ID NO: 6173 - DNA, 730 bp, Homo sapiens
gcggctccggctccggctccggctcccgggcatttaaaggggacgcggcggctgcccgggggggatgaggggcaagtggaggggacggctcagacgcacatcatcctcagtccctcgggactggagggactcgtgagccggagcccagaaatccgggggtggataagacaccgcgtcccctccaattcccgtaagcaccccttgctccatcctgcgccccaatacctcagctagcccccttccccacttcttacactccaaactcagccgggacagacctctgctgccgccgcccccacgaacgtgtgacgacggctggaggccaacagagtccctacaggtggtgctcacggtaatgcaccgacaatgagtggctgttttccagtttctggcctccgctgcctatctagggacggcaggatggccgcgcagggcgcgccgcgcttcctcctgaccttcgacttcgacgagactatcgtggacgaaaacagcgacgattcgatcgtgcgcgccgcgccgggccagcggctcccggagagcctgcgagccacctaccgcgagggcttctacaacgagtacatgcagcgcgtcttcaagtacctgggcgagcagggcgtgcggccgcgggacctgagcgccatctacgaagccatccctttgtcgccaggcatgagcgacctgctgcagtttgtggcaaaacagggcgcctgcttcgaggtgattctcatct

SEQ ID NO: 6174 - DNA, 621 bp, Homo sapiens
gcggctccggctccggctccggctcccgggcatttaaaggggacgcggcggctgcccgggggggatgaggggcaagtggaggggacggctcagacgcacatcatcctcagtccctcgggactggagggactcgtgagccggagcccagaaatccgggggtggataagacaccgcgtcccctccaattcccgaacgtgtgacgacggctggaggccaacagagtccctacaggtggtgctcacggtaatgcaccgacaatgagtggctgttttccagtttctggcctccgctgcctatctagggacggcaggatggccgcgcagggcgcgccgcgcttcctcctgaccttcgacttcgacgagactatcgtggacgaaaacagcgacgattcgatcgtgcgcgccgcgccgggccagcggctcccggagagcctgcgagccacctaccgcgagggcttctacaacgagtacatgcagcgcgtcttcaagtacctgggcgagcagggcgtgcggccgcgggacctgagcgccatctacgaagccatccctttgtcgccaggcatgagcgacctgctgcagtttgtggcaaaacagggcgcctgcttcgaggtgattctcatct

SEQ ID NO: 6175 - DNA, 439 bp, Homo sapiens
tgacaacttgatgatctttccgcaagctaaaaatatcactctggatcacagcagtagaggactctgtaaatttaatctgtgtgtctcctgtaaataagtgcattagcagtacacaggtggtgtcagagtcagtgatgatggatagaaattctacataaaatccaggctcagtggctcatgcctttaatcccagcactttgggagtctgaggcgggtggatcacctgaggtcaggagttcgagaccagcctggccaacatggcaaaacctcgtctctactaaaaatacaaaaattagctggatgatggcacatgcctgtaatcccagctattcgggaggcggaggcaggagaatctcttgaacctgggaggtagaggttgcagtgagccgagatcacgccattgcactccagcctgggcaaaagagcgacactccatcgc

SEQ ID NO: 6176 - DNA, 1918 bp, Homo sapiens
agcaaaggaaagccacttccaaggtctctttccatgatgtccttttgatgctgtgtttcctgaaagaatgagaaaagtcctccccagtccggggcccatgagcaaccaccattggggaagcggcatccaagccccctgggcacctcgctgagtcacctttcctctcccttctctcctcagttccaatggaaaatccgtcacgtgggcccagaatgagaagagcagccgggggcagcacctgtggcagcgcctgtccatccacatcaacaagaaagaaaaccccaaccaaacggccgtcatcaagcccttccccaagagcacggagagccgtggcctgggcgctggcgctggcgcaggcgggagcgctgggggcgtgggggccacgggcggtgcgggctgcgcaggcgccggcccaggcgggcccgagtccccagacgccggccccaaggcgctgtatgatgtggccgaggctgaggagcacttcccggcgcccgcgcggccgcgctcaccgtcgcccatcagcacgctgagccaccgcgcgggctcggccagccgcacggacgacgatgtgccgtcgctgcactcggagcctgtggcgcgcagcagctcctcgcagggctccctcatggagcagatcagcagtgtggtcacccgcttcacggccaacatcagcgagctcaactccatgatgctgtccaccgcggcccccagccccggcgtcggcgccccgctctgctcgtcctacctgatccccaaagagatccagttgcccacgaccatgacgacctttgccgaaatccagcctctgccggccatcgaagtcacgggcggcgcgcagcccgcggcaggggcgcaggcggctggggacgcggcccgggagagccccgcggccggtcccgaggctgcggccgccaagccagacctggaggagctggtggctctcaccccgccgtcccccttcagagactcggtggactcggggagcacaacccccaactcgccagtgtccgagtcggccctctgtatcccgtcgtctcccaaatatgacactcttatcataagagattacactcagagctcctcgtcgttgtgaatgtccctggaaagcacgccggcctgcgcgtgcggagcggagccccccgtgttcacacacacacaatggcaagcatagtcgcctggttacggcccagggggaatatgccaagggaccccttaatggaaacacagatcagtagtgctatctcatgacaaccacaagaaaccgacgacaaatcttttgcgagattttcttctagtggcttagaaacatggcttttaagaaacacggtgatatctttgagggtgacaaggcgtctcttcaaacagttccataccaactgctttgctctagggaagcagtgcgtgtgaaacagcgtaacggagggtgaagagcatagttaataagcaactgtaaaaagttttatttgtttactttaattcttttcccctgtaaaaagttttatttgtttactttaattcttttcccagaaaagagtctttgattcaccaaacatgaatgtacattttctaacaaactcaaaatctgggaccaaaacatcaacttttttctttcttttttctttctttttgttttttctttcctgtaaagaccttgaaaagaccttgaaaagcagtaacttgggtccagtatttacggaggcgttgtgaatgtgtcccatgcataacacactactggatagtgagtcgtgcgctaatgtactacgtagggcttctaccagagattttcctctccaattgggttgtgaaatactcttccaaaagcctgcatcggggattccacctacttatttcagattcacctccattaaccaagaaaaccagtggaagatttcttgactatttcaccatgttgccaatc

SEQ ID NO: 6177 - DNA, 4738 bp, Homo sapiens
cgcgagagagcgagcgccaccgccgcgggccccgcagccgttctgcctgctgtcaccgctgcctccatcgccgacactagcgctccagctgcagccaaggccgctacgagagcgcaggaagccctcgaggagcggctgcctgggggcgcaaggctcagggcgcgcacctggtttagaagatcatgaccacatggatcatctaactaaatggtacatggggacaaaatggtcctttagaaaatacatctgaattgctggctaatttcttgatttgcgactcaacgtaggacatcgcttgttcgtagctatcagaaccctcctgaattttccccaccatgctatctttattggcttgaactcctttcctaaaatggtccttctgttgatcctgtcagtcttacttttgaaagaagatgtccgtgggagtgcacagtccagtgagaggagggtggtggctcacatgccgggtgacatcattattggagctctcttttctgttcatcaccagcctactgtggacaaagttcatgagaggaagtgtggggcggtccgtgaacagtatggcattcagagagtggaggccatgctgcataccctggaaaggatcaattcagaccccacactcttgcccaacatcacactgggctgtgagataagggactcctgctggcattcggctgtggccctagagcagagcattgagttcataagagattccctcatttcttcagaagaggaagaaggcttggtacgctgtgtggatggctcctcctcttccttccgctccaagaagcccatagtaggggtcattgggcctggctccagttctgtagccattcaggtccagaatttgctccagcttttcaacatacctcagattgcttactcagcaaccagcatggatctgagtgacaagactctgttcaaatatttcatgagggttgtgccttcagatgctcagcaggcaagggccatggtggacatagtgaagaggtacaactggacctatgtatcagccgtgcacacagaaggcaactatggagaaagtgggatggaagccttcaaagatatgtcagcgaaggaagggatttgcatcgcccactcttacaaaatctacagtaatgcaggggagcagagctttgataagctgctgaagaagctcacaagtcacttgcccaaggcccgggtggtggcctgcttctgtgagggcatgacggtgagaggtctgctgatggccatgaggcgcctgggtctagcgggagaatttctgcttctgggcagtgatggctgggctgacaggtatgatgtgacagatggatatcagcgagaagctgttggtggcatcacaatcaagctccaatctcccgatgtcaagtggtttgatgattattatctgaagctccggccagaaacaaaccaccgaaacccttggtttcaagaattttggcagcatcgttttcagtgccgactggaagggtttccacaggagaacagcaaatacaacaagacttgcaatagttctctgactctgaaaacacatcatgttcaggattccaaaatgggatttgtgatcaacgccatctattcgatggcctatgggctccacaacatgcagatgtccctctgcccaggctatgcaggactctgtgatgccatgaagccaattgatggacggaaacttttggagtccctgatgaaaaccaattttactggggtttctggagatacgatcctattcgatgagaatggagactctccaggaaggtatgaaataatgaatttcaaggaaatgggaaaagattactttgattatatcaacgttggaagttgggacaatggagaattaaaaatggatgatgatgaagtatggtccaagaaaagcaacatcatcagatctgtgtgcagtgaaccatgtgagaaaggccagatcaaggtgatccgaaagggagaagtcagctgttgttggacctgtacaccttgtaaggagaatgagtatgtctttgatgagtacacatgcaaggcatgccaactggggtcttggcccactgatgatctcacaggttgtgacttgatcccagtacagtatcttcgatggggtgaccctgaacccattgcagctgtggtgtttgcctgccttggcctcctggccaccctgtttgttactgtagtcttcatcatttaccgtgatacaccagtagtcaagtcctcaagcagggaactctgctacattatccttgctggcatctgcctgggctacttatgtaccttctgcctcattgcgaagcccaaacagatttactgctaccttcagagaattggcattggtctctccccagccatgagctactcagcccttgtaacaaagaccaaccgtattgcaaggatcctggctggcagcaagaagaagatctgtaccaaaaagcccagattcatgagtgcctgtgcccagctagtgattgctttcattctcatatgcatccagttgggcatcatcgttgccctctttataatggagcctcctgacataatgcatgactacccaagcattcgagaagtctacctgatctgtaacaccaccaacctaggagttgtcactccacttggatacaatggattgttgattttgagctgcaccttctatgcgttcaagaccagaaatgttccagctaacttcaacgaggccaagtatatcgccttcacaatgtacacgacctgcattatatggctagcttttgtgccaatctactttggcagcaactacaaaatcatcaccatgtgtttctcggtcagcctcagtgccacagtggccctaggctgcatgtttgtgccgaaggtgtacatcatcctggccaaaccagagagaaacgtgcgcagcgccttcaccacatctaccgtggtgcgcatgcatgtaggggatggcaagtcatcctccgcagccagcagatccagcagcctagtcaacctgtggaagagaaggggctcctctggggaaaccttaagttccaatggaaaatccgtcacgtgggcccagaatgagaagagcagccgggggcagcacctgtggcagcgcctgtccatccacatcaacaagaaagaaaaccccaaccaaacggccgtcatcaagcccttccccaagagcacggagagccgtggcctgggcgctggcgctggcgcaggcgggagcgctgggggcgtgggggccacgggcggtgcgggctgcgcaggcgccggcccaggcgggcccgagtccccagacgccggccccaaggcgctgtatgatgtggccgaggctgaggagcacttcccggcgcccgcgcggccgcgctcaccgtcgcccatcagcacgctgagccaccgcgcgggctcggccagccgcacggacgacgatgtgccgtcgctgcactcggagcctgtggcgcgcagcagctcctcgcagggctccctcatggagcagatcagcagtgtggtcacccgcttcacggccaacatcagcgagctcaactccatgatgctgtccaccgcggcccccagccccggcgtcggcgccccgctctgctcgtcctacctgatccccaaagagatccagttgcccacgaccatgacgacctttgccgaaatccagcctctgccggccatcgaagtcacgggcggcgcgcagcccgcggcaggggcgcaggcggctggggacgcggcccgggagagccccgcggccggtcccgaggctgcggccgccaagccagacctggaggagctggtggctctcaccccgccgtcccccttcagagactcggtggactcggggagcacaacccccaactcgccagtgtccgagtcggccctctgtatcccgtcgtctcccaaatatgacactcttatcataagagattacactcagagctcctcgtcgttgtgaatgtccctggaaagcacgccggcctgcgcgtgcggagcggagccccccgtgttcacacacacacaatggcaagcatagtcgcctggttacggcccagggggaatatgccaagggaccccttaatggaaacacagatcagtagtgctatctcatgacaaccacaagaaaccgacgacaaatcttttgcgagattttcttctagtggcttagaaacatggcttttaagaaacacggtgatatctttgagggtgacaaggcgtctcttcaaacagttccataccaactgctttgctctagggaagcagtgcgtgtgaaacagcgtaacggagggtgaagagcatagttaataagcaactgtaaaaagttttatttgtttactttaattcttttcccctgtaaaaagttttatttgtttactttaattcttttcccagaaaagagtctttgattcaccaaacatgaatgtacattttctaacaaactcaaaatctgggaccaaaacatcaacttttttctttcttttttctttctttttgttttttctttcctgtaaagaccttgaaaagaccttgaaaagcagtaacttgggtccagtatttacggaggcgttgtgaatgtgtcccatgcataacacactactggatagtgagtcgtgcgctaatgtactacgtagggcttctaccagagattttcctctccaattgggttgtgaaatactcttccaaaagcctgcatcggggattccacctacttatttcagattcacctccattaaccaagaaaaccagtggaagatttcttgactatttcaccatgttgccaatc

SEQ ID NO: 6178 - DNA, 4834 bp, Homo sapiens
cgcgagagagcgagcgccaccgccgcgggccccgcagccgttctgcctgctgtcaccgctgcctccatcgccgacactagcgctccagctgcagccaaggccgctacgagagcgcaggaagccctcgaggagcggctgcctgggggcgcaaggctcagggcgcgcacctggtttagaagatcatgaccacatggatcatctaactaaatggtacatggggacaaaatggtcctttagaaaatacatctgaattgctggctaatttcttgatttgcgactcaacgtaggacatcgcttgttcgtagctatcagaaccctcctgaattttccccaccatgctatctttattggcttgaactcctttcctaaaatggtccttctgttgatcctgtcagtcttacttttgaaagaagatgtccgtgggagtgcacagtccagtgagaggagggtggtggctcacatgccgggtgacatcattattggagctctcttttctgttcatcaccagcctactgtggacaaagttcatgagaggaagtgtggggcggtccgtgaacagtatggcattcagagagtggaggccatgctgcataccctggaaaggatcaattcagaccccacactcttgcccaacatcacactgggctgtgagataagggactcctgctggcattcggctgtggccctagagcagagcattgagttcataagagattccctcatttcttcagaagaggaagaaggcttggtacgctgtgtggatggctcctcctcttccttccgctccaagaagcccatagtaggggtcattgggcctggctccagttctgtagccattcaggtccagaatttgctccagcttttcaacatacctcagattgcttactcagcaaccagcatggatctgagtgacaagactctgttcaaatatttcatgagggttgtgccttcagatgctcagcaggcaagggccatggtggacatagtgaagaggtacaactggacctatgtatcagccgtgcacacagaaggcaactatggagaaagtgggatggaagccttcaaagatatgtcagcgaaggaagggatttgcatcgcccactcttacaaaatctacagtaatgcaggggagcagagctttgataagctgctgaagaagctcacaagtcacttgcccaaggcccgggtggtggcctgcttctgtgagggcatgacggtgagaggtctgctgatggccatgaggcgcctgggtctagcgggagaatttctgcttctgggcagtgatggctgggctgacaggtatgatgtgacagatggatatcagcgagaagctgttggtggcatcacaatcaagctccaatctcccgatgtcaagtggtttgatgattattatctgaagctccggccagaaacaaaccaccgaaacccttggtttcaagaattttggcagcatcgttttcagtgccgactggaagggtttccacaggagaacagcaaatacaacaagacttgcaatagttctctgactctgaaaacacatcatgttcaggattccaaaatgggatttgtgatcaacgccatctattcgatggcctatgggctccacaacatgcagatgtccctctgcccaggctatgcaggactctgtgatgccatgaagccaattgatggacggaaacttttggagtccctgatgaaaaccaattttactggggtttctggagatacgatcctattcgatgagaatggagactctccaggaaggtatgaaataatgaatttcaaggaaatgggaaaagattactttgattatatcaacgttggaagttgggacaatggagaattaaaaatggatgatgatgaagtatggtccaagaaaagcaacatcatcagatctgtgtgcagtgaaccatgtgagaaaggccagatcaaggtgatccgaaagggagaagtcagctgttgttggacctgtacaccttgtaaggagaatgagtatgtctttgatgagtacacatgcaaggcatgccaactggggtcttggcccactgatgatctcacaggttgtgacttgatcccagtacagtatcttcgatggggtgaccctgaacccattgcagctgtggtgtttgcctgccttggcctcctggccaccctgtttgttactgtagtcttcatcatttaccgtgatacaccagtagtcaagtcctcaagcagggaactctgctacattatccttgctggcatctgcctgggctacttatgtaccttctgcctcattgcgaagcccaaacagatttactgctaccttcagagaattggcattggtctctccccagccatgagctactcagcccttgtaacaaagaccaaccgtattgcaaggatcctggctggcagcaagaagaagatctgtaccaaaaagcccagattcatgagtgcctgtgcccagctagtgattgctttcattctcatatgcatccagttgggcatcatcgttgccctctttataatggagcctcctgacataatgcatgactacccaagcattcgagaagtctacctgatctgtaacaccaccaacctaggagttgtcactccacttggatacaatggattgttgattttgagctgcaccttctatgcgttcaagaccagaaatgttccagctaacttcaacgaggccaagtatatcgccttcacaatgtacacgacctgcattatatggctagcttttgtgccaatctactttggcagcaactacaaaatcatcaccatgtgtttctcggtcagcctcagtgccacagtggccctaggctgcatgtttgtgccgaaggtgtacatcatcctggccaaaccagagagaaacgtgcgcagcgccttcaccacatctaccgtggtgcgcatgcatgtaggggatggcaagtcatcctccgcagccagcagatccagcagcctagtcaacctgtggaagagaaggggctcctctggggaaaccttaaggtacaaagacaggagactggcccagcacaagtcggaaatagagtgtttcacccccaaagggagtatggggaatggtgggagagcaacaatgagcagttccaatggaaaatccgtcacgtgggcccagaatgagaagagcagccgggggcagcacctgtggcagcgcctgtccatccacatcaacaagaaagaaaaccccaaccaaacggccgtcatcaagcccttccccaagagcacggagagccgtggcctgggcgctggcgctggcgcaggcgggagcgctgggggcgtgggggccacgggcggtgcgggctgcgcaggcgccggcccaggcgggcccgagtccccagacgccggccccaaggcgctgtatgatgtggccgaggctgaggagcacttcccggcgcccgcgcggccgcgctcaccgtcgcccatcagcacgctgagccaccgcgcgggctcggccagccgcacggacgacgatgtgccgtcgctgcactcggagcctgtggcgcgcagcagctcctcgcagggctccctcatggagcagatcagcagtgtggtcacccgcttcacggccaacatcagcgagctcaactccatgatgctgtccaccgcggcccccagccccggcgtcggcgccccgctctgctcgtcctacctgatccccaaagagatccagttgcccacgaccatgacgacctttgccgaaatccagcctctgccggccatcgaagtcacgggcggcgcgcagcccgcggcaggggcgcaggcggctggggacgcggcccgggagagccccgcggccggtcccgaggctgcggccgccaagccagacctggaggagctggtggctctcaccccgccgtcccccttcagagactcggtggactcggggagcacaacccccaactcgccagtgtccgagtcggccctctgtatcccgtcgtctcccaaatatgacactcttatcataagagattacactcagagctcctcgtcgttgtgaatgtccctggaaagcacgccggcctgcgcgtgcggagcggagccccccgtgttcacacacacacaatggcaagcatagtcgcctggttacggcccagggggaatatgccaagggaccccttaatggaaacacagatcagtagtgctatctcatgacaaccacaagaaaccgacgacaaatcttttgcgagattttcttctagtggcttagaaacatggcttttaagaaacacggtgatatctttgagggtgacaaggcgtctcttcaaacagttccataccaactgctttgctctagggaagcagtgcgtgtgaaacagcgtaacggagggtgaagagcatagttaataagcaactgtaaaaagttttatttgtttactttaattcttttcccctgtaaaaagttttatttgtttactttaattcttttcccagaaaagagtctttgattcaccaaacatgaatgtacattttctaacaaactcaaaatctgggaccaaaacatcaacttttttctttcttttttctttctttttgttttttctttcctgtaaagaccttgaaaagaccttgaaaagcagtaacttgggtccagtatttacggaggcgttgtgaatgtgtcccatgcataacacactactggatagtgagtcgtgcgctaatgtactacgtagggcttctaccagagattttcctctccaattgggttgtgaaatactcttccaaaagcctgcatcggggattccacctacttatttcagattcacctccattaaccaagaaaaccagtggaagatttcttgactatttcaccatgttgccaatc

SEQ ID NO: 6179 - DNA, 1365 bp, Homo sapiens
cgcgagagagcgagcgccaccgccgcgggccccgcagccgttctgcctgctgtcaccgctgcctccatcgccgacactagcgctccagctgcagccaaggccgctacgagagcgcaggaagccctcgaggagcggctgcctgggggcgcaaggctcagggcgcgcacctggtttagaagatcatgaccacatggatcatctaactaaatggtacatggggacaaaatggtcctttagaaaatacatctgaattgctggctaatttcttgatttgcgactcaacgtaggacatcgcttgttcgtagctatcagaaccctcctgaattttccccaccatgctatctttattggcttgaactcctttcctaaaatggtccttctgttgatcctgtcagtcttacttttgaaagaagatgtccgtgggagtgcacagtccagtgagaggagggtggtggctcacatgccgggtgacatcattattggagctctcttttctgttcatcaccagcctactgtggacaaagttcatgagaggaagtgtggggcggtccgtgaacagtatggcattcagagagtggaggccatgctgcataccctggaaaggatcaattcagaccccacactcttgcccaacatcacactgggctgtgagataagggactcctgctggcattcggctgtggccctagagcagagcattgagttcataagagattccctcatttcttcagaagaggaagaaggcttggtacgctgtgtggatggctcctcctcttccttccgctccaagaagcccatagtaggggtcattgggcctggctccagttctgtagccattcaggtccagaatttgctccagcttttcaacatacctcagattgcttactcagcaaccagcatggatctgagtgacaagactctgttcaaatatttcatgagggttgtgccttcagatgctcagcaggcaagggccatggtggacatagtgaagaggtacaactggacctatgtatcagccgtgcacacagaaggcaactatggagaaagtgggatggaagccttcaaagatatgtcagcgaaggaagggatttgcatcgcccactcttacaaaatctacagtaatgcaggggagcagagctttgataagctgctgaagaagctcacaagtcacttgcccaaggcccgggtggtggcctgcttctgtgagggcatgacggtgagaggtctgctgatggccatgaggcgcctgggtctagcgggagaatttctgcttctgggcaggaaccagatgccatctttattgagatctcaaagaacagcatcctatgggaagacagaagaaaatgccaaggtcgcttccttcag

SEQ ID NO: 6180 - DNA, 1911 bp, Homo sapiens
cgcgagagagcgagcgccaccgccgcgggccccgcagccgttctgcctgctgtcaccgctgcctccatcgccgacactagcgctccagctgcagccaaggccgctacgagagcgcaggaagccctcgaggagcggctgcctgggggcgcaaggctcagggcgcgcacctggtttagaagatcatgaccacatggatcatctaactaaatggtacatggggacaaaatggtcctttagaaaatacatctgaattgctggctaatttcttgatttgcgactcaacgtaggacatcgcttgttcgtagctatcagaaccctcctgaattttccccaccatgctatctttattggcttgaactcctttcctaaaatggtccttctgttgatcctgtcagtcttacttttgaaagaagatgtccgtgggagtgcacagtccagtgagaggagggtggtggctcacatgccgggtgacatcattattggagctctcttttctgttcatcaccagcctactgtggacaaagttcatgagaggaagtgtggggcggtccgtgaacagtatggcattcagagagtggaggccatgctgcataccctggaaaggatcaattcagaccccacactcttgcccaacatcacactgggctgtgagataagggactcctgctggcattcggctgtggccctagagcagagcattgagttcataagagattccctcatttcttcagaagaggaagaaggcttggtacgctgtgtggatggctcctcctcttccttccgctccaagaagcccatagtaggggtcattgggcctggctccagttctgtagccattcaggtccagaatttgctccagcttttcaacatacctcagattgcttactcagcaaccagcatggatctgagtgacaagactctgttcaaatatttcatgagggttgtgccttcagatgctcagcaggcaagggccatggtggacatagtgaagaggtacaactggacctatgtatcagccgtgcacacagaaggcaactatggagaaagtgggatggaagccttcaaagatatgtcagcgaaggaagggatttgcatcgcccactcttacaaaatctacagtaatgcaggggagcagagctttgataagctgctgaagaagctcacaagtcacttgcccaaggcccgggtggtggcctgcttctgtgagggcatgacggtgagaggtctgctgatggccatgaggcgcctgggtctagcgggagaatttctgcttctgggcagtgatggctgggctgacaggtatgatgtgacagatggatatcagcgagaagctgttggtggcatcacaatcaagctccaatctcccgatgtcaagtggtttgatgattattatctgaagctccggccagaaacaaaccaccgaaacccttggtttcaagaattttggcagcatcgttttcagtgccgactggaagggtttccacaggagaacagcaaatacaacaagacttgcaatacgctggaggctggaagccggagatcaggatgtgaacatagttgggttctggtgaaggctcattttccagcctacagacagcctccttcttgctatgtccacacttggcagaaagggagagaaattcagggcatgaatcaaattttttttgtatcttctttatcaagtcactggtatctcttctcttaaggacattaaccctatcatgaacaggctaccctcattagcttatctaaacctaattacttcccaaaacttcatctccaaataccatcacactaggaattagagtttcttcaacatattgagggtatttgaggggacgtaatttagtccataacacacagtctctggcatttaataaaactcaataaattacaacaatattaggaata

SEQ ID NO: 6181 - DNA, 3718 bp, Homo sapiens
atggcaggagtgggcttctagtaaaaaagatgagttcagcccctttcctttctctctcgcacacatatttgctcgcctttttgtctgccaacatgggataaagcagcaagaaagtgcttgccagatatgggtccttgaaccttggactgcccagcctccagaacttgatggctgggctgacaggtatgatgtgacagatggatatcagcgagaagctgttggtggcatcacaatcaagctccaatctcccgatgtcaagtggtttgatgattattatctgaagctccggccagaaacaaaccaccgaaacccttggtttcaagaattttggcagcatcgttttcagtgccgactggaagggtttccacaggagaacagcaaatacaacaagacttgcaatagttctctgactctgaaaacacatcatgttcaggattccaaaatgggatttgtgatcaacgccatctattcgatggcctatgggctccacaacatgcagatgtccctctgcccaggctatgcaggactctgtgatgccatgaagccaattgatggacggaaacttttggagtccctgatgaaaaccaattttactggggtttctggagatacgatcctattcgatgagaatggagactctccaggaaggtatgaaataatgaatttcaaggaaatgggaaaagattactttgattatatcaacgttggaagttgggacaatggagaattaaaaatggatgatgatgaagtatggtccaagaaaagcaacatcatcagatctgtgtgcagtgaaccatgtgagaaaggccagatcaaggtgatccgaaagggagaagtcagctgttgttggacctgtacaccttgtaaggagaatgagtatgtctttgatgagtacacatgcaaggcatgccaactggggtcttggcccactgatgatctcacaggttgtgacttgatcccagtacagtatcttcgatggggtgaccctgaacccattgcagctgtggtgtttgcctgccttggcctcctggccaccctgtttgttactgtagtcttcatcatttaccgtgatacaccagtagtcaagtcctcaagcagggaactctgctacattatccttgctggcatctgcctgggctacttatgtaccttctgcctcattgcgaagcccaaacagatttactgctaccttcagagaattggcattggtctctccccagccatgagctactcagcccttgtaacaaagaccaaccgtattgcaaggatcctggctggcagcaagaagaagatctgtaccaaaaagcccagattcatgagtgcctgtgcccagctagtgattgctttcattctcatatgcatccagttgggcatcatcgttgccctctttataatggagcctcctgacataatgcatgactacccaagcattcgagaagtctacctgatctgtaacaccaccaacctaggagttgtcactccacttggatacaatggattgttgattttgagctgcaccttctatgcgttcaagaccagaaatgttccagctaacttcaacgaggccaagtatatcgccttcacaatgtacacgacctgcattatatggctagcttttgtgccaatctactttggcagcaactacaaaatcatcaccatgtgtttctcggtcagcctcagtgccacagtggccctaggctgcatgtttgtgccgaaggtgtacatcatcctggccaaaccagagagaaacgtgcgcagcgccttcaccacatctaccgtggtgcgcatgcatgtaggggatggcaagtcatcctccgcagccagcagatccagcagcctagtcaacctgtggaagagaaggggctcctctggggaaaccttaaggtacaaagacaggagactggcccagcacaagtcggaaatagagtgtttcacccccaaagggagtatggggaatggtgggagagcaacaatgagcagttccaatggaaaatccgtcacgtgggcccagaatgagaagagcagccgggggcagcacctgtggcagcgcctgtccatccacatcaacaagaaagaaaaccccaaccaaacggccgtcatcaagcccttccccaagagcacggagagccgtggcctgggcgctggcgctggcgcaggcgggagcgctgggggcgtgggggccacgggcggtgcgggctgcgcaggcgccggcccaggcgggcccgagtccccagacgccggccccaaggcgctgtatgatgtggccgaggctgaggagcacttcccggcgcccgcgcggccgcgctcaccgtcgcccatcagcacgctgagccaccgcgcgggctcggccagccgcacggacgacgatgtgccgtcgctgcactcggagcctgtggcgcgcagcagctcctcgcagggctccctcatggagcagatcagcagtgtggtcacccgcttcacggccaacatcagcgagctcaactccatgatgctgtccaccgcggcccccagccccggcgtcggcgccccgctctgctcgtcctacctgatccccaaagagatccagttgcccacgaccatgacgacctttgccgaaatccagcctctgccggccatcgaagtcacgggcggcgcgcagcccgcggcaggggcgcaggcggctggggacgcggcccgggagagccccgcggccggtcccgaggctgcggccgccaagccagacctggaggagctggtggctctcaccccgccgtcccccttcagagactcggtggactcggggagcacaacccccaactcgccagtgtccgagtcggccctctgtatcccgtcgtctcccaaatatgacactcttatcataagagattacactcagagctcctcgtcgttgtgaatgtccctggaaagcacgccggcctgcgcgtgcggagcggagccccccgtgttcacacacacacaatggcaagcatagtcgcctggttacggcccagggggaatatgccaagggaccccttaatggaaacacagatcagtagtgctatctcatgacaaccacaagaaaccgacgacaaatcttttgcgagattttcttctagtggcttagaaacatggcttttaagaaacacggtgatatctttgagggtgacaaggcgtctcttcaaacagttccataccaactgctttgctctagggaagcagtgcgtgtgaaacagcgtaacggagggtgaagagcatagttaataagcaactgtaaaaagttttatttgtttactttaattcttttcccctgtaaaaagttttatttgtttactttaattcttttcccagaaaagagtctttgattcaccaaacatgaatgtacattttctaacaaactcaaaatctgggaccaaaacatcaacttttttctttcttttttctttctttttgttttttctttcctgtaaagaccttgaaaagaccttgaaaagcagtaacttgggtccagtatttacggaggcgttgtgaatgtgtcccatgcataacacactactggatagtgagtcgtgcgctaatgtactacgtagggcttctaccagagattttcctctccaattgggttgtgaaatactcttccaaaagcctgcatcggggattccacctacttatttcagattcacctccattaaccaagaaaaccagtggaagatttcttgactatttcaccatgttgccaatc

SEQ ID NO: 6182 - DNA, 3933 bp, Homo sapiens
ttcaactcttggcctcaagtgatctgcttgcttcagccttccaaattgctgggattatgggcatgagccaccccagcacccggccagtgccacatcttagaacactcttgaggtgctttttgatttttaggcaactatggagaaagtgggatggaagccttcaaagatatgtcagcgaaggaagggatttgcatcgcccactcttacaaaatctacagtaatgcaggggagcagagctttgataagctgctgaagaagctcacaagtcacttgcccaaggcccgggtggtggcctgcttctgtgagggcatgacggtgagaggtctgctgatggccatgaggcgcctgggtctagcgggagaatttctgcttctgggcagtgatggctgggctgacaggtatgatgtgacagatggatatcagcgagaagctgttggtggcatcacaatcaagctccaatctcccgatgtcaagtggtttgatgattattatctgaagctccggccagaaacaaaccaccgaaacccttggtttcaagaattttggcagcatcgttttcagtgccgactggaagggtttccacaggagaacagcaaatacaacaagacttgcaatagttctctgactctgaaaacacatcatgttcaggattccaaaatgggatttgtgatcaacgccatctattcgatggcctatgggctccacaacatgcagatgtccctctgcccaggctatgcaggactctgtgatgccatgaagccaattgatggacggaaacttttggagtccctgatgaaaaccaattttactggggtttctggagatacgatcctattcgatgagaatggagactctccaggaaggtatgaaataatgaatttcaaggaaatgggaaaagattactttgattatatcaacgttggaagttgggacaatggagaattaaaaatggatgatgatgaagtatggtccaagaaaagcaacatcatcagatctgtgtgcagtgaaccatgtgagaaaggccagatcaaggtgatccgaaagggagaagtcagctgttgttggacctgtacaccttgtaaggagaatgagtatgtctttgatgagtacacatgcaaggcatgccaactggggtcttggcccactgatgatctcacaggttgtgacttgatcccagtacagtatcttcgatggggtgaccctgaacccattgcagctgtggtgtttgcctgccttggcctcctggccaccctgtttgttactgtagtcttcatcatttaccgtgatacaccagtagtcaagtcctcaagcagggaactctgctacattatccttgctggcatctgcctgggctacttatgtaccttctgcctcattgcgaagcccaaacagatttactgctaccttcagagaattggcattggtctctccccagccatgagctactcagcccttgtaacaaagaccaaccgtattgcaaggatcctggctggcagcaagaagaagatctgtaccaaaaagcccagattcatgagtgcctgtgcccagctagtgattgctttcattctcatatgcatccagttgggcatcatcgttgccctctttataatggagcctcctgacataatgcatgactacccaagcattcgagaagtctacctgatctgtaacaccaccaacctaggagttgtcactccacttggatacaatggattgttgattttgagctgcaccttctatgcgttcaagaccagaaatgttccagctaacttcaacgaggccaagtatatcgccttcacaatgtacacgacctgcattatatggctagcttttgtgccaatctactttggcagcaactacaaaatcatcaccatgtgtttctcggtcagcctcagtgccacagtggccctaggctgcatgtttgtgccgaaggtgtacatcatcctggccaaaccagagagaaacgtgcgcagcgccttcaccacatctaccgtggtgcgcatgcatgtaggggatggcaagtcatcctccgcagccagcagatccagcagcctagtcaacctgtggaagagaaggggctcctctggggaaaccttaaggtacaaagacaggagactggcccagcacaagtcggaaatagagtgtttcacccccaaagggagtatggggaatggtgggagagcaacaatgagcagttccaatggaaaatccgtcacgtgggcccagaatgagaagagcagccgggggcagcacctgtggcagcgcctgtccatccacatcaacaagaaagaaaaccccaaccaaacggccgtcatcaagcccttccccaagagcacggagagccgtggcctgggcgctggcgctggcgcaggcgggagcgctgggggcgtgggggccacgggcggtgcgggctgcgcaggcgccggcccaggcgggcccgagtccccagacgccggccccaaggcgctgtatgatgtggccgaggctgaggagcacttcccggcgcccgcgcggccgcgctcaccgtcgcccatcagcacgctgagccaccgcgcgggctcggccagccgcacggacgacgatgtgccgtcgctgcactcggagcctgtggcgcgcagcagctcctcgcagggctccctcatggagcagatcagcagtgtggtcacccgcttcacggccaacatcagcgagctcaactccatgatgctgtccaccgcggcccccagccccggcgtcggcgccccgctctgctcgtcctacctgatccccaaagagatccagttgcccacgaccatgacgacctttgccgaaatccagcctctgccggccatcgaagtcacgggcggcgcgcagcccgcggcaggggcgcaggcggctggggacgcggcccgggagagccccgcggccggtcccgaggctgcggccgccaagccagacctggaggagctggtggctctcaccccgccgtcccccttcagagactcggtggactcggggagcacaacccccaactcgccagtgtccgagtcggccctctgtatcccgtcgtctcccaaatatgacactcttatcataagagattacactcagagctcctcgtcgttgtgaatgtccctggaaagcacgccggcctgcgcgtgcggagcggagccccccgtgttcacacacacacaatggcaagcatagtcgcctggttacggcccagggggaatatgccaagggaccccttaatggaaacacagatcagtagtgctatctcatgacaaccacaagaaaccgacgacaaatcttttgcgagattttcttctagtggcttagaaacatggcttttaagaaacacggtgatatctttgagggtgacaaggcgtctcttcaaacagttccataccaactgctttgctctagggaagcagtgcgtgtgaaacagcgtaacggagggtgaagagcatagttaataagcaactgtaaaaagttttatttgtttactttaattcttttcccctgtaaaaagttttatttgtttactttaattcttttcccagaaaagagtctttgattcaccaaacatgaatgtacattttctaacaaactcaaaatctgggaccaaaacatcaacttttttctttcttttttctttctttttgttttttctttcctgtaaagaccttgaaaagaccttgaaaagcagtaacttgggtccagtatttacggaggcgttgtgaatgtgtcccatgcataacacactactggatagtgagtcgtgcgctaatgtactacgtagggcttctaccagagattttcctctccaattgggttgtgaaatactcttccaaaagcctgcatcggggattccacctacttatttcagattcacctccattaaccaagaaaaccagtggaagatttcttgactatttcaccatgttgccaatc

SEQ ID NO: 6183 - DNA, 1314 bp, Homo sapiens
cgcgagagagcgagcgccaccgccgcgggccccgcagccgttctgcctgctgtcaccgctgcctccatcgccgacactagcgctccagctgcagccaaggccgctacgagagcgcaggaagccctcgaggagcggctgcctgggggcgcaaggctcagggcgcgcacctggtttagaagatcatgaccacatggatcatctaactaaatggtacatggggacaaaatggtcctttagaaaatacatctgaattgctggctaatttcttgatttgcgactcaacgtaggacatcgcttgttcgtagctatcagaaccctcctgaattttccccaccatgctatctttattggcttgaactcctttcctaaaatggtccttctgttgatcctgtcagtcttacttttgaaagaagatgtccgtgggagtgcacagtccagtgagaggagggtggtggctcacatgccgggtgacatcattattggagctctcttttctgttcatcaccagcctactgtggacaaagttcatgagaggaagtgtggggcggtccgtgaacagtatggcattcagagagtggaggccatgctgcataccctggaaaggatcaattcagaccccacactcttgcccaacatcacactgggctgtgagataagggactcctgctggcattcggctgtggccctagagcagagcattgagttcataagagattccctcatttcttcagaagaggaagaaggcttggtacgctgtgtggatggctcctcctcttccttccgctccaagaagcccatagtaggggtcattgggcctggctccagttctgtagccattcaggtccagaatttgctccagcttttcaacatacctcagattgcttactcagcaaccagcatggatctgagtgacaagactctgttcaaatatttcatgagggttgtgccttcagatgctcagcaggcaagggccatggtggacatagtgaagaggtacaactggacctatgtatcagccgtgcacacagaaggtagagggacaaagaaggaagagatgcgtaagagggatcagacattgatgttatcttttatgaggttcaagctattctcatgcctcagcctccagaggagctaggattacaggcatgtaccacacccaggaagttatacagatacacgttcctctgaacttcgccaatacttacagtattgtacaatacttatttgtgacttctcatcaacaccccaactggttagatgctgttatttttactggttgtatattaagacaataaaaaatttcgtacttgggta

SEQ ID NO: 6184 - DNA, 1279 bp, Homo sapiens
aattcatacacatgcaatcatacatgcacactgactctgaactgggtgaactctgtggagggaggcccagaatgggtgctttcaccaagaatttgtctgtgtacaactctagatggagtgggccagcagtagctgccagtctttctcccctgcagcttcctctgcttctggaatgaaccatgtatcctggagaccctcccaatggatgagagtggaaagacatcagtacaactggacttggcttccggaaaaagattgcttttgaactttggctctcttcacttgtatgctatcattgatattcccagtggtgcccgtggaaagagggagaaagagaagctgaacaggagaaagacaaacagaaagaatagagaacaggaacgaggtggagagcaagactgacagagaaagtgtgagcaatgatgagaattttaattcaccaaggagacgtgtttttggtttgtccccccaaaccccgcccgccccactacaggttatggaaagaatcatggcattactgaggagtaaacctctctggcacactgagcatggtcagggcattggtcagagggacagagcaaggaatgcatcctgagcccacagctttgaccactgtgatccagaagagaggtgcactacgtgggaagtgctgattccacagcatgcagcctggtaggggaaggaaaataaaagggtgtgaagaaggaatagttttataatctcggaagatgataccaagagcagaggcaacaaatagaggcctggcctccaggtgccggatccagacacctgacctagaatgcctgcccgctatccctgtggcaggaaatatcccctcatgtcccagggaattgcagatgggtcttctatacccttctacctgcccttagatctccatttttatcaaatagtacattgcattttgaagttttgggttttgtccttcatctttccctttcccttcaaatcttttaatggtaagaaagcaagtgaagcttggtgcaagctaaaatttttaaatggtgtggaaatgcaaataataccaagtaaaataatacagatattattaaagtttctggttttgaggtgttgtagataaatgtatttatgtgcctagtggggaatccaatattatgaatatgaaaaagggggcaataaaagggtatgtaaaatatgtatgaagaaaaggtgtacaaaaatttgcccttatgcacggaactctgtttctaagtgccaagcacagaaagccgctaaataaaatctttgcaattgtaaaatg

SEQ ID NO: 6185 - DNA, 382 bp, Homo sapiens
acaaccattttcagaggagtctgaaaaatatagaagggcagatggatttgggtggaaagctagcagattccaccataagagcacctggtcatcatgctaaaacgctgaaatgctgtcaggcctatgatgacaaaaggagccatcactgacaccaagcgttactggatcaggtgtgtacaaagaacccaggatccacattttccagagcagagcaaattagaataaggtaatttccagcaggaaggagcaaataaatggtacagcaatatataaaatcttaacacagaaaatgttttaaagatttagactaatgggaaattgaagcagctggacaagcttccttcttggcacacaattactgcagcaatgtcttcttttttaa

SEQ ID NO: 6186 - DNA, 548 bp, Homo sapiens
agacagggtctctgtggctcaggctggagtgcatggctcaatcacggcccactgcaacctccacctcccgggatcaagcgatcctcccacttcagcctcctgagtagctgcaaatacaggcacagactaccacgaccatctagtttttgtattttttgtagagaccaggcttcaccgtgttgttcaggctggtcttgatctcctggattcaagcgatcctcccatcttgacctcccaaagcgctggaattacaggcatgagcactgcgcccagtgagagctggagaaattttatctttcacaaacgcagatgttcatttattgaagaaatttcatgaaatttgtggactgtatgtaagtgcatacagaatgaatttccacatacccaaaacaatgaaaaagcctggcacagaagatgggaaaattgatctgggcaacagtggctcatgcctgtaatcctaaaactttcagaggccaaggcaggtggatcacttgagtccaggagttcgagaccagcctaggcatcacagcaagagaccccatctctac

SEQ ID NO: 6187 - DNA, 163 bp, Homo sapiens
tatataaaaaaataataataataactctatgtactttaggttaagaattgaaattgaacagaactaaatataatcaagagagtaaagataagatagaaatgaaagacactagtgaaagcataccacaagcagaattccttgagtttcctctagaaaaaaaaaa

SEQ ID NO: 6188 - DNA, 228 bp, Homo sapiens
tcactgcttctcccatatgagacaacagcactttcttgactagtaattacaataaataaaatagcaattagtccaaataatacaattattagtggcaggaaattttatcctccatcattactaccaatccaaatattctgcatatccctattaggtctcgaaatggttgtcagggttattcctcgagagaagagaaaatcaagctctcatcaattcttctttctttct

SEQ ID NO: 6189 - DNA, 481 bp, Homo sapiens
aatataaagtggaatcctggatgggatcttagaacagaaaaagggcattatgaaaaactaaggaaatgtgaataacctatggatgactttagtatcaccactcattaattgtaacacatgtaccatactaacattagattttaataatattggaaactagacatggggtacatgggaactctcagtatgatgtttgaaattttgtcaatctaaaaccataggctgggttcacgcctgtaattccagaactttgagagaccaagatgggcagatcttgagctcaggagatcaagactagcctgggcaacctgtcaaaacccagtctccacaaaaaaataattagctgggcatggtggtgcatgcctgtagtcccagctacttgagaggctgaggtaggagaatggcttgagcccaggaggcggaggctgcaataagccaaaatcatgccactgcattccaacccgggtgacagagccagatc

SEQ ID NO: 6190 - DNA, 465 bp, Homo sapiens
gaatttacttttagtgggactgaaccgaactcaagctaaatcctgagactttggacacagacagcaaaaaatatttaccagaatttacagctgtaaataccccggacacaccccatgtctgccaggaatcatctatttgggggattttgcaagcttttcctattctgcagccaatggcaactaactcagtcaacccatttggaaagaaagaagattcactcttgctgccattcatcctagccactcagggacaaagcagacataacttccttctcctggagcatgaatgaccgtagaactggccattccttaatgatatggtttagaaaatggagccctgattagaggggcatttttcatcatgctgttttcactttcctgctctagttggccatgaacaaacatatatcgttagaaagcctaaccaatactttcccggggccaatcttctaataaaatgacagt

SEQ ID NO: 6191 - DNA, 381 bp, Homo sapiens
tattttgaggtctctgtgtggtatagtaattgagaaagaaagttgagaatgtactgtgttttataattggtgatcctgatggggcgggcagtgtggcgctccagagctgctgtgctgtggtgggcggaaggaggtttctcttttaatgatatatgctaaataaagaagcaaaggggaagtgctgtacaaatgctgtgattaaataactattagaatggagccagcccctccaccatgtgctggatttcatcgccacttgcccacgcagaagcttttctcctgaaattatccccttgctctcaggcagcctctgtttttttcctctttactccatcattttcatcagcaagtaatatggccctcccatttttcatttaaaaa

SEQ ID NO: 6192 - DNA, 457 bp, Homo sapiens
cctttttgctttttaaaccataaatacttgttttaaaaatcaatattagccctggttagattagattgagtgtggtaaagcagaaataacaatgaattgggaatcaggacctatgaattctagccccaaatggctgtacacatgaatgtgctggggaggaaaggtttggctgatcacataacttttcctggcctcatgttcttcatgtagaaaatgaaggggttggattagattagtggttctcacagtgtggtccatggacctttttagggtcacaaaacaccttttaggcagtctgtgaaggccttttctttttgtactgtgtcaatatttgcactcatggtacaaaagcaatggtgagtgtacttgctaggttcctaccacatatcaaagccatgtcaccagatgactaacagttattctattcttcagtgttatgtactcatttaaaaaaaaa

SEQ ID NO: 6193 - DNA, 919 bp, Homo sapiens
gcaggcaggaaggtagtataagcagtccattcaataattaataagccacttaggtctgcttcaagtcctttatcttacagataaaggatgtgttcaggaacattaatggttgatgagaaaacattatgccaaataaaatatgttgggtaatcttgaaattgtcatgatttagctgggtgagtacttctttcttatatatctaacttaagtcaattcgagaaaagcctattgagcacatagaatgcctacctcatccccagcaccacggaaacatagaatctcaaggtcagcagggtcctcaatcccaaaattgtataagcagccagccagtcacgattggaatgcttccagggaaagcacttcattgcatccagaggcagtttactccatgtcctgacaatcccactagagttttctttttagagctgattttctttttaatcttcacagcttcttcccttagttctagttatactcctgtattgagcagcttttataggccagatgcagtttcaggtgattttcatgcattcagtcatttaaccccacagtcatcacatgaggtggggtctcccattttacagatcaggcaactggcacaaagaaattaagtgatttgctcaaggtcagtaactactgagtggcaaagcactctgtctccattagtataccttcttcttttcttttcttttttttttttttttttgagattgtgtctcactctgtcgccccggctggagtgcagtggtgtgatctcagctcactgtagcctctgcctcccaggttcaagtgattcttatgcctcagcctcctgagtagctgggattacacatgcatgtcaccacaccttgctaattttttaatttttagtagagatggggtttcaccatattggccaagctggtcttgaacttctggc

SEQ ID NO: 6194 - DNA, 572 bp, Homo sapiens
tatattatttaactcttaaatgttgacttttactgtatattttatatatttttagtatattactcatttctgaaccacatataggaaaagtaattggagaagtggttgtctacaattattttgaagagctcaaatatagaaatggaatgagatttgttcatatcctttagaatcaatggctggaaggttcagggaagcatatttaaaattagtacaaggaagacttattaatggttagcgctgcctaaagatcaggtaggttgcctctagggttatagaggccttcaggtttagactagaaaaaatttctataaaaaattcagttatccagtgagtaaatagataacctttagggttaacctttgccacctatgacaggctgcagatcatgagctggcctacaaattcagctgtaggatggtttattgtagactatgtacataaaatatggttttatattttattacaaaacattgaacatcctgtgctagatatggaaaaagttcaggaaacatcaagagctctccctcttctccagtggaattgaaaaaataaagtaaaaaacaaccaac

SEQ ID NO: 6195 - DNA, 3171 bp, Homo sapiens
  misc_feature (1342)..(1342): n is a, c, g, or t
caggaagggccatgaagattaataaagatttggactcagggcaaatatttacttagtagcaataactcaaagaattactgttgaataaataagccaattaagcagccaatcacgtactatgcggatgcacacaaatgaaaccctcacttcaacctgaagacattcgcacatgagttacgtagagggacctgcaggaagcggtagagaaaacataaggcttatgcgtttaatttccacaccaatttcaggatctttgtcactgacagcagcactaagacttgttaactttatatagttaagaagaacaaggctgagcgcgatgactcacgcctgtaagcctagaactttgggaggccaaagcaggcagactgcttgagcccaggagttccagaccagcctgggcaacatggcaacaccccatctctacaaaaaaatacaagaatcagctgggcgtggtgatgtgttcctgtaatctcagctactcgggaggcagaggcaggaggattgcttgaacccgggaggcagaggttgtagttagccgagatctcgccactgcactccagtctggacgacagagtgagactcagtctcaaataaataaataaatacataaatataaggaaaaaaataaagctgctttctcctcttcctcctctttggtctcatctggctctgctccaggcatctgccacaatgtgggtgcttacacctgctgcttttgctgggaagctcttgagtgtgttcaggcaacctctgagctctctgtggaggagcctggtcccgctgttctgctggctgagggcaaccttctggctgctagctaccaagaggagaaagcagcagctggtcctgagagggccagatgagaccaaagaggaggaagaggaccctcctctgcccaccaccccaaccagcgtcaactatcacttcactcgccagtgcaactacaaatgcggcttctgtttccacacagccaaaacatcctttgtgctgccccttgaggaagcaaagagaggattgcttttgcttaaggaagctggtatggagaagatcaacttttcaggtggagagccatttcttcaagaccggggagaatacctgggcaagttggtgaggttctgcaaagtagagttgcggctgcccagcgtgagcatcgtgagcaatggaagcctgatccgggagaggtggttccagaattatggtgagtatttggacattctcgctatctcctgtgacagctttgacgaggaagtcaatgtccttattggccgtggccaaggaaagaagaaccatgtggaaaaccttcaaaagctgaggaggtggtgtagggattatagagtcnctttcaagataaattctgtcattaatcgtttcaacgtggaagaggacatgacggaacagatcaaagcactaaaccctgtccgctggaaagtgttccagtgcctcttaattgagggtgagaattgtggagaagatgctctaagagaagcagaaagatttgttattggtgatgaagaatttgaaagattcttggagcgccacaaagaagtgtcctgcttggtgcctgaatctaaccagaagatgaaagactcctaccttattctggatgaatatatgcgctttctgaactgtagaaagggacggaaggacccttccaagtccatcctggatgttggtgtagaagaagctataaaattcagtggatttgatgaaaagatgtttctgaagcgaggaggaaaatacatatggagtaaggctgatctgaagctggattggtagagcggaaagtggaacgagacttcaacacaccagtgggaaaactcctagagtaactgccattgtctgcaatactatcccgttggtatttcccagtggctgaaaacctgattttctgctgcacgtggcatctgattacctgtggtcactgaacacacgaataacttggatagcaaatcctgagacaatggaaaaccattaactttacttcattggcttataaccttgttgttattgaaacagcacttctgtttttgagtttgttttagctaaaaagaaggaatacacacaggaataatgaccccaaaaatgcttagataaggcccctatacacaggacctgacatttagctcaatgatgcgtttgtaagaaataagctctagtgatatctgtgggggcaaaatttaatttggatttgattttttaaaacaatgtttactgcgatttctatatttccattttgaaactatttcttgttccaggtttgttcatttgacagagtcagtattttttgccaaatatccagataaccagttttcacatctgagacattacaaagtatctgcctcaattatttctgctggttataatgctttttttttttttgcttttatgccattgcagtcttgtactttttactgtgatgtacagaaatagtcaacagatgtttccaagaacatatgatatgataatcctaccaattttcaagaagtctctagaaagagataacacatggaaagatggtgtggtgcagcccagcccacggtgcctgttccatgaatgctggctacctatgtgtgtggtacctgttgtgtccctttctcttcaaagatcctgagcaaaacaaagatacgctttccatttgatgatggagttgacatggaggcagtgcttgcattgctttgttcgcctatcatctggccacatgaggctgtcaagcaaaagaataggagtgtagttgagtagctggttggccctacatctctgagaagtgacgttacactgggttggcataagatatcctaaaatcacgctggaaccttgggcaaggaagaatgtgagcaagagtagagagagtgcctggatttcatgtcagtgaagccatgtcaccatatcatatttttgaatgaactctgagtcagttgaaatagggtaccatctaggtcagtttaagaagagtcagctcagagaaagcaagcataagggaaaatgtcacgtaaactagatcagggaacaaaatcctctccttgtggaaatatcccatgcagtttgttgatacaacttagtatcttattgcctaaaaaaaaatttcttatcattgtttcaaaaaagcaaaatcatggaaaatttttgttgtccaggcaaataaaaggtcattttaatttagctgcaatt

SEQ ID NO: 6196 - DNA, 2529 bp, Homo sapiens
  misc_feature (700)..(700): n is a, c, g, or t
aagagagtccctggcatacagagactggctctgctccaggcatctgccacaatgtgggtgcttacacctgctgcttttgctgggaagctcttgagtgtgttcaggcaacctctgagctctctgtggaggagcctggtcccgctgttctgctggctgagggcaaccttctggctgctagctaccaagaggagaaagcagcagctggtcctgagagggccagatgagaccaaagaggaggaagaggaccctcctctgcccaccaccccaaccagcgtcaactatcacttcactcgccagtgcaactacaaatgcggcttctgtttccacacagccaaaacatcctttgtgctgccccttgaggaagcaaagagaggattgcttttgcttaaggaagctggtatggagaagatcaacttttcaggtggagagccatttcttcaagaccggggagaatacctgggcaagttggtgaggttctgcaaagtagagttgcggctgcccagcgtgagcatcgtgagcaatggaagcctgatccgggagaggtggttccagaattatggtgagtatttggacattctcgctatctcctgtgacagctttgacgaggaagtcaatgtccttattggccgtggccaaggaaagaagaaccatgtggaaaaccttcaaaagctgaggaggtggtgtagggattatagagtcnctttcaagataaattctgtcattaatcgtttcaacgtggaagaggacatgacggaacagatcaaagcactaaaccctgtccgctggaaagtgttccagtgcctcttaattgagggtgagaattgtggagaagatgctctaagagaagcagaaagatttgttattggtgatgaagaatttgaaagattcttggagcgccacaaagaagtgtcctgcttggtgcctgaatctaaccagaagatgaaagactcctaccttattctggatgaatatatgcgctttctgaactgtagaaagggacggaaggacccttccaagtccatcctggatgttggtgtagaagaagctataaaattcagtggatttgatgaaaagatgtttctgaagcgaggaggaaaatacatatggagtaaggctgatctgaagctggattggtagagcggaaagtggaacgagacttcaacacaccagtgggaaaactcctagagtaactgccattgtctgcaatactatcccgttggtatttcccagtggctgaaaacctgattttctgctgcacgtggcatctgattacctgtggtcactgaacacacgaataacttggatagcaaatcctgagacaatggaaaaccattaactttacttcattggcttataaccttgttgttattgaaacagcacttctgtttttgagtttgttttagctaaaaagaaggaatacacacaggaataatgaccccaaaaatgcttagataaggcccctatacacaggacctgacatttagctcaatgatgcgtttgtaagaaataagctctagtgatatctgtgggggcaaaatttaatttggatttgattttttaaaacaatgtttactgcgatttctatatttccattttgaaactatttcttgttccaggtttgttcatttgacagagtcagtattttttgccaaatatccagataaccagttttcacatctgagacattacaaagtatctgcctcaattatttctgctggttataatgctttttttttttttgcttttatgccattgcagtcttgtactttttactgtgatgtacagaaatagtcaacagatgtttccaagaacatatgatatgataatcctaccaattttcaagaagtctctagaaagagataacacatggaaagatggtgtggtgcagcccagcccacggtgcctgttccatgaatgctggctacctatgtgtgtggtacctgttgtgtccctttctcttcaaagatcctgagcaaaacaaagatacgctttccatttgatgatggagttgacatggaggcagtgcttgcattgctttgttcgcctatcatctggccacatgaggctgtcaagcaaaagaataggagtgtagttgagtagctggttggccctacatctctgagaagtgacgttacactgggttggcataagatatcctaaaatcacgctggaaccttgggcaaggaagaatgtgagcaagagtagagagagtgcctggatttcatgtcagtgaagccatgtcaccatatcatatttttgaatgaactctgagtcagttgaaatagggtaccatctaggtcagtttaagaagagtcagctcagagaaagcaagcataagggaaaatgtcacgtaaactagatcagggaacaaaatcctctccttgtggaaatatcccatgcagtttgttgatacaacttagtatcttattgcctaaaaaaaaatttcttatcattgtttcaaaaaagcaaaatcatggaaaatttttgttgtccaggcaaataaaaggtcattttaatttagctgcaatt

SEQ ID NO: 6197 - DNA, 3115 bp, Homo sapiens
  misc_feature (1286)..(1286): n is a, c, g, or t
caggaagggccatgaagattaataaagatttggactcagggcaaatatttacttagtagcaataactcaaagaattactgttgaataaataagccaattaagcagccaatcacgtactatgcggatgcacacaaatgaaaccctcacttcaacctgaagacattcgcacatgagttacgtagagggacctgcaggaagcggtagagaaaacataaggcttatgcgtttaatttccacaccaatttcaggatctttgtcactgacagcagcactaagacttgttaactttatatagttaagaagaacaaggctgagcgcgatgactcacgcctgtaagcctagaactttgggaggccaaagcaggcagactgcttgagcccaggagttccagaccagcctgggcaacatggcaacaccccatctctacaaaaaaatacaagaatcagctgggcgtggtgatgtgttcctgtaatctcagctactcgggaggcagaggcaggaggattgcttgaacccgggaggcagaggttgtagttagccgagatctcgccactgcactccagtctggacgacagagtgagactcagtctcaaataaataaataaatacataaatataaggaaaaaaataaagctgctttctcctcttcctcctctttggtctcatctggctctgctccaggcatctgccacaatgtgggtgcttacacctgctgcttttgctgggaagctcttgagtgtgttcaggcaacctctgagctctctgtggaggagcctggtcccgctgttctgctggctgagggcaaccttctggctgctagctaccaagaggagaaagcagcagctggtcctgagagggccagatgagaccaaagaggaggaagaggaccctcctctgcccaccaccccaaccagcgtcaactatcacttcactcgccagtgcaactacaaatgcggcttctgtttccacacagccaaaacatcgtatggagaagatcaacttttcaggtggagagccatttcttcaagaccggggagaatacctgggcaagttggtgaggttctgcaaagtagagttgcggctgcccagcgtgagcatcgtgagcaatggaagcctgatccgggagaggtggttccagaattatggtgagtatttggacattctcgctatctcctgtgacagctttgacgaggaagtcaatgtccttattggccgtggccaaggaaagaagaaccatgtggaaaaccttcaaaagctgaggaggtggtgtagggattatagagtcnctttcaagataaattctgtcattaatcgtttcaacgtggaagaggacatgacggaacagatcaaagcactaaaccctgtccgctggaaagtgttccagtgcctcttaattgagggtgagaattgtggagaagatgctctaagagaagcagaaagatttgttattggtgatgaagaatttgaaagattcttggagcgccacaaagaagtgtcctgcttggtgcctgaatctaaccagaagatgaaagactcctaccttattctggatgaatatatgcgctttctgaactgtagaaagggacggaaggacccttccaagtccatcctggatgttggtgtagaagaagctataaaattcagtggatttgatgaaaagatgtttctgaagcgaggaggaaaatacatatggagtaaggctgatctgaagctggattggtagagcggaaagtggaacgagacttcaacacaccagtgggaaaactcctagagtaactgccattgtctgcaatactatcccgttggtatttcccagtggctgaaaacctgattttctgctgcacgtggcatctgattacctgtggtcactgaacacacgaataacttggatagcaaatcctgagacaatggaaaaccattaactttacttcattggcttataaccttgttgttattgaaacagcacttctgtttttgagtttgttttagctaaaaagaaggaatacacacaggaataatgaccccaaaaatgcttagataaggcccctatacacaggacctgacatttagctcaatgatgcgtttgtaagaaataagctctagtgatatctgtgggggcaaaatttaatttggatttgattttttaaaacaatgtttactgcgatttctatatttccattttgaaactatttcttgttccaggtttgttcatttgacagagtcagtattttttgccaaatatccagataaccagttttcacatctgagacattacaaagtatctgcctcaattatttctgctggttataatgctttttttttttttgcttttatgccattgcagtcttgtactttttactgtgatgtacagaaatagtcaacagatgtttccaagaacatatgatatgataatcctaccaattttcaagaagtctctagaaagagataacacatggaaagatggtgtggtgcagcccagcccacggtgcctgttccatgaatgctggctacctatgtgtgtggtacctgttgtgtccctttctcttcaaagatcctgagcaaaacaaagatacgctttccatttgatgatggagttgacatggaggcagtgcttgcattgctttgttcgcctatcatctggccacatgaggctgtcaagcaaaagaataggagtgtagttgagtagctggttggccctacatctctgagaagtgacgttacactgggttggcataagatatcctaaaatcacgctggaaccttgggcaaggaagaatgtgagcaagagtagagagagtgcctggatttcatgtcagtgaagccatgtcaccatatcatatttttgaatgaactctgagtcagttgaaatagggtaccatctaggtcagtttaagaagagtcagctcagagaaagcaagcataagggaaaatgtcacgtaaactagatcagggaacaaaatcctctccttgtggaaatatcccatgcagtttgttgatacaacttagtatcttattgcctaaaaaaaaatttcttatcattgtttcaaaaaagcaaaatcatggaaaatttttgttgtccaggcaaataaaaggtcattttaatttagctgcaatt

SEQ ID NO: 6198 - DNA, 1659 bp, Homo sapiens
caggaagggccatgaagattaataaagatttggactcagggcaaatatttacttagtagcaataactcaaagaattactgttgaataaataagccaattaagcagccaatcacgtactatgcggatgcacacaaatgaaaccctcacttcaacctgaagacattcgcacatgagttacgtagagggacctgcaggaagcggtagagaaaacataaggcttatgcgtttaatttccacaccaatttcaggatctttgtcactgacagcagcactaagacttgttaactttatatagttaagaagaacaaggctgagcgcgatgactcacgcctgtaagcctagaactttgggaggccaaagcaggcagactgcttgagcccaggagttccagaccagcctgggcaacatggcaacaccccatctctacaaaaaaatacaagaatcagctgggcgtggtgatgtgttcctgtaatctcagctactcgggaggcagaggcaggaggattgcttgaacccgggaggcagaggttgtagttagccgagatctcgccactgcactccagtctggacgacagagtgagactcagtctcaaataaataaataaatacataaatataaggaaaaaaataaagctgctttctcctcttcctcctctttggtctcatctggctctgctccaggcatctgccacaatgtgggtgcttacacctgctgcttttgctgggaagctcttgagtgtgttcaggcaacctctgagctctctgtggaggagcctggtcccgctgttctgctggctgagggcaaccttctggctgctagctaccaagaggagaaagcagcagctggtcctgagagggccagatgagaccaaagaggaggaagaggaccctcctctgcccaccaccccaaccagcgtcaactatcacttcactcgccagtgcaactacaaatgcggcttctgtttccacacagccaaaacatcgtatggagaagatcaacttttcaggtggagagccatttcttcaagaccggggagaatacctgggcaagttggtgaggttctgcaaagtagagttgcggctgcccagcgtgagcatcgtgacaaaacaaagatacgctttccatttgatgatggagttgacatggaggcagtgcttgcattgctttgttcgcctatcatctggccacatgaggctgtcaagcaaaagaataggagtgtagttgagtagctggttggccctacatctctgagaagtgacgttacactgggttggcataagatatcctaaaatcacgctggaaccttgggcaaggaagaatgtgagcaagagtagagagagtgcctggatttcatgtcagtgaagccatgtcaccatatcatatttttgaatgaactctgagtcagttgaaatagggtaccatctaggtcagtttaagaagagtcagctcagagaaagcaagcataagggaaaatgtcacgtaaactagatcagggaacaaaatcctctccttgtggaaatatcccatgcagtttgttgatacaacttagtatcttattgcctaaaaaaaaatttcttatcattgtttcaaaaaagcaaaatcatggaaaatttttgttgtccaggcaaataaaaggtcattttaatttagctgcaatt

SEQ ID NO: 6199 - DNA, 1558 bp, Homo sapiens
caggaagggccatgaagattaataaagatttggactcagggcaaatatttacttagtagcaataactcaaagaattactgttgaataaataagccaattaagcagccaatcacgtactatgcggatgcacacaaatgaaaccctcacttcaacctgaagacattcgcacatgagttacgtagagggacctgcaggaagcggtagagaaaacataaggcttatgcgtttaatttccacaccaatttcaggatctttgtcactgacagcagcactaagacttgttaactttatatagttaagaagaacaaggctgagcgcgatgactcacgcctgtaagcctagaactttgggaggccaaagcaggcagactgcttgagcccaggagttccagaccagcctgggcaacatggcaacaccccatctctacaaaaaaatacaagaatcagctgggcgtggtgatgtgttcctgtaatctcagctactcgggaggcagaggcaggaggattgcttgaacccgggaggcagaggttgtagttagccgagatctcgccactgcactccagtctggacgacagagtgagactcagtctcaaataaataaataaatacataaatataaggaaaaaaataaagctgctttctcctcttcctcctctttggtctcatctggctctgctccaggcatctgccacaatgtgggtgcttacacctgctgcttttgctgggaagctcttgagtgtgttcaggcaacctctgagctctctgtggaggagcctggtcccgctgttctgctggctgagggcaaccttctggctgctagctaccaagaggagaaagcagcagctggtcctgagagggccagatgagaccaaagaggaggaagaggaccctcctctgcccaccaccccaaccagcgtcaactatcacttcactcgccagtgcaactacaaatgcggcttctgtttccacacagccaaaacatcctttgtgctgccccttgaggaagcaaagagaggattgcttttgcttaaggaagctggtatggagaagatcaacttttcaggtggagagccatttcttcaagaccggggagaatacctgggcaagttggtgaggttctgcaaagtagagttgcggctgcccagcgtgagcatcgtgagcaatggaagcctgatccgggagaggtggttccagaattatggtgtgctccatgggatggcattcttcttattgctattgctatttttattgttggttcttatatttccttccctcctgggccttcagccaggcctgctgaggaactggaagggaggaaaaactaatcttgcttactctaattgcttttcaagctgtgcacggcattatggcagttttagttccttagggctctcagtaaacaagtttggcaagttagataatagaccttttactgagatgactatcttgtacattgcaatttagcaaatacaagatctatggccttagtttagacactaggtaggaaaattaacacatttgacagctttgtaataaaatatctctgttgggactggac

SEQ ID NO: 6200 - DNA, 1011 bp, Homo sapiens
gagttttgctctgttgcccaggctggcgtgcagtggtgtggtctcggctcactgcagcctccgcctcctgggttcacgccagtcttctgcctcagtctctggagtggctgggactgcaggcacgtgccaccatgcccagctaatttttgtatttttggtagagacagggttttgccgtgttggccaggctagtctcgaactcctgacctcaagtgatctgtccgcctcagcctcccgaagtgctggtattataggcgtaagccaccgcatcctgcccagacatacgaaatttgacaggtattgtgtaccctttggatctttaggaattaatttttgcctctgtcactcagctttgtatattttgaaatggagataagtatagggaggtcttggaaggaaaattgccagaattcccaaaccatgtaacactcattgagaattccagatccattatatctaaagggcaagtgaaggaaacagtattgtgaactgggtataactccttggttcttaactagtacattcttaatctgtgagacccaaaggttgataaacaataatttaagattgtacagtactctaaacgtctgcaaaggtctagatgttatcagtatcactagtttttatttctgccagtagctcccttttaggttacattgttgtcctctttccagtgtggcatctgtcattggtttttcactatggcaagttcattaaaaagcttgctccattgttatcttcaagtaatgcccataaggagatggaagatatctgagacaattaaggctttagcttctaggcaagagaaataacgttgcattaaatttcaagtttctttctgctagacttgaatgtgtctagccactctaatttatgggggcttttggttttttcctattgtactttgtatgtagaattgttttgaaatatcaagcatatttactttgaatttgaactctttcttaattttgtatttatcctttgaataaaatgtaaatccaaaaaaaaaaa

SEQ ID NO: 6201 - DNA, 763 bp, Homo sapiens
agattcacactgagtccatcccgcctcagcctccaaaatgtgcaggggataacatggcactgagcctctgtaccataggcatgctttgcctctgtcactcagctttgtatattttgaaatggagataagtatagggaggtcttggaaggaaaattgccagaattcccaaaccatgtaacactcattgagaattccagatccattatatctaaagggcaagtgaaggaaacagtattgtgaactgggtataactccttggttcttaactagtacattcttaatctgtgagacccaaaggttgataaacaataatttaagattgtacagtactctaaacgtctgcaaaggtctagatgttatcagtatcactagtttttatttctgccagtagctcccttttaggttacattgttgtcctctttccagtgtggcatctgtcattggtttttcactatggcaagttcattaaaaagcttgctccattgttatcttcaagtaatgcccataaggagatggaagatatctgagacaattaaggctttagcttctaggcaagagaaataacgttgcattaaatttcaagtttctttctgctagacttgaatgtgtctagccactctaatttatgggggcttttggttttttcctattgtactttgtatgtagaattgttttgaaatatcaagcatatttactttgaatttgaactctttcttaattttgtatttatcctttgaataaaatgtaaatccaaaaaaaaaaa

SEQ ID NO: 6202 - DNA, 760 bp, Homo sapiens
ggagagttgagaccagtctctctctcctaatgcagaatcccatagccatggttgctatacctatcctgatggtccggaataaaatctagtcttactgtgctttgtatattttgaaatggagataagtatagggaggtcttggaaggaaaattgccagaattcccaaaccatgtaacactcattgagaattccagatccattatatctaaagggcaagtgaaggaaacagtattgtgaactgggtataactccttggttcttaactagtacattcttaatctgtgagacccaaaggttgataaacaataatttaagattgtacagtactctaaacgtctgcaaaggtctagatgttatcagtatcactagtttttatttctgccagtagctcccttttaggttacattgttgtcctctttccagtgtggcatctgtcattggtttttcactatggcaagttcattaaaaagcttgctccattgttatcttcaagtaatgcccataaggagatggaagatatctgagacaattaaggctttagcttctaggcaagagaaataacgttgcattaaatttcaagtttctttctgctagacttgaatgtgtctagccactctaatttatgggggcttttggttttttcctattgtactttgtatgtagaattgttttgaaatatcaagcatatttactttgaatttgaactctttcttaattttgtatttatcctttgaataaaatgtaaatccaaaaaaaaaaa

SEQ ID NO: 6203 - DNA, 377 bp, Homo sapiens
ttgagacagagtctcgctctgtcacccaggcttgagtgcagtggcgtgatctcagctcactgcaacctctgcctctggagttcaagcaaatctcatgcttcagcctcctgagcagctgggactacaggcgcacaccaccatgccctgctaatttttgtgtttttagtagagacagggtttcgccatgttggccaggctggtctccaatttctgacctcatgtgatccatctgcctcggcctcccaaagtgctgggattacaggcatgggccaccgcacctggcctactcacctcttgaggtggcctgtggcaaatttcatggctttaggttagcaaatctggaagggaaactaggggcagagagaccctccaattat

SEQ ID NO: 6204 - DNA, 318 bp, Homo sapiens
gcaatatttctttctgtataaaaagaggaagcatgtaggcagattcgaatttagtttttggtctgtttaattgcattaatatgctctttctgccatcttttgggaccttttcagtagctattgttaactcctttaaagggtggaggtgagattcacattatgccattttgcgaagtgttggtagaagggtaggtaattcagtctactgaggtttgagggtggtttatctggttctctctgtgtccactgaaaagatgtaattacgagttgactgtcttttatagagcttagaaaataggtctgctgcaggtggctgta

SEQ ID NO: 6205 - DNA, 388 bp, Homo sapiens
tgtcgggcccatctgccaaggcaagcacccacattaaagcagagtgaagagcagggcgagctgtgtagctcacctgcctttgaccctgcacgtgacgggcgagggaagaggaccatggtaacttgtctctaggcaacccataggtgcccaatggagagataatctcaaatatggtagcagagttcagactcagtggctttcagatggttagtataggctgaaattccaagagcattaaccagacacctactatgtgtatttcttgtgttggggttaggagatactgctgttggctgagacacacagcccacatccttggtaggtccctcagagagcatctagtgggcctgtcctcccagctcacagaaggggaaattgaagcctcaag

SEQ ID NO: 6206 - DNA, 495 bp, Homo sapiens
gttgaggcaggtgaatcacttgaacccgagaggcagaggttgcggtgagcctagatcacgccactgcactccactggtcttacgctgcaccaagctggagtgcaatggtgcagtcttggcttactgcaacccttgcctccttggttcaagcgattttcttgcctcagcttctcgtgaagccatgtagctgggattacaggtgcctgctaccacgcttggctaatttttgtgtttttaatagagaaggggtttggtttcaccatgttgcccaggctggtctggatcacgaagtcaggagttggagaccagcctggccaatatggctgtctctactaaaaatacaaaatttagctgggtgtggtggcgcgtgcctgtaaccccagctactcatgagactgagccagaagaatcgcttgaacccaggaggtggaggttgcagtgagttgagatcgcactactgcactcacagctggcgacagagcaagattccatctc

SEQ ID NO: 6207 - DNA, 414 bp, Homo sapiens
tgtgtttaaacaagaatatgtgagtcggacagtgtgctctttgactgaaaacctgattcagagaagttggcttattcctttgcctttgaccacagctttgttggaggtcagcagcatcctaagagccagggagcaggccaggcacagtggctcacgcctgtaattccagcactttgggaagccagggcaggtggatcacttgacgtcaggagttcaagaccagcctggccaacatggcgaaacctcatctctactaaaaatacaaagcaattagccaggcatggtggcaaatgcccataatcccagctactcaggaagctgaggcatgagaatcgcttgaacctgggaggtggaggttgcagtgagccaagatcatgccactgcactccagcctgggtgaagtgagactctgtc

SEQ ID NO: 6208 - DNA, 683 bp, Homo sapiens
ggcgcacgccatcatgcctggctaatattttgtatttgttgtagagactgggttttgctacgttgcccaggctggtcttgaactcctgggttcaagtgatcctcctgctttagcctctcaaagtgcagggattacaggcatgaactactttgcctggcctggttatgtctcaattgaagtacagaacaattttttactgcataatagtgagaatagatataaaatagttaaccatcaaagacatttgaaattgttaccacacctatttttaaaaattgtcattaaaaataagtatcaagtttatcttaatttttaactgtacaatacagtattgttaaccatatatacattgttgtacaacttcttttattttacttgactgaaactatacccattgaataacagctctccatttcctggtccttgcaacccctggcagcaagtattctactttctgtttctatgagtttgattactttggatacctacacagtatttgtcttttgtgactggcgtatttcacttaacattcatacatgctgtagcttatgactggatttccttcttttttaagactgaatcatcctcatcactggttctagctgaagtatgatgggatcattcttcctggcaaataaattcctgtttctatccagaaaaccaataaaaagttttccatgaaa

SEQ ID NO: 6209 - DNA, 462 bp, Homo sapiens
ttgcagtgagccaagatcgcgccactgcactccagcctgggcaacagagcaaaactccatctcaaaaaaataaaaaataaaaacctgtccaggttttttgtttgataaattttgtttttgaaatgattttcaaacctaactttacccatgtagccatgaagttaaaacaaaatcctagagtttatgctgtcattgtaagcaattacagatgatggccattacaaaacttcattttactctttgtggaagactagtctccatttcatatgcaatagaagattcaactctcttttgcacttgagaatactaaaagtaaatgtattttagtaaagaaaaaaaacccacatgtaaatgaatgtgtgtcttggagcaactgaattctattcaaaactttggaaggaaacagcaaagtgttagaatacgtgatttttaaagtgtatgtataaataaataccgtgagta

SEQ ID NO: 6210 - DNA, 257 bp, Homo sapiens
aaaccttcatatccagccgtctactcaacagtctcctggattgctcagaggcacctcttaacatatgtaaaccagagggcaacactgacctccccaaacctgcctctcctcctttatgctgccctatcctatgaagattttttttaaaatcagggccgggcacggtagctcacgcctgtaatcccagcactttgggaggcctagacaggaggatcacttgagctcaggagttcgagaccagcctgggcaatgcggcg

SEQ ID NO: 6211 - DNA, 390 bp, Homo sapiens
attcttaccaaatagggttgtaaagaactaagcatgaaaagtagcaaaatgtcagattaattttctctccctgcatttagggattcaaaagccatagagaataataatcgataaattatagttaaggatagactgttcacctagtgactgaataatacacaaagctcttcagaaattttcatgataagtttacttgcctaagagaccataaagaggaaaaatctgggagaagaaagagtcaatataatcagcaatgagaagtctccctttaatgacagctatggggaacctgaatgaagtagtatatacgtacaagtgattggctaggaccataccatagactgctcccataagtatttcctaccacaattgaccttctccagattcagc

SEQ ID NO: 6212 - DNA, 260 bp, Homo sapiens
gaagttgtaggctgtggtgaagtttgtgaatttgggagtcctcaggctcgtctggattccccttttatgccccaagcactggtgcacgcacaccctatggatcaggagtgcagaccgtgtgccccaatgttcaggaccctaggtgtgccaccactctgggagttattgaacgctggccatcagccgaccttgagccttcactggggcagagcagagaaatcacaggttatgcgataattttgtgagatctacctttttgg

SEQ ID NO: 6213 - DNA, 1732 bp, Homo sapiens
tatctgcttgggggttgctgattcctattggggttccgtggaagacccacgcctgatgccctccctcagtaaggaatgcacttccctcctggcatcgagcctggggctagcatgggcattactgggagaactgagacgattgtcacgcaccatcccctgtgatctgtggttctgatgtgcagcctcagctgaaaacggtcttcacctgtggctgtgcttacctgcgccactacttacagtgttttgaagagcaggatgaaaacggcaaaaaccttgactgtttctgctcaagtgtcctgaagtagaggatggtggggatgataaatgcttgctaggaaataagtccaagggctctataggacttcacagggttttagtttatgtctctaactttagcaaagctgcattcctattggaatgcatactggaaacagctctcattcctacctttaaagggctcttggaaagcagtgtgacaaccaaggtcactaaatggtgagatcatcaagccattttaagttctttctcatgttattcaccagcaccctgcaggacgttgggcacacatcacatccctcagctcagccatccagccgtctcagtgattcaccactcatttgcttaattaatagacaggtttgatcactttgtacatggaaggcactgtgccagtgaacaagcagttggacccagccctccagtagggaatggacagctgaaaatccatgagcaagaaagaaggaaaaagaaagagttctgagcagccaaaccatttctcgatgatttcagagccttcattctgagcatcagttatatgctctccagtgtaatgactttatagccaagcacagtaattgatattactgtgaaggcccttaacttatcaagaaatggttgaggccgggcacattggctcatgcctataatcccagcacgtgggaggccgaggcaggcagatcacttaagcccaggagttcaagcccagcctgggcaacatgatgaaagcccatctctacaaaaaaaatatacaaacaattagccaggcatggtggcatgtgcatgtagtcccatgtagtcccagctacttaggaggcagaaacacctgagcctgggaggtcgaggctgcagtgaattgtgctcacaccactgcattccagcctgggtgatggagtgaaaccctgtctcaaaaaaaaagaaagaaaagaaaaagaaagttgacttagctatactccatataagaaggtatagaaatatatagagcaatttagaaagattatagtgtccaaagattcaaactcagaaaagaattgaaaggttgcctgccagccatatccccagacgaacctagaccactggggtttcactatcatacagaatagagaaaaacattggttactgacacctgaaatcaaaaagcttggatatttttcagtcccaaaccagaacatagctcccgtatataaatgtaaatcttccttcaaaagtataattaagtataattatgggtgtatgtcaaaaatatagaggaagatggatttttacttataggttgttatacaaagttgggacagcaatcaaatttttaaacagttttcaagaatgtatgaccttaaaagaaatgtgtgaccctgatcactttccatatttgtaattaaccggagacctaatggtctgacacttaagtttccactatcactaggaccctgaatgctaattctggggagtttagatg

SEQ ID NO: 6214 - DNA, 488 bp, Homo sapiens
gctttgactttcataaataatgcttctggaaatctagtaaaacctttaaattttggccaggcatggtggctcacgcctcagcttcccagagtgttgggattataggcgtgagccactgcacctggcacatgtatatgtatgtattttttacaaaattggatgaagtataatttatttgctaaatattttcacttatgccatgatatcttatttaatctttaatttgtctatgaaaatacctgctctgctaggggacttctagttgaaaactcattaatttaaaaaattaattttgaattcagccacctattcttttttctaattgtttcttgtagcttttgctttgattggaataactttattctaggaataaagttgtgtcatctgcaaacatgaatcatgtacacatctgattttcttatatttatgtctcctttttctcttcaaattacattgcctttaccattgatgggaacctgggtaataaa

SEQ ID NO: 6215 - DNA, 470 bp, Homo sapiens
atggttactacaaactatatttgtaatttttttttcttgagatggagtcttgctctgttgcccaggctggagtgcagtggcgcgatctcggctcactgcaacctccacctcccgggttcaagcgattctcctgcctcagcctcctgatataatttatttgctaaatattttcacttatgccatgatatcttatttaatctttaatttgtctatgaaaatacctgctctgctaggggacttctagttgaaaactcattaatttaaaaaattaattttgaattcagccacctattcttttttctaattgtttcttgtagcttttgctttgattggaataactttattctaggaataaagttgtgtcatctgcaaacatgaatcatgtacacatctgattttcttatatttatgtctcctttttctcttcaaattacattgcctttaccattgatgggaacctgggtaataaa

SEQ ID NO: 6216 - DNA, 979 bp, Homo sapiens
ggtacctgtgttcgtcagggatgctctgacaaccaggtgtcgtccacgggcgggggcatgggcatggtgacagtggtcctgttgatgtcaccgatgatgctgagcgcctccttcagcgcgtggtgcatgtgcagcatctcgtcgtgctgctgtgcctgctctgccaactcctccatcagtgtgttctggttcccacatgagtacatattggccagcggctccgagatgatgaactccggggtctgagagtgggcaaacagggaagaaggttgggacctggtgcctgtgccgccctggctgccttgctgggcccttctgggactgtgcgctggacttggagccccttggagtatggcttttcacatgggcttctataccgcttcgactggaagatccacctccccactgccttttctcactcagatggggacaccgaggtccagaggaaaagacacctgtcaaatgtcacagatctgggaggggacttaagacttatcatgccaagaggacacctgtctactcagtttttttttggtggggcggggggcggtgatagggtctcgctctgtcaccaggctggagtacagtgatgactgctcactgcagcctccacctcctgggctcaaagtgatcctccaacgtcagcctctcgagtagctaggactacaggcacatgccaccaccaagcccagctatttttaaaatttttgtgtggagacaaggtctcactatgtggcccaggctggtctcgaactcctgggctcaagtgatcctcctgcctcggcctccaggagtgggagttggagttgatgcctggatacaggagctctgtgggtgggagtgagacaaaacacagggtcctgagctctggggaccaagcaatgtcctctggtgaaaaaaatcctggacttgctggcagaagatttgcctcttactcgccatgtgctctgaatacatttacctgccctcaaaaaattca

SEQ ID NO: 6217 - DNA, 374 bp, Homo sapiens
ctctgttccctgctttggccagtggctatcctcaatgtgacccacactacacctctgcccacactgcagctctttacccagttaccctccagttcctcacaacgtatgcctatctcagtcatgccccggactgcattgaagccagactgcccttttccccaaggcagggtcatgatttgccaaaggtttcgtgtgtgtgttagcaagactggatacaggagctctgtgggtgggagtgagacaaaacacagggtcctgagctctggggaccaagcaatgtcctctggtgaaaaaaatcctggacttgctggcagaagatttgcctcttactcgccatgtgctctgaatacatttacctgccctcaaaaaattca

SEQ ID NO: 6218 - DNA, 912 bp, Homo sapiens
gacaagagtttcacttttgtcacccaggctggagtgcagtggcacgaatctgactcactgcaacctccgcctcccacattcaagcaagtctcctgtctcagcctcccaggtagctgggactacaggcgcacgctaccacgccgggctaatgtttgtatttttagtagagacagggtgtcgccatgtttgccgggctgatctcaaactcctgacctcgtgatccgcccgccttggcctcccaaagtgctgggattacaggcctgagccaccgcacgcggcccccttcgtgccttttgaggaagcagcagccttggtcatggcccataagaactcagacttcaactgaaaaaagtggctcttccctacacaacagtccaggaagctggatattgggagtgtggtgagacgagaactgacccatccataagctattctggattctctgtcactctcagccgtggagcatcaagcaggcttcctgaagcttcgggaggacctggcttcagctgctgtctcagctgctcgaatgtaacatggttccgtagttgagacttcagtcatcctgagcaataaaccagctcatccactgaaaaaaaaaaaaaaaaaaaaaaaaacaaaagtgttgggcgcgactacgccccctcgaaaaactcctcaacagcccttccctgggccgccccgcccccactatgctcacgcgacccccgtgcgacacacgccgctcccccacgcacacccgcgcgcgccacaacccaccgcccccgcgcctcccgcccacacacaacagccccccgccggacacccacgcccttccgtcacaccacccccgcaggcgccccccaagccccaccacacggccaccaacaccccagcgcctcccccaccgcacccgacactacaatagcccgccgc

SEQ ID NO: 6219 - DNA, 350 bp, Homo sapiens
ctgacccatccataagctattctggattctctgtcactctcagccgtggagcatcaagcaggcttcctgaagcttcgggaggacctggcttcagctgctgtctcagctgctcgaatgtaacatggttccgtagttgagacttcagtcatcctgagcaataaaccagctcatccactaacttggctcctagcttattacatgtgtgcactccctgcactgatgaaaacaggaaacatggcgggcgcaggggctcacgcctggcatcccagcactttcgaggctgaagcaggaggatagcttgaggccgggagttcaagactagcctaggcaacgtggcaaaaccccatcta

SEQ ID NO: 6220 - DNA, 168 bp, Homo sapiens
cagtctgtatgtggaggcgcacacctatggtcccagccacttgggaggctgaggccagagaattgtgtgagcccaggaggagttccataccagcctgggcaacatagcaagacctcctctcaaaaacagacaaaaaaagtggtgttccagagtgattagtttgcttta

SEQ ID NO: 6221 - DNA, 232 bp, Homo sapiens
aagttgcctagttgtttcatttactgaaaagttcatctttcactaccttgagatatttccttcattgcctgttgccatatgtatttgggtttctcaacattgtgttcctttagtctattcatgaggcggtattcagagatctcctggcaattcttgtttttctatataaatttatttatttagagagagagatatatatacatacacacatacatacatacacagggtcttg

SEQ ID NO: 6222 - DNA, 460 bp, Homo sapiens
ttttttttttaagtgacagggtctcactctgttgtgcagagtgagtgcactggctggagagcagtagtgccatcatagctcactgtaaccttgaactcctgggcccaagcaattttcccactggctcccaaagggctgagattacaggcataagccactgtgctcagctggaaagactcttcctaacagtagaatgccaacaaacaaatgcagaaggaataatggaattagaaaattatcatttggcaactatcataacaataattgattcaggcaattatcccaagacattcattaattgtgaatggaaaaatagtaactttacagtagaaaaacctgacagatatcaccttaactaagtgaccagagacatcattgtgagtgctgggacaaatcaacatcacgtacatcctcaataggatgccctgagctcacagcctctgtggtgttcttatcaaac

SEQ ID NO: 6223 - DNA, 362 bp, Homo sapiens
accttaaatggcacacaaacggtataaattcaagttgatgaacattgagttcaatgtgagttaactgaagagaatagccattggattcttatgtcacccctatttatctctctagagatatatggaggataacttggtggacaaaatacagttagaagctgagaatattggtctcaatttcagctgagaatttgagatgaaacatgtatgcttggaagtcatttatacacagctgttagttgaagctattgtaatgtataagtcttctcatttgtaaagcacaagagagcagggccaaggacagaactcttaagggcaggggaaggagggaagaccattggtgtttaaggactccattcctc

SEQ ID NO: 6224 - DNA, 253 bp, Homo sapiens
tgtttctatatttccttagtaatcatcgtccctcatatggaaatacattggcagtgactaagccactttgagtatagagcagaagtccccagatgagtcatacaggccgttggtggaaggcttcatatttgaaagaaacaaattttatatggagatagtattatttatactcaaaatggctcctctatttaatctacaccttttataagtcagaggaattttttgacctggaggagaaaatcattaattccag

SEQ ID NO: 6225 - DNA, 440 bp, Homo sapiens
ttgagttcactcatttctccttcctttccttattgatcatgggattctgttgtagcagaaagatctgtttgtgttttcgtttatggatattgttttcagtgacagatcataaaatgcaactggaaaaacagtgtagacccaggtcacacagagcacaaggaagttcagaggaattcagtttccaattaaggaataaactctaaaggcccttttgaaggagtgtgatgggaatttgcattctgtaatgttaaatctcttgcttgcagcacttttttttttaagctacaatcctgtttcatagagtaagcaaaatttttaaatattgaaaacctaggaagtaatttagttatctgacattaggttttgagtaactatttagtatatctgcataaccagctgcctcatgcctgtttccccatgctacccttttccttcccagc

SEQ ID NO: 6226 - DNA, 519 bp, Homo sapiens
aatctggggcagcaatgtgctcagggagcgttccccaggagaagagcaaagactgatcgaaagcaacctgagccgccctgctcaccttgtctacgattacctggcagcagagggtgggcctgtgacccagatctggtaggtggggcctgagaggaagtggactggagggttaggtgcttcctccccagggagatgaagacattcaagagatggaaagtcgctcctgcgcttcttccctggaggctgtcttgagaggatatgatcctcccatctgtggcagtcatataagaataggagaaaggcaggtaaagtatagaaaagctaccttgagtcccagcatcactgagctgctgaattaacaaccctgggtccactaataccagtttcttgtttgcaaaataatgaattgtccttattgtctgcactcatttcagttgggcactctcatattttgtaaccaaaggcatcttacctattgcaacaaagaagaaataaagaactacaatttttctatcacat

SEQ ID NO: 6227 - DNA, 256 bp, Homo sapiens
aaaattctgtgttaatggtgcttttaaaataatttaaaaataactccatgtttttgccttagagtaagttaacttactgttttcagatagtagcatgacatatttctgtctgtgaaagcaaaatttattttaaattttatttccaaatatacatccagagaaagtaatttgtattttttttaaagtaggcatattacacaagagggaacatgtgaatatgtatcttaatgttgtacatattaaaattattcatcct

SEQ ID NO: 6228 - DNA, 470 bp, Homo sapiens
ccttgaagtttgacttgtctgttccctcaaatgtgtcgacacttctgaaatgttttctcctttggcacatcggtttgaacatccccagatgtctatggtgtacctcaaaatctggtccttgcagtcggggtgatatgacacatctgttgtctaatgtacctactgtgtgctcacggacaaagccaaataattaatctgggccgggattgttcatgctttcacagttcggttcggcattgatctcttcttgcagaaggcctatattgggaccaaactgggaatgcaacagggcaaagttggtctaaaaatcctctgggaattttccatttggcaattaaattttctgtagattacatctctctatcaattaccagtgtggcttttataatgttataaaatctgagcatagccagttacatttcttttaccctgagtctctgggtctttatctgaaaaattaaaggactaga

SEQ ID NO: 6229 - DNA, 467 bp, Homo sapiens
acaatttattagcattaggtacatttatattactgagcaactgtcaccactatccatcttgaaacatttttcatcttgcaaaactaaaactctgtattcattaaacagtaactccccactacggagctaggaaaaaggtcagaaaccaaagaaaacaagaaatacagccaaggtcaaacctagttagggcaacactatcactatagtcactactgaatactggatttcactgatagcataaaagttaccactgacatatgccaaattaactctaaagcatttctacttctttatttcacctgatttatattcatagtctcaagttggagaatcaaattagttgatcttaagctacttgttcatgtaccacctgccaaaaatcagaaaagttaagtcacctagacccaacaacttcattagtagtaggtaggattgctccaaaagaaaaaagagtttgatgagtagca

SEQ ID NO: 6230 - DNA, 208 bp, Homo sapiens
acttctggttgctttaaactaacttggttcaactcagggtctcttatattttctttaggggaatgaagtcagtttttcagtgttttgtgtgtttgacaacacagtgtcacaaagaaagtaattgatgctttattactttgcaaactcttcatatagtggagtcaaagcctcatgcagaaaacaataaatatacatatgtatgtgtgta

SEQ ID NO: 6231 - DNA, 437 bp, Homo sapiens
gcctaaaaaaaaaaaaaagaaagaaaaaagaaaatattcattccttttcttaaatgcataaaccacccagaaaatatataccttaaaaataaaaaaggggcttagtaaatattttatatttcactcaactggaattataatagaaagggaaactgttttattagaaaatttaccatttgcaggaaggtgtatgtgcctatgcacctcagtctttattaaggcaatggaggaaaaacagccaggaacaaggtgaaaagaagttcattcactgtctcagaaaataaagacctcagactttctaaatgaaaatataccattagcatcagatactaatcacaaggtagttatttttaaagaggttcctaagtaagacacacacacccatgacaccctgaggctaatctatgcacctagagacttattctgccctttgttgt

SEQ ID NO: 6232 - DNA, 393 bp, Homo sapiens
ttttcctagtcctccacagctttcctctgcaaaccttgcaccctaatctagctgtcatcattcatatctataaacttatagttctctttgttttagaagtttttaggtacgttagaaatgtcatcgctggcttttaattaatgttactaccttgacccacaagctatggttaacatgacaagttatggaaatcagaatgttatttagattcaatctctaggtatggagataagctcattttaacaatctttctttaataaactggatatgtgttgagaaaatgcaaactctaatagaaaagataaaaatattcattcatcctcaagaaatatttacctaggacctaaagagtattagtcatctctaccctattaagcagtgtagacaaaaaaa

SEQ ID NO: 6233 - DNA, 415 bp, Homo sapiens
ttttttttgagacagggtcttgctctgtcacccaggctggagtgcagtggtgcaatctcagctcactgcagccttgacttcccaggctcaagcgatcctccttcctcagctcccaccccccacctccacctccacctcagtcccactgcagctgggactacaggtgcgcaccaccatgcccggctaacttggatttttttgtagagacggggctttaccatgttacccaggctgggacgtgggtttgtttaaaaagccattcatagctgacggatggccaaggtggaggctcccggttggtggacgaggagggaccctggaagactgtggtccattcctctgtagttctggaaaaccagccaggaaggaagtttccacactggagcttggggtcaagtagcagcatcgcccaacc

SEQ ID NO: 6234 - DNA, 392 bp, Homo sapiens
accaaaagtcatagtgtccccagtaaacaaataatgctagagctaaagagaaaccataaggtaagcatctaagatcctttcattttcagatatacatgctttagaaaaattgtcttggcatggagactagcctttgggatctagtgccttgaaaaaaaatctgatggtaacatctctattttggtaaattgattcaagaaaaaggcaaagagacaaaaagcaattcaaactgctcatactctttagccctgggaagcctgcaccggcaggtttctggatatggtctattttagttcaaagtgcaatcacactgtataaaatataaagtcactaagaatgaggcatagcacaaataccctagggacctgacatcaggaattagggcaggtcac

SEQ ID NO: 6235 - DNA, 441 bp, Homo sapiens
  misc_feature (24)..(24): n is a, c, g, or t
ccacttcaccaccactccaattangataaagaagaaaacacttccatcaccctgttttcctcatcaaatttgattttagcacttttatttaattgtgctcttaaatttggcaatgagcagtaatttagcccatatgttggccgcctaaaccaatttaatgctaatattgattaactagtgtattcttatcaatctcaccctcatgcctgtaattctagtactttgggaggccaaggcaggaggattgcttgagcccaggagaccagactgggcaacatagcgagaccatttctacaaaaaaatcatttaaaaaaattagccagtcatagtggcacgcactcgtagtcccaattacccaggaggctgaggtgggaggatcgcttcagctcaggagatcaaggctgttacattctagcctgagcaacagagtgaaactgtctc

SEQ ID NO: 6236 - DNA, 176 bp, Homo sapiens
gaaggaaggaaggaaggaatcagagtatctaccacgttgtaagacaagtaagtattggccgggcttactggcacacacctgtaatctcagcactttgggaggccaaggcgggcagattgcttgagctcaggagtttgagaccagcctgggcaacatggtgaaaccccatctctaca

SEQ ID NO: 6237 - DNA, 765 bp, Homo sapiens
tgctggtttgtgtgtgaaaaacattttccccctcttctttccttaacctccttgttgcttaggatgaggagactctgtaatttaaagcagaggacgagaggaggaagaaacttccatgttaacatggcctactctcactcctttctaaacgagccacttttggcgtcagaagttgactggagagagataaacaaactcccagtcaaagcccctaaagcgacagtgcccagagttcttttattttttgctgcaaccaacgtaaacctgtaaaagaccaacagtgaagattagtgtattagtgaatgcatggaggccaatgctgccctaatgagacgtgataaaaagtccatcactcctctaagccaaaaggaaacaaaataaaaatgaccctttttactgtacaagggaagcctgtcttggtgtgtttgttgcttgactatcccaattcttgagtcctgggaggggtctgggaattgggaccttagcacatttggggaaaggaggggaatagagggaagagaaatcaaaggggctctcgcaaagttctggctaagaaggagagattggaagaaaagcaaggtcctgaccccccccagatccccactcacccattgcatgtggcattccccactactggccggtgcttagaggcccataaaacctctcttcacctaatccacctggcagagccctcagagatgacgtcagccaacccagctggactggccttacttctgcctttttcacctgtatgttaaaaaacaa

SEQ ID NO: 6238 - DNA, 223 bp, Homo sapiens
cagagagcctagaaaatatcaccttgtgaatatctacttccatgaagtcagtgacacatttttaggtcttaaacctcaatatttaaaatatttgtctctggaatttgaaaataagatgtatgctttgtttactggataaaaaggttaatcacttgttcatctgattagtaatcaaagtttctaaaatttatttaatacttgatgttactttatgttttatata

SEQ ID NO: 6239 - DNA, 197 bp, Homo sapiens
aatattatgatcagagaacagacttctttcatacaacttacccactaatctgttttgaaatgtctgttatcttttaacattatatgttttgtggccttcttctctttctttatgtattttcagtctggggtagtggtggtatagtacttcattcataatttgaaaatgcttattaaatcattctatatttcgaaaac

SEQ ID NO: 6240 - DNA, 1077 bp, Homo sapiens
cagtgcctgtgaagtggcctttggtgtggtctcagtggagacaggcagaggtgaaaatggcacgagagggaagccaggtgttctatcatcttcggatgcttttgcatgcaaagttaccaagggccacagagttattaggaaattaaaatttaaaacagggtatgaacattgggttgaataactaaactgcttccaagagtggaaatgctgagctgggcgtgctggctcacgcctgtaattccagcactttgggaggctgaggcgggtggatcacgaggtcgggagatcgagaccatcctggctaacacggtgaaaccccatatctactaaaaatataaaaaattagccagacgtggtggcgggcgcctgtagtcccagctacttggaaggctgaggcaggagaatggcgtgaacccaggaggcggagctttcggtgagctgagattgcaccactgcactccagcctgggtgacagtgtaagagtccatctcaaaaaaaaaaaaaaaaagagtgcaaatgcttagggcagtagaggcaggattgccgaaggagcagaggtagcccggtgaggagcttggtggttccttgggagaaaagcatagcgccgtcttcccagcgtgcatgaagggtgaggtggagcagacgtaatcatctttccatccatcagaagagtctgtgccagaaaacagtgacttcctgtggcaagacatcaagtgacttaagcaaacaaggaactgaggattgaaggaaaaaggctatctcgattttctggtattaatgataaaaggggattgtagcttattaatcagttgagtctggttccttaccttctgcccctgtgactgttatcttgtttctgaagtgtcagttggagatagcatttggtataatacttttaggattcctctgtttccatccacgggttgtgctgtcctaattgtagacaactagtaggaaaatgggagctctgatccctcctgttctgatgggctaaaatagacacataaactcattataccatctggactaatttcattgaccaaatcccattagaagaaaagcaaactatttggaaac

SEQ ID NO: 6241 - DNA, 771 bp, Homo sapiens
ggctccctcatccggcagctcgccgggtcctgccttcctggcctagaggagtcgggcaggacgggtccgttcaccctttctgctggttccggcacccccagcactggtcatcaatctgacccctttccacggacccgtcgcctgctggagcggcccctctgaatgcttgggactcccttccctgttacatggaagttacatgcctgggcttaaatcccgacgctgccatttactagccaagtaactttgggcacctctggtctccgtttcctctttttaaaaatcgggatcataatataagttagggtcacagtagaaacccctatattgtgttttggttaccccctcccacacacacacacatcctgggtgtattttttaaaacctatattgttaacttttgaatgaaaataagggcataggagcattgtctatccttgacacccagctattaatctctaaataccaccccccactaaaaggtaccaagtgatccttcgagaaatgactgatgccaggtcaggagctaggagtgaatgaggacaacttggaacatcttgtgtcagaagctcaggacgcctctcaagacgaacgaggtccttctaaaaggacatgggaaccagcctgaagttgcccactggccaaaattagaacaatttgagaatcaaaaataacaatgactgcaaactgaaaaatgattggaaactttaaacataaaaaagccattccccccaaagagtaatccaaattaaaaaaaaaactataacttca

SEQ ID NO: 6242 - DNA, 503 bp, Homo sapiens
actaatacagcagccagaatgatcatttaaaaacctagttataattctgctctaaccacttcgatggtttctgtcttagaatgaaatacaaaagatttatcttgttttgcacagcccttagtaatctagctcctggcttcctagcacctcttctttacctccccctcactcttatctctccttcaccatatttgtagtgatttaaaataccacttgcagcatgcactatgcatactgtacacatagggatgaaatgtatcttggaacacacttatttcaaatgatgctgttggtagactactttatacatctgataaagtagatgtaactcaccttaaacccccaacccctgtgttcataagccctcttactttattttctgctctatgcaagtatcaccttctcagagacggctttcctaaactaaccaccttacattaagaaaactacctttccctggccgggtgcgatggctcatgcctgtaatcctagcactttgggag

SEQ ID NO: 6243 - DNA, 467 bp, Homo sapiens
gctaggaaatgttcgaccttgtctccagggagaggaagtgggtttgctgtgcatctagccagcctctgccacactgcagttgagtgaaatctagttgtcactgaagacagctgacaaaatggataaaggtatttttttacaaatgtaaaaaatggctttcataagaagttataaatggacttataattttttgatatttcttaaagatatttcacctacttttcctctttatcaacggttaaaatatgaggcagcctcaagcacgttatttccaaaacaccttccttgacctctccagacaataagcagctcactgcatttacttctgtgctgggctaccccttagctgtaataactggttggcatacatctcacttggctcaaaactcagagggtgaagactatgtacagttcatcttttaatcaccagggcctaatgccaagaagataataaaaaaagatgtaat

SEQ ID NO: 6244 - DNA, 210 bp, Homo sapiens
ttatttaattagtatttttgaagtattttcactttaagctgaaattcattttaaatggaacttgacatcaataatgaaaatgaaaaaccagtatcacttgccacagatggtcattgtaaaggtaaatttgttgtaaaaacatattgtaatgaattgaatctaatttatttgtactatattattgagtactttgttatctcatgatttatt

SEQ ID NO: 6245 - DNA, 631 bp, Homo sapiens
agatgtgcacactcgcgagcagggatttttctggttcaggaaagtcctgcgtccttgggcgcactttcacaagtgtgagaaagccagttcaaatgtgacttcccgtgagaaaccctgcctggcctcccgccctccccggcactctcagcatgaatcatgctgcgttgtcactattgtcttgctcatctgtgcctgtcgcattccctgagttcctcctggcggggtctcggccttgttcatctttggacctggtggccagcacagagaatgtgctcaatgaatgtttgctggattgaatgacacaccctcaggtccaagtgggccatgcccctctgcctgcagcctggtggccgtcagggtcagggctcccatgctttctgatacccgggaggatgggtctctgaccatgggattttgaaatagcaatgagcctgaataacattttgagatactggcaacaacgaaagtgtggaatgaaacttcccgttatttctgctggctaacactaagtggttgccacctatgttcataatacaaggaactgctcagtttcaaccagaggtgagtgaaaacagatgtcattgttttcccatgtcagttcatgagccctctgggttgtattctcaggtcg

SEQ ID NO: 6246 - DNA, 411 bp, Homo sapiens
gagcagcagctccaccaaccccagttctgtgaccaacagcggcctcttaagtaaccgtttgtttcctcaaaataacactccacctttcacctagcaagaaggatggttatctgcatgggtgccatctttctgggccctccaaatgcggacagctcacctttgctgctaaaaacacctgcttcacctcccagctccaggtcattcctctgagatcttatggaaaagctctcagctaaattggacattaaatactagaggaatggattggttcacatactgggaaagtccagaggtcactggtgaatgcagggctccagttgtatcatcaggtcttagtttctctcctcctgactctgcctgctgctgtatcggcttcgttctcagtttgcacatgatgatcttctaggattg

SEQ ID NO: 6247 - DNA, 663 bp, Homo sapiens
  misc_feature (5)..(5): n is a, c, g, or t
  misc_feature (37)..(37): n is a, c, g, or t
cctgnttgtaaaatatgaggtgagtggagtgagacgntgacaaaacctactcctcccggctgctgtgaaatctacctactgttctgtgaacagataatttttttaagtaggaagcagtttagtctttgcagccccctacttctctttaattgctatgtagcaggcatgaggttaaagcataagctagcccagcgaggatgatgtgctacagtatttatttattttggaaggaagggtgtaattaaccctaaataacagcccttgtggcttgcagaggggagcctcctggccctatcaaaggcgggcagaacagggagggactgaggctgacatgaagtcacagataccgaaactatgtgcctgataatgatataattaggggatcagagatttctgacggctgcggacttcaaaagctttaaaagaagccagcagtctctcctgtagccatcttgactaaagcagacatttttgtttaatcactacatacagtaacgagaagggggcagaaacagaagggcattgttccacagtttcaaaataccagtcccctttctggccttttgcatgccacaggaagaaactttatgaacgacagaaatatagttttaatacagtggtacaaaagtccattctccttgcttaaaatgtggctccaattaa

SEQ ID NO: 6248 - DNA, 297 bp, Homo sapiens
ctgactctaactaaataaatcagaagaagaagaaaaaaagaaagactgaaggggaaacatgcagagttaattcacagaggagcctgccaagtggtctgggtggcagggagatgcacattaaaagaaaagtagatgtcctgccctagccaagtgtggtggggcacgcctgtaatcccagctactggggaggctgaggcaggagaattgctgaacccagaagccggagtttgcagtgagtctagatcgtgccactgcacttccagcctgggcgaccagagcaagggtctttgaaaaaaa

SEQ ID NO: 6249 - DNA, 514 bp, Homo sapiens
gccactgctttgtttggtatttcttgggttatttagttttttagtatatgaatcactgtcttataagtttgttgatggaaacagcatatgctatactttttccgctgtcttagattggaatacttaatgtattcctatttgtagaatgacttggctgtgcactaattttcacagagtagcaaaatttaaccctaccttattgttaagaaagggaaatggaggctgggcttggtggctcatgcctgtaatcccagcacttttgggaggccaagggggcagatacctaggacaggagttggagaccagcctggccaacatggtgaaaccctgtctctactaaaaatacaaaaaaaattagctgggcgttgtggcaggcccctgtaatcccagctgcttgggaggctgaggtaggagaatcacttgaacccaggaggcggaggttacagtgagccgagattgcgccattgcactccggcctggtcaccaagaaggaaactctgatgtaccccaacaa

SEQ ID NO: 6250 - DNA, 617 bp, Homo sapiens
aaaatagcatgttgtagtactattgcaggggatagggagctagtatgcattttagatatctaattggctcttattaatttgtgagacttagtaattattggaatatgaaatattctggcttcagaatttaatgagatgttagagaggcttgattttattgaacattttatatttttgccacctttgtgactgggaatactgagcatataatttatgtgataaaaatgagcatccgtgttcataaggtatcttgatatcattatcacctattttttgtttgctaaatgggcaagtaaaacctactcttcaaaccagaagatatataaccttgaagagataggaacaaagaggaatgatttcatactgatgaatattacgtgagcataagtaggttttattctaattattttgctagagttttgcattagggatgtttgtcatttttgaaatgacattttacttgagaaactgcttatacttttaaaaaaaactagttatacagtatgtgttgtggctcacgcctgtgatcccagcactttgagaggccaaggcaagagaataacttgagactaggagtttgagaccagcctgggtaacatagtgagacactgtctcta

SEQ ID NO: 6251 - DNA, 935 bp, Homo sapiens
caaaatagtaacagatagtaatacataacagtattgaactgtatactcaaagatgaataaaatggaaaattttttgggttttgaaaccacaaaagtagttttggttgacacagtggcttacacctctaatcccagcactttggaagactaaggtggaaggatcacttgattccaggagttccagacaagcttgggcaatgcagggagaccccatttctactaaaaattttaaaaattagctgactgtggtggtgtgcacttgtaatgccagctacttgggaggctgaggcgggaagattgcttgggcccaggagtttaacgcttcagtaaactatgatcacgtcactgcactccagcctgggtgacagagtgagactgtcatttaaaaaaagacaaaataataataactttaaaaaattaaaggtggtccatgcatggactaatgatgagaatgttcattaaccaaagaatttgaataatttatttttttctctacctaaagttcaaaaataaagcaagaaagaaagcaactaccaagacagggacttaccttgccttaagacacactataagaatagacaaacagatcagtgggacaaaatgcagatctcagagatggatgggaatttaatatataataaaggtgtaaccaccaatcaataagaaggtattcattgttaagtagattagttgagaaaactgactcaccacaaggagaaaaattaaaactagatttgtacataatactgaatacaaaggggactcaagataaagacctaattatgaaaggtaaagttatgaaactaatttttaaaatataagcaggctgggtgtggtgactcatgcctgtaatcccggcactttgggaggctgaggggggcagatcacttgagcctagaggttcaagaccagcttgggcaacatggtcaaaccct

SEQ ID NO: 6252 - DNA, 456 bp, Homo sapiens
tcacgtacacaacatgtgctgtgaatgtttgagccttgccctgctttctggctactcagatcctctactcaggagagagcctctacccatgccacttgggaggagagggatgtgcttaagcatgttcctatggtatgctgcttaggccccaaggaggaagcaggcagacactggggaagctacctggaggggtgcctggggagtagacctgcctgtcagcccatcacctccccagcctgtgcaggtcctgggcttgtcatggctctgtgggttccatttctactccttagccaggcagtcgaacccttctgcagctccaccactcctgccccacctgtactcatgcctttgcctgcacatcctccttcctttttcactcccctctccccttttctaacaccttggtgcagaggtgggagaattgcttgaggccaggagtttgagactccgtcttgg

SEQ ID NO: 6253 - DNA, 578 bp, Homo sapiens
gcaagaagtacacgcatccacaattgtagtaagagatttcaacacacctctcaataattgatagaacaagtagacagaaaaacaaccatcttggcctaattgacactacccagcaacacaatacttggaacatttaccaagatagaccatattctgggatattgagcaaggtgtgatatacgtatagaaattcaagtcatgcaaagtagaatagaaatcaataacagacacttggaaaaatctccaaatattataaaaaactagcacacttcccaataccttatgggtcagagaaaaaaatcaaaaggctattttgaactgaccaaaaatgaaaatacaacagtgtgtggcatgcagctgaagcagtacttggaagttttatagcattaagcacctatattagaaaaggatacaagtctcaatgactttagcttccatcttaacagaaaaagagcaagttagacaaagaggcagaaatgaaatattaaataccagaacagaaatgaatgaaacaaaacagagaaaataaagctaaaagctgatttgagagatcaataaaattgataaacctctagcca

SEQ ID NO: 6254 - DNA, 330 bp, Homo sapiens
ttcacagctttaatgatcactgttcctatcgggttatttatatttcacaactaaatcttatatatctggaggcgcccttgggatatccaataaggacagctgtttttatgctgctattgttgccgtggtcaccggccatgtggtgctggccctctttatgtatgtggtctggaatgaaggctcatgacagtgacatgaaggcaaacaggattaaagtgaacatcaccttttgatagcattaaattcattttttaaaatgataaatgctggaggggggacatctgatttgaataaaattgaaagaacatgttaaagtcagtcttaaggagt

SEQ ID NO: 6255 - DNA, 3177 bp, Homo sapiens
gtgtgactctgtgccagagcaattgactaaaactctcaggttttagatatcaagccaccggggacttcatgagccaagtcccttccattcctttccaggtgcatagaacttcccacaagagtgtcagcactgtgctttcatcccgagcatcttgtttctgtcattcttattcttctacccatcttcacagcaatcattttcttcacttttctttttttttttttttcgtcttggccattgcacaccctaagacaaagcaatccattttcgttgttgttgttgtttgtgtgtttgtttgttttttgagacagagcctcgatccatcatccaggctgcagtgcagcagcgccatcatgactctctactgcctcaacctctcaggcccgagcaatcctcccagcttcctgagtagctcgggcctcagggctggggtctcctggatacaatggagcagatgagccgggaggacatgctggccatctcaacacccgtcttgaccagtctggatgtgccccctgagatgatgcccaccgtcatagatgaatacctaggaagcaactcggacgcacaagccaaatgccaggcgttccaggaattcatgggtgacgtattcatcaatgttcccaccgtcagtttttcaagataccttcgagattctggaagccctgtctttttctatgagttccagcatcgacccagttcttttgcgaagatcaaacctgcctgggtgaaggctgatcatggggccgagggtgcttttgtgttcggaggtcccttcctcatggacgagagctcccgcctggcctttccagaggccacagaggaggagaagcagctaagcctcaccatgatggcccagtggacccactttgcccggacaggggaccccaatagcaaggctctgcctccttggccccaattcaaccaggcggaacaatatctggagatcaacccagtgccacgggccggacagaagttcagggaggcctggatgcagttctggtcagagacgctccccagcaagatacaacagtggcaccagaagcagaagaacaggaaggcccaggaggacctctgaggccaggcctgaaccttcttggctggggcaaaccactcttcaagtggtggcagagtcccagcacggcagcccgcctctccccctgctgagactttaatctccaccagcccttaaagtgtcggccgctctgtgactggagttatgctcttttgaaatgtcacaaggccgcctcccacctctggggcattgtacaagttcttccctctccctgaagtgcctttcctgctttcttcgtggtaggttctagcacattcctctagcttcctggaggactcactcccccaggaagccttccctgccttctctgggctgtgcggccccgagtctgcgtccattagagcacagtccacccgaggctagcaccgtgtctgtgtctgtctccccctcagaggagctctctcaaaatggggattagcctaaccccactctgtcacccacaccaggatcgggtgggacctggagctagggggtgtttgctgagtgagtgagtgaaacacagaatatgggaatggcagctgctgaacttgaacccagagccttcaggtgccaaagccatactcaggcccccaccgacattgtccaccctggccagaagggtgcatgccaatggcagagacctgggatgggagaagtcctggggcgccaggggatccagcctagagcagaccttagcccctgactaaggcctcagactagggcgggaggggtctcctcctctctgctgcccagtcctggcccctgcacaagacaacagaatccatcagggccatgagtgtcacccagacctgaccctcaccaattccagccctgaccctcaggacgctggatgccagctcccagccccagtgccgggtcctccctcccttcctggcttggggagaccagtttctggggagcttccaagagcacccaccaagacacagcaggacaggccaggggagggcatctggaccagggcatccgtcgggctattgtcacagagaaaagaagagacccacccactcgggctgcaaaaggtgaaaagcaccaagaggttttcagatggaagtgagaggtgacagtgtgctggcagccctcacagccctcgcttgctctccctgccgcctctgcctgggctcccactttggcagcacttgaggagcccttcaacccgccgctgcactgtaggagcccctttctgggctggccaaggccggagccagctccctcagcttgcggggaggtgcggagggagaggggcgggcaggaaccggggctgcgcgcagcgcttgcgggccagagtgagttccgggtgggcgtgggctcggcggggccccactcagagcagctggccggccccaggcagtgagggccttagcacctgggccagcagctgctgtgctcgatttctcgctgggccttagctgcctccccgcggggcagggctcgggacctgcagccctccatgcctgaccctccccccaccccccgtgggctcctgtgcggccggagcctccccaaggagcgccgccccctgctccacagcgcccagtcccatcgaccacccaagggctgaggagtgcgggtgcacagcgcgggactggcaggcagctccacctgctgccccagtgctggatccactgggtgaagccagctgggctcctgagtctggtggggacttggagaacctttatgtctagctaagggattgtaaatacaccgatgggcactctgtatctagctcaaggtttgtaaacacaccaatcagcaccctgtgtctagctcagtgtttgtgaatgcaccaatccacactctgtatctggctactctggtggggacttggagaacctttgtgtccacactctgtatctagctaatctagtggggatgtggagaacctttgtgtctagctcagggatcgtaaacgcaccaatcagcaccctgtcaaaacagaccacttgactctctgtaaaatggaccaatcagcaggatgtgggtggggcgagacaagagaataaaagcaggctgcctgagccagcagtgacaacccccctcgggtcccctcccacgccgtggaagctttgttctttcgctctttgcaataaatcttgctactgccc

SEQ ID NO: 6256 - DNA, 3785 bp, Homo sapiens
ttccaccttctgaagcttctgtcgaaccagttgtaaggagaatggagagagcagtgagagtggagtccggggtcctggtcggggtggtctgtctgctcctggcatgccctgccacagccactgggcccgaagttgctcagcctgaagtagacaccaccctgggtcgtgtgcgaggccggcaggtgggcgtgaagggcacagaccgccttgtgaatgtctttctgggcattccatttgcccagccgccactgggccctgaccggttctcagccccacacccagcacagccctgggagggtgtgcgggatgccagcactgcgcccccaatgtgcctacaagacgtggagagcatgaacagcagcagatttgtcctcaacggaaaacagcagatcttctccgtttcagaggactgcctggtcctcaacgtctatagcccagctgaggtccccgcagggtccggtaggccggtcatggtatgggtccatggaggcgctctgataactggcgctgccacctcctacgatggatcagctctggctgcctatggggatgtggtcgtggttacagtccagtaccgccttggggtccttggcttcttcagcactggagatgagcatgcacctggcaaccagggcttcctagatgtggtagctgctttgcgctgggtgcaagaaaacatcgcccccttcgggggtgacctcaactgtgtcactgtctttggtggatctgccggtgggagcatcatctctggcctggtcctgtccccagtggctgcagggctgttccacagagccatcacacagagtggggtcatcaccaccccagggatcatcgactctcacccttggcccctagctcagaaaatcgcaaacaccttggcctgcagctccagctccccggctgagatggtgcagtgccttcagcagaaagaaggagaagagctggtccttagcaagaagctgaaaaatactatctatcctctcaccgttgatggcactgtcttccccaaaagccccaaggaactcctgaaggagaagcccttccactctgtgcccttcctcatgggtgtcaacaaccatgagttcagctggctcatccccaggggctggggtctcctggatacaatggagcagatgagccgggaggacatgctggccatctcaacacccgtcttgaccagtctggatgtgccccctgagatgatgcccaccgtcatagatgaatacctaggaagcaactcggacgcacaagccaaatgccaggcgttccaggaattcatgggtgacgtattcatcaatgttcccaccgtcagtttttcaagataccttcgagattctggaagccctgtctttttctatgagttccagcatcgacccagttcttttgcgaagatcaaacctgcctgggtgaaggctgatcatggggccgagggtgcttttgtgttcggaggtcccttcctcatggacgagagctcccgcctggcctttccagaggccacagaggaggagaagcagctaagcctcaccatgatggcccagtggacccactttgcccggacaggggaccccaatagcaaggctctgcctccttggccccaattcaaccaggcggaacaatatctggagatcaacccagtgccacgggccggacagaagttcagggaggcctggatgcagttctggtcagagacgctccccagcaagatacaacagtggcaccagaagcagaagaacaggaaggcccaggaggacctctgaggccaggcctgaaccttcttggctggggcaaaccactcttcaagtggtggcagagtcccagcacggcagcccgcctctccccctgctgagactttaatctccaccagcccttaaagtgtcggccgctctgtgactggagttatgctcttttgaaatgtcacaaggccgcctcccacctctggggcattgtacaagttcttccctctccctgaagtgcctttcctgctttcttcgtggtaggttctagcacattcctctagcttcctggaggactcactcccccaggaagccttccctgccttctctgggctgtgcggccccgagtctgcgtccattagagcacagtccacccgaggctagcaccgtgtctgtgtctgtctccccctcagaggagctctctcaaaatggggattagcctaaccccactctgtcacccacaccaggatcgggtgggacctggagctagggggtgtttgctgagtgagtgagtgaaacacagaatatgggaatggcagctgctgaacttgaacccagagccttcaggtgccaaagccatactcaggcccccaccgacattgtccaccctggccagaagggtgcatgccaatggcagagacctgggatgggagaagtcctggggcgccaggggatccagcctagagcagaccttagcccctgactaaggcctcagactagggcgggaggggtctcctcctctctgctgcccagtcctggcccctgcacaagacaacagaatccatcagggccatgagtgtcacccagacctgaccctcaccaattccagccctgaccctcaggacgctggatgccagctcccagccccagtgccgggtcctccctcccttcctggcttggggagaccagtttctggggagcttccaagagcacccaccaagacacagcaggacaggccaggggagggcatctggaccagggcatccgtcgggctattgtcacagagaaaagaagagacccacccactcgggctgcaaaaggtgaaaagcaccaagaggttttcagatggaagtgagaggtgacagtgtgctggcagccctcacagccctcgcttgctctccctgccgcctctgcctgggctcccactttggcagcacttgaggagcccttcaacccgccgctgcactgtaggagcccctttctgggctggccaaggccggagccagctccctcagcttgcggggaggtgcggagggagaggggcgggcaggaaccggggctgcgcgcagcgcttgcgggccagagtgagttccgggtgggcgtgggctcggcggggccccactcagagcagctggccggccccaggcagtgagggccttagcacctgggccagcagctgctgtgctcgatttctcgctgggccttagctgcctccccgcggggcagggctcgggacctgcagccctccatgcctgaccctccccccaccccccgtgggctcctgtgcggccggagcctccccaaggagcgccgccccctgctccacagcgcccagtcccatcgaccacccaagggctgaggagtgcgggtgcacagcgcgggactggcaggcagctccacctgctgccccagtgctggatccactgggtgaagccagctgggctcctgagtctggtggggacttggagaacctttatgtctagctaagggattgtaaatacaccgatgggcactctgtatctagctcaaggtttgtaaacacaccaatcagcaccctgtgtctagctcagtgtttgtgaatgcaccaatccacactctgtatctggctactctggtggggacttggagaacctttgtgtccacactctgtatctagctaatctagtggggatgtggagaacctttgtgtctagctcagggatcgtaaacgcaccaatcagcaccctgtcaaaacagaccacttgactctctgtaaaatggaccaatcagcaggatgtgggtggggcgagacaagagaataaaagcaggctgcctgagccagcagtgacaacc

SEQ ID NO: 6257 - DNA, 3856 bp, Homo sapiens
ttccaccttctgaagcttctgtcgaaccagttgtaaggagaatggagagagcagtgagagtggagtccggggtcctggtcggggtggtctgtctgctcctggcatgccctgccacagccactgggcccgaagttgctcagcctgaagtagacaccaccctgggtcgtgtgcgaggccggcaggtgggcgtgaagggcacagaccgccttgtgaatgtctttctgggcattccatttgcccagccgccactgggccctgaccggttctcagccccacacccagcacagccctgggagggtgtgcgggatgccagcactgcgcccccaatgtgcctacaagacgtggagagcatgaacagcagcagatttgtcctcaacggaaaacagcagatcttctccgtttcagaggactgcctggtcctcaacgtctatagcccagctgaggtccccgcagggtccggtaggccggtcatggtatgggtccatggaggcgctctgataactggcgctgccacctcctacgatggatcagctctggctgcctatggggatgtggtcgtggttacagtccagtaccgccttggggtccttggcttcttcagcactggagatgagcatgcacctggcaaccagggcttcctagatgtggtagctgctttgcgctgggtgcaagaaaacatcgcccccttcgggggtgacctcaactgtgtcactgtctttggtggatctgccggtgggagcatcatctctggcctggtcctgtccccagtggctgcagggctgttccacagagccatcacacagagtggggtcatcaccaccccagggatcatcgactctcacccttggcccctagctcagaaaatcgcaaacaccttggcctgcagctccagctccccggctgagatggtgcagtgccttcagcagaaagaaggagaagagctggtccttagcaagaagctgaaaaatactatctatcctctcaccgttgatggcactgtcttccccaaaagccccaaggaactcctgaaggagaagcccttccactctgtgcccttcctcatgggtgtcaacaaccatgagttcagctggctcatccccaggggctggggtctcctggatacaatggagcagatgagccgggaggacatgctggccatctcaacacccgtcttgaccagtctggatgtgccccctgagatgatgcccaccgtcatagatgaatacctaggaagcaactcggacgcacaagccaaatgccaggcgttccaggaattcatgggtgacgtattcatcaatgttcccaccgtcagtttttcaagataccttcgagattctggaagccctgtctttttctatgagttccagcatcgacccagttcttttgcgaagatcaaacctgcctgggtgaaggctgatcatggggccgagggtgcttttgtgttcggaggtcccttcctcatggacgagagctcccgcctggcctttccagaggccacagaggaggagaagcagctaagcctcaccatgatggcccagtggacccactttgcccggacaggggaccccaatagcaaggctctgcctccttggccccaattcaaccaggcggaacaatatctggagatcaacccagtgccacgggccggacagaagttcagggaggcctggatgcagttctggtcagagacgctccccagcaagatacaacagtggcaccagaagcagaagaacaggaaggcccaggaggacctctgaggccaggcctgaaccttcttggctggggcaaaccactcttcaagtggtggcagagtcccagcacggcagcccgcctctccccctgctgagactttaatctccaccagcccttaaagtgtcggccgctctgtgactggagttatgctcttttgaaatgtcacaaggccgcctcccacctctggggcattgtacaagttcttccctctccctgaagtgcctttcctgctttcttcgtggtaggttctagcacattcctctagcttcctggaggactcactcccccaggaagccttccctgccttctctgggctgtgcggccccgagtctgcgtccattagagcacagtccacccgaggctagcaccgtgtctgtgtctgtctccccctcagaggagctctctcaaaatggggattagcctaaccccactctgtcacccacaccaggatcgggtgggacctggagctagggggtgtttgctgagtgagtgagtgaaacacagaatatgggaatggcagctgctgaacttgaacccagagccttcaggtgccaaagccatactcaggcccccaccgacattgtccaccctggccagaagggtgcatgccaatggcagagacctgggatgggagaagtcctggggcgccaggggatccagcctagagcagaccttagcccctgactaaggcctcagactagggcgggaggggtctcctcctctctgctgcccagtcctggcccctgcacaagacaacagaatccatcagggccatgagtgtcacccagacctgaccctcaccaattccagccctgaccctcaggacgctggatgccagctcccagccccagtgccgggtcctccctcccttcctggcttggggagaccagtttctggggagcttccaagagcacccaccaagacacagcaggacaggccaggggagggcatctggaccagggcatccgtcgggctattgtcacagagaaaagaagagacccacccactcgggctgcaaaaggtgaaaagcaccaagaggttttcagatggaagtgagaggtgacagtgtgctggcagccctcacagccctcgcttgctctccctgccgcctctgcctgggctcccactttggcagcacttgaggagcccttcaacccgccgctgcactgtaggagcccctttctgggctggccaaggccggagccagctccctcagcttgcggggaggtgcggagggagaggggcgggcaggaaccggggctgcgcgcagcgcttgcgggccagagtgagttccgggtgggcgtgggctcggcggggccccactcagagcagctggccggccccaggcagtgagggccttagcacctgggccagcagctgctgtgctcgatttctcgctgggccttagctgcctccccgcggggcagggctcgggacctgcagccctccatgcctgaccctccccccaccccccgtgggctcctgtgcggccggagcctccccaaggagcgccgccccctgctccacagcgcccagtcccatcgaccacccaagggctgaggagtgcgggtgcacagcgcgggactggcaggcagctccacctgctgccccagtgctggatccactgggtgaagccagctgggctcctgagtctggtggggacttggagaacctttatgtctagctaagggattgtaaatacaccgatgggcactctgtatctagctcaaggtttgtaaacacaccaatcagcaccctgtgtctagctcagtgtttgtgaatgcaccaatccacactctgtatctggctactctggtggggacttggagaacctttgtgtccacactctgtatctagctaatctagtggggatgtggagaacctttgtgtctagctcagggatcgtaaacgcaccaatcagcaccctgtcaaaacagaccacttgactctctgtaaaatggaccaatcagcaggatgtgggtggggcgagacaagagaataaaagcaggctgcctgagccagcagtgacaacccccctcgggtcccctcccacgccgtggaagctttgttctttcgctctttgcaataaatcttgctactgccc

SEQ ID NO: 6258 - DNA, 292 bp, Homo sapiens
catgactctttcatttgtccccagaaaatcgcaaacaccttggcctgcagctccagctccccggctgagatggtgcagtgccttcagcagaaagaaggagaagagctggtccttagcaagaagctggtatggccacccttttggggatggtgccgggcaatggcacagagggggttctatccatcccctgcaggagcagaggggcagtctacccccaggtggggctggggacagcagctcatgaggggaaggggctgagggcttggagacagaaatggagggccatctccat

SEQ ID NO: 6259 - DNA, 474 bp, Homo sapiens
acccaaggggctggatttgactagacagccatcttggctcgtctcaccataaatttatttacacaaagctccatgggcactcagccactgtctatccagcccatttatcgagtagttatcccctcactctcctgtgtcatcagtgctctctttatgcttgctctttctatcagcacacatttgtgatatatttctcatctttataaatgaaaacctcatttggcccctcatccctttccagctcctgtctcattgctcttctcccatttatagcaaaagtcttctaaaaaaaattgttgcttagattcactgtctttatttctttagtagttatcccctcactctcctgtgtcatcagtgctctctttatgcttgctctttctatcagcacacatttgtgatatatttctcatctttataaatgaaaacctcatttggcccctcatccctttccagctcctgtctcattgctct

SEQ ID NO: 6260 - DNA, 476 bp, Homo sapiens
tattactgaattatataacatttggagatttcccagttatatttttattaatgtactaatttatgtcctccatgttaaaacaacagagtctgtgattttaatctactgaaatgtgttgagaaatgctttatgtcccaggatctggtcaattctggtaaatgtttcaagtacattaaaaagaatacagttcttgggcacagcattctacattcatccatttccagcggtttgctaatattgttcatatcttctgcagccttactgagttttgatatcatgttggtattattgataccagtattacttattcttcttcctgaaacactaaaatgaatcattttgtccaagcacggtggctcatgcctgtaatctcagcactttgggaggctgaggtgggaggatcctgagtccaggagttcaaggtcagcctggacaagagagcaagaacccccatctctacaaaaaaaaatgaaatt

SEQ ID NO: 6261 - DNA, 322 bp, Homo sapiens
ttacaatcttatgggaccactgtcctatgtgcagcctattgttgattgaaatgtcactactggacacatgactgtgttgtctaatttgtatatttgttcctagcctgtgtctcccctccagagtgtaggtccctgagggcagtcacctgatctgtctcagtcactgcagtgtccccaaacagagcaccgcctcaggcacacagaggtaagcatgcatcgatcacaccaacgatgcaggaatgtcctgacacaccaggcagctgctgtgtgttctcgggctggttacttaacttgcaggagcctcaggagcctcattggtcaa

SEQ ID NO: 6262 - DNA, 919 bp, Homo sapiens
tgttttcagtagggatggggtgtttcactatgttggccaggctggtctcaaactcctgacctcaggtgatctgcccaccctggcctcccaaagtgctgggattaaaggcgtaagctaccgtgctggggctaaatatattttcttgtgctctggagtatttcagagttactgaatgaggttaactaattcatgcagggcttttacttttttttattattatacttaaagttctgggatacatgtgcagaacgtgcaggtttgttacgtaggtatacacgtgccatggtggtttgctgcacccatcaacccatcatctacctcaggtatttctcctaatgctattcttcctctagcccccacccctcaataggccatggtgtgtgatgttcccctccctgtgtccatgtgttctcactgttcaactcccacttatgagtgagaacatgtggtgtttggttttctgttcctgtgttagtttgccgagaatgatggtttccagcttcatccatgtccctgcaaaggacatgaacttatcctttttcatggctgcacatagtattccatggtgtatatgtgccacgttttctttatccagtctatcattgatggacatttaggttggttccaagtctttgctattgtgaatagtgctgcaacaaacatacatgtgcatgtgtctttacagcagaatgatttataatcttttggatatatacccagtaatgggattgctgggtaaaatggtatttctgcttccagatccttgaggaatcgccacattgtcttccacaatggttgaactaatgtacactgccaccaacagtgtaaaggggcttttactttttaatgaaatttatgagtaagggaatgaaatgacatctgtgtctttctcctgaaattcaacacactccacctgtac

SEQ ID NO: 6263 - DNA, 398 bp, Homo sapiens
tgtctttttaatataaaaggtgttaacagctatgtattgttctgcaaatttgttagtctgtgtgtcctgcaggctctttatatcagggcatatatacttacattattaattttaatagctatatgttatccagtagacttagaataaaatcccaaattcttacttgatggcatctatggagtatggccacctcatctctcattgcatcctcctccttacccactcctttctgctcacactgggctgtgtcttgatgtttctgggaacacgtgggaacacaaacccacctgtctccttggactgaggaaggctccagtccttcaatattttcttgcctcatttccttactttattcaagtctctactcaaatacagcctcatcagaagttccttgatgt

SEQ ID NO: 6264 - DNA, 793 bp, Homo sapiens
tttattttgtgtttttacaacatgcaggtgctgctccaaaaaagtttttcaaaaaaaaaaaaagagaaagaaagagagagaaagaaaaacatgtattgcagtgagggtatttatgttcaaagttcagaaatttgtgggcattaactgagacctggaatccctgccattcagctgaccctctgccctgcccaacattcttcactgttaaatgcctaagaataatagcctcctccacctgcaccccagcaaagtgaaacatatttccctggctgggttttaagtcaagctaaacaccagcagacctaagcgtggtacctgcatcacttggccgtccagagaaagagacacactggctttgaattcttttggaacttctttgagccagaaaatatcgactcctagcaggcccagcacaggcgctgttgtacatgctctctgggtctgtactgatcaatgacaattttggtaaacactgcctgaataattcatcatagaaaaaagctttcgaattaaatgatattactggggcttccagcacaaacacacacgtgttcccgaaaagctagtccagctggaagactgcttggaataaccacgatgatacccaagctaagccccccattttataaattgtaatgagtcatctacctaccctaccctcagtcataggaaaatgctgttggagcctcagccaggtgttccagcagcatgcacctggcacatcttgctatggcttctcatggtaaaatgctaccatggttaacccaacgcggcagcatgcagcgatctaaaa

SEQ ID NO: 6265 - DNA, 694 bp, Homo sapiens
cctcgctttctattctgagctgaatgggagcagaatatttctatttttacatttttgatagttatgagaaaacatcaaaaaaataaagcactgaaaatacatagatggcaaaaattattatagataagattacatgcataatttctttgcagaaaagctctggtattaaacaaaactgaagaacatttccctgacaaacattttttcaatgactttaatcattcaatactacagcataataacaacttccttgattgatggatagtgtgccccaatactgcttgtgataaatataatataatataattaatgtaatatcatattctgttttgatatcacttggtgcatttctgactgtatttaagcttagagaaaatttgctagtggtaaggaggaaaaagaagagtctcttgtactttgattgtaaactggacaacataaatggatgaagatgaattctgactgggtttataagaaactgaagttctaagggtaaagttagatggctattgtctctgaaaactttaggtgaagaacctcttttttttgaggttgggtatcctgaaaaactgaattgtcacttctgtgcttaattaaacctgaaactgcaaagataaaaatgtgttgtcatcctagatcaactaaatctgtcagaaaaaaagtacaaaataaataaaaaatggaagaaaatgtc

SEQ ID NO: 6266 - DNA, 465 bp, Homo sapiens
cgcccagacctaaactgtcaaatacttaagacttagaaagagcgatgaaaacctctttgaacatacagctttcagtatttgttttggagacttgaattttgttttaaagagcctcggataaaggttattttatttttatttttatagagaccaggttttgccatgctgcccagggtggtctcaaactcctgggctcaatccatccacctgcctcgcccttccaaagtgctgagattacaggcatgagccactgcacctggccaagaaattattttgttatccaaaataaatgcagtctttttcaggccatcagttcatattcctgtagtagatttatatttgaagttcttccgatgcctggcatattcataatcatggttcttccctgttaaagtaatcacctagtctataagtacaagttcaagattgtcgcaaatttcttcttgaatagaatctagagatcac

SEQ ID NO: 6267 - DNA, 914 bp, Homo sapiens
catcacggtgattgtcaactgtcatggcaaccagtgggaatgtcatttagtactgaagttggattagaatgaagctagaggttcttcagaggtcgagtaagctaagaaggaacctatgaccacagacaacctgttttctaaaaataagcagagttaaatctgagtaggaatttagctatgtcatggaggcattgcattgggtaacaaaagccaggtaggcgtccagctaagtcccctaggccctgcaacgggtaacagcagtactgactctatgttagagaaaagcttgcttgcttgagtataattattgttttgcctgagtttgtaaactattcactaaaaacagccacagaaaaaaacaggaccttcttcaacagataaaacacacagacccgcagctttgggaacaggctgatggcccctgcacagtctagtcacaaggcattgaccaagaaagtaatgactaactgcccatctgagactgtgcatgattcacaagaatgtttctttgttttgttttttgagacagtcttggtctgtctcccaggctggagtgcagtgatgttggttcgctgtagcctctgcctcctgagtagctgggactacaggcgtgtgccaccgcacctggctaatttttgtatttttagtagagatgatgtttgactatgttggccaggatggtctcgaactcctgacctcaagtgatccacctgcctcggcctcccaaattgctggggttacaagcatgagccaccgctcctggcccacaagaatgttttgatcattatttctcctaattttccttaaaatccctggatctagaggcacaactgagaaaggtggtctttgaatgctagtgcactgccttttgcaggttgctggtttctcgaataaagctaactttgctttcacca

SEQ ID NO: 6268 - DNA, 424 bp, Homo sapiens
aaaaaaagggagatgctcttaaacacacacttgtttccactgggtaacagtaagaaatgaggaatttcatttaagccttactgcttcctacaaattgcataatattagattacaccaacatgcaattggccaagtttttaaaaacctgacttgtttttggttgtggaaaacactgttaataaagaagagttatttttgctatgggatggtggctttggagtgttgatttgactgctctgttgactttgaagtaaattcaaagtaaatacattttggttgcatctgagaacaggtgcgttttgagattctccgtgttggtgtagttggggcagggctgccttcacaatgtgctgtgcatggtgaccatttgctcccgtgttcacgttttgcccaatgctctgtcacatgaatgccgttcaagctc

SEQ ID NO: 6269 - DNA, 290 bp, Homo sapiens
tttttgtagagatggggtcttgctctgttgcccaggctggtcttgaactcctagcctcatgcgatcctcctgcctccacctctcaaagcatgaggatataggtgtgagccactgtggccagccctcatttaacatttattgagcattaacccctctgctaggcactgggtgtgtgctgaatatgacttggtctctatactcaggtttgcagccataaagagatattatcacaattctaatatggaaacatctagacaacgccaccgtggtctgtgcaaatgtgctcctag

SEQ ID NO: 6270 - DNA, 463 bp, Homo sapiens
aacacagggcagagcttttctgtctgtggagggggcaccagggaaaactttgcagagatggtgccatttgaatcaactcaatcttaaagaattcctcttgaatttttcttcaagactgatttggatgaaaatggctatacttggtcctcgtgaggaatcaatgacataataaaagtatgctaaaaagcataaaaaacaatataaatagtctattagtaatgaaatgattcatgggcatgaatattacagatctagttctaatttttgattgcctgtttattaatgtttttttctttttgataatgaattatgagtgcagttatttgagaactgattgtaagactgtagttaaaagtgggagaggccaggcacagtggctcacacctgaaatcctagcactttgggaggctgaggtgggaggattcaagaccaacatagcaagaccctgtcttaaatctaaaag

SEQ ID NO: 6271 - DNA, 372 bp, Homo sapiens
gaggctgtgtggcagtttaaacacagtttccactgccttccctttccctaaagagtaaacacaggagataatactttctaacaactcatcgttatcaagggcctactatgtgctgcttgttttggctgcatgcgtaaacacatctcagacattgtctcactggatactgttttaaggagcctaatgtggccccagtaattatgaaaacctttgaaatgtctggatctctaagaaattagaaaaaggagggaatggctgagcatgggggctcatgcctgtaatctgtgttttgggaggccaaggtgggaggatggtctgagcccaggagttcaggaccagcctgggtgacatagtgagaccctgtctgtacca

SEQ ID NO: 6272 - DNA, 1545 bp, Homo sapiens
  misc_feature (432)..(432): n is a, c, g, or t
  misc_feature (439)..(439): n is a, c, g, or t
  misc_feature (544)..(544): n is a, c, g, or t
  misc_feature (652)..(652): n is a, c, g, or t
  misc_feature (682)..(682): n is a, c, g, or t
  misc_feature (738)..(738): n is a, c, g, or t
gcctctcagggttcttggtgggaccatagctcagatggcagcaactgaaaggacagaactgctgcccagatgagatcccatgatgtgtgttctaaatcggcctttagtaatggtgcaggtggcctggtgccctcagcctcaccgcaccacccttttgccttttggtgatgaggctaagtacatgcttgccatatgttgaggtgggggtgggtcagtgcctctccaggggtgagtagttctgcactggccctgcgtatgggtgaggctaaaggaggaggccgcgcagtggggcaggcaacatccaactgctttagcctttttgcccacgtattttcaggatattggctttcagattgcaggtatatgactctgcttgatttttgcagttggcccgatgtgcacctcagccattttctattgattctgtagaangggactnaaacttacattcagtagaaaattacgtgtgtgtccatatgcctatctgtgcacacacacacaaatatatttgtgtgtatacacatatatgcaaatgcatggaaangtaggagggagggaagtggaactggttggggtggggtggtgctgaaggagaactttaatattttattttaaatacttatttttttttgagacggagtcttgctctatngcccaggctggagtgcagtggcgcgatctnggctcactgcaagctccgcctcccgggttcacgccattctcctgcctcagcctccngagtagctgggactacaggcgcccgccaccatgcccggctaattttttgtatttttagtagagacggggtttcaacgtgttagccaggatggtctcgatctcctgaccttatgatccacccgtctcggcctcccaaagtgctgggattatgggcgtgaccaccgctcccggccattttttgtgtttaaattttttttttttttaaatcaaaacaccagaaacccctctgtgtagggcagaggttcttaagcagtgaggggcacctgcaggatctgttccagcagacagctggccccaaatcctggctttctgggtcaagagggctgggtggggcccaggagctgcctctcgaacaagttccagggaggctgctgaggtggggcctgcccttcagaagcccgggtctggtggagagactgggagagtcctgagtgactcgtctgcatttgcagcacctgtctgaagagaggcatggagattagagctttcttctctccctacaaccccatcctctttctgagcatttcccagctgcacgtggctgtgaggaacacggggcctgcagtatttcaggagtggctgtatcaatgtgttttctctttttagccaggaagaccaacaaacaggtgtttgtcagctataaccttcagaacacagacagtaacttcgcattacttgtagaaaacaggatcaaggaagagatggaggctttccccgaaaagttctagctgagtggcagaagtgagaatttgtaaacttatgtacaatgtacgtgtaaataaatggattgaatttcagtttgtcatc

SEQ ID NO: 6273 - DNA, 513 bp, Homo sapiens
ggcggggctggcagcggcgaggacccgggtctggcgctgtgggccgggagccgtggggcggcatggaggggctggttgtcgccgccggcggggacgtctccctgcacaacttcagcgcgaggctgtgggagcagctggtccacttccacgtcatgcggctgacggactcgctgttcctgtgggtgggggccacgccgcacctgcgcaacctcgccgtggccatgtgcagccgctacgactccatccccgtgtctacctccctccttggagacacttccgacacgacctctactggccttgcccagcgcctagccaggaagaccaacaaacaggtgtttgtcagctataaccttcagaacacagacagtaacttcgcattacttgtagaaaacaggatcaaggaagagatggaggctttccccgaaaagttctagctgagtggcagaagtgagaatttgtaaacttatgtacaatgtacgtgtaaataaatggattgaatttcagtttgtcatc

SEQ ID NO: 6274 - DNA, 847 bp, Homo sapiens
ggcggggctggcagcggcgaggacccgggtctggcgctgtgggccgggagccgtggggcggcatggaggggctggttgtcgccgccggcggggacgtctccctgcacaacttcagcgcgaggctgtgggagcagctggtccacttccacgtcatgcggctgacggactcgctgttcctgtgggtgggggccacgccgcacctgcgcaacctcgccgtggccatgtgcagccgctacacagggagtgagcctgcggtcggcctgaggtatcctgcaactgcaagcactaaataagctcctgactcatctctcccctgtggctgatgcagaagctgatcctggagaaactaaaaccttctgcacagcaaaggaaacaatcaacagactgaaaagacaacctacagaatgagagaaagtctttgcaaactattcatctgacaggggattaacatctagaatatatgaggaactcaaacacctcaacagcaaaaaaagaaacaacctgatttttaaaatggacaataatctgaatagacatttcttaaaagacacaaatggccaacaaacatatattaaaaaaagctcaacatcactaatcatcagaaaacacaaatcaaaaccacaatgaggtatcaactcacctcagttaggatggctattatcaaaaagacacacacacaaaaatgctggcaaggatgtggagaaagggaactcttatatgatgttggtgggaatgtaaactagtacatcaactatggagaacagtacagaggttcctcaaaaaactacaaacagaattacctcatgacccagcaatcccactactggtgtttatccaaaggaaagga

SEQ ID NO: 6275 - DNA, 412 bp, Homo sapiens
ggcggggctggcagcggcgaggacccgggtctggcgctgtgggccgggagccgtggggcggcatggaggggctggttgtcgccgccggcggggacgtctccctgcacaacttcagcgcgaggctgtgggagcagctggtccacttccacgtcatgcggctgacggactcgctgttcctgtgggtgggggccacgccgcacctgcgcaacctcgccgtggccatgtgcagccgctacgactccatccccgtgtctacctccctccttggagacacttccgacacgacctctactggccttgcccagcgcctaggtatgtacccacagctggcgctgcatggccagccaggtggggcccactctttaatggaaccatgaagcaagtcccttcggaagtaaagcatctttatgct

SEQ ID NO: 6276 - DNA, 337 bp, Homo sapiens
ctgcataggagcccaacatcaccagcttaccacgtattggtcattctctttgaggagcagggccatactgacggcttacatgtgcgctctggtggaagtaggatgtttggtggcagcaggagcaaaatcaactctgccaggaagaccaacaaacaggtgtttgtcagctataaccttcagaacacagacagtaacttcgcattacttgtagaaaacaggatcaaggaagagatggaggctttccccgaaaagttctagctgagtggcagaagtgagaatttgtaaacttatgtacaatgtacgtgtaaataaatggattgaatttcagtttgtcatc

SEQ ID NO: 6277 - DNA, 846 bp, Homo sapiens
ggcggggctggcagcggcgaggacccgggtctggcgctgtgggccgggagccgtggggcggcatggaggggctggttgtcgccgccggcggggacgtctccctgcacaacttcagcgcgaggctgtgggagcagctggtccacttccacgtcatgcggctgacggactcgctgttcctgtgggtgggggccacgccgcacctgcgcaacctcgccgtggccatgtgcagccgctacgactccatccccgtgtctacctccctccttggagacacttccgacacgacctctactggccttgcccagcgcctagccaggaagaccaacaaacaggtgtttgtcagctataaccttcagaacacagacagtaacttcgcattacttgtagaaaacaggatcaaggaagagatggaggctttccccgaaaagttctagctgagtggcagaagtgagaatttgtaaacttatgtacaatgtacgtgtaaataaatggattgaatttcagtttgtcatcaggccgcgctcccgttttgtttttaaggggttaatcttttgagcttccttctcagcagtgtgtgggccaaaaggctcatactgacccacctggtgaaggagaggcaaagtgggcagtatatacttcctcatttggctgtgagtgatagagggatgaaatgggatttttgttgggattgaagactgtaatctaagagtttcaatcagacatgactgtaacgtgcatcctcaattagaattaaagtgatatataaataaaaaaaaagtcgacgcggccgccaatgtaggggtcacagtctacccgctaattccggaccgggacctgcttgcgaac

SEQ ID NO: 6278 - DNA, 1878 bp, Homo sapiens
  misc_feature (432)..(432): n is a, c, g, or t
  misc_feature (439)..(439): n is a, c, g, or t
  misc_feature (544)..(544): n is a, c, g, or t
  misc_feature (652)..(652): n is a, c, g, or t
  misc_feature (682)..(682): n is a, c, g, or t
  misc_feature (738)..(738): n is a, c, g, or t
gcctctcagggttcttggtgggaccatagctcagatggcagcaactgaaaggacagaactgctgcccagatgagatcccatgatgtgtgttctaaatcggcctttagtaatggtgcaggtggcctggtgccctcagcctcaccgcaccacccttttgccttttggtgatgaggctaagtacatgcttgccatatgttgaggtgggggtgggtcagtgcctctccaggggtgagtagttctgcactggccctgcgtatgggtgaggctaaaggaggaggccgcgcagtggggcaggcaacatccaactgctttagcctttttgcccacgtattttcaggatattggctttcagattgcaggtatatgactctgcttgatttttgcagttggcccgatgtgcacctcagccattttctattgattctgtagaangggactnaaacttacattcagtagaaaattacgtgtgtgtccatatgcctatctgtgcacacacacacaaatatatttgtgtgtatacacatatatgcaaatgcatggaaangtaggagggagggaagtggaactggttggggtggggtggtgctgaaggagaactttaatattttattttaaatacttatttttttttgagacggagtcttgctctatngcccaggctggagtgcagtggcgcgatctnggctcactgcaagctccgcctcccgggttcacgccattctcctgcctcagcctccngagtagctgggactacaggcgcccgccaccatgcccggctaattttttgtatttttagtagagacggggtttcaacgtgttagccaggatggtctcgatctcctgaccttatgatccacccgtctcggcctcccaaagtgctgggattatgggcgtgaccaccgctcccggccattttttgtgtttaaattttttttttttttaaatcaaaacaccagaaacccctctgtgtagggcagaggttcttaagcagtgaggggcacctgcaggatctgttccagcagacagctggccccaaatcctggctttctgggtcaagagggctgggtggggcccaggagctgcctctcgaacaagttccagggaggctgctgaggtggggcctgcccttcagaagcccgggtctggtggagagactgggagagtcctgagtgactcgtctgcatttgcagcacctgtctgaagagaggcatggagattagagctttcttctctccctacaaccccatcctctttctgagcatttcccagctgcacgtggctgtgaggaacacggggcctgcagtatttcaggagtggctgtatcaatgtgttttctctttttagccaggaagaccaacaaacaggtgtttgtcagctataaccttcagaacacagacagtaacttcgcattacttgtagaaaacaggatcaaggaagagatggaggctttccccgaaaagttctagctgagtggcagaagtgagaatttgtaaacttatgtacaatgtacgtgtaaataaatggattgaatttcagtttgtcatcaggccgcgctcccgttttgtttttaaggggttaatcttttgagcttccttctcagcagtgtgtgggccaaaaggctcatactgacccacctggtgaaggagaggcaaagtgggcagtatatacttcctcatttggctgtgagtgatagagggatgaaatgggatttttgttgggattgaagactgtaatctaagagtttcaatcagacatgactgtaacgtgcatcctcaattagaattaaagtgatatataaataaaaaaaaagtcgacgcggccgccaatgtaggggtcacagtctacccgctaattccggaccgggacctgcttgcgaac

SEQ ID NO: 6279 - DNA, 998 bp, Homo sapiens
ggcggggctggcagcggcgaggacccgggtctggcgctgtgggccgggagccgtggggcggcatggaggggctggttgtcgccgccggcggggacgtctccctgcacaacttcagcgcgaggctgtgggagcagctggtccacttccacgtcatgcggctgacggactcgctgttcctgtgggtgggggccacgccgcacctgcgcaacctcgccgtggccatgtgcagccgctacgactccatccccgtgtctacctccctccttggagacacttccgacacgacctctactggccttgcccagcgcctaggaaggactgtcctcactcagtgtgataccgttcagggctcggagggaagactggcctggcctgtgagtgtggcgtagagtggggattaagcaaaggtcatgaggctgaatgctccactcttcccacaccccaacacacttcctgtgggccagccaggaagaccaacaaacaggtgtttgtcagctataaccttcagaacacagacagtaacttcgcattacttgtagaaaacaggatcaaggaagagatggaggctttccccgaaaagttctagctgagtggcagaagtgagaatttgtaaacttatgtacaatgtacgtgtaaataaatggattgaatttcagtttgtcatcaggccgcgctcccgttttgtttttaaggggttaatcttttgagcttccttctcagcagtgtgtgggccaaaaggctcatactgacccacctggtgaaggagaggcaaagtgggcagtatatacttcctcatttggctgtgagtgatagagggatgaaatgggatttttgttgggattgaagactgtaatctaagagtttcaatcagacatgactgtaacgtgcatcctcaattagaattaaagtgatatataaataaaaaaaaagtcgacgcggccgccaatgtaggggtcacagtctacccgctaattccggaccgggacctgcttgcgaac

SEQ ID NO: 6280 - DNA, 501 bp, Homo sapiens
cagctgtggaagagtccaggcactcaggcgtggcatcttggttcaccctttcttgcttccgaggctgcattcaagccccaatgagaacaaaaccatgtgtgtggggaggggcgtggggggtgtcggcagttttagtttttcagaagtgacgtttgttggcagatggctccctgtcctccaggcagtcactcatggactggccagtggacaggccctttctataagaacccagccagccttccctctcccaaaccctgtcactgcctgggcttcatccagggagctagaaatagggtttgcactgatgtgtggaagcagcctctccttgccttctgtgctcctcctgtggctgcaggagtgtggctctgggtgtctgtgtgtggtggacggtaaattcgctgcccagtcaggtcccacaaggccacggggctcagtcacagccagtggggagaaccatggtgagccatgcaggttgagaacaggaccagtgcatttgcgaga

SEQ ID NO: 6281 - DNA, 733 bp, Homo sapiens
gctattttaccaacattgatcaagctctggttgagccttgtacaggatattataggctttaaaagaagaagaagaaagacctggtatgctgtacaaaaaactgcaaaccaggcacgcagatataagtgttacaagaatccagaagaagcagcaaggagatggggctaggagtttgtaagcagggaactgtatctgtaatatgtaaatgaagttactgggcatctcttcaatggtcagtgtgagtggaatgtgtgggaaaatgtagtggtgagaggtgagataaagagaagtagacagggacgaagtcacagagaggaccgtgttgggaagtttggactctctattctgtaggtagatgaagtatttaaaagaagaggccatgatatagtaatatttggtttaatgtggtatggttgtagtgtgtggcggaaatttgagaggaagaattgtcaacttgcagggcagcagggaagccatttgtatttagctagaagaacatggattgaagcaatggatgatggatttcagagcaatttgtgaagtagaaccagaattttgtccgtcgaacttggggtgacgaagcactatgcctcagataaaggtactatcttctagggaattcaaacggacctaagctgctatttgggcagttgagaccaagagaggcatcctggtaatagtgctgtgcttcaagacaaaagacattaaaatatttttacattgcaaaagtttt

SEQ ID NO: 6282 - DNA, 583 bp, Homo sapiens
tgtcaggggctcagcgctgaatcatcagagcctaaagtgtctgataaatactacttattcattcatccattcatttactcaatcattcattccacagataatccctgagtgcttattctgtgctgggtaccatgctagttgctgaggatacaacagtgagcaaagccaagtacctgctgtcagaccagccactcattctgtgtgtgttcaataagtgatcaacaggaagaggaatgcctattcattctcacatatacttttaatgatgagcattgccagccaatagactggctgcctcatgtggaggtgagctccccatcacaggaagtattcaataagatcctggataagaaagagcccattgtcatgatgctgcaagtggaggctcctgaaggtccctcttacctccacgattctctggttctctggaggatgccatcgggtggctgctgttgtgtggctgtcagagtccggcagcagcatgcaaggtagacatctttgttttttcctgatggaaccaactggcttctcttgaaaaccagagctaaacacttgcctttgatataaaataaattttcattta

SEQ ID NO: 6283 - DNA, 582 bp, Homo sapiens
ttctcacctgctagttgtcccttaacttcaatttcccactcttccctataggatcttagaaatactaaagggaacatctaatattcacaattcctgggcctgagcaccccctgggcacacagagataaactgctatagccctggaagaaatcagggctctgggaagccggggtctaactaaagttagcaccaaatccctgaacttccctgtgtgtactatgagacaagaactgtgggactttcctgacttgggcaggaaaggagcttggaagaatgagagggactgggtggcaagctctatcatcaaacaggcgctgcaggggctctgcagggctgtccccagacaggtacatttggaagggagggagatgaggtagggacttggcagatgcccagtgggtgtaagtcagtggccacacagtgagtgtacaggggctaaagggcagccacttgaaaaaatgtgctgttcaactgaataagttcacaaggaacaatccaaagattactaaatatcaattatttgtgttgcctgaattgtcctccaatcccaataaatatcatgcgtgcatttcaacagggatt

SEQ ID NO: 6284 - DNA, 174 bp, Homo sapiens
ccttcgcaactgaaaagctgatggagctggattccctgtttgtaaaggcatgaattcctggtggctccaccccattcccccagcgtgcatgtggggccttagtgggctgcaggcatgtttaggcaagcccctgtgcaagttcccttatctgcacaaaacatctcatgtaaccat

SEQ ID NO: 6285 - DNA, 323 bp, Homo sapiens
gagcccaacagattagaaaataattgccacggaaaagacattttgtggcagggcacaatgtctcacacctatactcccagcactttgaaaggctgaggcaggaggatcgcttgagcccaggagttcaagacaagcctgggcaacatggcaagacaccatctctacaaaagatacaaaaattagctgggtgcattggcacatgccgtcccatctacttgttaggctgaggaggaaggatcacttgagccctggaaatggggttgcagtgaggcaagatcatgccactgcactccagcctgggtgacagagcaagaccctgcctc

SEQ ID NO: 6286 - DNA, 588 bp, Homo sapiens
ccagactgagaattgtcagtctacagtatgataccccaagtatctctcatgagtttgatatttttgtgataccttattcttcactcttagtaggtttatttcaataaagtaaggctttgcttatatgggagggcagtgcattaagctaatgcaaattatagttgataaactaccttctcatgtatcgctgaatgccagggagcatttttgttgggggcagtgctggcgggagttttgatggaagtaatagtagagagatggagagtacacaagacctagaggagggttgattgaaccataaggaaaaacagataaaagggaaggtgagaggaattgaagacaattatcatttttctcatacagcctcatttagcaggctgagacttggctgtttcgggagtacctgctgcctctcactagaaactgccatctttatgctatcaccctgtctctcatccagtcttacctacctgaggtataagacctggactcaccacttgagttatacatggctacctgatccatctcttcaaagtcatattaaatactataagattctcagatttaatctgtcaaaacctaaatagt

SEQ ID NO: 6287 - DNA, 902 bp, Homo sapiens
gaaggtctcccaggagctctgtactgaggcagacacagaaagacacaaaacggtcgtctttcctgcccaagtaaagcttacagactaactggggagatgtagtgtgcatacaaaacagtaaaagagccatctcaaggacagagagcatagaccaagtcatctggaatggtctacatgccatgcggaagtccaccgaagggttagaacagggtgtcccagactctctcttctgagggaaggttggttgcaaaagtgggattcatgaccctcccaggctacaccatcttctttagaatgagaactgccaggtgacgccctcgctgctcctacctggctactaaacatcgacttcggttcacttcacggatgttcagtggatatcggtcacatgccaggtccccagctacgcattcaaggatggataatatacatagcagcacatccttgaggaactcataccttggtaaagggaaagaaatccatgaatggatacctctgtgtcctaagtgtttgtaataatgctgtgtgtcaggcctctgagcccaagctaagccatcatatcccctgtgacctgcatgtgcacatccagacggctggttcctaccttaactgatgatattccaccacaaaagaagtgaaaatggctggtccctgccttaactgatgacattaccttgtgaaattccttctcctggctcatcctggctcaaaagctcccccactgaacaccttgcaacccccacccctggccaccagagaacaaccccctttgactgtaattttccattacctacccacatcttataaaatggccccatccctatctcccttcgctgactcttttcggactcagcccgcctgcacccaggtgaaataaacagccttgttgctcacacaaagcc

SEQ ID NO: 6288 - DNA, 694 bp, Homo sapiens
caatgaaaggggtacatcttccctgacattcattcagaaacccataacctcagtctaatcatgagaaaaacaacaaacaacataaacacaggagcaaaattcgaggaactttctacaaaacacttgaccctactcaaaattgccaaggtctcgaaaacaaggaaagagatgccgtcacggacgagaggagactaagcagatacgatgactgaatgccatgtgggatcccgggtgggatcccgaaatggagaaaggatattagtgaaaaaactggcaaaatctgaatacaatttggagtttagttaaaagtaacataccaatgttggttccttagttttgggaaatgtccagtactacagtaatgtaagatggtaacattagggagagctgaaatcgggtgagggctatgtgacgaatttgtactatctttgcaactttactgtggatctaaaattattccagattaagaagtttacctatataaaaagcatatgtacatcataattacagttatgcaaaaatatggttagaaaaaatacataaggaaaacatacgtaaaaattagtgtggttctgttagaatggtggcattgtggagtattttttcctcttatctgcttactgaattagctgtaaatgagtcattttccataaattaaagagttaattttagagattcttttccttgaaataca

SEQ ID NO: 6289 - DNA, 653 bp, Homo sapiens
cacattttcagaaaagcaggagggaggagagcatcacaattcattttatgaggacagtattactagataccaaagccaacacaaaggcatcccaagaaaagaaaactagcagccagtattcctcataaatgtagacacaaaaatccttagcaaaatattagcatgtttaattagcaatattatatttaaaaggataatactataatcatggtcaagtaggatttatcccagcaatgcaaggctcacttaacttagaaatatcaattctgtgtaatataccatactaataagatatatttgaaaaaaaagtgatcatctcaatagatgcagaaaagtatttgacaaaattcaatacaaattataataaaaactcttagcaagctaggaattgaaggcaacttcctcaacctgataaagaatgtctgtgaaaaaaaaaatcatacttcatggtgaatgattttatagttttccacttaagatgaagaacaaggcaaggatgtttgctcttactgcttttattcagcattatcctggaggtcctagctaatgcagtaaggcaagaaaaagaaatttaaaggatatttggaatggaaaggaagaagtaaaaccaaatagatggcatttatacagaaagttctaaagaatctaccaaa

SEQ ID NO: 6290 - DNA, 497 bp, Homo sapiens
tccagcctgggcaacagaatgagactccctctcaaatcaaaaaacaaaaaaaaacccaccatgagaagtcacagcaggtacaaatgcagtgagggggaagaacatagcatgcttggggaacagagatggtcagtgtggctggtgtgtgggatgcacaagggaagtgccaggcgacagtactgggaaagcaggtaggaagcaggcagtctgggaagggccttctgtgctgcaccaagtttagattctgtcctcttggccagtggttcttcgtatctttccttctgccacaacatacgtataagatagctgctactgcctgccacagataagactgtggccagttctgagctgtactgctgcgtctcccttctcccacaagaagttgagagaaaggcaaacaagaaaccttattagaagggtaactttaaaaccaccagcttctttttaaaaaattaatggcatataataacatacactaaataaaagattaaaacagc

SEQ ID NO: 6291 - DNA, 141 bp, Homo sapiens
atcctgctcagccccagctctttttcgccatacaagtaggaaggcccatgattttctgtaattttaaaaaagagaaatcagaaatctctattcttattcaaaatctcccaattgttagtgttagaaactaattcaagatgt

SEQ ID NO: 6292 - DNA, 1109 bp, Homo sapiens
acggcccttaggatagcaggattccctgaagagggccaaaggggcaggagcgcagccttagtggcagtgctggtccatgaggctctacaaagcaagggatgggtgtttgggaggaggaaaaggctcttgctgtactcctagaggttggaattaaagtggaaaagccagaaaattcaagtcctttactaacatgtctggagattagaaggtatatgtacatgggggagaagccaaaattattgctgcgagtggtcagcaagaaaatcaaggctcttttcattattttgagcattcctctgatatttgaaaaggaagtacaacaggaaaggaagtctgaggatggaagctaaaattggtatgaatttatattttagagatcaaaatgtaccttatgttgaaacctatgtaagaagtgattatgtagaaagagtgaaagtgatagctcttagtctggaaagcccactggcttgtttgggcatttctcatggcttcccactcaaagtggatccccaaaatcacttgatggatttccttgctgatttctaagtaaactatggtttaagaaagaaatgacagggctcagcactgccctacagtaccaagaatacaaatgtttccatgaagtcttcaaaggcatttgtaaaattcaggctgtaagtgattagttagttcattctgcacttatttattaactgtatattcagttccaggctctagggtagagattatggataaaggtgaattagatagatgaagtttttgccctcacagcaaaagctttagccaataattaaagctatcactggaagtgggtctgtgccaataacctagagaagagcagtgcttttagagttgagctatattcccaatcagttcttaatggtggttttacccccttccctctacactgtcttttcttgagattggatcatgtgtgtgaacccacatcatttccagtcaaaatcaccaagagaggccggacacagtggctcatgcctataatcccagcactttgggaggcctaaatgggtgggcctcttgagtccagagtttgagaccagcctgggcgaccccagctctaccaaaaaaaccaaaaaacaaaaaatacc

SEQ ID NO: 6293 - DNA, 355 bp, Homo sapiens
gatggagagggtgcagctgacagagggagctcatgaatggtgggacctggcatggctcagggaaacttttggcataatagaaggcaaaccctcccttctagttcagaaatgtgtaattgctggagatgttagcttgctactgggtaaaatgattttaaagagagaacttctcaacatttaaatcagcctcaattttccatgttccttttcatcaagtcagctctggtttgagaagggatcatatcggcactcaaccctttaaatgattttccttctttgcctttctttttctttctctttggccttggctccttcctttccaaccactcccctcccagaacctcttattttagcc

SEQ ID NO: 6294 - DNA, 595 bp, Homo sapiens
atcacaggattccgattttaatacgcctcacaataggaattttggccttgaggccaagaattgggcacgagggttaattagtagctggagctgtcactgagccctgcatgttttgcactgtactcggcacatggtttattattgctatctcagacaaaacccaacctagatgtgtgagtttggtaatttattccaagttacgtcaaggaagataaggtcccggtgagatgagtaaattagcaagggggccagtctgaggtcttgtttggtagctgggactactgtgctcttgtatatgatcagatttggcacaggtttttagaatagcgtgtatacaagtagagggatctctttttttctttttattgtaaattgacaattacatatgacataaatgtatggggtacaaagtaatgttataatctataaatacagtgtggaataattaagtcaaactagttaacatactcatcaccccaaatgcttaacattttttgtggtgagaacatttgaaatgtactctctcagcaattttgaaacatacagtactctgttaactattcaccatgctgtgcaatagaactcaaaaaaagaa

SEQ ID NO: 6295 - DNA, 326 bp, Homo sapiens
ttgaccatctcaagagaacatggagaatactcacaaatgcttttacaatgacttaatttttatgttctggttgttacttctgtaatgtaacttctgttattgttcacttactttacaaaataagaagaccaaacctttttttaaagccccgttaatgaaagacagtaaacaggcagtgtggctctgagaggagggagagctcacaacatgaagagcgagattgttctagctacagggagtggcatgggaaaaaattactgtgttggagatgctggaggtattagagtgatttgaataaatggaatgaaggaagtggtttaagaaat

SEQ ID NO: 6296 - DNA, 922 bp, Homo sapiens
tgtgatactcttggtagatagctatattttaatgaatttattttgtggggagaggggaggttagtggaatacttttggaatctggaataaataacatgtatcaaataacgatacatgctttggaggattccttggtcttagaatccctgtgcaattctgtaaaagaataccaggttctctggcatgtagaagtgaacttgggcaggtggaaatggttaacaaagaattctaggagtagagaataaggtctgaatcctcttaggacagttgggagttacaaaaaattaacaaacagaaacattgagattggtgctttagaacttggagtaaattaagaataaagggaagtagacacctttaaaaaacaaagaaaaagaacttggtgagtaaaaatagaaaagacaaattatggagtaggaaataaaaactcaccagaaaagttgtcttttacctcctaagggaaaagctaaaggaattagagttgttttgtctaaagaaaggcaagggaagactcaatttgttgttgtcagttattaacaatttatataaagaatagtgtactatttcttttctgtctgcagagattgagcagaaatgctttcaattaaaacaaatagatatgagagaattgttgatagccggtaaaattatagactaccaaacctagcatgagccaccgcatccggccaatgttaatacttttttaagaaaaaaaattttaacctaccattttcataggctttacctgtgagcttgccttagtgctgaaccctgtgacttttcaaggcttcttccaggtctgtgtttctgcctaaaataaaagtttaaatcttggtgaagattgtctacagacaattctgaaaatttagttttccttctaccagaaagaaagaaaaagagagaaaagaatcttctaaaaaaa

SEQ ID NO: 6297 - DNA, 934 bp, Homo sapiens
tgtgatactcttggtagatagctatattttaatgaatttattttgtggggagaggggaggttagtggaatacttttggaatctggaataaataacatgtatcaaataacgatacatgctttggaggattccttggtcttagaatccctgtgcaattctgtaaaagaataccaggttctctggcatgtagaagtgaacttgggcaggtggaaatggttaacaaagaattctaggagtagagaataaggtctgaatcctcttaggacagttgggagttacaaaaaattaacaaacagaaacattgagattggtgctttagaacttggagtaaattaagaataaagggaagtagacacctttaaaaaacaaagaaaaagaacttggtgagtaaaaatagaaaagacaaattatggagtaggaaataaaaactcaccagaaaagttgtcttttacctcctaagggaaaagctaaaggaattagagttgttttgtctaaagaaaggcaagggaagactcaatttgttgttgtcagttattaacaatttatataaagaatagtgtactatttcttttctgtctgcagagattgagcagaaatgctttcaattaaaacaaatagatatgagagaattgttgatagccggtaaaattatagactaccaaacctagctgggcgtggtggctcatgcctgtaatctccgcactttgggaggccaaggcaggcagatcacctgaggtcaggagtttgagaccaccctggccaacatggcgaaaccccgtctctactaaaaatatgaaaattagccaggtgtggtagtcccagcatctcgctctgtcacccaggctggagtgcagtggcaatctcagcttactgcaatctccacctcccaggttcaagtgattctcctgcctcagcctcccgtcgacgctggtatt

SEQ ID NO: 6298 - DNA, 367 bp, Homo sapiens
ttggtttggcttcctagtgtcaattaaacttctaaaagtttaatctgagattccttataaaaacttccagcaaagcaactttaaaaaagtctgtgtgggctgggattacaggcatgagccaccgcatccggccaatgttaatacttttttaagaaaaaaaattttaacctaccattttcataggctttacctgtgagcttgccttagtgctgaaccctgtgacttttcaaggcttcttccaggtctgtgtttctgcctaaaataaaagtttaaatcttggtgaagattgtctacagacaattctgaaaatttagttttccttctaccagaaagaaagaaaaagagagaaaagaatcttctaaaaaaa

SEQ ID NO: 6299 - DNA, 1867 bp, Homo sapiens
accgcgaggggttcagatattctgaactgacctctctcttctgcagaggggtcatcgcatactcacacactgcatggctccccctgcctccatcacatttctccactgagcagggcttcccttgcccacagaggtgggtgagggtagcagcattggggttacggctgtggtttctttcacttattattagaataatagtcactggtgagacctgaggtagagatggagccgcctctgaaccaagcccacttggtttctttactgcactggttttcatgagaaagcaatttaatattaattctttaggatgttccagcttccctcagtgcattcccttgcagccagttttgctatctgcttagcgacctgcccattgtcattgaagtgtggcttctggggggagcgtcatatcttccattccatctcctgctttagggaaagacagtttttagtccaggggtttttcacctaatgactggatttcaaagccaagatgctgcagttgaatgtgtcaggaagtctctatacaaagagtgaaaagagactttagcatgtgaaccaaatccaaataaattcttcctgaaccatacactagagggggaagaagaaccaacccataatcagacacaccgatctgccttgccagtagaagccactttgaaggtaatttcacagtccaccagactagttttgcatagaacaaacccacagtaagtcggcaagcagagctttcctatccttgttggacccactagaaactgtcccagctctcttaagcccgcttcctgcagcagcatccgtagaatttttgtactacacccaataccagactgggaaggcctatcctttcagtgaccctgctaactgctaggatgaatgtatagtaacatgtacaggctacattgtaaacagcacaaaacagaagctgacatgtgtggttattctttttaagagaattataaatactgtaatatataattttattttattggcatgcctttttgtaaatacaaattattaacttattaaataggaaatggcttctggcttatgccattgtcatgtttatttttattttttatacttttctttcttcttagaacttagatgctgtcagccaatgtacatccccaaaccagacagacagacaaaaaattttttattgctaatggtcttttccaaaacaacaaaaaatatatatttttgttccaatgtgcaataaattctaaccacgtctatgcaagatttggctaaacttaataattgttcttaggtcttgagatgggcaacagagctgtaagatcccgccaagtacaccatgtgctcatgctagtgatgtcattaagctactagggcatagtgatgagatttttctgagatctaaccgtttccctccgctagctcctgaccccagcccagcaggctgtctcctcagtaacacatgggccttggtatctggcacccatcagccagcctcataggaaagaagccacctccgctgtatttgaagtttcactttttaaaaaaaaaatgtttcccacctttttatccttcacccactgtccttccacctgctcactcactcactctctcacccatcctgctccacacttctttggtagtaaatgacaccatcaccagcagtttacacccgcagttaacaggcatcgaactgaaagaatcagtgatgacgtttttgtgcatcttcgctgagtgggtaagtggcaacgctttgccaaatattaacgaagccaatcaaagagcagcgcagccacagtatcactgcacatatatatatagatatataaatataatataaatatttattttttgtagccaggtccttggtgcagtatttatactccac

SEQ ID NO: 6300 - DNA, 327 bp, Homo sapiens
aaactggacctctatttctcacgatatacaaaaattaactcaagatggattaaagacttaaattttaaaacctgagactataaaagtcctaagaaaaactcttctggcctaggcaaagtatttatgactaagacccccaaagaaaattcaacaaaaaacaataacagacaaatgggacataattaaattttcaaaagttctgcacagctaaagaagtaacaggataaatggacaatctagagaatgggagaaaatatttgcaaattatgcttcaacaaagggttaatagccagaatctacaacaaactcaaacatttcaacaagaaa

SEQ ID NO: 6301 - DNA, 960 bp, Homo sapiens
tggctcctgtgcactttggttgctgagagtggttgtgggcagcaggccggtgagcagtgggggcagggatcttgacaccagcccttgttggactccacacccttctgaccattcatccacctttgggagtggggagcagggtctgttgaaagaggcagccgtgtcatgctcctgttagtaagggaactagacttttttgagcctaaaaccatacaagagaattcaacagaaagagaatttaatgtatatattcattcttgtaaaacaataatattgtagtaaaacttacatctgtgtgtttgctggccaggctagtcatttatgactttcttcgagtaagcgaaaatccttggagtctggcaattcttccttgtagggaatcttcaagaagactttagctccaactttattcttttgtatttcattacctctgggaaaattactagctgggcattttgtggcgattctcaacctcaactctagggctagtgcttttaaaatctggtcaactgcgtaattgtgaaacagtactgtgtcagctttatgcacttattattatttttttaagacacaaaaacttacaaattggcaaattgtttttcagtgttttccccttcacagggctttaaaaatatcttgagtatgttggggttagattgggtggttggaaagcaaagctccaagtgctagaatggacggctgccctctgcagcttcaacacagggatccactcagcccccttagctgactactggtgcttaaaacggtttttgacaaacgccagagtttcacaaatatagaagtagcagttatagaggtggttttgcaagtcccttggaacattcatgcaggtctgcagtcactcttaatttgaatgagaaagaagatggtagaaactatttttattttctcctgggagcaagagaaaaggaaggctagaactctgtactatgtaatttt

SEQ ID NO: 6302 - DNA, 782 bp, Homo sapiens
gcggccgctactactactaaattcgcggccgcgtcgacctgggagtacaagtgcacatcaccacacccaggtactctggagtctgaggtgggaggattgcttgagcccaggaggtcaaggctgtagtgtgctatgatcacacttgtacatagctacttcactccagcctggaaaacacagacagaccctgtctctaaaataagtcaacaaacaaataaagagggaggagggtaggaaggagagctgttataaaggacgcttatatgtagtcccaactacttaggaggctgaggcaggattgtgtaagttcaggagttcaaggccagcctgcgccatatagcaagcccctatctcatagctagctagctagatagacagatatataaataggatggatggatggatggatggacggacggacagacagatagatagataaagtaaataaacaaaatagaaaataggctgcccaatgttcacatcctgataagccacaggtcaaacactcctaggttcagactgaagttctcttcagagtctcctctgtaactaacactgtggaaagcatcgcgaggaaaggacaggaagacaaatccatgcccaggtcagcttgcaaaaagctaacaatcttgctggagaaacaagactgtttttgttttttgttttttgttttttaagacgcagtctccctctgttgccgaggctagagtgtaatggcacgatcttggctcactgcagcctctgccttctggattcaagtaattcttctgcctcagcctcct

SEQ ID NO: 6303 - DNA, 4064 bp, Homo sapiens
gtaggaacaaaccggtgtcaatggttaacccaggttcttggtgtctggagcttttctttcctttattattaactaaagagcattctctaccattgcccagctgaaagcacctagctcatagattctctgtggggagagtgaataaagaatgggggattgaggcacagagtgttaaaatagtgagacacaggattctaactggcagactggcactttatctcaattcttaactgctgtgttgcctctcactttaaagacatccacattccaccctgggccttgcccgtctggtgagcccaatctctgctggtcagtcacgcagttgaggtcagggaaggagtaactcaagatgattttgatgttgcagttttaaatttcactttgacttgagctgggaaatcctttggcctattataccatggatgctaaaaatggttctaactgaaaacccaaaccaagaaatagcaacaagtctagaattcttactactacaaaactcacctggatccctaagggcacagcaaagaatgagctattacggcagcagctatcatattatcaatgcggacgcaaaatacccaggctacccgccagagcacattatagctgagaagagaagagcaagaagacgattacttcacaaagatggcagctgtaatgtctacttcaagcacatttttggagaatggggaagctatgtggttgacatcttcaccactcttgtggacaccaagtggcgccatatgtttgtgatattttctttatcttatattctctcgtggttgatatttggctctgtcttttggctcatagcctttcatcatggcgatctattaaatgatccagacatcacaccttgtgttgacaacgtccattctttcacaggggcctttttgttctccctagagacccaaaccaccataggatatggttatcgctgtgttactgaagaatgttctgtggccgtgctcatggtgatcctccagtccatcttaagttgcatcataaatacctttatcattggagctgccttggccaaaatggcaactgctcgaaagagagcccaaaccattcgtttcagctactttgcacttataggtatgagagatgggaagctttgcctcatgtggcgcattggtgattttcggccaaaccacgtggtagaaggaacagttagagcccaacttctccgctatacagaagacagtgaagggaggatgacgatggcatttaaagacctcaaattagtcaacgaccaaatcatcctggtcaccccggtaactattgtccatgaaattgaccatgagagccctctgtatgcccttgaccgcaaagcagtagccaaagataactttgagattttggtgacatttatctatactggtgattccactggaacatctcaccaatctagaagctcctatgttccccgagaaattctctggggccataggtttaatgatgtcttggaagttaagaggaagtattacaaagtgaactgcttacagtttgaaggaagtgtggaagtatatgcccccttttgcagtgccaagcaattggactggaaagaccagcagctccacatagaaaaagcaccaccagttcgagaatcctgcacgtcggacaccaaggcgagacgaaggtcatttagtgcagttgccattgtcagcagctgtgaaaaccctgaggagaccaccacttccgccacacatgaatatagggaaacaccttatcagaaagctctcctgactttaaacagaatctctgtagaatcccaaatgtagtcctaaattgcaattatgagggctaccactgaatcattttatctttcagccaatcaagtcgttgtaaacgtggcttttttgaaagtgttatggctatgttttatgatgatgctgggtaagtagagtaagttaaacttggtaaaagataatctaaaaattccatagttctcagttattaaaatttttcttgttcgccaattttgtattaagaatgctattaagcctaattgattaaaatttatcttttttattatcttacatgcttgtatcttcagttggaggtgtagtattcaaaaacggggaatgaaggcaggaaggaggctggaataaataaaaataaaaatagacaagtaagacagcataaataatacatttttaaacatgtcaacattgataatacaatgaagatttaccataaaaagtatcatatctaaccaagatatgcaaaagatgcattcagtaagctgtaacgttgagaaatgtaactgtgaaatcagctcaccagttcaagtcactaggtttgccacttggaccgtcttggtttcagcgagcatagcgagtggctgtaagaaattgtccatgccaccaattccactgctacttgcccaggtagtgatcagtgagagttagaagcaattttttctctaaccgatgaggcagaagaaaagttaacagtatttaaagcagcatttctctcttaacgttcctgggagactccaacaaatggagaccagaaacaaggcaaccacgaccttgctaggttctctgaggaggggactttctatgttcacgtcccaccttcttcgaggacatgaccaagggacaggatcatacagatgaggtgaggggatggttagcagcgataaacattctcagacccttggagagaaaccgttgctagcttgctggtcccgaaagattgcaactttggctgctacagaaaggatagaacctttttggggggagggtggggagggagatatttatttgtgcccagaagcagttatgtatgcttcttgtcttggttactgtacaagatacaaatgactcgagttgtggattgcaagaaactcttttattaaacttggaacaaccatttaaatgaaggattttgtgagatagaattcaattaaagcgatttgaatgcacagtaagtggataatctgagtacaatgaaatttcttaagttttagaacatgagataaagttgtatactctactttcatgttaaaatgttaatcatgattactttaagcccacatccactgagtaaagagtcactttaaactttataaatcaaagagatattaggaacattcagaattatttgtgttttgtttttgttttacattgttgctgcactggcaataagtatgtggcactgtttttatttgtttatgttatttaaatacacacccagacacacacacacacagtttttgctttttctggaaaatctttctttctcttctctctccatgaaaattaaaacacacaagtgaatgaagtaattacatagtccaagattagaaatacaagtaaaatatataggtataggtagatagagtgcctttctgtttcttttcttttcttttttctttttttgttcttccttcctttcttccctcctccccctcatccttccctttctccttcttttcccttttttttttttttttgacctgggagtaataaagttactttttaaatgcacgtatgcaatcttttattcctcttgttttatggataagagatttgttcaggtcaaaagttgcaaaactgttctgaagcttaatattagagacccaagtaagattgtttttagtcttgcttgaggaatgcacactccatttaaaaaattgtgcgctctgtagatttggattttacagcagcaattacttggctaaattagagtactgcaatcttgtaagtagaaaacagccaccatgacaataaacaaaaacacttaaaaatatttttagcttgttttacctacatctagtttcatttcatcttgctttgctttgttgactctgctaccgctgatgtttgccttgtcaatatcagaataggggcatcagtgtcccgtgaaatacattttgttgtgctatgagcctctgtaatcaaatgcttgtactcagaagagagtgtaaaatcagcatttctatgtaacatatatctctaattatctgtgtaattttataacatactttgacaaccccagtgagttacttaataataaagatcttaaaataatgcaaaaaaaaaaaatgcatatac

SEQ ID NO: 6304 - DNA, 665 bp, Homo sapiens
gtaggaacaaaccggtgtcaatggttaacccaggttcttggtgtctggagcttttctttcctttattattaactaaagagcattctctaccattgcccagctgaaagcacctagctcatagattctctgtggggagagtgaataaagaatgggggattgaggcacagagtgttaaaatagtgagacacaggattctaactggcagactggcactttatctcaattcttaactgctgtgttgcctctcactttaaagataagaaattaaaccaattttaacatgattctccgaaaaaccaatacttgcactccttcctccatgaaaatgtgctttatccctacgcatttttccagaagtccagctttctacttatacgtttatattttcataaactttgctacagagcaaattcggtgttacaaacattgcttccttttgttcacattttacacgtttactgcctccttaaatcattcaccttcactgtattttaggaaagaaatgctatttatatattttgtgaatccacagtctattatacattctgctaactaagaataaaacttgtctacttggttatttgagtctagagaatgattttcaacctggagtgactttgctcaccaagggacatctggcaatgtctggtcacatttttggatgt

SEQ ID NO: 6305 - DNA, 3983 bp, Homo sapiens
gtaggaacaaaccggtgtcaatggttaacccaggttcttggtgtctggagcttttctttcctttattattaactaaagagcattctctaccattgcccagctgaaagcacctagctcatagattctctgtggggagagtgaataaagaatgggggattgaggcacagagtgttaaaatagtgagacacaggattctaactggcagactggcactttatctcaattcttaactgctgtgttgcctctcactttaaaggagtaactcaagatgattttgatgttgcagttttaaatttcactttgacttgagctgggaaatcctttggcctattataccatggatgctaaaaatggttctaactgaaaacccaaaccaagaaatagcaacaagtctagaattcttactactacaaaactcacctggatccctaagggcacagcaaagaatgagctattacggcagcagctatcatattatcaatgcggacgcaaaatacccaggctacccgccagagcacattatagctgagaagagaagagcaagaagacgattacttcacaaagatggcagctgtaatgtctacttcaagcacatttttggagaatggggaagctatgtggttgacatcttcaccactcttgtggacaccaagtggcgccatatgtttgtgatattttctttatcttatattctctcgtggttgatatttggctctgtcttttggctcatagcctttcatcatggcgatctattaaatgatccagacatcacaccttgtgttgacaacgtccattctttcacaggggcctttttgttctccctagagacccaaaccaccataggatatggttatcgctgtgttactgaagaatgttctgtggccgtgctcatggtgatcctccagtccatcttaagttgcatcataaatacctttatcattggagctgccttggccaaaatggcaactgctcgaaagagagcccaaaccattcgtttcagctactttgcacttataggtatgagagatgggaagctttgcctcatgtggcgcattggtgattttcggccaaaccacgtggtagaaggaacagttagagcccaacttctccgctatacagaagacagtgaagggaggatgacgatggcatttaaagacctcaaattagtcaacgaccaaatcatcctggtcaccccggtaactattgtccatgaaattgaccatgagagccctctgtatgcccttgaccgcaaagcagtagccaaagataactttgagattttggtgacatttatctatactggtgattccactggaacatctcaccaatctagaagctcctatgttccccgagaaattctctggggccataggtttaatgatgtcttggaagttaagaggaagtattacaaagtgaactgcttacagtttgaaggaagtgtggaagtatatgcccccttttgcagtgccaagcaattggactggaaagaccagcagctccacatagaaaaagcaccaccagttcgagaatcctgcacgtcggacaccaaggcgagacgaaggtcatttagtgcagttgccattgtcagcagctgtgaaaaccctgaggagaccaccacttccgccacacatgaatatagggaaacaccttatcagaaagctctcctgactttaaacagaatctctgtagaatcccaaatgtagtcctaaattgcaattatgagggctaccactgaatcattttatctttcagccaatcaagtcgttgtaaacgtggcttttttgaaagtgttatggctatgttttatgatgatgctgggtaagtagagtaagttaaacttggtaaaagataatctaaaaattccatagttctcagttattaaaatttttcttgttcgccaattttgtattaagaatgctattaagcctaattgattaaaatttatcttttttattatcttacatgcttgtatcttcagttggaggtgtagtattcaaaaacggggaatgaaggcaggaaggaggctggaataaataaaaataaaaatagacaagtaagacagcataaataatacatttttaaacatgtcaacattgataatacaatgaagatttaccataaaaagtatcatatctaaccaagatatgcaaaagatgcattcagtaagctgtaacgttgagaaatgtaactgtgaaatcagctcaccagttcaagtcactaggtttgccacttggaccgtcttggtttcagcgagcatagcgagtggctgtaagaaattgtccatgccaccaattccactgctacttgcccaggtagtgatcagtgagagttagaagcaattttttctctaaccgatgaggcagaagaaaagttaacagtatttaaagcagcatttctctcttaacgttcctgggagactccaacaaatggagaccagaaacaaggcaaccacgaccttgctaggttctctgaggaggggactttctatgttcacgtcccaccttcttcgaggacatgaccaagggacaggatcatacagatgaggtgaggggatggttagcagcgataaacattctcagacccttggagagaaaccgttgctagcttgctggtcccgaaagattgcaactttggctgctacagaaaggatagaacctttttggggggagggtggggagggagatatttatttgtgcccagaagcagttatgtatgcttcttgtcttggttactgtacaagatacaaatgactcgagttgtggattgcaagaaactcttttattaaacttggaacaaccatttaaatgaaggattttgtgagatagaattcaattaaagcgatttgaatgcacagtaagtggataatctgagtacaatgaaatttcttaagttttagaacatgagataaagttgtatactctactttcatgttaaaatgttaatcatgattactttaagcccacatccactgagtaaagagtcactttaaactttataaatcaaagagatattaggaacattcagaattatttgtgttttgtttttgttttacattgttgctgcactggcaataagtatgtggcactgtttttatttgtttatgttatttaaatacacacccagacacacacacacacagtttttgctttttctggaaaatctttctttctcttctctctccatgaaaattaaaacacacaagtgaatgaagtaattacatagtccaagattagaaatacaagtaaaatatataggtataggtagatagagtgcctttctgtttcttttcttttcttttttctttttttgttcttccttcctttcttccctcctccccctcatccttccctttctccttcttttcccttttttttttttttttgacctgggagtaataaagttactttttaaatgcacgtatgcaatcttttattcctcttgttttatggataagagatttgttcaggtcaaaagttgcaaaactgttctgaagcttaatattagagacccaagtaagattgtttttagtcttgcttgaggaatgcacactccatttaaaaaattgtgcgctctgtagatttggattttacagcagcaattacttggctaaattagagtactgcaatcttgtaagtagaaaacagccaccatgacaataaacaaaaacacttaaaaatatttttagcttgttttacctacatctagtttcatttcatcttgctttgctttgttgactctgctaccgctgatgtttgccttgtcaatatcagaataggggcatcagtgtcccgtgaaatacattttgttgtgctatgagcctctgtaatcaaatgcttgtactcagaagagagtgtaaaatcagcatttctatgtaacatatatctctaattatctgtgtaattttataacatactttgacaaccccagtgagttacttaataataaagatcttaaaataatgcaaaaaaaaaaaatgcatatac

SEQ ID NO: 6306 - DNA, 3952 bp, Homo sapiens
agctgagaactcagtggcctttgtctgtggtgaatgtatccggaaaggcaaagaagagagagattctcctgtggggtttctcatctccatggcggtaggtgctgacagcttcagaagggtataacagggccaagagaaaagggccctgagatgctcagctacggtgctcttacaagatgaaaaggacatggggttcagatctgcacttcatcatctttcactaaggagtaactcaagatgattttgatgttgcagttttaaatttcactttgacttgagctgggaaatcctttggcctattataccatggatgctaaaaatggttctaactgaaaacccaaaccaagaaatagcaacaagtctagaattcttactactacaaaactcacctggatccctaagggcacagcaaagaatgagctattacggcagcagctatcatattatcaatgcggacgcaaaatacccaggctacccgccagagcacattatagctgagaagagaagagcaagaagacgattacttcacaaagatggcagctgtaatgtctacttcaagcacatttttggagaatggggaagctatgtggttgacatcttcaccactcttgtggacaccaagtggcgccatatgtttgtgatattttctttatcttatattctctcgtggttgatatttggctctgtcttttggctcatagcctttcatcatggcgatctattaaatgatccagacatcacaccttgtgttgacaacgtccattctttcacaggggcctttttgttctccctagagacccaaaccaccataggatatggttatcgctgtgttactgaagaatgttctgtggccgtgctcatggtgatcctccagtccatcttaagttgcatcataaatacctttatcattggagctgccttggccaaaatggcaactgctcgaaagagagcccaaaccattcgtttcagctactttgcacttataggtatgagagatgggaagctttgcctcatgtggcgcattggtgattttcggccaaaccacgtggtagaaggaacagttagagcccaacttctccgctatacagaagacagtgaagggaggatgacgatggcatttaaagacctcaaattagtcaacgaccaaatcatcctggtcaccccggtaactattgtccatgaaattgaccatgagagccctctgtatgcccttgaccgcaaagcagtagccaaagataactttgagattttggtgacatttatctatactggtgattccactggaacatctcaccaatctagaagctcctatgttccccgagaaattctctggggccataggtttaatgatgtcttggaagttaagaggaagtattacaaagtgaactgcttacagtttgaaggaagtgtggaagtatatgcccccttttgcagtgccaagcaattggactggaaagaccagcagctccacatagaaaaagcaccaccagttcgagaatcctgcacgtcggacaccaaggcgagacgaaggtcatttagtgcagttgccattgtcagcagctgtgaaaaccctgaggagaccaccacttccgccacacatgaatatagggaaacaccttatcagaaagctctcctgactttaaacagaatctctgtagaatcccaaatgtagtcctaaattgcaattatgagggctaccactgaatcattttatctttcagccaatcaagtcgttgtaaacgtggcttttttgaaagtgttatggctatgttttatgatgatgctgggtaagtagagtaagttaaacttggtaaaagataatctaaaaattccatagttctcagttattaaaatttttcttgttcgccaattttgtattaagaatgctattaagcctaattgattaaaatttatcttttttattatcttacatgcttgtatcttcagttggaggtgtagtattcaaaaacggggaatgaaggcaggaaggaggctggaataaataaaaataaaaatagacaagtaagacagcataaataatacatttttaaacatgtcaacattgataatacaatgaagatttaccataaaaagtatcatatctaaccaagatatgcaaaagatgcattcagtaagctgtaacgttgagaaatgtaactgtgaaatcagctcaccagttcaagtcactaggtttgccacttggaccgtcttggtttcagcgagcatagcgagtggctgtaagaaattgtccatgccaccaattccactgctacttgcccaggtagtgatcagtgagagttagaagcaattttttctctaaccgatgaggcagaagaaaagttaacagtatttaaagcagcatttctctcttaacgttcctgggagactccaacaaatggagaccagaaacaaggcaaccacgaccttgctaggttctctgaggaggggactttctatgttcacgtcccaccttcttcgaggacatgaccaagggacaggatcatacagatgaggtgaggggatggttagcagcgataaacattctcagacccttggagagaaaccgttgctagcttgctggtcccgaaagattgcaactttggctgctacagaaaggatagaacctttttggggggagggtggggagggagatatttatttgtgcccagaagcagttatgtatgcttcttgtcttggttactgtacaagatacaaatgactcgagttgtggattgcaagaaactcttttattaaacttggaacaaccatttaaatgaaggattttgtgagatagaattcaattaaagcgatttgaatgcacagtaagtggataatctgagtacaatgaaatttcttaagttttagaacatgagataaagttgtatactctactttcatgttaaaatgttaatcatgattactttaagcccacatccactgagtaaagagtcactttaaactttataaatcaaagagatattaggaacattcagaattatttgtgttttgtttttgttttacattgttgctgcactggcaataagtatgtggcactgtttttatttgtttatgttatttaaatacacacccagacacacacacacacagtttttgctttttctggaaaatctttctttctcttctctctccatgaaaattaaaacacacaagtgaatgaagtaattacatagtccaagattagaaatacaagtaaaatatataggtataggtagatagagtgcctttctgtttcttttcttttcttttttctttttttgttcttccttcctttcttccctcctccccctcatccttccctttctccttcttttcccttttttttttttttttgacctgggagtaataaagttactttttaaatgcacgtatgcaatcttttattcctcttgttttatggataagagatttgttcaggtcaaaagttgcaaaactgttctgaagcttaatattagagacccaagtaagattgtttttagtcttgcttgaggaatgcacactccatttaaaaaattgtgcgctctgtagatttggattttacagcagcaattacttggctaaattagagtactgcaatcttgtaagtagaaaacagccaccatgacaataaacaaaaacacttaaaaatatttttagcttgttttacctacatctagtttcatttcatcttgctttgctttgttgactctgctaccgctgatgtttgccttgtcaatatcagaataggggcatcagtgtcccgtgaaatacattttgttgtgctatgagcctctgtaatcaaatgcttgtactcagaagagagtgtaaaatcagcatttctatgtaacatatatctctaattatctgtgtaattttataacatactttgacaaccccagtgagttacttaataataaagatcttaaaataatgcaaaaaaaaaaaatgcatatac

SEQ ID NO: 6307 - DNA, 1346 bp, Homo sapiens
ctgtaagtagtatatgtgagtgccggcagttaggacagggagagataggagcaagtaggactgctgtgattaggacggatcagacgaagagggtgtgtacaagatacaaatgactcgagttgtggattgcaagaaactcttttattaaacttggaacaaccatttaaatgaaggattttgtgagatagaattcaattaaagcgatttgaatgcacagtaagtggataatctgagtacaatgaaatttcttaagttttagaacatgagataaagttgtatactctactttcatgttaaaatgttaatcatgattactttaagcccacatccactgagtaaagagtcactttaaactttataaatcaaagagatattaggaacattcagaattatttgtgttttgtttttgttttacattgttgctgcactggcaataagtatgtggcactgtttttatttgtttatgttatttaaatacacacccagacacacacacacacagtttttgctttttctggaaaatctttctttctcttctctctccatgaaaattaaaacacacaagtgaatgaagtaattacatagtccaagattagaaatacaagtaaaatatataggtataggtagatagagtgcctttctgtttcttttcttttcttttttctttttttgttcttccttcctttcttccctcctccccctcatccttccctttctccttcttttcccttttttttttttttttgacctgggagtaataaagttactttttaaatgcacgtatgcaatcttttattcctcttgttttatggataagagatttgttcaggtcaaaagttgcaaaactgttctgaagcttaatattagagacccaagtaagattgtttttagtcttgcttgaggaatgcacactccatttaaaaaattgtgcgctctgtagatttggattttacagcagcaattacttggctaaattagagtactgcaatcttgtaagtagaaaacagccaccatgacaataaacaaaaacacttaaaaatatttttagcttgttttacctacatctagtttcatttcatcttgctttgctttgttgactctgctaccgctgatgtttgccttgtcaatatcagaataggggcatcagtgtcccgtgaaatacattttgttgtgctatgagcctctgtaatcaaatgcttgtactcagaagagagtgtaaaatcagcatttctatgtaacatatatctctaattatctgtgtaattttataacatactttgacaaccccagtgagttacttaataataaagatcttaaaataatgcaaaaaaaaaaaatgcatatac

SEQ ID NO: 6308 - DNA, 570 bp, Homo sapiens
ttttgtgatatggaaagatttttattattatataagcttccagaggtttgatcagaaaacaaagatgtaaataggcatggaagaaggctattcttggttcttgttttctgtccgccaccattggcaagactatctactatgcgtaggcatgggaaccagttaaagaaagtgtcgattcactagagcgaagctgagaactcagtggcctttgtctgtggtgaatgtatccggaaaggcaaagaagagagagattctcctgtggggtttctcatctccatggcggtaggtgctgacagcttcagaagggtataacagggccaagagaaaagggccctgagatgctcagctacggtgctcttacaagatgaaaaggacatggggttcagatctgcacttcatcatctttcactaaggtaagatcgtgttgtggattaaaagtgttccaagcttgaactaattgcttgtcggctcttttaagctcatcctttttgcatgtatccccgctaatatgcatctttatgatgctttttttggctcagcagtcatgctttatggaggcatgctctatgg

SEQ ID NO: 6309 - DNA, 362 bp, Homo sapiens
gttaaaattggctacaatacttttatttttgtttgttttgcacaggagtaactcaagatgattttgatgttgcagttttaaatttcactttgacttgagctgggaaatcctttggcctattataccatggatgctaaaaatggtaagagctgcatgttctgccttgatgttttcaagactgaatttggagggagaaaaattattttgcctaaggatgtccgtgaaagtatcaggaaaacactgaaaagccggagagaagggttcaattgtagcgtgctccctttaagagggaaacgagattagcaactttggcaaatttttgggactctattcagagggaaagagaagagctgccagtgtca

SEQ ID NO: 6310 - DNA, 2112 bp, Homo sapiens
gtaggaacaaaccggtgtcaatggttaacccaggttcttggtgtctggagcttttctttcctttattattaactaaagagcattctctaccattgcccagctgaaagcacctagctcatagattctctgtggggagagtgaataaagaatgggggattgaggcacagagtgttaaaatagtgagacacaggattctaactggcagactggcactttatctcaattcttaactgctgtgttgcctctcactttaaagacatccacattccaccctgggccttgcccgtctggtgagcccaatctctgctggtcagtcacgcagttgaggtcagggaaggagtaactcaagatgattttgatgttgcagttttaaatttcactttgacttgagctgggaaatcctttggcctattataccatggatgctaaaaatggttctaactgaaaacccaaaccaagaaatagcaacaagtctagaattcttactactacaaaactcacctggatccctaagggcacagcaaagaatgagctattacggcagcagctatcatattatcaatgcggacgcaaaatacccaggctacccgccagagcacattatagctgagaagagaagagcaagaagacgattacttcacaaagatggcagctgtaatgtctacttcaagcacatttttggagaatggggaagctatgtggttgacatcttcaccactcttgtggacaccaagtggcgccatatgtttgtgatattttctttatcttatattctctcgtggttgatatttggctctgtcttttggctcatagcctttcatcatggcgatctattaaatgatccagacatcacaccttgtgttgacaacgtccattctttcacaggggcctttttgttctccctagagacccaaaccaccataggatatggttatcgctgtgttactgaagaatgttctgtggccgtgctcatggtgatcctccagtccatcttaagttgcatcataaatacctttatcattggagctgccttggccaaaatggcaactgctcgaaagagagcccaaaccattcgtttcagctactttgcacttataggtatgagagatgggaagctttgcctcatgtggcgcattggtgattttcggccaaaccacgtggtagaaggaacagttagagcccaacttctccgctatacagaagacagtgaagggaggatgacgatggcatttaaagacctcaaattagtcaacgaccaaatcatcctggtcaccccggtaactattgtccatgaaattgaccatgagagccctctgtatgcccttgaccgcaaagcagtagccaaagataactttgagattttggtgacatttatctatactggtgattccactggaacatctcaccaatctagaagctcctatgttccccgagaaattctctggggccataggtttaatgatgtcttggaagttaagaggaagtattacaaagtgaactgcttacagtttgaaggaagtgtggaagtatatgcccccttttgcagtgccaagcaattggactggaaagaccagcagctccacatagaaaaagcaccaccagttcgagaatcctgcacgtcggacaccaaggcgagacgaaggtcatttagtgcagttgccattgtcagcagctgtgaaaaccctgaggagaccaccacttccgccacacatgaatatagggaaacaccttatcagaaagctctcctgactttaaacagaatctctgtagaatcccaaatgtagtcctaaattgcaattatgagggctaccactgaatcattttatctttcagccaatcaagtcgttgtaaacgtggcttttttgaaagtgttatggctatgttttatgatgatgctgggtaagtagagtaagttaaacttggtaaaagataatctaaaaattccatagttctcagttattaaaatttttcttgttcgccaattttgtattaagaatgctattaagcctaattgattaaaatttatcttttttattatcttacatgcttgtatcttcagttggaggtgtagtattcaaaaacggggaatgaaggcaggaaggaggctggaat

SEQ ID NO: 6311 - DNA, 4033 bp, Homo sapiens
agctgagaactcagtggcctttgtctgtggtgaatgtatccggaaaggcaaagaagagagagattctcctgtggggtttctcatctccatggcggtaggtgctgacagcttcagaagggtataacagggccaagagaaaagggccctgagatgctcagctacggtgctcttacaagatgaaaaggacatggggttcagatctgcacttcatcatctttcactaagacatccacattccaccctgggccttgcccgtctggtgagcccaatctctgctggtcagtcacgcagttgaggtcagggaaggagtaactcaagatgattttgatgttgcagttttaaatttcactttgacttgagctgggaaatcctttggcctattataccatggatgctaaaaatggttctaactgaaaacccaaaccaagaaatagcaacaagtctagaattcttactactacaaaactcacctggatccctaagggcacagcaaagaatgagctattacggcagcagctatcatattatcaatgcggacgcaaaatacccaggctacccgccagagcacattatagctgagaagagaagagcaagaagacgattacttcacaaagatggcagctgtaatgtctacttcaagcacatttttggagaatggggaagctatgtggttgacatcttcaccactcttgtggacaccaagtggcgccatatgtttgtgatattttctttatcttatattctctcgtggttgatatttggctctgtcttttggctcatagcctttcatcatggcgatctattaaatgatccagacatcacaccttgtgttgacaacgtccattctttcacaggggcctttttgttctccctagagacccaaaccaccataggatatggttatcgctgtgttactgaagaatgttctgtggccgtgctcatggtgatcctccagtccatcttaagttgcatcataaatacctttatcattggagctgccttggccaaaatggcaactgctcgaaagagagcccaaaccattcgtttcagctactttgcacttataggtatgagagatgggaagctttgcctcatgtggcgcattggtgattttcggccaaaccacgtggtagaaggaacagttagagcccaacttctccgctatacagaagacagtgaagggaggatgacgatggcatttaaagacctcaaattagtcaacgaccaaatcatcctggtcaccccggtaactattgtccatgaaattgaccatgagagccctctgtatgcccttgaccgcaaagcagtagccaaagataactttgagattttggtgacatttatctatactggtgattccactggaacatctcaccaatctagaagctcctatgttccccgagaaattctctggggccataggtttaatgatgtcttggaagttaagaggaagtattacaaagtgaactgcttacagtttgaaggaagtgtggaagtatatgcccccttttgcagtgccaagcaattggactggaaagaccagcagctccacatagaaaaagcaccaccagttcgagaatcctgcacgtcggacaccaaggcgagacgaaggtcatttagtgcagttgccattgtcagcagctgtgaaaaccctgaggagaccaccacttccgccacacatgaatatagggaaacaccttatcagaaagctctcctgactttaaacagaatctctgtagaatcccaaatgtagtcctaaattgcaattatgagggctaccactgaatcattttatctttcagccaatcaagtcgttgtaaacgtggcttttttgaaagtgttatggctatgttttatgatgatgctgggtaagtagagtaagttaaacttggtaaaagataatctaaaaattccatagttctcagttattaaaatttttcttgttcgccaattttgtattaagaatgctattaagcctaattgattaaaatttatcttttttattatcttacatgcttgtatcttcagttggaggtgtagtattcaaaaacggggaatgaaggcaggaaggaggctggaataaataaaaataaaaatagacaagtaagacagcataaataatacatttttaaacatgtcaacattgataatacaatgaagatttaccataaaaagtatcatatctaaccaagatatgcaaaagatgcattcagtaagctgtaacgttgagaaatgtaactgtgaaatcagctcaccagttcaagtcactaggtttgccacttggaccgtcttggtttcagcgagcatagcgagtggctgtaagaaattgtccatgccaccaattccactgctacttgcccaggtagtgatcagtgagagttagaagcaattttttctctaaccgatgaggcagaagaaaagttaacagtatttaaagcagcatttctctcttaacgttcctgggagactccaacaaatggagaccagaaacaaggcaaccacgaccttgctaggttctctgaggaggggactttctatgttcacgtcccaccttcttcgaggacatgaccaagggacaggatcatacagatgaggtgaggggatggttagcagcgataaacattctcagacccttggagagaaaccgttgctagcttgctggtcccgaaagattgcaactttggctgctacagaaaggatagaacctttttggggggagggtggggagggagatatttatttgtgcccagaagcagttatgtatgcttcttgtcttggttactgtacaagatacaaatgactcgagttgtggattgcaagaaactcttttattaaacttggaacaaccatttaaatgaaggattttgtgagatagaattcaattaaagcgatttgaatgcacagtaagtggataatctgagtacaatgaaatttcttaagttttagaacatgagataaagttgtatactctactttcatgttaaaatgttaatcatgattactttaagcccacatccactgagtaaagagtcactttaaactttataaatcaaagagatattaggaacattcagaattatttgtgttttgtttttgttttacattgttgctgcactggcaataagtatgtggcactgtttttatttgtttatgttatttaaatacacacccagacacacacacacacagtttttgctttttctggaaaatctttctttctcttctctctccatgaaaattaaaacacacaagtgaatgaagtaattacatagtccaagattagaaatacaagtaaaatatataggtataggtagatagagtgcctttctgtttcttttcttttcttttttctttttttgttcttccttcctttcttccctcctccccctcatccttccctttctccttcttttcccttttttttttttttttgacctgggagtaataaagttactttttaaatgcacgtatgcaatcttttattcctcttgttttatggataagagatttgttcaggtcaaaagttgcaaaactgttctgaagcttaatattagagacccaagtaagattgtttttagtcttgcttgaggaatgcacactccatttaaaaaattgtgcgctctgtagatttggattttacagcagcaattacttggctaaattagagtactgcaatcttgtaagtagaaaacagccaccatgacaataaacaaaaacacttaaaaatatttttagcttgttttacctacatctagtttcatttcatcttgctttgctttgttgactctgctaccgctgatgtttgccttgtcaatatcagaataggggcatcagtgtcccgtgaaatacattttgttgtgctatgagcctctgtaatcaaatgcttgtactcagaagagagtgtaaaatcagcatttctatgtaacatatatctctaattatctgtgtaattttataacatactttgacaaccccagtgagttacttaataataaagatcttaaaataatgcaaaaaaaaaaaatgcatatac

SEQ ID NO: 6312 - DNA, 2031 bp, Homo sapiens
gtaggaacaaaccggtgtcaatggttaacccaggttcttggtgtctggagcttttctttcctttattattaactaaagagcattctctaccattgcccagctgaaagcacctagctcatagattctctgtggggagagtgaataaagaatgggggattgaggcacagagtgttaaaatagtgagacacaggattctaactggcagactggcactttatctcaattcttaactgctgtgttgcctctcactttaaaggagtaactcaagatgattttgatgttgcagttttaaatttcactttgacttgagctgggaaatcctttggcctattataccatggatgctaaaaatggttctaactgaaaacccaaaccaagaaatagcaacaagtctagaattcttactactacaaaactcacctggatccctaagggcacagcaaagaatgagctattacggcagcagctatcatattatcaatgcggacgcaaaatacccaggctacccgccagagcacattatagctgagaagagaagagcaagaagacgattacttcacaaagatggcagctgtaatgtctacttcaagcacatttttggagaatggggaagctatgtggttgacatcttcaccactcttgtggacaccaagtggcgccatatgtttgtgatattttctttatcttatattctctcgtggttgatatttggctctgtcttttggctcatagcctttcatcatggcgatctattaaatgatccagacatcacaccttgtgttgacaacgtccattctttcacaggggcctttttgttctccctagagacccaaaccaccataggatatggttatcgctgtgttactgaagaatgttctgtggccgtgctcatggtgatcctccagtccatcttaagttgcatcataaatacctttatcattggagctgccttggccaaaatggcaactgctcgaaagagagcccaaaccattcgtttcagctactttgcacttataggtatgagagatgggaagctttgcctcatgtggcgcattggtgattttcggccaaaccacgtggtagaaggaacagttagagcccaacttctccgctatacagaagacagtgaagggaggatgacgatggcatttaaagacctcaaattagtcaacgaccaaatcatcctggtcaccccggtaactattgtccatgaaattgaccatgagagccctctgtatgcccttgaccgcaaagcagtagccaaagataactttgagattttggtgacatttatctatactggtgattccactggaacatctcaccaatctagaagctcctatgttccccgagaaattctctggggccataggtttaatgatgtcttggaagttaagaggaagtattacaaagtgaactgcttacagtttgaaggaagtgtggaagtatatgcccccttttgcagtgccaagcaattggactggaaagaccagcagctccacatagaaaaagcaccaccagttcgagaatcctgcacgtcggacaccaaggcgagacgaaggtcatttagtgcagttgccattgtcagcagctgtgaaaaccctgaggagaccaccacttccgccacacatgaatatagggaaacaccttatcagaaagctctcctgactttaaacagaatctctgtagaatcccaaatgtagtcctaaattgcaattatgagggctaccactgaatcattttatctttcagccaatcaagtcgttgtaaacgtggcttttttgaaagtgttatggctatgttttatgatgatgctgggtaagtagagtaagttaaacttggtaaaagataatctaaaaattccatagttctcagttattaaaatttttcttgttcgccaattttgtattaagaatgctattaagcctaattgattaaaatttatcttttttattatcttacatgcttgtatcttcagttggaggtgtagtattcaaaaacggggaatgaaggcaggaaggaggctggaat

SEQ ID NO: 6313 - DNA, 1689 bp, Homo sapiens
tcagagacgcagagagaggccaaggtgagatgaggctggggtgaggtcttttaggaaagtgtgtgtgaaggaagaggggtaggagcaggagtaggcagggagagccttcagtcttggtagaggtgcacctgtgacgaggttggggaaggaggagggctgggtttcagtgcaggtctgagaaatggagtgggcctgaactagccccagagcattagttccgtgctctgccattccctggaaaaagcctcatgccacacactggtggacccagaggcagcagcacagcttccaagcggcaggcactcggccaccacgggactgctgagaagtatccttcccagtgtgctgcatctcagcaagtcagaaagcacagccagctttccttcccacaggcttcttccccacacacgggttacttagagcgttagtcctcggacagtctcctcactccactttttcattgtattctattgttcatattgccatggtatcttaaaaccatggtttgcggatggcgctctcctgccaggaactcttcctctgtcatgtgtgggattaatttaaactgttgagcatgacatcatcttccagccttacttcttcaccttgaaatacgcacactatagatgtcattcatattgaactgtatattattaatatctgtgctgttaccgttgtcggtactctactcctgctcctgctgttgaacttacacacttacttattttcttaattctaatcaggcgtccttttatgtggaaaacctcagtgtcttcctacttaacatgtcttccccaggagtgattcttagttacttgcttctatttttgcactggtcacattgtgtttcaaacgcgtgccgctgtctgtcctccacgcttagtgagggtggtccctgagatcctgggcttgaccagctgcactttctctgatcctcagcacctcacatgggcctgctgtatgttcagtgctcagtaactgttgtttttataattaataccttgcaaataagcatgtaaggtgactactagcattttgcaaatgcgtatagtttataggttagaagcaactgccagttttgtcacatgtgccatagggcggatcctcaccaagttggaaatagtgagctcttgacttgatgatggagtattctttgtgacttccccataagctctcttaaatgattaatgttaggacatacgtgatatttccgtggccgaggcatcaccacattacttcatgtgtgttagatgatcattgtacacgtagcttagtacacagatgcctttagaagacttacaaagaatcgagtgttttctttcatgacatcagtgtttttaatgcttcacactcaattctttacaagctgattaaagaattactttgtgccgtcaatatatattcctttgtttccttcatacaatacagttctgtgagaaaagactgtacgaccagcctggactcattccttgtctgagatgcattccgtaagctaataaagccaaacctctatttgtaatatggtccagagcttgttatggaaatgcggcccttgaaaaaaataaaataatttataattgttcagatttcaaaatcatgataaattagtgattccctgaaacatgagaaagagaagcaagttgtaggttatattttcatgaatctgaattgaaatagtgatttaaaaaa

SEQ ID NO: 6314 - DNA, 1409 bp, Homo sapiens
  misc_feature (1399)..(1399): n is a, c, g, or t
  misc_feature (1401)..(1401): n is a, c, g, or t
tcagagacgcagagagaggccaaggtgagatgaggctggggtgaggtcttttaggaaagtgtgtgtgaaggaagaggggtaggagcaggagtaggcagggagagccttcagtcttggtagaggtgcacctgtgacgaggttggggaaggaggagggctgggtttcagtgcaggtctgagaaatggagtgggcctgaactagccccagagcattagttccgtgctctgccattccctggaaaaagcctcatgccacacactggtggacccagaggcagcagcacagcttccaagcggcaggcactcggccaccacgggactgctgagaagtatccttcccagtgtgctgcatctcagcaagtcagaaagcacagccagctttccttcccacaggcttcttccccacacacgggttacttagagcgttagtcctcggacagtctcctcactccactttttcattgtattctattgttcatattgccatggtatcttaaaaccatggtttgcggatggcgctctcctgccaggaactcttcctctgtcatgtgtgggattaatttaaactgttgagcatgacatcatcttccagccttacttcttcaccttgaaatacgcacactatagatgtcattcatattgaactgtatattattaatatctgtgctgttaccgttgtcggtactctactcctgctcctgctgttgaacttacacacttacttattttcttaattctaatcaggcgtccttttatgtggaaaacctcagtgtcttcctacttaacatgtcttccccaggagtgattcttagttacttgcttctatttttgcactggtcacattgtgtttcaaacgcgtgccgctgtctgtcctccacgcttagtgagggtggtccctgagatcctgggcttgaccagctgcactttctctgatcctcagcacctcacatgggcctgctgtatgttcagtgctcagtaactgttgtttttataattaataccttgcaaataagcatgtaaggtgactactagcattttgcaaatgcgtatagtttataggttagaagcaactgccagttttgtcacatgtgccatagggcggatcctcaccaagttggaaatagtgagctcttgacttgatgatggagtattctttgtgacttccccataagctctcttaaatgattaatgttaggacatacgtgatatttccgtggccgaggcatcaccacattacttcatgtgtgttagatgatcattgtacacgtagcttagtacacagatgcctttagaagacttacaaagaatcgagtgttttctttcatgacatcagtgtttttaatgcttcacaaagtaattctttaatcagcttgtaaagagtcgaccggccgcagaatttngnagtagtag

SEQ ID NO: 6315 - DNA, 362 bp, Homo sapiens
atggactaacccgctgagcagaaaaatccccagtacaacaaaataaccctaaggaatatatatattttttctatagtggctaattggagaggagtaagagttcagactctgtaagtaaatatctgatttcaaattccatcctatatattttcccaatacttcatttatacttgccaaattttttctcttccccaaaactacctttgggaagggattaggaatgagtccctaatttaagtcttgcattgtttaagctttaaatcagggccgaatattctcttaactatgaatggtcattgaacaaggaaaaacaacagatacacaaacgtatatgtatcttggaatgggaaggaataatgagg

SEQ ID NO: 6316 - DNA, 342 bp, Homo sapiens
tatttgtttgtaaattgcctatacatatccccgttctttttttctatcagataggctgtcttttttatattgatttttatgtttttatactttatgaatattaaccattcttatgttttaggtgttgcaaattttttcttttttatcatttgtcttttgaatgtgtttatagtgacttttgctggtgtaccaaagcttccatttttaaaatacaaaatacatgaatctttgtgaatcctgggtttcgtcctttattgataaatccttctttagcataagattataaaaacattatgctattaatttaatcattatggttttttatatccgtaatctatctca

SEQ ID NO: 6317 - DNA, 328 bp, Homo sapiens
ccaagatcaagcggaaaagctgattgtggctactgagttggggtcctcacagttgaagaaaagtcactgataaggaaggggcaggaataaaccctgcggggcggcactggaggtacaggcatcagtacaggctcacaacctttgccatgtgtacagactggatgcagaaatcaataccggaacatttacacacacacatttcccagctctgtccactgacgcgtgacagggcccaggcgcgatgaccccccacttaggctacagagagcaaagtccaaaagctgttccagtttcagcactctaaagtcccacgtcccagggaaagcct

SEQ ID NO: 6318 - DNA, 1057 bp, Homo sapiens
ggttgatctcaaactcctggccccaagcaatccacctgcctcagcctcccaaagtgctaggattataggaataagccaccatgcccagcctaaaagcatgttttgaactcttctttttttatgattcatatttaattatttttagcagaaagagaaatgttaaatttctgtatgaaaatttttataaccactttctatgttatgtatgtatatatacatatatatttttgtaattatgtttgtaccagcctggacaacatagtgagaccatctctacagaaaattagaaaaattggccaggtatggtgttgtgcatatgtactcccagctactcgggaggcagaggcaggaggattgcttcaccccaggcatcaaggctgcagtgagctatgatggtgccattgcactctagcctggatgacagagtgagaccctatcttagggtcagggttaaaaaagaaaagtttgttcagttatcaaatagtgacgaatttgtattcagaagtacactaatacaagtttaaatttttcagaaaaatcaatccccagtgataacatagtcatgtgatacttttttttccattcaaagatcacaacatatttctttaaagaacaccactactctacctgggcaacaaaacgagaccctgtctcaaaaaaaaaaaaaaagaaatcagaacattgtaggtataaaacatccatgagcctttacctcagaaaggtaaagttagatatgaagaaagttaaggaaaacatagtaaatgggaagaatcttagtatctctaagaggagatactttctggtagttagtgactccctgatgactggtatagacccataactgagcacctgataatatatcccataccactgattttttttctgccccttacgctacttttgagaagaaaaagaaagatatgaaagcccagcatggtggctgacacctgtaatcccaacattatgggaggccaaggcgcgatcctcgcttgaggcctgaagtttgaaaccagtctgggcaacactgagatctcatctctacccaacaaaaaaaaaa

SEQ ID NO: 6319 - DNA, 476 bp, Homo sapiens
tgagtgacataaagtaacacatccaagcagttaaaagatagaacaggattagaaacagcaaattataatgagcagggcgatcaactctgaaagagggaaatgaaataaaaattcaagaatagagcatagtgaaaacaagtacttttgggtagtcaagtgggtaaatgtgacactctaaaggagaaagtaaaacaggtcaggcacagtggcccacacctgtaatcccagcactttgggaggccaaggtgggaggatcgctttagttcaggagtttaagaccagcatggtcaacatggcaaaacccatgtctctaccaaaaagaaacaaaaaaaattgctggggcatgtacctgtggtctcagctacttggaaggctgaggtgggaggattgcttgagccgggaaggtagagtttgcagtgcgctgagaccatgctactatgctccagcctgggcaacaaaacgagaccctgtctcaa

SEQ ID NO: 6320 - DNA, 771 bp, Homo sapiens
gaaggagaagaatcaagtgcagggttgggactagtgcttctcaaattttaatgtgcaggagaatcatgcatggatcttgttaatgctgattctggtacagtaggtctagggcggggcctgagattctgcatttctaacaagaacccaggtgatgctgacgctgctgggccaaaaaagacactttgagtagcaagggttaggcaacctttaaagggcccttcaagagtctaagattccatgaaggatactatttcctctacaagcttgtgaaagtcttccagtgctactgggaatggggtacagggataaatctcactgttttgacctcacagaagtaaacccctagaatcatgttctcaaaatgaaacactggattgctgaactgatggcattgagaattaaggctccaaaatcctgggagtttcatacctaactccactgcctttgccttatgatgcacactgctccctctatccctccctcccagggtctgcagagatgaactatgctgttttaggtctcattggtccttataccttccctaaaccaggaggactttggagcctgctgacacagggagttctacatgtctaagcacgcagctgctagagtcctcagccatctgagctaaatagctgctcagagacaattagtacacctccgtatcttacagataaaggaactgaagtccaaacaagccaagctacccaaccaaggctcacagcaggcaagaggataaaaaccatgtcctttgactcccaggttagtttt

SEQ ID NO: 6321 - DNA, 6174 bp, Homo sapiens
gcgagtgactgcaccgagcccgagaagtcgccgcgccccgcagccgccccgactggttccccgccttgcccgtgggccccgccgggatggggaaccgccgggacctgggccagccgcgggccggtctctgcctgctcctggccgcgctgcagcttctgccggggacgcaggccgatcctgtggatgtcctgaaggccctgggtgtgcagggaggccaggctggggtccccgaggggcctggcttctgtccccagaggactccagagggtgaccgggcattcagaattggccaggccagcacgctcggcatccccacgtgggaactctttccagaaggccactttcctgagaacttctccttgctgatcaccttgcggggacagccagccaatcagtctgtcctgctgtccatttatgatgaaaggggtgcccggcagttgggcctggcactggggccagcgctgggtctcctaggtgaccccttccgccccctcccccagcaggtcaacctcacagatggcaggtggcaccgtgtggccgtcagcatagatggtgagatggtgaccctggtagctgactgtgaagctcagccccctgttttgggccatggcccccgcttcatcagcatagctggactcactgtgctggggacccaggaccttggggaaaagactttcgagggagacattcaggagctgctgataagcccagatcctcaggctgccttccaggcttgtgagcggtacctccccgactgtgacaacctggcaccggcagccacagtggctccccagggtgaaccagaaacccctcgtcctcggcggaaggggaagggaaaagggaggaagaaagggcgaggtcgcaaggggaagggcaggaaaaagaacaaggaaatttggacctcaagtccacctcctgactccgcagagaaccagacctccactgacatccccaagacagagactccagctccaaatctgcctccgacccccacgcctttggtcgtcacctccactgtgactactggactcaatgccacgatcctagaggggagcttggaccctgacagtggaaccgagctggggaccctggagaccaaggcagccagggaggatgaagaaggagatgattccaccatgggccctgacttccgggcagcagaatatccatctcggactcagttccagatctttcctggtgctggagagaaaggagcaaaaggagagcccgcagtgattgaaaaggggcagcagtttgagggacctccaggagccccaggaccccaaggggtggttggcccctcaggccctcccggccccccaggattccctggcgaccctggtccaccgggccctgctggcctcccaggaatccccggcattgatgggatccgaggcccaccgggcactgtgatcatgatgccgttccagtttgcaggcggctcctttaaaggccccccagtctcattccagcaggcccaggctcaggcagttctgcagcagactcagctctctatgaaaggcccccctggtccagtggggctcactgggcgcccaggccctgtgggtctccccgggcatccaggtctgaaaggagaggagggagcagaagggccacagggtccccgaggcctgcagggacctcatggaccccctggccgagtgggcaagatgggccgccctggagcagatggagctcggggcctcccaggggacactggacctaagggtgatcgtggcttcgatggcctccctgggctgcctggtgagaagggccaaaggggtgactttggccatgtggggcaacccggtcccccaggagaggatggtgagaggggagcagagggacctccagggcccactggccaggctggggagccgggtccacgaggactgcttggccccagaggctctcctggccccacgggtcgcccgggtgtgactggaattgatggtgctcctggtgccaaaggcaatgtgggtcctccaggagaaccaggccctccgggacagcagggaaaccatgggtcccagggactccccggtccccagggactcattggcactcctggggagaagggtccccctggaaacccaggaattccaggcctcccaggatccgatggccctctgggtcacccaggacatgagggccccacgggagagaaaggggctcagggtccaccagggtcggcaggccctccgggctatcctggacctcggggagtgaagggcacttcaggcaaccggggcctccagggggagaaaggcgagaagggagaggacggcttcccaggcttcaagggcgatgtggggctcaaaggtgatcaggggaaacccggagctccaggtccccggggagaggatggtcctgaggggccgaaggggcaggcggggcaggctggcgaggaggggcccccaggctcagctggggagaagggcaagcttggggtgccaggcctcccaggttatccaggacgccctggacctaagggatctattggatttcccggtcccctgggacccataggagagaaagggaagtcgggaaagacagggcagccaggcctggaaggagagcggggaccaccaggttcccgtggagagagggggcaaccgggtgccacagggcaaccaggccccaagggcgatgtgggccaggatggagcccctgggatccctggagaaaagggcctccctggtctgcaaggccctccaggattccctgggccaaagggcccccctggtcaccaaggtaaagatgggcgaccagggcaccctggacagagaggagaactgggcttccaaggtcagacaggcccgcctggaccagctggtgtcttaggccctcagggaaagacaggagaagtgggacctctaggtgaaagggggcctccaggcccccctggacctcctggtgaacaaggtcttcctggcctggaaggcagagagggggccaagggggaactgggaccaccaggaccccttgggaaagaagggccagctggactcaggggctttcccggccccaaagggggccctggggacccgggacctactggcttaaagggtgataagggccccccagggcctgtgggggccaatggctcccctggtgagcgcggtcctttgggcccagcaggaggcattggacttcctggccaaagtggcagcgaaggccccgttggccctgcaggcaagaaggggtcccggggagaacgtggcccccctggccccactggcaaagatgggatcccagggcccctggggcctctgggaccccctggagctgctgggccttctggcgaggaaggggacaagggggatgtgggtgcccccggacacaaggggagtaaaggcgataaaggagacgcgggcccacctggacaaccagggatacggggtcctgcaggacacccaggtcccccgggagcagacggggctcaggggcgccggggacccccaggcctctttgggcagaaaggagatgacggagtcagaggctttgtgggggtgattggccctcctggactgcaggggctgccaggccctccgggagagaaaggggaggtcggagacgtcgggtccatgggtccccatggagctccaggtcctcggggtccccaaggccccactggatcagagggcactccagggctgcctggaggagttggtcagccaggcgccgtgggtgagaagggtgagcgaggggacgctggagacccagggcctccaggagccccaggcatcccggggcccaagggagacattggtgaaaagggggactcaggcccatctggagctgctggacccccaggcaagaaaggtccccctggagaggatggagccaaagggagcgtgggccccacggggctgcccggagatctagggcccccaggagaccctggagtttcaggcatagatggttccccaggggagaagggagaccctggtgatgttgggggaccgggtccgcctggagcttctggggagcccggcgcccccgggccccccggcaagaggggtccttcaggccacatgggtcgagaaggcagagaaggggagaaaggtgccaagggggagccaggtcctgatgggcccccagggaggacgggtccaatgggggctagagggccccctggacgtgtggggcctgagggtcttcgagggatccctggccctgtgggtgaaccaggcctcctgggagcccctggacagatgggccctcctggccccctggggccctctggcctcccagggctgaagggagacactggccccaagggggaaaagggccacattggattgatcggtctcattggccccccgggagaagctggtgagaaaggagatcaggggttgccaggcgtgcagggaccccctggtcccaagggagaccctggtccccctggtcccattggctctctgggccaccctgggcccccaggtgtggcgggccctctaggacagaaaggctcaaaagggtctccggggtccatgggcccccgtggagacactggacctgcaggcccaccaggccccccgggtgcccctgccgagctgcatgggctgcgcaggcgccggcgcttcgtcccagtcccgcttccagtcgtggagggcggcctggaggaggtgctggcctcgctcacatcgctgagcttggagctggagcagctgcggcgtcctcccggcactgcggagcgcccgggcctcgtgtgccacgagctgcaccgcaaccacccgcacctgcctgatggggaatactggattgaccccaaccagggctgcgcgcgggactcgttcagggttttttgcaacttcacggcgggaggagagacctgcctctatcccgacaagaagtttgagatcgtgaaattggcctcctggtccaaggaaaagcctggaggctggtatagcacattccgtcgagggaagaagttctcctacgtggacgccgacgggtccccagtgaatgtcgtgcagctgaacttcctgaaactgctgagtgccacagctcgccagaacttcacctactcctgccagaatgcagctgcctggctggacgaagccacgggtgactacagccactccgcccgcttccttggcaccaatggagaggagctgtctttcaaccagacgacagcagccactgtcagcgtcccccaggatggctgccggctccggaaaggacagacgaagacccttttcgaattcagctcttctcgagcgggatttctgcccctgtgggatgtggcggccactgactttggccagacgaaccaaaagtttgggtttgaactgggccccgtctgcttcagcagctgagagtgtccggggtgggagggaccgtgagggagccccagaatggggtgcatttggtgctgaggctttgaagccaccgtatttttcgttacctgtgactatggagccaatgggatgtgacttcgctcatcacggtcagtcattccttctcctttccagggtgctgggggctggggttccctggcccaagggtccagcctcctctcaccccattccaggtggcatactgcagtctggctctttctcccctccctccccacccaagcctcacctccccaccccttgaacccccatgcaatgagcttctaactcagagctgatgaacaaaagcccccccacccccaatgcctgcctcctcactcctccgtcgctgcccttcacaccttttggtgctacccctccccagagttaagcactggatgtctcctgatcccaggctgggacccctacccccaccccctttgatcctttctacttccacggtgaaaggactgaggtcggactacagagggaagagggacttcccttgactgggttgtgtttcttttcctgcctcagcccagctctgcaaatcccctccccctgccccccacctccccaggctcaccttgccatgccaggtggtttggggaccaagatgttgggggggtgaatcaggatcctaatggtgctgccctatttatacctgggtctgtattaaaagggaaagtcccccctgttgtagatttcatctgcttcctccttagggaaggctgggatatgatgagagattccagcccaagcccggccccccaccgccaggccatagggcataatttgcatctcaaatctgagaataaactgatgaactgtg

SEQ ID NO: 6322 - DNA, 6617 bp, Homo sapiens
gcgagtgactgcaccgagcccgagaagtcgccgcgccccgcagccgccccgactggttccccgccttgcccgtgggccccgccgggatggggaaccgccgggacctgggccagccgcgggccggtctctgcctgctcctggccgcgctgcagcttctgccggggacgcaggccgatcctgtggatgtcctgaaggccctgggtgtgcagggaggccaggctggggtccccgaggggcctggcttctgtccccagaggactccagagggtgaccgggcattcagaattggccaggccagcacgctcggcatccccacgtgggaactctttccagaaggccactttcctgagaacttctccttgctgatcaccttgcggggacagccagccaatcagtctgtcctgctgtccatttatgatgaaaggggtgcccggcagttgggcctggcactggggccagcgctgggtctcctaggtgaccccttccgccccctcccccagcaggtcaacctcacagatggcaggtggcaccgtgtggccgtcagcatagatggtgagatggtgaccctggtagctgactgtgaagctcagccccctgttttgggccatggcccccgcttcatcagcatagctggactcactgtgctggggacccaggaccttggggaaaagactttcgagggagacattcaggagctgctgataagcccagatcctcaggctgccttccaggcttgtgagcggtacctccccgactgtgacaacctggcaccggcagccacagtggctccccagggtgaaccagaaacccctcgtcctcggcggaaggggaagggaaaagggaggaagaaagggcgaggtcgcaaggggaagggcaggaaaaagaacaaggaaatttggacctcaagtccacctcctgactccgcagagaaccagacctccactgacatccccaagacagagactccagctccaaatctgcctccgacccccacgcctttggtcgtcacctccactgtgactactggactcaatgccacgatcctagaggggagcttggaccctgacagtggaaccgagctggggaccctggagaccaaggcagccagggaggatgaagaaggagatgattccaccatgggccctgacttccgggcagcagaatatccatctcggactcagttccagatctttcctggtgctggagagaaaggagcaaaaggagagcccgcagtgattgaaaaggggcagcagtttgagggacctccaggagccccaggaccccaaggggtggttggcccctcaggccctcccggccccccaggattccctggcgaccctggtccaccgggccctgctggcctcccaggaatccccggcattgatgggatccgaggcccaccgggcactgtgatcatgatgccgttccagtttgcaggcggctcctttaaaggccccccagtctcattccagcaggcccaggctcaggcagttctgcagcagactcagctctctatgaaaggcccccctggtccagtggggctcactgggcgcccaggccctgtgggtctccccgggcatccaggtctgaaaggagaggagggagcagaagggccacagggtccccgaggcctgcagggacctcatggaccccctggccgagtgggcaagatgggccgccctggagcagatggagctcggggcctcccaggggacactggacctaagggtgatcgtggcttcgatggcctccctgggctgcctggtgagaagggccaaaggggtgactttggccatgtggggcaacccggtcccccaggagaggatggtgagaggggagcagagggacctccagggcccactggccaggctggggagccgggtccacgaggactgcttggccccagaggctctcctggccccacgggtcgcccgggtgtgactggaattgatggtgctcctggtgccaaaggcaatgtgggtcctccaggagaaccaggccctccgggacagcagggaaaccatgggtcccagggactccccggtccccagggactcattggcactcctggggagaagggtccccctggaaacccaggaattccaggcctcccaggatccgatggccctctgggtcacccaggacatgagggccccacgggagagaaaggggctcagggtccaccagggtcggcaggccctccgggctatcctggacctcggggagtgaagggcacttcaggcaaccggggcctccagggggagaaaggcgagaagggagaggacggcttcccaggcttcaagggcgatgtggggctcaaaggtgatcaggggaaacccggagctccaggtccccggggagaggatggtcctgaggggccgaaggggcaggcggggcaggctggcgaggaggggcccccaggctcagctggggagaagggcaagcttggggtgccaggcctcccaggttatccaggacgccctggacctaagggatctattggatttcccggtcccctgggacccataggagagaaagggaagtcgggaaagacagggcagccaggcctggaaggagagcggggaccaccaggttcccgtggagagagggggcaaccgggtgccacagggcaaccaggccccaagggcgatgtgggccaggatggagcccctgggatccctggagaaaagggcctccctggtctgcaaggccctccaggattccctgggccaaagggcccccctggtcaccaaggtaaagatgggcgaccagggcaccctggacagagaggagaactgggcttccaaggtcagacaggcccgcctggaccagctggtgtcttaggccctcagggaaagacaggagaagtgggacctctaggtgaaagggggcctccaggcccccctggacctcctggtgaacaaggtcttcctggcctggaaggcagagagggggccaagggggaactgggaccaccaggaccccttgggaaagaagggccagctggactcaggggctttcccggccccaaagggggccctggggacccgggacctactggcttaaagggtgataagggccccccagggcctgtgggggccaatggctcccctggtgagcgcggtcctttgggcccagcaggaggcattggacttcctggccaaagtggcagcgaaggccccgttggccctgcaggcaagaaggggtcccggggagaacgtggcccccctggccccactggcaaagatgggatcccagggcccctggggcctctgggaccccctggagctgctgggccttctggcgaggaaggggacaagggggatgtgggtgcccccggacacaaggggagtaaaggcgataaaggagacgcgggcccacctggacaaccagggatacggggtcctgcaggacacccaggtcccccgggagcagacggggctcaggggcgccggggacccccaggcctctttgggcagaaaggagatgacggagtcagaggctttgtgggggtgattggccctcctggactgcaggggctgccaggccctccgggagagaaaggggaggtcggagacgtcgggtccatgggtccccatggagctccaggtcctcggggtccccaaggccccactggatcagagggcactccagggctgcctggaggagttggtcagccaggcgccgtgggtgagaagggtgagcgaggggacgctggagacccagggcctccaggagccccaggcatcccggggcccaagggagacattggtgaaaagggggactcaggcccatctggagctgctggacccccaggcaagaaaggtccccctggagaggatggagccaaagggagcgtgggccccacggggctgcccggagatctagggcccccaggagaccctggagtttcaggcatagatggttccccaggggagaagggagaccctggtgatgttgggggaccgggtccgcctggagcttctggggagcccggcgcccccgggccccccggcaagaggggtccttcaggccacatgggtcgagaaggcagagaaggggagaaaggtgccaagggggagccaggtcctgatgggcccccagggaggacgggtccaatgggggctagagggccccctggacgtgtggggcctgagggtcttcgagggatccctggccctgtgggtgaaccaggcctcctgggagcccctggacagatgggccctcctggccccctggggccctctggcctcccagggctgaagggagacactggccccaagggggaaaagggccacattggattgatcggtctcattggccccccgggagaagctggtgagaaaggagatcaggggttgccaggcgtgcagggaccccctggtcccaagggagaccctggtccccctggtcccattggctctctgggccaccctgggcccccaggtgtggcgggccctctaggacagaaaggctcaaaagggtctccggggtccatgggcccccgtggagacactggacctgcaggcccaccaggccccccgggtgcccctgccgagctgcatgggctgcgcaggcgccggcgcttcgtcccagtcccgcttccagtcgtggagggcggcctggaggaggtgctggcctcgctcacatcgctgagcttggagctggagcagctgcggcgtcctcccggcactgcggagcgcccgggcctcgtgtgccacgagctgcaccgcaaccacccgcacctgcctgatggggaatactggattgaccccaaccagggctgcgcgcgggactcgttcagggttttttgcaacttcacggcgggaggagagacctgcctctatcccgacaagaagtttgagatcgtgaaattggcctcctggtccaaggaaaagcctggaggctggtatagcacattccgtcgagggaagaagttctcctacgtggacgccgacgggtccccagtgaatgtcgtgcagctgaacttcctgaaactgctgagtgccacagctcgccagaacttcacctactcctgccagaatgcagctgcctggctggacgaagccacgggtgactacagccactccgcccgcttccttggcaccaatggagaggagctgtctttcaaccagacgacagcagccactgtcagcgtcccccaggatggctgccggctccggaaaggacagacgaagacccttttcgaattcagctcttctcgagcgggatttctgcccctgtgggatgtggcggccactgactttggccagacgaaccaaaagtttgggtttgaactgggccccgtctgcttcagcagctgagagtgtccggggtgggagggaccgtgagggagccccagaatggggtgcatttggtgctgaggctttgaagccaccgtatttttcgttacctgtgactatggagccaatgggatgtgacttcgctcatcacggtcagtcattccttctcctttccagggtgctgggggctggggttccctggcccaagggtccagcctcctctcaccccattccaggtggcatactgcagtctggctctttctcccctccctccccacccaagcctcacctccccaccccttgaacccccatgcaatgagcttctaactcagagctgatgaacaaaagcccccccacccccaatgcctgcctcctcactcctccgtcgctgcccttcacaccttttggtgctacccctccccagagttaagcactggatgtctcctgatcccaggctgggacccctacccccaccccctttgatcctttctacttccacggtgaaaggactgaggtcggactacagagggaagagggacttcccttgactgggttgtgtttcttttcctgcctcagcccagctctgcaaatcccctccccctgccccccacctccccaggctcaccttgccatgccaggtggtttggggaccaagatgttgggggggtgaatcaggatcctaatggtgctgccctatttatacctgggtctgtattaaaagggaaagtcccccctgttgtagatttcatctgcttcctccttagggaaggctgggatatgatgagagattccagcccaagcccggccccccaccgccaggccatagggcataatttgcatctcaaatctgagaataaactgatgaactgtgaaaaaaaaaaaaaaataaataatataaaaaagggggggggcgcggcactaaaaatggtttccttgggggggccgagtgttataccgtgttaccacgaggttttctttggttccaagtggggccctaaatagggggcgccgcattctaataagctaagagcaagtgggaccagtaggatattaaacaaaacgatgtggggattggggggcaaaaacgtgggtcagactgggggagatcttgtgtggaagcggaacccttaaacattcggggggggtgtggaccacatatttgggcacaactcttcactctcggaacatttacacgctcaagggagtaaaattattaacttgcaaaggcattaggctggtaaccacgatggaatatgactgctcgatgaaagagtatgtacaggggagtatgatgtatgaaacttttttcaggac

SEQ ID NO: 6323 - DNA, 5493 bp, Homo sapiens
gcgagtgactgcaccgagcccgagaagtcgccgcgccccgcagccgccccgactggttccccgccttgcccgtgggccccgccgggatggggaaccgccgggacctgggccagccgcgggccggtctctgcctgctcctggccgcgctgcagcttctgccggggacgcaggccgatcctgtggatgtcctgaaggccctgggtgtgcagggaggccaggctggggtccccgaggggcctggcttctgtccccagaggactccagagggtgaccgggcattcagaattggccaggccagcacgctcggcatccccacgtgggaactctttccagaaggccactttcctgagaacttctccttgctgatcaccttgcggggacagccagccaatcagtctgtcctgctgtccatttatgatgaaaggggtgcccggcagttgggcctggcactggggccagcgctgggtctcctaggtgaccccttccgccccctcccccagcaggtcaacctcacagatggcaggtggcaccgtgtggccgtcagcatagatggtgagatggtgaccctggtagctgactgtgaagctcagccccctgttttgggccatggcccccgcttcatcagcatagctggactcactgtgctggggacccaggaccttggggaaaagactttcgagggagacattcaggagctgctgataagcccagatcctcaggctgccttccaggcttgtgagcggtacctccccgactgtgacaacctggcaccggcagccacagtggctccccagggtgaaccagaaacccctcgtcctcggcggaaggggaagggaaaagggaggaagaaagggcgaggtcgcaaggggaagggcaggaaaaagaacaaggaaatttggacctcaagtccacctcctgactccgcagagaaccagacctccactgacatccccaagacagagactccagctccaaatctgcctccgacccccacgcctttggtcgtcacctccactgtgactactggactcaatgccacgatcctagaggggagcttggaccctgacagtggaaccgagctggggaccctggagaccaaggcagccagggaggatgaagaaggagatgattccaccatgggccctgacttccgggcagcagaatatccatctcggactcagttccagatctttcctggtgctggagagaaaggagcaaaaggagagcccgcagtgattgaaaaggggcagcagtttgagggacctccaggagccccaggaccccaaggggtggttggcccctcaggccctcccggccccccaggattccctggcgaccctggtccaccgggccctgctggcctcccaggaatccccggcattgatgggatccgaggcccaccgggcactgtgatcatgatgccgttccagtttgcaggcggctcctttaaaggccccccagtctcattccagcaggcccaggctcaggcagttctgcagcagactcagctctctatgaaaggcccccctggtccagtggggctcactgggcgcccaggccctgtgggtctccccgggcatccaggtctgaaaggagaggagggagcagaagggccacagggtccccgaggcctgcagggacctcatggaccccctggccgagtgggcaagatgggccgccctggagcagatggagctcggggcctcccaggggacactggacctaagggtgatcgtggcttcgatggcctccctgggctgcctggtgagaagggccaaaggggtgactttggccatgtggggcaacccggtcccccaggagaggatggtgagaggggagcagagggacctccagggcccactggccaggctggggagccgggtccacgaggactgcttggccccagaggctctcctggccccacgggtcgcccgggtgtgactggaattgatggtgctcctggtgccaaaggcaatgtgggtcctccaggagaaccaggccctccgggacagcagggaaaccatgggtcccagggactccccggtccccagggactcattggcactcctggggagaagggtccccctggaaacccaggaattccaggcctcccaggatccgatggccctctgggtcacccaggacatgagggccccacgggagagaaaggggctcagggtccaccagggtcggcaggccctccgggctatcctggacctcggggagtgaagggcacttcaggcaaccggggcctccagggggagaaaggcgagaagggagaggacggcttcccaggcttcaagggcgatgtggggctcaaaggtgatcaggggaaacccggagctccaggtccccggggagaggatggtcctgaggggccgaaggggcaggcggggcaggctggcgaggaggggcccccaggctcagctggggagaagggcaagcttggggtgccaggcctcccaggttatccaggacgccctggacctaagggatctattggatttcccggtcccctgggacccataggagagaaagggaagtcgggaaagacagggcagccaggcctggaaggagagcggggaccaccaggttcccgtggagagagggggcaaccgggtgccacagggcaaccaggccccaagggcgatgtgggccaggatggagcccctgggatccctggagaaaagggcctccctggtctgcaaggccctccaggattccctgggccaaagggcccccctggtcaccaaggtaaagatgggcgaccagggcaccctggacagagaggagaactgggcttccaaggtcagacaggcccgcctggaccagctggtgtcttaggccctcagggaaagacaggagaagtgggacctctaggtgaaagggggcctccaggcccccctggacctcctggtgaacaaggtcttcctggcctggaaggcagagagggggccaagggggaactgggaccaccaggaccccttgggaaagaagggccagctggactcaggggctttcccggccccaaagggggccctggggacccgggacctactggcttaaagggtgataagggccccccagggcctgtgggggccaatggctcccctggtgagcgcggtcctttgggcccagcaggaggcattggacttcctggccaaagtggcagcgaaggccccgttggccctgcaggcaagaaggggtcccggggagaacgtggcccccctggccccactggcaaagatgggatcccagggcccctggggcctctgggaccccctggagctgctgggccttctggcgaggaaggggacaagggggatgtgggtgcccccggacacaaggggagtaaaggcgataaaggagacgcgggcccacctggacaaccagggatacggggtcctgcaggacacccaggtcccccgggagcagacggggctcaggggcgccggggacccccaggcctctttgggcagaaaggagatgacggagtcagaggctttgtgggggtgattggccctcctggactgcaggggctgccaggccctccgggagagaaaggggaggtcggagacgtcgggtccatgggtccccatggagctccaggtcctcggggtccccaaggccccactggatcagagggcactccagggctgcctggaggagttggtcagccaggcgccgtgggtgagaagggtgagcgaggggacgctggagacccagggcctccaggagccccaggcatcccggggcccaagggagacattggtgaaaagggggactcaggcccatctggagctgctggacccccaggcaagaaaggtccccctggagaggatggagccaaagggagcgtgggccccacggggctgcccggagatctagggcccccaggagaccctggagtttcaggcatagatggttccccaggggagaagggagaccctggtgatgttgggggaccgggtccgcctggagcttctggggagcccggcgcccccgggccccccggcaagaggggtccttcaggccacatgggtcgagaaggcagagaaggggagaaaggtgccaagggggagccaggtcctgatgggcccccagggaggacgggtccaatgggggctagagggccccctggacgtgtggggcctgagggtcttcgagggatccctggccctgtgggtgaaccaggcctcctgggagcccctggacagatgggccctcctggccccctggggccctctggcctcccagggctgaagggagacactggccccaagggggaaaagggccacattggattgatcggtctcattggccccccgggagaagctggtgagaaaggagatcaggggttgccaggcgtgcagggaccccctggtcccaagggagaccctggtccccctggtcccattggctctctgggccaccctgggcccccaggtgtggcgggccctctaggacagaaaggctcaaaagggtctccggggtccatgggcccccgtggagacactggacctgcaggcccaccaggccccccgggtgcccctgccgagctgcatgggctgcgcaggcgccggcgcttcgtcccagtcccgcttccagtcgtggagggcggcctggaggaggtgctggcctcgctcacatcgctgagcttggagctggagcagctgcggcgtcctcccggcactgcggagcgcccgggcctcgtgtgccacgagctgcaccgcaaccacccgcacctgcctgatggggaatactggattgaccccaaccagggctgcgcgcgggactcgttcagggttttttgcaacttcacggcgggaggagagacctgcctctatcccgacaagaagtttgagatcgtgaaattggcctcctggtccaaggaaaagcctggaggctggtatagcacattccgtcgagggaagaagttctcctacgtggacgccgacgggtccccagtgaatgtcgtgcagctgaacttcctgaaactgctgagtgccacagctcgccagaacttcacctactcctgccagaatgcagctgcctggctggacgaagccacgggtgactacagccactccgcccgcttccttggcaccaatggagaggagctgtctttcaaccagacgacagcagccactgtcagcgtcccccaggatggctgccgggtaagagggtggggcagtggccagctagagaggggaggcaagatgtcggccaccttcccggtaactcaccgtctctgtcttctctggggacagctccggaaaggacagacgaagacccttttcgaattcagctcttctcgagcgggatttctgcccctgtgggatgtggcggccactgactttggccagacgaaccaaaagtttgggtttgaactgggccccgtctgcttcagcagctgagagtgtccggggtgggagggaccgtgagtgcaccccaacttgcgcgaaagagcaagatcccaaccacttacccccc

SEQ ID NO: 6324 - DNA, 4562 bp, Homo sapiens
gcgagtgactgcaccgagcccgagaagtcgccgcgccccgcagccgccccgactggttccccgccttgcccgtgggccccgccgggatggggaaccgccgggacctgggccagccgcgggccggtctctgcctgctcctggccgcgctgcagcttctgccggggacgcaggccgatcctgtggatgtcctgaaggccctgggtgtgcagggaggccaggctggggtccccgaggggcctggcttctgtccccagaggactccagagggtgaccgggcattcagaattggccaggccagcacgctcggcatccccacgtgggaactctttccagaaggccactttcctgagaacttctccttgctgatcaccttgcggggacagccagccaatcagtctgtcctgctgtccatttatgatgaaaggggtgcccggcagttgggcctggcactggggccagcgctgggtctcctaggtgaccccttccgccccctcccccagcaggtcaacctcacagatggcaggtggcaccgtgtggccgtcagcatagatggtgagatggtgaccctggtagctgactgtgaagctcagccccctgttttgggccatggcccccgcttcatcagcatagctggactcactgtgctggggacccaggaccttggggaaaagactttcgagggagacattcaggagctgctgataagcccagatcctcaggctgccttccaggcttgtgagcggtacctccccgactgtgacaacctggcaccggcagccacagtggctccccagggtgaaccagaaacccctcgtcctcggcggaaggggaagggaaaagggaggaagaaagggcgaggtcgcaaggggaagggcaggaaaaagaacaaggaaatttggacctcaagtccacctcctgactccgcagagaaccagacctccactgacatccccaagacagagactccagctccaaatctgcctccgacccccacgcctttggtcgtcacctccactgtgactactggactcaatgccacgatcctagaggggagcttggaccctgacagtggaaccgagctggggaccctggagaccaaggcagccagggaggatgaagaaggagatgattccaccatgggccctgacttccgggcagcagaatatccatctcggactcagttccagatctttcctggtgctggagagaaaggagcaaaaggagagcccgcagtgattgaaaaggggcagcagtttgagggacctccaggagccccaggaccccaaggggtggttggcccctcaggccctcccggccccccaggattccctggcgaccctggtccaccgggccctgctggcctcccaggaatccccggcattgatgggatccgaggcccaccgggcactgtgatcatgatgccgttccagtttgcaggcggctcctttaaaggccccccagtctcattccagcaggcccaggctcaggcagttctgcagcagactcagctctctatgaaaggcccccctggtccagtggggctcactgggcgcccaggccctgtgggtctccccgggcatccaggtctgaaaggagaggagggagcagaagggccacagggtccccgaggcctgcagggacctcatggaccccctggccgagtgggcaagatgggccgccctggagcagatggagctcggggcctcccaggggacactggacctaagggtgatcgtggcttcgatggcctccctgggctgcctggtgagaagggccaaaggggtgactttggccatgtggggcaacccggtcccccaggagaggatggtgagaggggagcagagggacctccagggcccactggccaggctggggagccgggtccacgaggactgcttggccccagaggctctcctggccccacgggtcgcccgggtgtgactggaattgatggtgctcctggtgccaaaggcaatgtgggtcctccaggagaaccaggccctccgggacagcagggaaaccatgggtcccagggactccccggtccccagggactcattggcactcctggggagaagggtccccctggaaacccaggaattccaggcctcccaggatccgatggccctctgggtcacccaggacatgagggccccacgggagagaaaggggctcagggtccaccagggtcggcaggccctccgggctatcctggacctcggggagtgaagggcacttcaggcaaccggggcctccagggggagaaaggcgagaagggagaggacggcttcccaggcttcaagggcgatgtggggctcaaaggtgatcaggggaaacccggagctccaggtccccggggagaggatggtcctgaggggccgaaggggcaggcggggcaggctggcgaggaggggcccccaggctcagctggggagaagggcaagcttggggtgccaggcctcccaggttatccaggacgccctggacctaagggatctattggatttcccggtcccctgggacccataggagagaaagggaagtcgggaaagacagggcagccaggcctggaaggagagcggggaccaccaggttcccgtggagagagggggcaaccgggtgccacagggcaaccaggccccaagggcgatgtgggccaggatggagcccctgggatccctggagaaaagggcctccctggtctgcaaggccctccaggattccctgggccaaagggcccccctggtcaccaaggtaaagatgggcgaccagggcaccctggacagagaggagaactgggcttccaaggtcagacaggcccgcctggaccagctggtgtcttaggccctcagggaaagacaggagaagtgggacctctaggtgaaagggggcctccaggcccccctggacctcctggtgaacaaggtcttcctggcctggaaggcagagagggggccaagggggaactgggaccaccaggaccccttgggaaagaagggccagctggactcaggggctttcccggccccaaagggggccctggggacccgggacctactggcttaaagggtgataagggccccccagggcctgtgggggccaatggctcccctggtgagcgcggtcctttgggcccagcaggaggcattggacttcctggccaaagtggcagcgaaggccccgttggccctgcaggcaagaaggggtcccggggagaacgtggcccccctggccccactggcaaagatgggatcccagggcccctggggcctctgggaccccctggagctgctgggccttctggcgaggaaggggacaagggggatgtgggtgcccccggacacaaggggagtaaaggcgataaaggagacgcgggcccacctggacaaccagggatacggggtcctgcaggacacccaggtcccccgggagcagacggggctcaggggcgccggggacccccaggcctctttgggcagaaaggagatgacggagtcagaggctttgtgggggtgattggccctcctggactgcaggggctgccaggccctccgggagagaaaggggaggtcggagacgtcgggtccatgggtccccatggagctccaggtcctcggggtccccaaggccccactggatcagagggcactccagggctgcctggaggagttggtcagccaggcgccgtgggtgagaagggtgagcgaggggacgctggagacccagggcctccaggagccccaggcatcccggggcccaagggagacattggtgaaaagggggactcaggcccatctggagctgctggacccccaggcaagaaaggtccccctggagaggatggagccaaagggagcgtgggccccacggggctgcccggagatctagggcccccaggagaccctggagtttcaggcatagatggttccccaggggagaagggagaccctggtgatgttgggggaccgggtccgcctggagcttctggggagcccggcgcccccgggccccccggcaagaggggtccttcaggccacatgggtcgagaaggcagagaaggggagaaaggtgccaagggggagccaggtcctgatgggcccccagggaggacgggtccaatgggggctagagggccccctggacgtgtggggcctgagggtcttcgagggatccctggccctgtgggtgaaccaggcctcctgggagcccctggacagatgggccctcctggccccctggggccctctggcctcccagggctgaagggagacactggccccaagggggaaaagggccacattggattgatcggtctcattggccccccgggagaagctggtgagaaaggagatcaggggttgccaggcgtgcagggaccccctggtcccaagggagaccctggtccccctggtcccattggctctctgggccaccctgggcccccaggtgtggcgggccctctaggacagaaaggctcaaaagggtctccggtgagtacaccctgcttccgtgggcttacacatcccagctccccacccccttcactgcaccagaaccctcca

SEQ ID NO: 6325 - DNA, 694 bp, Homo sapiens
ggccctgctggcctcccaggaatccccggcattgatgggatccgaggcccaccgggcactgtgatcatgatgccggtaagaaggagatggagtggcccagccttggggagtggagtcctgatccaggagggggcctctcctgggggcttccctcaccactaaattcctcccagttccagtttgcaggcggctcctttaaaggccccccagtctcattccagcaggcccaggctcaggcagttctgcagcagactcaggtgagtgggaggtgtggacatagtgggaggaaccccagagagtgatagagcctcggcgtaaggaggggctgggcaggagaagggggttatttttctcctgaagatgcctctgtggggaatgttgggggtcttgtgggaggccccaagctctgactcctctgtctttccagctctctatgaaaggcccccctggtccagtggggctcactgggcgcccaggccctgtggtgagtaaggcgactgcgtggagggggcggtgcatgcattagtgaagaatcatctacccacactcctccatctctcctcccccaagggtctccccgggcatccaggtctgaaaggagaggagggagcagaagggccacaggtgagacttgtggagatagggcaggataggatgggaatagccttcccccaggaccacaagatacagtgct

SEQ ID NO: 6326 - DNA, 1533 bp, Homo sapiens
cacttccatgcacatttcaagaatgcagatggacacctctccctttggtgctactgtctgagggtgtaagattttaaagtgagcatctggcggtagtagcatttttagatatattcttggctaagtttctcattgcagtgcctttctttcctgccagtagtttcacagctatttatccagcttggagaaccttccctaatttcatatcttctagccaagtttttacatgtctgtcaccacaacataaacatgtgagttgaataacttttaaaagcagagtctgtctgtaaacaagtttttgccttctactttcaattgccttcttagatgagctaagtgttgaacggccggctcagtgctgtttttgggactatggaatgcatcttcctccaccactcccctcatttaatgaaaggactttcttctctctccatctagcacagtaatcgctaatcccttagacaatgttttcccaaaatttcaggcagctattctatcaacaaactgataattaaacttgtgtcacatctttgatattctgttgtattaattctgttggggtagtctttaatcttcgtgaaactttttctttccatattaggaaatattttcctaatatctctaaagcctaacttgtccatctgacttactgtctgaatcttcccaacttatgcatgcccacttttattgtttaaatttgtttcttttttttttttttttaaacatagggagactgcattgcttattgatccaaaaaattcctgttcttcatcccgccagtgggttgctctggttgtgggacatgaacttgcccatcaatggtttggaaatcttgttactatggaatggtggactcatctttggttaaatgaaggttttgcatcctggattgaatatctgtgtgtagaccactgcttcccagagtatgatatttggactcagtttgtttctgctgattacacccgtgcccaggagcttgacgccttagataacagccatcctattgaagtcagtgtgggccatccatctgaggttgatgagatatttgatgctatatcatatagcaaaggtgcatctgtcatccgaatgctgcatgactacattggggataaggactttaagaaaggaatgaacatgtatttaaccaagttccaacaaaagaatgctgccgcaggtaatctttaatagcttgagatagaaatggagagaaagtattgtcactctatccaggctgggacattttatttttgttctgaatacttaactcaaggtcaggatccatgtaataaataaattagccttatttgaagctgtgttcaggttgaatatctctaatctgaaatttgaaatgctccagaatctgaaactttttcttttctttctttctttttttttaattaaagttctagggtgcatgtgcacaatgtgcaggtttgttacatcagtatacatgtgccatgttggtttgctgcacccattaactcgtcatttacattaggtatttctcctaatgctatccctcccccagccccc

SEQ ID NO: 6327 - DNA, 682 bp, Homo sapiens
acactgtcctcgccacaggactgcaggctggtcgccagattcctgcctattcgtgcaagcgtcaccttgcagggagggaatctgaatctagggctgggactacccggagctcaaggctagggatgccctggtgacctgaaggaaggaaaaggttcagatcagagtttcgactctgagtgtccatccactctttcagtcctgggaagggagaccctgtcccagcttgatctcacctctactgaggaatcatggggccaaaaccgacaatttccagaatccccgggctctggtcctcactggggtcaccccgtggcctgtgacaccagatcgttttctgcccacagctcatagatcgagcgtacaagggaatgcccatgaacatccggggcccgatgtggtcagtcctcctgaacactgaggaaatgaagttgaaaaaccccggaagataccagatcatgaaggagaagggcaagaggtcatctgagcacatccagcgcatcgaccgggacgtaagcgggacattaaggaagcatatattcttcagggatcgatacggaaccaagcagcgggaactactccacatcctcctggcatatgaggagtataacccgaggaagcctctccttcagaggaagcctctccagtcacctctgccctctccaatgacatgagtcctcccagg

SEQ ID NO: 6328 - DNA, 1333 bp, Homo sapiens
  misc_feature (790)..(790): n is a, c, g, or t
tgaccctcagatataattctaatatcaccagttggcctttcttgacatctcttttagtcttctctctttttcagaaatgtgagttctttgcgaaatgttttgaactgaattttaggtcattaaattgtgagttttggaatatagtggaagggacatgtgagtgttttagattagtagaatgacaatcatttcaatttctttaagtattttcatcttctgtttttaggaatggtggactcatctttggttaaatgaaggttttgcatcctggattgaatatctgtgtgtagaccactgcttcccagagtatgatatttggactcagtttgtttctgctgattacacccgtgcccaggagcttgacgccttagataacagccatcctattgaagtcagtgtgggccatccatctgaggttgatgagatatttgatgctatatcatatagcaaaggtgcatctgtcatccgaatgctgcatgactacattggggataaggactttaagaaaggaatgaacatgtatttaaccaagttccaacaaaagaatgctgccacagaggatctctgggaaagtttagaaaatgctagtggtaaacctatagcagctgtgatgaatacctggaccaaacaaatgggatttcccctcatttatgtggaagctgaacaggtagaagatgacagattattgaggttgtcccaaaagaagttctgtgctggtgggtcatatgttggtgaagattgtccccagtggatggtccctatcacaatctctactagtgaagaccccaancaggccaaactaaaaattctaatggacaagccagagatgaatgtggtttcgaaaaatgtcaaacacagaccaatgggtgaaagttaaacttaggaacagatgggtcttatccggacccagtacagatctgccatgctggaaagttattaccaggcattcgtgaacctttctctgaccactgtggatcgacttggattaccagaaatgacctcttctccttgggctcgaggctggcatcatcaagcacttgtagaggtctaacagtcatggaggctctgggaatgagcccaattatacggtatggagcgaactgaactgtaacctggggatacacatcaaacacgtgggcccacgacagaagttctatgaggaaaaccaacgagtttgggaaaacagaccatcagcctatcaggggaaaaccgcggagcgaccccaacactgaaaaggccccgcgaacacccaccgtaagagctgagaccagcacaacagcaagcagcgcaaggcacctagcaaaagccgcagcgtaagacacgcgagaacaac

SEQ ID NO: 6329 - DNA, 659 bp, Homo sapiens
acactgtcctcgccacaggactgcaggctggtcgccagattcctgcctattcgtgcaagcgtcaccttgcagggagggaatctgaatctagggctgggactacccggagctcaaggctagggatgccctggtgacctgaaggaaggaaaaggttcagatcagagtttcgactctgagtgtccatccactctttcagtcctgggaagggagaccctgtcccagcttgatctcacctctactgaggaatcatggggccaaaaccgacaatttccagaatccccgggctctggtcctcactggggtcaccccgtggcctgtgacaccagatcgttttctgcccacagctcatagatcgagcgtacaagggaatgcccatgaacatccggggcccgatgtggtcagtcctcctgaacactgaggaaatgaagttgaaaaaccccggaagataccagatcatgaaggagaagggcaagaggtcatctgagcacatccagcgcatcgaccgggacgtaagcgggacattaaggaagcatatattcttcagggatcgatacggaaccaagcatggtggaactactccacattctctacacgtaggcatatgaccgagtataaccccgacggataacctcatggctttcatgagaggacagccttat

SEQ ID NO: 6330 - DNA, 456 bp, Homo sapiens
gcgaggtgatctagaggatccggtatacataaccccttggttccgccattatgatttcagacagagctgctgggtccgtgccatatcccaggaggaccagctggccccctgctggcaggctgaacaccctgcggagcgggtgagatcggctttcgctgcacccagcactgattccgaccagggcacccccttcagagctagggacgaacagccgtgtgctcccacctcagggccttgcctctgcggcctccacttggaaagttctcagttccctccaggcttctagaagcatctgggccagggctcatggctggataatttccctaggcttaacaacccaagcaagcttcgcatcctcgttttatttttggttaaacttatgaaaatgtattaagaaagagtgcagctcgagagagattcagagatggaaccaagttatgttataccgggtaccga

SEQ ID NO: 6331 - DNA, 805 bp, Homo sapiens
tgtggcccgggtgcagggagaggcaggtggatgctgggaggtcagaacctgcaagggccttggggctgtcaagtggggtgggcccctggtgcagccagagtacaccgggcaggtctcagggcaggctcccttgaccctggcggggggatgtggtcactccctgagggactcctgtcagggcccggtcgcccaccctgggcggcccccatcccatctcagggctaacctttctcagctccagcagaaagcaccacctcgagtccaggacgggcagccccattgggcagcctgaccgccccccacgccaggggccccagtaaccccggccaggctgtccctacactccttcttctcccaggtcctgccgctcctgggagtcagccccacaggaaggcccttgtcctcccttccctgtgccttctcctgggctgagccctgagctggaaagggacagagccagtcctttctgggggtcggcacccaggctggggccgctccaggccccgtgcagttcctcagctctgcctgggttgccttacagtgagacggagctgcctcctctgactgcgcgggaggcgaaggtaagagcctgatgcgtggaggggctggtccagggacgtagggactgggcgggtggtcagtgaggcagaggaagcagctggcctgagcggtggcgggtgagggcaacacgctgtcactgggaggggcagcagtccctgctggacctgaccccaggttgctgttcactttggcagtttgataaaattccaaaaggagaaccacagtcctggcttgggggtggctg

SEQ ID NO: 6332 - DNA, 3145 bp, Homo sapiens
cacttccatgcacatttcaagaatgcagatggacacctctccctttggtgctactgtctgagggtgtaagattttaaagtgagcatctggcggtagtagcatttttagatatattcttggctaagtttctcattgcagtgcctttctttcctgccagtagtttcacagctatttatccagcttggagaaccttccctaatttcatatcttctagccaagtttttacatgtctgtcaccacaacataaacatgtgagttgaataacttttaaaagcagagtctgtctgtaaacaagtttttgccttctactttcaattgccttcttagatgagctaagtgttgaacggccggctcagtgctgtttttgggactatggaatgcatcttcctccaccactcccctcatttaatgaaaggactttcttctctctccatctagcacagtaatcgctaatcccttagacaatgttttcccaaaatttcaggcagctattctatcaacaaactgataattaaacttgtgtcacatctttgatattctgttgtattaattctgttggggtagtctttaatcttcgtgaaactttttctttccatattaggaaatattttcctaatatctctaaagcctaacttgtccatctgacttactgtctgaatcttcccaacttatgcatgcccacttttattgtttaaatttgtttcttttttttttttttttaaacatagggagactgcattgcttattgatccaaaaaattcctgttcttcatcccgccagtgggttgctctggttgtgggacatgaacttgcccatcaatggtttggaaatcttgttactatggaatggtggactcatctttggttaaatgaaggttttgcatcctggattgaatatctgtgtgtagaccactgcttcccagagtatgatatttggactcagtttgtttctgctgattacacccgtgcccaggagcttgacgccttagataacagccatcctattgaagtcagtgtgggccatccatctgaggttgatgagatatttgatgctatatcatatagcaaaggtgcatctgtcatccgaatgctgcatgactacattggggataaggactttaagaaaggaatgaacatgtatttaaccaagttccaacaaaagaatgctgccaggatggacgtggtagaggtcgcgggcagttggtgggcacaagagcgagaggacatcattatgaaatacgaaaagggacaccgagctgggctgccagaggacaaggggcctaagccttttcgaagctacaacaacaacgtcgatcatttggggattgtacatgagacggagctgcctcctctgactgcgcgggaggcgaagcaaattcggcgggagatcagccgaaagagcaagtgggtggatatgctgggagactgggagaaatacaaaagcagcagaaagctcatagatcgagcgtacaagggaatgcccatgaacatccggggcccgatgtggtcagtcctcctgaacactgaggaaatgaagttgaaaaaccccggaagataccagatcatgaaggagaagggcaagaggtcatctgagcacatccagcgcatcgaccgggacgtaagcgggacattaaggaagcatatattcttcagggatcgatacggaaccaagcagcgggaactactccacatcctcctggcatatgaggagtataacccggaggtgggctactgcagggacctgagccacatcgccgccttgttcctcctctatcttcctgaggaggatgcattctgggcactggtgcagctgctggccagtgagaggcactccctgcagggatttcacagcccaaatggcgggaccgtccaggggctccaagaccaacaggagcatgtggtagccacgtcacaacccaagaccatggggcatcaggacaagaaagatctatgtgggcagtgttccccgttaggctgcctcatccggatattgattgacgggatctctctcgggctcaccctgcgcctgtgggacgtgtatctggtagaaggcgaacaggcgtagatgccgataacaagaatcgcctttaaggttcagcagaagcgcctcacgaagacgtccaggtgtggcccgtgggcacgtttttgcaaccggttcgttgatacctgggccagggatgaggacactgtgctcaagcatcttagggcctctatgaagaaactaacaagaaagcagggggacctgcaacccccagccaaacccgagcaagggtcgtcggcatccaggcctgtgccggcttcacgtggcgggaagaccctctgcaagggggacaggcaggcccctccaggcccaccagcccggttcccgcggcccatttggtcagcttccccgccacgggcacctcgttcttccacaccctgtcctggtggggctgtccgggaagacacctaccctgtgggcactcagggtgtgcccagcccggccctggctcagggaggacctcagggttcctggagattcctgcagtggaactccatgccccgcctcccaacggacctggacgtagagggcccttggttccgccattatgatttcagacagagctgctgggtccgtgccatatcccaggaggaccagctggccccctgctggcaggctgaacaccctgcggagcgggtgagatcggctttcgctgcacccagcactgattccgaccagggcacccccttcagagctagggacgaacagccgtgtgctcccacctcagggccttgcctctgcggcctccacttggaaagttctcagttccctccaggcttctagaagcatctgggccagggctcatggctggataatttccctaggcttaacaacccaagcaagcttcgcatcctcgttttatttttggttaaacttatgaaaatgtattaagaaagagtgcagctcgagagagattcagagatggaacacaccagaccccagatcacaaagccaaccatgcccagcccctcccagcacccccagccccacgaccatcgttttgaattctgacgacaccgtgagcctgcctttgtacttcaaactcatggaaggataaccaccttcatgttttgaaataaatgtttcctgttgaaatgaaaaaaaa

SEQ ID NO: 6333 - DNA, 3168 bp, Homo sapiens
cattattgatttgaaggcatttgcattaaatttgaaatgttaaaatgtaaacaaaaatttagttgtaaataattataatatattgttaaaatccatagcagacactgttcctggatatttgctggaatggcagtggtagcaagtgttgtcttttctttctagttaatgcctagcttgttgcctggcactgaagagaaagtaaatatttgaacaagggaatgaatgaatgacagagggaaatggcgactgctttatgaaataacttgttaggttaattctaaggtatttatatttcatattcttttcttaaggctactgatgcccgaagggcttttccttgctgggatgagcctgctatcaaagcaacttttgatatctcattggttgttcctaaagacagagtagctttatcaaacatgaatgtaattgaccggaaaccataccctgatgatgaaaatttagtggaagtgaagtttgcccgcacacctgttacatctacatatctggtggcatttgttgtgggtgaatatgactttgtagaaacaaggtcaaaagatggtgtgtgtgtctgtgtttacactcctgttggcaaagcagaacaaggaaaatttgcattagaggttgctgctaaaaccttgcctttttataaggactacttcaatgttccttatcctctacctaaaattgatctcattgctattgcagactttgcagctggtgccatggagaactgggaccttgttacttatagggagactgcattgcttattgatccaaaaaattcctgttcttcatcccgccagtgggttgctctggttgtgggacatgaacttgcccatcaatggtttggaaatcttgttactatggaatggtggactcatctttggttaaatgaaggttttgcatcctggattgaatatctgtgtgtagaccactgcttcccagagtatgatatttggactcagtttgtttctgctgattacacccgtgcccaggagcttgacgccttagataacagccatcctattgaagtcagtgtgggccatccatctgaggttgatgagatatttgatgctatatcatatagcaaaggtgcatctgtcatccgaatgctgcatgactacattggggataaggactttaagaaaggaatgaacatgtatttaaccaagttccaacaaaagaatgctgccaggatggacgtggtagaggtcgcgggcagttggtgggcacaagagcgagaggacatcattatgaaatacgaaaagggacaccgagctgggctgccagaggacaaggggcctaagccttttcgaagctacaacaacaacgtcgatcatttggggattgtacatgagacggagctgcctcctctgactgcgcgggaggcgaagcaaattcggcgggagatcagccgaaagagcaagtgggtggatatgctgggagactgggagaaatacaaaagcagcagaaagctcatagatcgagcgtacaagggaatgcccatgaacatccggggcccgatgtggtcagtcctcctgaacactgaggaaatgaagttgaaaaaccccggaagataccagatcatgaaggagaagggcaagaggtcatctgagcacatccagcgcatcgaccgggacgtaagcgggacattaaggaagcatatattcttcagggatcgatacggaaccaagcagcgggaactactccacatcctcctggcatatgaggagtataacccggaggtgggctactgcagggacctgagccacatcgccgccttgttcctcctctatcttcctgaggaggatgcattctgggcactggtgcagctgctggccagtgagaggcactccctgcagggatttcacagcccaaatggcgggaccgtccaggggctccaagaccaacaggagcatgtggtagccacgtcacaacccaagaccatggggcatcaggacaagaaagatctatgtgggcagtgttccccgttaggctgcctcatccggatattgattgacgggatctctctcgggctcaccctgcgcctgtgggacgtgtatctggtagaaggcgaacaggcgtagatgccgataacaagaatcgcctttaaggttcagcagaagcgcctcacgaagacgtccaggtgtggcccgtgggcacgtttttgcaaccggttcgttgatacctgggccagggatgaggacactgtgctcaagcatcttagggcctctatgaagaaactaacaagaaagcagggggacctgcaacccccagccaaacccgagcaagggtcgtcggcatccaggcctgtgccggcttcacgtggcgggaagaccctctgcaagggggacaggcaggcccctccaggcccaccagcccggttcccgcggcccatttggtcagcttccccgccacgggcacctcgttcttccacaccctgtcctggtggggctgtccgggaagacacctaccctgtgggcactcagggtgtgcccagcccggccctggctcagggaggacctcagggttcctggagattcctgcagtggaactccatgccccgcctcccaacggacctggacgtagagggcccttggttccgccattatgatttcagacagagctgctgggtccgtgccatatcccaggaggaccagctggccccctgctggcaggctgaacaccctgcggagcgggtgagatcggctttcgctgcacccagcactgattccgaccagggcacccccttcagagctagggacgaacagccgtgtgctcccacctcagggccttgcctctgcggcctccacttggaaagttctcagttccctccaggcttctagaagcatctgggccagggctcatggctggataatttccctaggcttaacaacccaagcaagcttcgcatcctcgttttatttttggttaaacttatgaaaatgtattaagaaagagtgcagctcgagagagattcagagatggaacacaccagaccccagatcacaaagccaaccatgcccagcccctcccagcacccccagccccacgaccatcgttttgaattctgacgacaccgtgagcctgcctttgtacttcaaactcatggaaggataaccaccttcatgttttgaaataaatgtttcctgttgaaatgaaaaaaaa

SEQ ID NO: 6334 - DNA, 3116 bp, Homo sapiens
cattattgatttgaaggcatttgcattaaatttgaaatgttaaaatgtaaacaaaaatttagttgtaaataattataatatattgttaaaatccatagcagacactgttcctggatatttgctggaatggcagtggtagcaagtgttgtcttttctttctagttaatgcctagcttgttgcctggcactgaagagaaagtaaatatttgaacaagggaatgaatgaatgacagagggaaatggcgactgctttatgaaataacttgttaggttaattctaaggtatttatatttcatattcttttcttaaggctactgatgcccgaagggcttttccttgctgggatgagcctgctatcaaagcaacttttgatatctcattggttgttcctaaagacagagtagctttatcaaacatgaatgtaattgaccggaaaccataccctgatgatgaaaatttagtggaagtgaagtttgcccgcacacctgttacatctacatatctggtggcatttgttgtgggtgaatatgactttgtagaaacaaggtcaaaagatggtgtgtgtgtctgtgtttacactcctgttggcaaagcagaacaaggaaaatttgcattagaggtaaatgtacttgaagaggattgttccagcagtccataactccaggtgccatggagaactgggaccttgttacttatagggagactgcattgcttattgatccaaaaaattcctgttcttcatcccgccagtgggttgctctggttgtgggacatgaacttgcccatcaatggtttggaaatcttgttactatggaatggtggactcatctttggttaaatgaaggttttgcatcctggattgaatatctgtgtgtagaccactgcttcccagagtatgatatttggactcagtttgtttctgctgattacacccgtgcccaggagcttgacgccttagataacagccatcctattgaagtcagtgtgggccatccatctgaggttgatgagatatttgatgctatatcatatagcaaaggtgcatctgtcatccgaatgctgcatgactacattggggataaggactttaagaaaggaatgaacatgtatttaaccaagttccaacaaaagaatgctgccaggatggacgtggtagaggtcgcgggcagttggtgggcacaagagcgagaggacatcattatgaaatacgaaaagggacaccgagctgggctgccagaggacaaggggcctaagccttttcgaagctacaacaacaacgtcgatcatttggggattgtacatgagacggagctgcctcctctgactgcgcgggaggcgaagcaaattcggcgggagatcagccgaaagagcaagtgggtggatatgctgggagactgggagaaatacaaaagcagcagaaagctcatagatcgagcgtacaagggaatgcccatgaacatccggggcccgatgtggtcagtcctcctgaacactgaggaaatgaagttgaaaaaccccggaagataccagatcatgaaggagaagggcaagaggtcatctgagcacatccagcgcatcgaccgggacgtaagcgggacattaaggaagcatatattcttcagggatcgatacggaaccaagcagcgggaactactccacatcctcctggcatatgaggagtataacccggaggtgggctactgcagggacctgagccacatcgccgccttgttcctcctctatcttcctgaggaggatgcattctgggcactggtgcagctgctggccagtgagaggcactccctgcagggatttcacagcccaaatggcgggaccgtccaggggctccaagaccaacaggagcatgtggtagccacgtcacaacccaagaccatggggcatcaggacaagaaagatctatgtgggcagtgttccccgttaggctgcctcatccggatattgattgacgggatctctctcgggctcaccctgcgcctgtgggacgtgtatctggtagaaggcgaacaggcgtagatgccgataacaagaatcgcctttaaggttcagcagaagcgcctcacgaagacgtccaggtgtggcccgtgggcacgtttttgcaaccggttcgttgatacctgggccagggatgaggacactgtgctcaagcatcttagggcctctatgaagaaactaacaagaaagcagggggacctgcaacccccagccaaacccgagcaagggtcgtcggcatccaggcctgtgccggcttcacgtggcgggaagaccctctgcaagggggacaggcaggcccctccaggcccaccagcccggttcccgcggcccatttggtcagcttccccgccacgggcacctcgttcttccacaccctgtcctggtggggctgtccgggaagacacctaccctgtgggcactcagggtgtgcccagcccggccctggctcagggaggacctcagggttcctggagattcctgcagtggaactccatgccccgcctcccaacggacctggacgtagagggcccttggttccgccattatgatttcagacagagctgctgggtccgtgccatatcccaggaggaccagctggccccctgctggcaggctgaacaccctgcggagcgggtgagatcggctttcgctgcacccagcactgattccgaccagggcacccccttcagagctagggacgaacagccgtgtgctcccacctcagggccttgcctctgcggcctccacttggaaagttctcagttccctccaggcttctagaagcatctgggccagggctcatggctggataatttccctaggcttaacaacccaagcaagcttcgcatcctcgttttatttttggttaaacttatgaaaatgtattaagaaagagtgcagctcgagagagattcagagatggaacacaccagaccccagatcacaaagccaaccatgcccagcccctcccagcacccccagccccacgaccatcgttttgaattctgacgacaccgtgagcctgcctttgtacttcaaactcatggaaggataaccaccttcatgttttgaaataaatgtttcctgttgaaatgaaaaaaaa

SEQ ID NO: 6335 - DNA, 3159 bp, Homo sapiens
gtggaggccgccgcccaggtgaggcaggcgactaatcagattgtgatgaatgtgctgatattgatattattacagcttcatatgcaccagaaggagatgaagaaatacatgctacaggatttaactatcagaatgaagatgaaaaagtcaccttgtctttccctagtactctgcaaacaggtacgggaaccttaaagatagattttgttggagagctgaatgacaaaatgaaaggtttctatagaagtaagtatactaccccttctggagaggtgcgctatgctgctgtaacacagtttgaggctactgatgcccgaagggcttttccttgctgggatgagcctgctatcaaagcaacttttgatatctcattggttgttcctaaagacagagtagctttatcaaacatgaatgtaattgaccggaaaccataccctgatgatgaaaatttagtggaagtgaagtttgcccgcacacctgttacatctacatatctggtggcatttgttgtgggtgaatatgactttgtagaaacaaggtcaaaagatggtgtgtgtgtctgtgtttacactcctgttggcaaagcagaacaaggaaaatttgcattagaggttgctgctaaaaccttgcctttttataaggactacttcaatgttccttatcctctacctaaaattgatctcattgctattgcagactttgcagctggtgccatggagaactgggaccttgttacttatagggagactgcattgcttattgatccaaaaaattcctgttcttcatcccgccagtgggttgctctggttgtgggacatgaacttgcccatcaatggtttggaaatcttgttactatggaatggtggactcatctttggttaaatgaaggttttgcatcctggattgaatatctgtgtgtagaccactgcttcccagagtatgatatttggactcagtttgtttctgctgattacacccgtgcccaggagcttgacgccttagataacagccatcctattgaagtcagtgtgggccatccatctgaggttgatgagatatttgatgctatatcatatagcaaaggtgcatctgtcatccgaatgctgcatgactacattggggataaggactttaagaaaggaatgaacatgtatttaaccaagttccaacaaaagaatgctgccaggatggacgtggtagaggtcgcgggcagttggtgggcacaagagcgagaggacatcattatgaaatacgaaaagggacaccgagctgggctgccagaggacaaggggcctaagccttttcgaagctacaacaacaacgtcgatcatttggggattgtacatgagacggagctgcctcctctgactgcgcgggaggcgaagcaaattcggcgggagatcagccgaaagagcaagtgggtggatatgctgggagactgggagaaatacaaaagcagcagaaagctcatagatcgagcgtacaagggaatgcccatgaacatccggggcccgatgtggtcagtcctcctgaacactgaggaaatgaagttgaaaaaccccggaagataccagatcatgaaggagaagggcaagaggtcatctgagcacatccagcgcatcgaccgggacgtaagcgggacattaaggaagcatatattcttcagggatcgatacggaaccaagcagcgggaactactccacatcctcctggcatatgaggagtataacccggaggtgggctactgcagggacctgagccacatcgccgccttgttcctcctctatcttcctgaggaggatgcattctgggcactggtgcagctgctggccagtgagaggcactccctgcagggatttcacagcccaaatggcgggaccgtccaggggctccaagaccaacaggagcatgtggtagccacgtcacaacccaagaccatggggcatcaggacaagaaagatctatgtgggcagtgttccccgttaggctgcctcatccggatattgattgacgggatctctctcgggctcaccctgcgcctgtgggacgtgtatctggtagaaggcgaacaggcgtagatgccgataacaagaatcgcctttaaggttcagcagaagcgcctcacgaagacgtccaggtgtggcccgtgggcacgtttttgcaaccggttcgttgatacctgggccagggatgaggacactgtgctcaagcatcttagggcctctatgaagaaactaacaagaaagcagggggacctgcaacccccagccaaacccgagcaagggtcgtcggcatccaggcctgtgccggcttcacgtggcgggaagaccctctgcaagggggacaggcaggcccctccaggcccaccagcccggttcccgcggcccatttggtcagcttccccgccacgggcacctcgttcttccacaccctgtcctggtggggctgtccgggaagacacctaccctgtgggcactcagggtgtgcccagcccggccctggctcagggaggacctcagggttcctggagattcctgcagtggaactccatgccccgcctcccaacggacctggacgtagagggcccttggttccgccattatgatttcagacagagctgctgggtccgtgccatatcccaggaggaccagctggccccctgctggcaggctgaacaccctgcggagcgggtgagatcggctttcgctgcacccagcactgattccgaccagggcacccccttcagagctagggacgaacagccgtgtgctcccacctcagggccttgcctctgcggcctccacttggaaagttctcagttccctccaggcttctagaagcatctgggccagggctcatggctggataatttccctaggcttaacaacccaagcaagcttcgcatcctcgttttatttttggttaaacttatgaaaatgtattaagaaagagtgcagctcgagagagattcagagatggaacacaccagaccccagatcacaaagccaaccatgcccagcccctcccagcacccccagccccacgaccatcgttttgaattctgacgacaccgtgagcctgcctttgtacttcaaactcatggaaggataaccaccttcatgttttgaaataaatgtttcctgttgaaatgaaaaaaaa

SEQ ID NO: 6336 - DNA, 3103 bp, Homo sapiens
gtggaggccgccgcccaggtgaggcaggcgactaatcagattgtgatgaatgtgctgatattgatattattacagcttcatatgcaccagaaggagatgaagaaatacatgctacaggatttaactatcagaatgaagatgaaaaagtcaccttgtctttccctagtactctgcaaacaggtacgggaaccttaaagatagattttgttggagagctgaatgacaaaatgaaaggtttctatagaagctactgatgcccgaagggcttttccttgctgggatgagcctgctatcaaagcaacttttgatatctcattggttgttcctaaagacagagtagctttatcaaacatgaatgtaattgaccggaaaccataccctgatgatgaaaatttagtggaagtgaagtttgcccgcacacctgttacatctacatatctggtggcatttgttgtgggtgaatatgactttgtagaaacaaggtcaaaagatggtgtgtgtgtctgtgtttacactcctgttggcaaagcagaacaaggaaaatttgcattagaggttgctgctaaaaccttgcctttttataaggactacttcaatgttccttatcctctacctaaaattgatctcattgctattgcagactttgcagctggtgccatggagaactgggaccttgttacttatagggagactgcattgcttattgatccaaaaaattcctgttcttcatcccgccagtgggttgctctggttgtgggacatgaacttgcccatcaatggtttggaaatcttgttactatggaatggtggactcatctttggttaaatgaaggttttgcatcctggattgaatatctgtgtgtagaccactgcttcccagagtatgatatttggactcagtttgtttctgctgattacacccgtgcccaggagcttgacgccttagataacagccatcctattgaagtcagtgtgggccatccatctgaggttgatgagatatttgatgctatatcatatagcaaaggtgcatctgtcatccgaatgctgcatgactacattggggataaggactttaagaaaggaatgaacatgtatttaaccaagttccaacaaaagaatgctgccaggatggacgtggtagaggtcgcgggcagttggtgggcacaagagcgagaggacatcattatgaaatacgaaaagggacaccgagctgggctgccagaggacaaggggcctaagccttttcgaagctacaacaacaacgtcgatcatttggggattgtacatgagacggagctgcctcctctgactgcgcgggaggcgaagcaaattcggcgggagatcagccgaaagagcaagtgggtggatatgctgggagactgggagaaatacaaaagcagcagaaagctcatagatcgagcgtacaagggaatgcccatgaacatccggggcccgatgtggtcagtcctcctgaacactgaggaaatgaagttgaaaaaccccggaagataccagatcatgaaggagaagggcaagaggtcatctgagcacatccagcgcatcgaccgggacgtaagcgggacattaaggaagcatatattcttcagggatcgatacggaaccaagcagcgggaactactccacatcctcctggcatatgaggagtataacccggaggtgggctactgcagggacctgagccacatcgccgccttgttcctcctctatcttcctgaggaggatgcattctgggcactggtgcagctgctggccagtgagaggcactccctgcagggatttcacagcccaaatggcgggaccgtccaggggctccaagaccaacaggagcatgtggtagccacgtcacaacccaagaccatggggcatcaggacaagaaagatctatgtgggcagtgttccccgttaggctgcctcatccggatattgattgacgggatctctctcgggctcaccctgcgcctgtgggacgtgtatctggtagaaggcgaacaggcgtagatgccgataacaagaatcgcctttaaggttcagcagaagcgcctcacgaagacgtccaggtgtggcccgtgggcacgtttttgcaaccggttcgttgatacctgggccagggatgaggacactgtgctcaagcatcttagggcctctatgaagaaactaacaagaaagcagggggacctgcaacccccagccaaacccgagcaagggtcgtcggcatccaggcctgtgccggcttcacgtggcgggaagaccctctgcaagggggacaggcaggcccctccaggcccaccagcccggttcccgcggcccatttggtcagcttccccgccacgggcacctcgttcttccacaccctgtcctggtggggctgtccgggaagacacctaccctgtgggcactcagggtgtgcccagcccggccctggctcagggaggacctcagggttcctggagattcctgcagtggaactccatgccccgcctcccaacggacctggacgtagagggcccttggttccgccattatgatttcagacagagctgctgggtccgtgccatatcccaggaggaccagctggccccctgctggcaggctgaacaccctgcggagcgggtgagatcggctttcgctgcacccagcactgattccgaccagggcacccccttcagagctagggacgaacagccgtgtgctcccacctcagggccttgcctctgcggcctccacttggaaagttctcagttccctccaggcttctagaagcatctgggccagggctcatggctggataatttccctaggcttaacaacccaagcaagcttcgcatcctcgttttatttttggttaaacttatgaaaatgtattaagaaagagtgcagctcgagagagattcagagatggaacacaccagaccccagatcacaaagccaaccatgcccagcccctcccagcacccccagccccacgaccatcgttttgaattctgacgacaccgtgagcctgcctttgtacttcaaactcatggaaggataaccaccttcatgttttgaaataaatgtttcctgttgaaatgaaaaaaaa

SEQ ID NO: 6337 - DNA, 2995 bp, Homo sapiens
cattattgatttgaaggcatttgcattaaatttgaaatgttaaaatgtaaacaaaaatttagttgtaaataattataatatattgttaaaatccatagcagacactgttcctggatatttgctggaatggcagtggtagcaagtgttgtcttttctttctagttaatgcctagcttgttgcctggcactgaagagaaagtaaatatttgaacaagggaatgaatgaatgacagagggaaatggcgactgctttatgaaataacttgttaggttaattctaaggtatttatatttcatattcttttcttaaggctactgatgcccgaagggcttttccttgctgggatgagcctgctatcaaagcaacttttgatatctcattggttgttcctaaagacagagtagctttatcaaacatgaatgtaattgaccggaaaccataccctgatgatgaaaatttagtggaagtgaagtttgcccgcacacctgttacatctacatatctggtggcatttgttgtgggtgaatatgactttgtagaaacaaggtcaaaagatggtgtgtgtgtctgtgtttacactcctgttggcaaagcagaacaaggaaaatttgcattagaggtaaatgtacttgaagaggattgttccagcagtccataactccaggtgccatggagaactgggaccttgttacttatagggagactgcattgcttattgatccaaaaaattcctgttcttcatcccgccagtgggttgctctggttgtgggacatgaacttgcccatcaatggtttggaaatcttgttactatggaatggtggactcatctttggttaaatgaaggttttgcatcctggattgaatatctgtgtgtagaccactgcttcccagagtatgatatttggactcagtttgtttctgctgattacacccgtgcccaggagcttgacgccttagataacagccatcctattgaagtcagtgtgggccatccatctgaggttgatgagatatttgatgctatatcatatagcaaaggtgcatctgtcatccgaatgctgcatgactacattggggataaggactttaagaaaggaatgaacatgtatttaaccaagttccaacaaaagaatgctgccaggatggacgtggtagaggtcgcgggcagttggtgggcacaagagcgagaggacatcattatgaaatacgaaaagggacaccgagctgggctgccagaggacaaggggcctaagccttttcgaagctacaacaacaacgtcgatcatttggggattgtacactcatagatcgagcgtacaagggaatgcccatgaacatccggggcccgatgtggtcagtcctcctgaacactgaggaaatgaagttgaaaaaccccggaagataccagatcatgaaggagaagggcaagaggtcatctgagcacatccagcgcatcgaccgggacgtaagcgggacattaaggaagcatatattcttcagggatcgatacggaaccaagcagcgggaactactccacatcctcctggcatatgaggagtataacccggaggtgggctactgcagggacctgagccacatcgccgccttgttcctcctctatcttcctgaggaggatgcattctgggcactggtgcagctgctggccagtgagaggcactccctgcagggatttcacagcccaaatggcgggaccgtccaggggctccaagaccaacaggagcatgtggtagccacgtcacaacccaagaccatggggcatcaggacaagaaagatctatgtgggcagtgttccccgttaggctgcctcatccggatattgattgacgggatctctctcgggctcaccctgcgcctgtgggacgtgtatctggtagaaggcgaacaggcgtagatgccgataacaagaatcgcctttaaggttcagcagaagcgcctcacgaagacgtccaggtgtggcccgtgggcacgtttttgcaaccggttcgttgatacctgggccagggatgaggacactgtgctcaagcatcttagggcctctatgaagaaactaacaagaaagcagggggacctgcaacccccagccaaacccgagcaagggtcgtcggcatccaggcctgtgccggcttcacgtggcgggaagaccctctgcaagggggacaggcaggcccctccaggcccaccagcccggttcccgcggcccatttggtcagcttccccgccacgggcacctcgttcttccacaccctgtcctggtggggctgtccgggaagacacctaccctgtgggcactcagggtgtgcccagcccggccctggctcagggaggacctcagggttcctggagattcctgcagtggaactccatgccccgcctcccaacggacctggacgtagagggcccttggttccgccattatgatttcagacagagctgctgggtccgtgccatatcccaggaggaccagctggccccctgctggcaggctgaacaccctgcggagcgggtgagatcggctttcgctgcacccagcactgattccgaccagggcacccccttcagagctagggacgaacagccgtgtgctcccacctcagggccttgcctctgcggcctccacttggaaagttctcagttccctccaggcttctagaagcatctgggccagggctcatggctggataatttccctaggcttaacaacccaagcaagcttcgcatcctcgttttatttttggttaaacttatgaaaatgtattaagaaagagtgcagctcgagagagattcagagatggaacacaccagaccccagatcacaaagccaaccatgcccagcccctcccagcacccccagccccacgaccatcgttttgaattctgacgacaccgtgagcctgcctttgtacttcaaactcatggaaggataaccaccttcatgttttgaaataaatgtttcctgttgaaatgaaaaaaaa

SEQ ID NO: 6338 - DNA, 2652 bp, Homo sapiens
atgtcaaggaaaattctggacatattttattgtcagggtctgttttgtgaatactttaattctcttgacttagcctatccctacttcagtttatatatataattttgtatctaaagaactagagttataatcctacttcaacatatttaattaggctcccatataattgtaattcattacaattagtgcaagaaatctaatgttcttcacctccatgtcttcctcatcactcctctgcaactaccccaaaaataaacagaaccatagtggcttctttcccagcagaacaaagccaggactggaacccaagctctaagggatgacaggaatcatgttctattcaactttattattattagttactacatttttttgaggaccatcgttatacattatgagtgagttaaaggcagaaaaatgtaagttagaagggttttcctagaaagcgttttatgtaattcagtattacgggctatctgcttcctgtcataaccctgaatcacattgtctgccaggtcagtgtgggccatccatctgaggttgatgagatatttgatgctatatcatatagcaaaggtgcatctgtcatccgaatgctgcatgactacattggggataaggactttaagaaaggaatgaacatgtatttaaccaagttccaacaaaagaatgctgccaggatggacgtggtagaggtcgcgggcagttggtgggcacaagagcgagaggacatcattatgaaatacgaaaagggacaccgagctgggctgccagaggacaaggggcctaagccttttcgaagctacaacaacaacgtcgatcatttggggattgtacatgagacggagctgcctcctctgactgcgcgggaggcgaagcaaattcggcgggagatcagccgaaagagcaagtgggtggatatgctgggagactgggagaaatacaaaagcagcagaaagctcatagatcgagcgtacaagggaatgcccatgaacatccggggcccgatgtggtcagtcctcctgaacactgaggaaatgaagttgaaaaaccccggaagataccagatcatgaaggagaagggcaagaggtcatctgagcacatccagcgcatcgaccgggacgtaagcgggacattaaggaagcatatattcttcagggatcgatacggaaccaagcagcgggaactactccacatcctcctggcatatgaggagtataacccggaggtgggctactgcagggacctgagccacatcgccgccttgttcctcctctatcttcctgaggaggatgcattctgggcactggtgcagctgctggccagtgagaggcactccctgcagggatttcacagcccaaatggcgggaccgtccaggggctccaagaccaacaggagcatgtggtagccacgtcacaacccaagaccatggggcatcaggacaagaaagatctatgtgggcagtgttccccgttaggctgcctcatccggatattgattgacgggatctctctcgggctcaccctgcgcctgtgggacgtgtatctggtagaaggcgaacaggcgtagatgccgataacaagaatcgcctttaaggttcagcagaagcgcctcacgaagacgtccaggtgtggcccgtgggcacgtttttgcaaccggttcgttgatacctgggccagggatgaggacactgtgctcaagcatcttagggcctctatgaagaaactaacaagaaagcagggggacctgcaacccccagccaaacccgagcaagggtcgtcggcatccaggcctgtgccggcttcacgtggcgggaagaccctctgcaagggggacaggcaggcccctccaggcccaccagcccggttcccgcggcccatttggtcagcttccccgccacgggcacctcgttcttccacaccctgtcctggtggggctgtccgggaagacacctaccctgtgggcactcagggtgtgcccagcccggccctggctcagggaggacctcagggttcctggagattcctgcagtggaactccatgccccgcctcccaacggacctggacgtagagggcccttggttccgccattatgatttcagacagagctgctgggtccgtgccatatcccaggaggaccagctggccccctgctggcaggctgaacaccctgcggagcgggtgagatcggctttcgctgcacccagcactgattccgaccagggcacccccttcagagctagggacgaacagccgtgtgctcccacctcagggccttgcctctgcggcctccacttggaaagttctcagttccctccaggcttctagaagcatctgggccagggctcatggctggataatttccctaggcttaacaacccaagcaagcttcgcatcctcgttttatttttggttaaacttatgaaaatgtattaagaaagagtgcagctcgagagagattcagagatggaacacaccagaccccagatcacaaagccaaccatgcccagcccctcccagcacccccagccccacgaccatcgttttgaattctgacgacaccgtgagcctgcctttgtacttcaaactcatggaaggataaccaccttcatgttttgaaataaatgtttcctgttgaaatgaaaaaaaa

SEQ ID NO: 6339 - DNA, 2355 bp, Homo sapiens
tgtggcccgggtgcagggagaggcaggtggatgctgggaggtcagaacctgcaagggccttggggctgtcaagtggggtgggcccctggtgcagccagagtacaccgggcaggtctcagggcaggctcccttgaccctggcggggggatgtggtcactccctgagggactcctgtcagggcccggtcgcccaccctgggcggcccccatcccatctcagggctaacctttctcagctccagcagaaagcaccacctcgagtccaggacgggcagccccattgggcagcctgaccgccccccacgccaggggccccagtaaccccggccaggctgtccctacactccttcttctcccaggtcctgccgctcctgggagtcagccccacaggaaggcccttgtcctcccttccctgtgccttctcctgggctgagccctgagctggaaagggacagagccagtcctttctgggggtcggcacccaggctggggccgctccaggccccgtgcagttcctcagctctgcctgggttgccttacagtgagacggagctgcctcctctgactgcgcgggaggcgaagcaaattcggcgggagatcagccgaaagagcaagtgggtggatatgctgggagactgggagaaatacaaaagcagcagaaagctcatagatcgagcgtacaagggaatgcccatgaacatccggggcccgatgtggtcagtcctcctgaacactgaggaaatgaagttgaaaaaccccggaagataccagatcatgaaggagaagggcaagaggtcatctgagcacatccagcgcatcgaccgggacgtaagcgggacattaaggaagcatatattcttcagggatcgatacggaaccaagcagcgggaactactccacatcctcctggcatatgaggagtataacccggaggtgggctactgcagggacctgagccacatcgccgccttgttcctcctctatcttcctgaggaggatgcattctgggcactggtgcagctgctggccagtgagaggcactccctgcagggatttcacagcccaaatggcgggaccgtccaggggctccaagaccaacaggagcatgtggtagccacgtcacaacccaagaccatggggcatcaggacaagaaagatctatgtgggcagtgttccccgttaggctgcctcatccggatattgattgacgggatctctctcgggctcaccctgcgcctgtgggacgtgtatctggtagaaggcgaacaggcgtagatgccgataacaagaatcgcctttaaggttcagcagaagcgcctcacgaagacgtccaggtgtggcccgtgggcacgtttttgcaaccggttcgttgatacctgggccagggatgaggacactgtgctcaagcatcttagggcctctatgaagaaactaacaagaaagcagggggacctgcaacccccagccaaacccgagcaagggtcgtcggcatccaggcctgtgccggcttcacgtggcgggaagaccctctgcaagggggacaggcaggcccctccaggcccaccagcccggttcccgcggcccatttggtcagcttccccgccacgggcacctcgttcttccacaccctgtcctggtggggctgtccgggaagacacctaccctgtgggcactcagggtgtgcccagcccggccctggctcagggaggacctcagggttcctggagattcctgcagtggaactccatgccccgcctcccaacggacctggacgtagagggcccttggttccgccattatgatttcagacagagctgctgggtccgtgccatatcccaggaggaccagctggccccctgctggcaggctgaacaccctgcggagcgggtgagatcggctttcgctgcacccagcactgattccgaccagggcacccccttcagagctagggacgaacagccgtgtgctcccacctcagggccttgcctctgcggcctccacttggaaagttctcagttccctccaggcttctagaagcatctgggccagggctcatggctggataatttccctaggcttaacaacccaagcaagcttcgcatcctcgttttatttttggttaaacttatgaaaatgtattaagaaagagtgcagctcgagagagattcagagatggaacacaccagaccccagatcacaaagccaaccatgcccagcccctcccagcacccccagccccacgaccatcgttttgaattctgacgacaccgtgagcctgcctttgtacttcaaactcatggaaggataaccaccttcatgttttgaaataaatgtttcctgttgaaatgaaaaaaaa

SEQ ID NO: 6340 - DNA, 2029 bp, Homo sapiens
aaaggttttctccctgagaggcatgacccaggccagctgattcatcagaatcagaggatggacgtggtagaggtcgcgggcagttggtgggcacaagagcgagaggacatcattatgaaatacgaaaagggacaccgagctgggctgccagaggacaaggggcctaagccttttcgaagctacaacaacaacgtcgatcatttggggattgtacatgagacggagctgcctcctctgactgcgcgggaggcgaagcaaattcggcgggagatcagccgaaagagcaagtgggtggatatgctgggagactgggagaaatacaaaagcagcagaaagctcatagatcgagcgtacaagggaatgcccatgaacatccggggcccgatgtggtcagtcctcctgaacactgaggaaatgaagttgaaaaaccccggaagataccagatcatgaaggagaagggcaagaggtcatctgagcacatccagcgcatcgaccgggacgtaagcgggacattaaggaagcatatattcttcagggatcgatacggaaccaagcagcgggaactactccacatcctcctggcatatgaggagtataacccggaggtgggctactgcagggacctgagccacatcgccgccttgttcctcctctatcttcctgaggaggatgcattctgggcactggtgcagctgctggccagtgagaggcactccctgcagggatttcacagcccaaatggcgggaccgtccaggggctccaagaccaacaggagcatgtggtagccacgtcacaacccaagaccatggggcatcaggacaagaaagatctatgtgggcagtgttccccgttaggctgcctcatccggatattgattgacgggatctctctcgggctcaccctgcgcctgtgggacgtgtatctggtagaaggcgaacaggcgtagatgccgataacaagaatcgcctttaaggttcagcagaagcgcctcacgaagacgtccaggtgtggcccgtgggcacgtttttgcaaccggttcgttgatacctgggccagggatgaggacactgtgctcaagcatcttagggcctctatgaagaaactaacaagaaagcagggggacctgcaacccccagccaaacccgagcaagggtcgtcggcatccaggcctgtgccggcttcacgtggcgggaagaccctctgcaagggggacaggcaggcccctccaggcccaccagcccggttcccgcggcccatttggtcagcttccccgccacgggcacctcgttcttccacaccctgtcctggtggggctgtccgggaagacacctaccctgtgggcactcagggtgtgcccagcccggccctggctcagggaggacctcagggttcctggagattcctgcagtggaactccatgccccgcctcccaacggacctggacgtagagggcccttggttccgccattatgatttcagacagagctgctgggtccgtgccatatcccaggaggaccagctggccccctgctggcaggctgaacaccctgcggagcgggtgagatcggctttcgctgcacccagcactgattccgaccagggcacccccttcagagctagggacgaacagccgtgtgctcccacctcagggccttgcctctgcggcctccacttggaaagttctcagttccctccaggcttctagaagcatctgggccagggctcatggctggataatttccctaggcttaacaacccaagcaagcttcgcatcctcgttttatttttggttaaacttatgaaaatgtattaagaaagagtgcagctcgagagagattcagagatggaacacaccagaccccagatcacaaagccaaccatgcccagcccctcccagcacccccagccccacgaccatcgttttgaattctgacgacaccgtgagcctgcctttgtacttcaaactcatggaaggataaccaccttcatgttttgaaataaatgtttcctgttgaaatgaaaaaaaa

SEQ ID NO: 6341 - DNA, 2037 bp, Homo sapiens
acactgtcctcgccacaggactgcaggctggtcgccagattcctgcctattcgtgcaagcgtcaccttgcagggagggaatctgaatctagggctgggactacccggagctcaaggctagggatgccctggtgacctgaaggaaggaaaaggttcagatcagagtttcgactctgagtgtccatccactctttcagtcctgggaagggagaccctgtcccagcttgatctcacctctactgaggaatcatggggccaaaaccgacaatttccagaatccccgggctctggtcctcactggggtcaccccgtggcctgtgacaccagatcgttttctgcccacagctcatagatcgagcgtacaagggaatgcccatgaacatccggggcccgatgtggtcagtcctcctgaacactgaggaaatgaagttgaaaaaccccggaagataccagatcatgaaggagaagggcaagaggtcatctgagcacatccagcgcatcgaccgggacgtaagcgggacattaaggaagcatatattcttcagggatcgatacggaaccaagcagcgggaactactccacatcctcctggcatatgaggagtataacccggaggtgggctactgcagggacctgagccacatcgccgccttgttcctcctctatcttcctgaggaggatgcattctgggcactggtgcagctgctggccagtgagaggcactccctgcagggatttcacagcccaaatggcgggaccgtccaggggctccaagaccaacaggagcatgtggtagccacgtcacaacccaagaccatggggcatcaggacaagaaagatctatgtgggcagtgttccccgttaggctgcctcatccggatattgattgacgggatctctctcgggctcaccctgcgcctgtgggacgtgtatctggtagaaggcgaacaggcgtagatgccgataacaagaatcgcctttaaggttcagcagaagcgcctcacgaagacgtccaggtgtggcccgtgggcacgtttttgcaaccggttcgttgatacctgggccagggatgaggacactgtgctcaagcatcttagggcctctatgaagaaactaacaagaaagcagggggacctgcaacccccagccaaacccgagcaagggtcgtcggcatccaggcctgtgccggcttcacgtggcgggaagaccctctgcaagggggacaggcaggcccctccaggcccaccagcccggttcccgcggcccatttggtcagcttccccgccacgggcacctcgttcttccacaccctgtcctggtggggctgtccgggaagacacctaccctgtgggcactcagggtgtgcccagcccggccctggctcagggaggacctcagggttcctggagattcctgcagtggaactccatgccccgcctcccaacggacctggacgtagagggcccttggttccgccattatgatttcagacagagctgctgggtccgtgccatatcccaggaggaccagctggccccctgctggcaggctgaacaccctgcggagcgggtgagatcggctttcgctgcacccagcactgattccgaccagggcacccccttcagagctagggacgaacagccgtgtgctcccacctcagggccttgcctctgcggcctccacttggaaagttctcagttccctccaggcttctagaagcatctgggccagggctcatggctggataatttccctaggcttaacaacccaagcaagcttcgcatcctcgttttatttttggttaaacttatgaaaatgtattaagaaagagtgcagctcgagagagattcagagatggaacacaccagaccccagatcacaaagccaaccatgcccagcccctcccagcacccccagccccacgaccatcgttttgaattctgacgacaccgtgagcctgcctttgtacttcaaactcatggaaggataaccaccttcatgttttgaaataaatgtttcctgttgaaatgaaaaaaaa

SEQ ID NO: 6342 - DNA, 1853 bp, Homo sapiens
ctcggtacccgctgatccgcttaagttggggattgtacatgagacggagctgcctcctctgactgcgcgggaggcgaagcaaattcggcgggagatcagccgaaagagcaagtgggtggatatgctgggagactgggagaaatacaaaagcagcagaaagctcatagatcgagcgtacaagggaatgcccatgaacatccggggcccgatgtggtcagtcctcctgaacactgaggaaatgaagttgaaaaaccccggaagataccagatcatgaaggagaagggcaagaggtcatctgagcacatccagcgcatcgaccgggacgtaagcgggacattaaggaagcatatattcttcagggatcgatacggaaccaagcagcgggaactactccacatcctcctggcatatgaggagtataacccggaggtgggctactgcagggacctgagccacatcgccgccttgttcctcctctatcttcctgaggaggatgcattctgggcactggtgcagctgctggccagtgagaggcactccctgcagggatttcacagcccaaatggcgggaccgtccaggggctccaagaccaacaggagcatgtggtagccacgtcacaacccaagaccatggggcatcaggacaagaaagatctatgtgggcagtgttccccgttaggctgcctcatccggatattgattgacgggatctctctcgggctcaccctgcgcctgtgggacgtgtatctggtagaaggcgaacaggcgtagatgccgataacaagaatcgcctttaaggttcagcagaagcgcctcacgaagacgtccaggtgtggcccgtgggcacgtttttgcaaccggttcgttgatacctgggccagggatgaggacactgtgctcaagcatcttagggcctctatgaagaaactaacaagaaagcagggggacctgcaacccccagccaaacccgagcaagggtcgtcggcatccaggcctgtgccggcttcacgtggcgggaagaccctctgcaagggggacaggcaggcccctccaggcccaccagcccggttcccgcggcccatttggtcagcttccccgccacgggcacctcgttcttccacaccctgtcctggtggggctgtccgggaagacacctaccctgtgggcactcagggtgtgcccagcccggccctggctcagggaggacctcagggttcctggagattcctgcagtggaactccatgccccgcctcccaacggacctggacgtagagggcccttggttccgccattatgatttcagacagagctgctgggtccgtgccatatcccaggaggaccagctggccccctgctggcaggctgaacaccctgcggagcgggtgagatcggctttcgctgcacccagcactgattccgaccagggcacccccttcagagctagggacgaacagccgtgtgctcccacctcagggccttgcctctgcggcctccacttggaaagttctcagttccctccaggcttctagaagcatctgggccagggctcatggctggataatttccctaggcttaacaacccaagcaagcttcgcatcctcgttttatttttggttaaacttatgaaaatgtattaagaaagagtgcagctcgagagagattcagagatggaacacaccagaccccagatcacaaagccaaccatgcccagcccctcccagcacccccagccccacgaccatcgttttgaattctgacgacaccgtgagcctgcctttgtacttcaaactcatggaaggataaccaccttcatgttttgaaataaatgtttcctgttgaaatgaaaaaaaa

SEQ ID NO: 6343 - DNA, 2528 bp, Homo sapiens
tgaccctcagatataattctaatatcaccagttggcctttcttgacatctcttttagtcttctctctttttcagaaatgtgagttctttgcgaaatgttttgaactgaattttaggtcattaaattgtgagttttggaatatagtggaagggacatgtgagtgttttagattagtagaatgacaatcatttcaatttctttaagtattttcatcttctgtttttaggaatggtggactcatctttggttaaatgaaggttttgcatcctggattgaatatctgtgtgtagaccactgcttcccagagtatgatatttggactcagtttgtttctgctgattacacccgtgcccaggagcttgacgccttagataacagccatcctattgaagtcagtgtgggccatccatctgaggttgatgagatatttgatgctatatcatatagcaaaggtgcatctgtcatccgaatgctgcatgactacattggggataaggactttaagaaaggaatgaacatgtatttaaccaagttccaacaaaagaatgctgccaggatggacgtggtagaggtcgcgggcagttggtgggcacaagagcgagaggacatcattatgaaatacgaaaagggacaccgagctgggctgccagaggacaaggggcctaagccttttcgaagctacaacaacaacgtcgatcatttggggattgtacatgagacggagctgcctcctctgactgcgcgggaggcgaagcaaattcggcgggagatcagccgaaagagcaagtgggtggatatgctgggagactgggagaaatacaaaagcagcagaaagctcatagatcgagcgtacaagggaatgcccatgaacatccggggcccgatgtggtcagtcctcctgaacactgaggaaatgaagttgaaaaaccccggaagataccagatcatgaaggagaagggcaagaggtcatctgagcacatccagcgcatcgaccgggacgtaagcgggacattaaggaagcatatattcttcagggatcgatacggaaccaagcagcgggaactactccacatcctcctggcatatgaggagtataacccggaggtgggctactgcagggacctgagccacatcgccgccttgttcctcctctatcttcctgaggaggatgcattctgggcactggtgcagctgctggccagtgagaggcactccctgcagggatttcacagcccaaatggcgggaccgtccaggggctccaagaccaacaggagcatgtggtagccacgtcacaacccaagaccatggggcatcaggacaagaaagatctatgtgggcagtgttccccgttaggctgcctcatccggatattgattgacgggatctctctcgggctcaccctgcgcctgtgggacgtgtatctggtagaaggcgaacaggcgtagatgccgataacaagaatcgcctttaaggttcagcagaagcgcctcacgaagacgtccaggtgtggcccgtgggcacgtttttgcaaccggttcgttgatacctgggccagggatgaggacactgtgctcaagcatcttagggcctctatgaagaaactaacaagaaagcagggggacctgcaacccccagccaaacccgagcaagggtcgtcggcatccaggcctgtgccggcttcacgtggcgggaagaccctctgcaagggggacaggcaggcccctccaggcccaccagcccggttcccgcggcccatttggtcagcttccccgccacgggcacctcgttcttccacaccctgtcctggtggggctgtccgggaagacacctaccctgtgggcactcagggtgtgcccagcccggccctggctcagggaggacctcagggttcctggagattcctgcagtggaactccatgccccgcctcccaacggacctggacgtagagggcccttggttccgccattatgatttcagacagagctgctgggtccgtgccatatcccaggaggaccagctggccccctgctggcaggctgaacaccctgcggagcgggtgagatcggctttcgctgcacccagcactgattccgaccagggcacccccttcagagctagggacgaacagccgtgtgctcccacctcagggccttgcctctgcggcctccacttggaaagttctcagttccctccaggcttctagaagcatctgggccagggctcatggctggataatttccctaggcttaacaacccaagcaagcttcgcatcctcgttttatttttggttaaacttatgaaaatgtattaagaaagagtgcagctcgagagagattcagagatggaacacaccagaccccagatcacaaagccaaccatgcccagcccctcccagcacccccagccccacgaccatcgttttgaattctgacgacaccgtgagcctgcctttgtacttcaaactcatggaaggataaccaccttcatgttttgaaataaatgtttcctgttgaaatgaaaaaaaa

SEQ ID NO: 6344 - DNA, 1995 bp, Homo sapiens
cgtcgattcttgccggttttgacttggaagacccttgccctgaatctagggctgggactacccggagctcaaggctagggatgccctggtgacctgaaggaaggaaaaggttcagatcagagtttcgactctgagtgtccatccactctttcagtcctgggaagggagaccctgtcccagcttgatctcacctctactgaggaatcatggggccaaaaccgacaatttccagaatccccgggctctggtcctcactggggtcaccccgtggcctgtgacaccagatcgttttctgcccacagctcatagatcgagcgtacaagggaatgcccatgaacatccggggcccgatgtggtcagtcctcctgaacactgaggaaatgaagttgaaaaaccccggaagataccagatcatgaaggagaagggcaagaggtcatctgagcacatccagcgcatcgaccgggacgtaagcgggacattaaggaagcatatattcttcagggatcgatacggaaccaagcagcgggaactactccacatcctcctggcatatgaggagtataacccggaggtgggctactgcagggacctgagccacatcgccgccttgttcctcctctatcttcctgaggaggatgcattctgggcactggtgcagctgctggccagtgagaggcactccctgcagggatttcacagcccaaatggcgggaccgtccaggggctccaagaccaacaggagcatgtggtagccacgtcacaacccaagaccatggggcatcaggacaagaaagatctatgtgggcagtgttccccgttaggctgcctcatccggatattgattgacgggatctctctcgggctcaccctgcgcctgtgggacgtgtatctggtagaaggcgaacaggcgtagatgccgataacaagaatcgcctttaaggttcagcagaagcgcctcacgaagacgtccaggtgtggcccgtgggcacgtttttgcaaccggttcgttgatacctgggccagggatgaggacactgtgctcaagcatcttagggcctctatgaagaaactaacaagaaagcagggggacctgcaacccccagccaaacccgagcaagggtcgtcggcatccaggcctgtgccggcttcacgtggcgggaagaccctctgcaagggggacaggcaggcccctccaggcccaccagcccggttcccgcggcccatttggtcagcttccccgccacgggcacctcgttcttccacaccctgtcctggtggggctgtccgggaagacacctaccctgtgggcactcagggtgtgcccagcccggccctggctcagggaggacctcagggttcctggagattcctgcagtggaactccatgccccgcctcccaacggacctggacgtagagggcccttggttccgccattatgatttcagacagagctgctgggtccgtgccatatcccaggaggaccagctggccccctgctggcaggctgaacaccctgcggagcgggtgagatcggctttcgctgcacccagcactgattccgaccagggcacccccttcagagctagggacgaacagccgtgtgctcccacctcagggccttgcctctgcggcctccacttggaaagttctcagttccctccaggcttctagaagcatctgggccagggctcatggctggataatttccctaggcttaacaacccaagcaagcttcgcatcctcgttttatttttggttaaacttatgaaaatgtattaagaaagagtgcagctcgagagagattcagagatggaacacaccagaccccagatcacaaagccaaccatgcccagcccctcccagcacccccagccccacgaccatcgttttgaattctgacgacaccgtgagcctgcctttgtacttcaaactcatggaaggataaccaccttcatgttttgaaataaatgtttcctgttgaaatgaaaaaaaa

SEQ ID NO: 6345 - DNA, 3091 bp, Homo sapiens
cacttccatgcacatttcaagaatgcagatggacacctctccctttggtgctactgtctgagggtgtaagattttaaagtgagcatctggcggtagtagcatttttagatatattcttggctaagtttctcattgcagtgcctttctttcctgccagtagtttcacagctatttatccagcttggagaaccttccctaatttcatatcttctagccaagtttttacatgtctgtcaccacaacataaacatgtgagttgaataacttttaaaagcagagtctgtctgtaaacaagtttttgccttctactttcaattgccttcttagatgagctaagtgttgaacggccggctcagtgctgtttttgggactatggaatgcatcttcctccaccactcccctcatttaatgaaaggactttcttctctctccatctagcacagtaatcgctaatcccttagacaatgttttcccaaaatttcaggcagctattctatcaacaaactgataattaaacttgtgtcacatctttgatattctgttgtattaattctgttggggtagtctttaatcttcgtgaaactttttctttccatattaggaaatattttcctaatatctctaaagcctaacttgtccatctgacttactgtctgaatcttcccaacttatgcatgcccacttttattgtttaaatttgtttcttttttttttttttttaaacatagggagactgcattgcttattgatccaaaaaattcctgttcttcatcccgccagtgggttgctctggttgtgggacatgaacttgcccatcaatggtttggaaatcttgttactatggaatggtggactcatctttggttaaatgaaggttttgcatcctggattgaatatctgtgtgtagaccactgcttcccagagtatgatatttggactcagtttgtttctgctgattacacccgtgcccaggagcttgacgccttagataacagccatcctattgaagtcagtgtgggccatccatctgaggttgatgagatatttgatgctatatcatatagcaaaggtgcatctgtcatccgaatgctgcatgactacattggggataaggactttaagaaaggaatgaacatgtatttaaccaagttccaacaaaagaatgctgccaggatggacgtggtagaggtcgcgggcagttggtgggcacaagagcgagaggacatcattatgaaatacgaaaagggacaccgagctgggctgccagaggacaaggggcctaagccttttcgaagctacaacaacaacgtcgatcatttggggattgtacatgagacggagctgcctcctctgactgcgcgggaggcgaagcaaattcggcgggagatcagccgaaagagcaagtgggtggatatgctgggagactgggagaaatacaaaagcagcagaaagctcatagatcgagcgtacaagggaatgcccatgaacatccggggcccgatgtggtcagtcctcctgaacactgaggaaatgaagttgaacatccagcgcatcgaccgggacgtaagcgggacattaaggaagcatatattcttcagggatcgatacggaaccaagcagcgggaactactccacatcctcctggcatatgaggagtataacccggaggtgggctactgcagggacctgagccacatcgccgccttgttcctcctctatcttcctgaggaggatgcattctgggcactggtgcagctgctggccagtgagaggcactccctgcagggatttcacagcccaaatggcgggaccgtccaggggctccaagaccaacaggagcatgtggtagccacgtcacaacccaagaccatggggcatcaggacaagaaagatctatgtgggcagtgttccccgttaggctgcctcatccggatattgattgacgggatctctctcgggctcaccctgcgcctgtgggacgtgtatctggtagaaggcgaacaggcgtagatgccgataacaagaatcgcctttaaggttcagcagaagcgcctcacgaagacgtccaggtgtggcccgtgggcacgtttttgcaaccggttcgttgatacctgggccagggatgaggacactgtgctcaagcatcttagggcctctatgaagaaactaacaagaaagcagggggacctgcaacccccagccaaacccgagcaagggtcgtcggcatccaggcctgtgccggcttcacgtggcgggaagaccctctgcaagggggacaggcaggcccctccaggcccaccagcccggttcccgcggcccatttggtcagcttccccgccacgggcacctcgttcttccacaccctgtcctggtggggctgtccgggaagacacctaccctgtgggcactcagggtgtgcccagcccggccctggctcagggaggacctcagggttcctggagattcctgcagtggaactccatgccccgcctcccaacggacctggacgtagagggcccttggttccgccattatgatttcagacagagctgctgggtccgtgccatatcccaggaggaccagctggccccctgctggcaggctgaacaccctgcggagcgggtgagatcggctttcgctgcacccagcactgattccgaccagggcacccccttcagagctagggacgaacagccgtgtgctcccacctcagggccttgcctctgcggcctccacttggaaagttctcagttccctccaggcttctagaagcatctgggccagggctcatggctggataatttccctaggcttaacaacccaagcaagcttcgcatcctcgttttatttttggttaaacttatgaaaatgtattaagaaagagtgcagctcgagagagattcagagatggaacacaccagaccccagatcacaaagccaaccatgcccagcccctcccagcacccccagccccacgaccatcgttttgaattctgacgacaccgtgagcctgcctttgtacttcaaactcatggaaggataaccaccttcatgttttgaaataaatgtttcctgttgaaatgaaaaaaaa

SEQ ID NO: 6346 - DNA, 3079 bp, Homo sapiens
cacttccatgcacatttcaagaatgcagatggacacctctccctttggtgctactgtctgagggtgtaagattttaaagtgagcatctggcggtagtagcatttttagatatattcttggctaagtttctcattgcagtgcctttctttcctgccagtagtttcacagctatttatccagcttggagaaccttccctaatttcatatcttctagccaagtttttacatgtctgtcaccacaacataaacatgtgagttgaataacttttaaaagcagagtctgtctgtaaacaagtttttgccttctactttcaattgccttcttagatgagctaagtgttgaacggccggctcagtgctgtttttgggactatggaatgcatcttcctccaccactcccctcatttaatgaaaggactttcttctctctccatctagcacagtaatcgctaatcccttagacaatgttttcccaaaatttcaggcagctattctatcaacaaactgataattaaacttgtgtcacatctttgatattctgttgtattaattctgttggggtagtctttaatcttcgtgaaactttttctttccatattaggaaatattttcctaatatctctaaagcctaacttgtccatctgacttactgtctgaatcttcccaacttatgcatgcccacttttattgtttaaatttgtttcttttttttttttttttaaacatagggagactgcattgcttattgatccaaaaaattcctgttcttcatcccgccagtgggttgctctggttgtgggacatgaacttgcccatcaatggtttggaaatcttgttactatggaatggtggactcatctttggttaaatgaaggttttgcatcctggattgaatatctgtgtgtagaccactgcttcccagagtatgatatttggactcagtttgtttctgctgattacacccgtgcccaggagcttgacgccttagataacagccatcctattgaagtcagtgtgggccatccatctgaggttgatgagatatttgatgctatatcatatagcaaaggtgcatctgtcatccgaatgctgcatgactacattggggataaggactttaagaaaggaatgaacatgtatttaaccaagttccaacaaaagaatgctgccaggatggacgtggtagaggtcgcgggcagttggtgggcacaagagcgagaggacatcattatgaaatacgaaaagggacaccgagctgggctgccagaggacaaggggcctaagccttttcgaagctacaacaacaacgtcgatcatttggggattgtacatgagacggagctgcctcctctgactgcgcgggaggcgaagcaaattcggcgggagatcagccgaaagagcaagtgggtggatatgctgggagactgggagaaatacaaaagcagcagaaagctcatagatcgagcgtacaagggaatgcccatgaacatccggggcccgatgtggtcagtcctcctgaacactgaggaaatgaagttgaaaaaccccggaagataccagatcatgaaggagaagggcaagaggtcatctgagcacatccagcgcatcgaccgggacgtaagcgggacattaaggaagcatatattcttcagggatcgatacggaaccaagcagcgggaactactccacatcctcctggcatatgaggagtataacccggaggtgggctactgcagggacctgagccacatcgccgccttgttcctcctctatcttcctgaggaggatgcattctgggcactggtgcagctgctggccagtgagaggcactccctgcagggatttcacagcccaaatggcgggaccgtccaggggctccaagaccaacaggagcatgtggtagccacgtcacaacccaagaccatggggcatcagatctctctcgggctcaccctgcgcctgtgggacgtgtatctggtagaaggcgaacaggcgtagatgccgataacaagaatcgcctttaaggttcagcagaagcgcctcacgaagacgtccaggtgtggcccgtgggcacgtttttgcaaccggttcgttgatacctgggccagggatgaggacactgtgctcaagcatcttagggcctctatgaagaaactaacaagaaagcagggggacctgcaacccccagccaaacccgagcaagggtcgtcggcatccaggcctgtgccggcttcacgtggcgggaagaccctctgcaagggggacaggcaggcccctccaggcccaccagcccggttcccgcggcccatttggtcagcttccccgccacgggcacctcgttcttccacaccctgtcctggtggggctgtccgggaagacacctaccctgtgggcactcagggtgtgcccagcccggccctggctcagggaggacctcagggttcctggagattcctgcagtggaactccatgccccgcctcccaacggacctggacgtagagggcccttggttccgccattatgatttcagacagagctgctgggtccgtgccatatcccaggaggaccagctggccccctgctggcaggctgaacaccctgcggagcgggtgagatcggctttcgctgcacccagcactgattccgaccagggcacccccttcagagctagggacgaacagccgtgtgctcccacctcagggccttgcctctgcggcctccacttggaaagttctcagttccctccaggcttctagaagcatctgggccagggctcatggctggataatttccctaggcttaacaacccaagcaagcttcgcatcctcgttttatttttggttaaacttatgaaaatgtattaagaaagagtgcagctcgagagagattcagagatggaacacaccagaccccagatcacaaagccaaccatgcccagcccctcccagcacccccagccccacgaccatcgttttgaattctgacgacaccgtgagcctgcctttgtacttcaaactcatggaaggataaccaccttcatgttttgaaataaatgtttcctgttgaaatgaaaaaaaa

SEQ ID NO: 6347 - DNA, 597 bp, Homo sapiens
aaagcatgatcgagctcggtaccccttggttccgccattatgatttcagacagagctgctgggtccgtgccatatcccaggaggaccagctggccccctgctggcaggctgaacaccctgcggagcgggtgagatcggctttcgctgcacccagcactgattccgaccagggcacccccttcagagctagggacgaacagccgtgtgctcccacctcagggccttgcctctgcggcctccacttggaaagttctcagttccctccaggcttctagaagcatctgggccagggctcatggctggataatttccctaggcttaacaacccaagcaagcttcgcatcctcgttttatttttggttaaacttatgaaaatgtattaagaaagagtgcagctcgagagagattcagagatggaacacaccagaccccagatcacaaagccaaccatgcccagcccctcccagcacccccagccccacgaccatcgttttgaattctgacgacaccgtgagcctgcctttgtacttcaaactcatggaaggataaccaccttcatgttttgaaataaatgtttcctgttgaaatgaaaaaaaa

SEQ ID NO: 6348 - DNA, 3098 bp, Homo sapiens
cacttccatgcacatttcaagaatgcagatggacacctctccctttggtgctactgtctgagggtgtaagattttaaagtgagcatctggcggtagtagcatttttagatatattcttggctaagtttctcattgcagtgcctttctttcctgccagtagtttcacagctatttatccagcttggagaaccttccctaatttcatatcttctagccaagtttttacatgtctgtcaccacaacataaacatgtgagttgaataacttttaaaagcagagtctgtctgtaaacaagtttttgccttctactttcaattgccttcttagatgagctaagtgttgaacggccggctcagtgctgtttttgggactatggaatgcatcttcctccaccactcccctcatttaatgaaaggactttcttctctctccatctagcacagtaatcgctaatcccttagacaatgttttcccaaaatttcaggcagctattctatcaacaaactgataattaaacttgtgtcacatctttgatattctgttgtattaattctgttggggtagtctttaatcttcgtgaaactttttctttccatattaggaaatattttcctaatatctctaaagcctaacttgtccatctgacttactgtctgaatcttcccaacttatgcatgcccacttttattgtttaaatttgtttcttttttttttttttttaaacatagggagactgcattgcttattgatccaaaaaattcctgttcttcatcccgccagtgggttgctctggttgtgggacatgaacttgcccatcaatggtttggaaatcttgttactatggaatggtggactcatctttggttaaatgaaggttttgcatcctggattgaatatctgtgtgtagaccactgcttcccagagtatgatatttggactcagtttgtttctgctgattacacccgtgcccaggagcttgacgccttagataacagccatcctattgaagtcagtgtgggccatccatctgaggttgatgagatatttgatgctatatcatatagcaaaggtgcatctgtcatccgaatgctgcatgactacattggggataaggactttaagaaaggaatgaacatgtatttaaccaagttccaacaaaagaatgctgccaggatggacgtggtagaggtcgcgggcagttggtgggcacaagagcgagaggacatcattatgaaatacgaaaagggacaccgagctgggctgccagaggacaaggggcctaagccttttcgaagctacaacaacaacgtcgatcatttggggattgtacatgagacggagctgcctcctctgactgcgcgggaggcgaagcaaattcggcgggagatcagccgaaagagcaagtgggtggatatgctgggagactgggagaaatacaaaagcagcagaaagctcatagatcgagcgtacaagggaatgcccatgaacatccggggcccgatgtggtcagtcctcctgaacactgaggaaatgaagttgaaaaaccccggaagataccagatcatgaaggagaagggcaagaggtcatctgagcacatccagcgcatcgaccgggacgtaagcgggacattaaggaagcatatattcttcagggatcgatacggaaccaagcagcgggaactactccacatcctcctggcatatgaggagtataacccggaggtgggctactgcagggacctgagccacatcgccgccttgttcctcctctatcttcctgaggaggatgcattctgggcactggtgcagctgctggccagtgagaggcactccctgcagggatttcacagcccaaatggcgggaccgtccaggggctccaagaccaacaggagcatgtggtagccacgtcacaacccaagaccatggggcatcaggacaagaaagatctatgtgggcagtgttccccgttaggctgcctcatccggatattgattgacgggatctctctcgggctcaccctgcgcctgtgggacgtgtatctggtagaaggcgaacaggcgtagatgccgataacaagaatcgcctttaaggttcagcagaagcgcctcacgaagacgtccaggtgtggcccgtgggcacgtttttgcaaccggttcgttgatacctgggccagggatgaggacactgtgctcaagcatcttagggcctctatgaagaaactaacaagaaagcagggggacctgcaacccccagccaaacccgagcaagggtcgtcggcatccaggcctgtgccggcttcacgtggcgggaagaccctctgcaagggggacaggcaggcccctccaggcccaccagcccggttcccgcggcccatttggtcagcttccccgccacgggcacctcgttcttccacaccctgtcctggtggggctgtccgggaagacacctaccctgtgggcactcagggtgtgcccagcccggccctggctcagggaggacctcagggttcctggagattcctgcagtggaactccatgccccgcctcccaacggacctggacgtagagggcccttggttccgccattatgatttcagacagagctgctgggtccgtgccatatcccaggaggaccagctggccccctgctggcaggctgaacaccctgcggagcgggtgagatcggctttcgctgcacccagcactgattccgaccagggcacccccttcagagctagggacgaacagccgtgtgctcccacctcagggccttgcctctgcggcctccacttggaaagttctcagttccctccaggcttctagaagcatctgggccagggctcatggctggataatttccctaggcttaacaacccaagcaagcttcgcatcctcgttttatttttggttaaacttatgaaacaccagaccccagatcacaaagccaaccatgcccagcccctcccagcacccccagccccacgaccatcgttttgaattctgacgacaccgtgagcctgcctttgtacttcaaactcatggaaggataaccaccttcatgttttgaaataaatgtttcctgttgaaatgaaaaaaaa

SEQ ID NO: 6349 - DNA, 2912 bp, Homo sapiens
cacttccatgcacatttcaagaatgcagatggacacctctccctttggtgctactgtctgagggtgtaagattttaaagtgagcatctggcggtagtagcatttttagatatattcttggctaagtttctcattgcagtgcctttctttcctgccagtagtttcacagctatttatccagcttggagaaccttccctaatttcatatcttctagccaagtttttacatgtctgtcaccacaacataaacatgtgagttgaataacttttaaaagcagagtctgtctgtaaacaagtttttgccttctactttcaattgccttcttagatgagctaagtgttgaacggccggctcagtgctgtttttgggactatggaatgcatcttcctccaccactcccctcatttaatgaaaggactttcttctctctccatctagcacagtaatcgctaatcccttagacaatgttttcccaaaatttcaggcagctattctatcaacaaactgataattaaacttgtgtcacatctttgatattctgttgtattaattctgttggggtagtctttaatcttcgtgaaactttttctttccatattaggaaatattttcctaatatctctaaagcctaacttgtccatctgacttactgtctgaatcttcccaacttatgcatgcccacttttattgtttaaatttgtttcttttttttttttttttaaacatagggagactgcattgcttattgatccaaaaaattcctgttcttcatcccgccagtgggttgctctggttgtgggacatgaacttgcccatcaatggtttggaaatcttgttactatggaatggtggactcatctttggttaaatgaaggttttgcatcctggattgaatatctgtgtgtagaccactgcttcccagagtatgatatttggactcagtttgtttctgctgattacacccgtgcccaggagcttgacgccttagataacagccatcctattgaagtcagtgtgggccatccatctgaggttgatgagatatttgatgctatatcatatagcaaaggtgcatctgtcatccgaatgctgcatgactacattggggataaggactttaagaaaggaatgaacatgtatttaaccaagttccaacaaaagaatgctgccaggatggacgtggtagaggtcgcgggcagttggtgggcacaagagcgagaggacatcattatgaaatacgaaaagggacaccgagctgggctgccagaggacaaggggcctaagccttttcgaagctacaacaacaacgtcgatcatttggggattgtacatgagacggagctgcctcctctgactgcgcgggaggcgaagcaaattcggcgggagatcagccgaaagagcaagtgggtggatatgctgggagactgggagaaatacaaaagcagcagaaagctcatagatcgagcgtacaagggaatgcccatgaacatccggggcccgatgtggtcagtcctcctgaacactgaggaaatgaagttgaaaaaccccggaagataccagatcatgaaggagaagggcaagaggtcatctgagcacatccagcgcatcgaccgggacgtaagcgggacattaaggaagcatatattcttcagggatcgatacggaaccaagcagcgggaactactccacatcctcctggcatatgaggagtataacccggaggtgggctactgcagggacctgagccacatcgccgccttgttcctcctctatcttcctgaggaggatgcattctgggcactggtgcagctgctggccagtgagaggcactccctgcagggatttcacagcccaaatggcgggaccgtccaggggctccaagaccaacaggagcatgtggtagccacgtcacaacccaagaccatggggcatcaggacaagaaagatctatgtgggcagtgttccccgttaggctgcctcatccggatattgattgacgggatctctctcgggctcaccctgcgcctgtgggacgtgtatctggtagaaggcgaacaggcgtagatgccgataacaagaatcgcctttaaggttcagcagaagcgcctcacgaagacgtccaggtgtggcccgtgggcacgtttttgcaaccggttcgttgatacctgggccagggatgaggacactgtgctcaagcatcttagggcctctatgaagaaactaacaagaaagcagggggacctgcaacccccagccaaacccgagcaagggtcgtcggcatccaggcctgtgccggcttcacgtggcgggaagaccctctgcaagggggacaggcaggcccctccaggcccaccagcccggttcccgcggcccatttggtcagcttccccgccacgggcacctcgttcttccacaccctgtcctggtggggctgtccgggaagacacctaccctgtgggcactcagggtgtgcccagcccggccctggctcagggaggacctcagggttcctggagattcctgcagtggaactccatgccccgcctcccaacggacctggacgtagagggcccttggttccgccattatgatttcagacagagctgctgggtccgtgccatatcccaggaggaccagctggccccctgctggcaggctgaacaccctgcggagcgggtgagatcggctttcgctgcacccagcactgattccgaccagggcacccccttcagagctagggacgaacagccgtgtgctcccacctcagggccttgcctctgcggcctccacttggaaagttctcagttccctccaggcttctagaagcatctgggccagggctcatggctggataatttccctaggcttaacaacccaagcaaccaagcaaccactggtaccgagctcgagta

SEQ ID NO: 6350 - DNA, 1556 bp, Homo sapiens
cattattgatttgaaggcatttgcattaaatttgaaatgttaaaatgtaaacaaaaatttagttgtaaataattataatatattgttaaaatccatagcagacactgttcctggatatttgctggaatggcagtggtagcaagtgttgtcttttctttctagttaatgcctagcttgttgcctggcactgaagagaaagtaaatatttgaacaagggaatgaatgaatgacagagggaaatggcgactgctttatgaaataacttgttaggttaattctaaggtatttatatttcatattcttttcttaaggctactgatgcccgaagggcttttccttgctgggatgagcctgctatcaaagcaacttttgatatctcattggttgttcctaaagacagagtagctttatcaaacatgaatgtaattgaccggaaaccataccctgatgatgaaaatttagtggaagtgaagtttgcccgcacacctgttacatctacatatctggtggcatttgttgtgggtgaatatgactttgtagaaacaaggtcaaaagatggtgtgtgtgtctgtgtttacactcctgttggcaaagcagaacaaggaaaatttgcattagaggttgctgctaaaaccttgcctttttataaggactacttcaatgttccttatcctctacctaaaattgatctcattgctattgcagactttgcagctggtgccatggagaactgggaccttgttacttatagggagactgcattgcttattgatccaaaaaattcctgttcttcatcccgccagtgggttgctctggttgtgggacatgaacttgcccatcaatggtttggaaatcttgttactatggaatggtggactcatctttggttaaatgaaggttttgcatcctggattgaatatctgtgtgtagaccactgcttcccagagtatgatatttggactcagtttgtttctgctgattacacccgtgcccaggagcttgacgccttagataacagccatcctattgaagtcagtgtgggccatccatctgaggttgatgagatatttgatgctatatcatatagcaaaggtgcatctgtcatccgaatgctgcatgactacattggggataaggactttaagaaaggaatgaacatgtatttaaccaagttccaacaaaagaatgctgccgcaggtaatctttaatagcttgagatagaaatggagagaaagtattgtcactctatccaggctgggacattttatttttgttctgaatacttaactcaaggtcaggatccatgtaataaataaattagccttatttgaagctgtgttcaggttgaatatctctaatctgaaatttgaaatgctccagaatctgaaactttttcttttctttctttctttttttttaattaaagttctagggtgcatgtgcacaatgtgcaggtttgttacatcagtatacatgtgccatgttggtttgctgcacccattaactcgtcatttacattaggtatttctcctaatgctatccctcccccagccccc

SEQ ID NO: 6351 - DNA, 1859 bp, Homo sapiens
cacttccatgcacatttcaagaatgcagatggacacctctccctttggtgctactgtctgagggtgtaagattttaaagtgagcatctggcggtagtagcatttttagatatattcttggctaagtttctcattgcagtgcctttctttcctgccagtagtttcacagctatttatccagcttggagaaccttccctaatttcatatcttctagccaagtttttacatgtctgtcaccacaacataaacatgtgagttgaataacttttaaaagcagagtctgtctgtaaacaagtttttgccttctactttcaattgccttcttagatgagctaagtgttgaacggccggctcagtgctgtttttgggactatggaatgcatcttcctccaccactcccctcatttaatgaaaggactttcttctctctccatctagcacagtaatcgctaatcccttagacaatgttttcccaaaatttcaggcagctattctatcaacaaactgataattaaacttgtgtcacatctttgatattctgttgtattaattctgttggggtagtctttaatcttcgtgaaactttttctttccatattaggaaatattttcctaatatctctaaagcctaacttgtccatctgacttactgtctgaatcttcccaacttatgcatgcccacttttattgtttaaatttgtttcttttttttttttttttaaacatagggagactgcattgcttattgatccaaaaaattcctgttcttcatcccgccagtgggttgctctggttgtgggacatgaacttgcccatcaatggtttggaaatcttgttactatggaatggtggactcatctttggttaaatgaaggttttgcatcctggattgaatatctgtgtgtagaccactgcttcccagagtatgatatttggactcagtttgtttctgctgattacacccgtgcccaggagcttgacgccttagataacagccatcctattgaagtcagtgtgggccatccatctgaggttgatgagatatttgatgctatatcatatagcaaaggtgcatctgtcatccgaatgctgcatgactacattggggataaggactttaagaaaggaatgaacatgtatttaaccaagttccaacaaaagaatgctgccaggatggacgtggtagaggtcgcgggcagttggtgggcacaagagcgagaggacatcattatgaaatacgaaaagggacaccgagctgggctgccagaggacaaggggcctaagccttttcgaagctacaacaacaacgtcgatcatttggggattgtacatgagacggagctgcctcctctgactgcgcgggaggcgaagcaaattcggcgggagatcagccgaaagagcaagtgggtggatatgctgggagactgggagaaatacaaaagcagcagaaagctcatagatcgagcgtacaagggaatgcccatgaacatccggggcccgatgtggtcagtcctcctgaacactgaggaaatgaagttgaaaaaccccggaagataccagatcatgaaggagaagggcaagaggtcatctgagcacatccagcgcatcgaccgggacgtaagcgggacattaaggaagcatatattcttcagggatcgatacggaaccaagcagcgggaactactccacatcctcctggcatatgaggagtataacccggaggtgggctactgcagggacctgagccacatcgccgccttgttcctcctctatcttcctgaggaggatgcattctgggcactggtgcagctgctggccagtgagaggcactccctgcagggtaagtgaacagctgcccc

SEQ ID NO: 6352 - DNA, 1950 bp, Homo sapiens
  misc_feature (1407)..(1407): n is a, c, g, or t
cacttccatgcacatttcaagaatgcagatggacacctctccctttggtgctactgtctgagggtgtaagattttaaagtgagcatctggcggtagtagcatttttagatatattcttggctaagtttctcattgcagtgcctttctttcctgccagtagtttcacagctatttatccagcttggagaaccttccctaatttcatatcttctagccaagtttttacatgtctgtcaccacaacataaacatgtgagttgaataacttttaaaagcagagtctgtctgtaaacaagtttttgccttctactttcaattgccttcttagatgagctaagtgttgaacggccggctcagtgctgtttttgggactatggaatgcatcttcctccaccactcccctcatttaatgaaaggactttcttctctctccatctagcacagtaatcgctaatcccttagacaatgttttcccaaaatttcaggcagctattctatcaacaaactgataattaaacttgtgtcacatctttgatattctgttgtattaattctgttggggtagtctttaatcttcgtgaaactttttctttccatattaggaaatattttcctaatatctctaaagcctaacttgtccatctgacttactgtctgaatcttcccaacttatgcatgcccacttttattgtttaaatttgtttcttttttttttttttttaaacatagggagactgcattgcttattgatccaaaaaattcctgttcttcatcccgccagtgggttgctctggttgtgggacatgaacttgcccatcaatggtttggaaatcttgttactatggaatggtggactcatctttggttaaatgaaggttttgcatcctggattgaatatctgtgtgtagaccactgcttcccagagtatgatatttggactcagtttgtttctgctgattacacccgtgcccaggagcttgacgccttagataacagccatcctattgaagtcagtgtgggccatccatctgaggttgatgagatatttgatgctatatcatatagcaaaggtgcatctgtcatccgaatgctgcatgactacattggggataaggactttaagaaaggaatgaacatgtatttaaccaagttccaacaaaagaatgctgccacagaggatctctgggaaagtttagaaaatgctagtggtaaacctatagcagctgtgatgaatacctggaccaaacaaatgggatttcccctcatttatgtggaagctgaacaggtagaagatgacagattattgaggttgtcccaaaagaagttctgtgctggtgggtcatatgttggtgaagattgtccccagtggatggtccctatcacaatctctactagtgaagaccccaancaggccaaactaaaaattctaatggacaagccagagatgaatgtggtttcgaaaaatgtcaaacacagaccaatgggtgaaagttaaacttaggaacagatgggtcttatccggacccagtacagatctgccatgctggaaagttattaccaggcattcgtgaacctttctctgaccactgtggatcgacttggattaccagaaatgacctcttctccttgggctcgaggctggcatcatcaagcacttgtagaggtctaacagtcatggaggctctgggaatgagcccaattatacggtatggagcgaactgaactgtaacctggggatacacatcaaacacgtgggcccacgacagaagttctatgaggaaaaccaacgagtttgggaaaacagaccatcagcctatcaggggaaaaccgcggagcgaccccaacactgaaaaggccccgcgaacacccaccgtaagagctgagaccagcacaacagcaagcagcgcaaggcacctagcaaaagccgcagcgtaagacacgcgagaacaac

SEQ ID NO: 6353 - DNA, 1690 bp, Homo sapiens
cacttccatgcacatttcaagaatgcagatggacacctctccctttggtgctactgtctgagggtgtaagattttaaagtgagcatctggcggtagtagcatttttagatatattcttggctaagtttctcattgcagtgcctttctttcctgccagtagtttcacagctatttatccagcttggagaaccttccctaatttcatatcttctagccaagtttttacatgtctgtcaccacaacataaacatgtgagttgaataacttttaaaagcagagtctgtctgtaaacaagtttttgccttctactttcaattgccttcttagatgagctaagtgttgaacggccggctcagtgctgtttttgggactatggaatgcatcttcctccaccactcccctcatttaatgaaaggactttcttctctctccatctagcacagtaatcgctaatcccttagacaatgttttcccaaaatttcaggcagctattctatcaacaaactgataattaaacttgtgtcacatctttgatattctgttgtattaattctgttggggtagtctttaatcttcgtgaaactttttctttccatattaggaaatattttcctaatatctctaaagcctaacttgtccatctgacttactgtctgaatcttcccaacttatgcatgcccacttttattgtttaaatttgtttcttttttttttttttttaaacatagggagactgcattgcttattgatccaaaaaattcctgttcttcatcccgccagtgggttgctctggttgtgggacatgaacttgcccatcaatggtttggaaatcttgttactatggaatggtggactcatctttggttaaatgaaggttttgcatcctggattgaatatctgtgtgtagaccactgcttcccagagtatgatatttggactcagtttgtttctgctgattacacccgtgcccaggagcttgacgccttagataacagccatcctattgaagtcagtgtgggccatccatctgaggttgatgagatatttgatgctatatcatatagcaaaggtgcatctgtcatccgaatgctgcatgactacattggggataaggactttaagaaaggaatgaacatgtatttaaccaagttccaacaaaagaatgctgccaggatggacgtggtagaggtcgcgggcagttggtgggcacaagagcgagaggacatcattatgaaatacgaaaagggacaccgagctgggctgccagaggacaaggggcctaagccttttcgaagctacaacaacaacgtcgatcatttggggattgtacatgagacggagctgcctcctctgactgcgcgggaggcgaagcaaattcggcgggagatcagccgaaagagcaagtgggtggatatgctgggagactgggagaaatacaaaagcagcagaaagctcatagatcgagcgtacaagggaatgcccatgaacatccggggcccgatgtggtcagtcctcctgaacactgaggaaatgaagttgaaaaaccccggaagataccagatcatgaaggagaagggcaagaggtcatctgagcacatccagcgcatcgaccgggacgtaagcgggacattaaggaagcatatattcttcagggatcgatacggaaccaagtaagcctacgggagccaca

SEQ ID NO: 6354 - DNA, 885 bp, Homo sapiens
cattattgatttgaaggcatttgcattaaatttgaaatgttaaaatgtaaacaaaaatttagttgtaaataattataatatattgttaaaatccatagcagacactgttcctggatatttgctggaatggcagtggtagcaagtgttgtcttttctttctagttaatgcctagcttgttgcctggcactgaagagaaagtaaatatttgaacaagggaatgaatgaatgacagagggaaatggcgactgctttatgaaataacttgttaggttaattctaaggtatttatatttcatattcttttcttaaggctactgatgcccgaagggcttttccttgctgggatgagcctgctatcaaagcaacttttgatatctcattggttgttcctaaagacagagtagctttatcaaacatgaatgtaattgaccggaaaccataccctgatgatgaaaatttagtggaagtgaagtttgcccgcacacctgttacatctacatatctggtggcatttgttgtgggtgaatatgactttgtagaaacaaggtcaaaagatggtgtgtgtgtctgtgtttacactcctgttggcaaagcagaacaaggaaaatttgcattagaggtaaatgtacttgaagaggattgttccagcagtccataactccaggttggggaatttacatttctggtcaattattagtacagttatttataatttaatctgaaagttgtgctacttggtttatttttaatagaatttaggaaatgccaaccttggtgtttcgttattttacaaaataataattaagagaatataagagtggaatttctctagggaatgggttggaaaatatgtagttatatttttcatatcaagttataaatgg

SEQ ID NO: 6355 - DNA, 464 bp, Homo sapiens
atatatagatatatatctcaataaatgtttatatttattttgtgaaggtgccatggagaactgggaccttgttacttataggtatgttaatgatgtattaccctgccttatcttttcaaatcactgatttcaaaagggcttccctcctaatcacagttgagtagcttctgctttacgatatggtgtaaatttttctaccttcccccacttccatgcacatttcaagaatgcagatggacacctctccctttggtgctactgtctgagggtgtaagattttaaagtgagcatctggcggtagtagcatttttagatatattcttggctaagtttctcattgcagtgcctttctttcctgccagtagtttcacagctatttatccagcttggagaaccttccctaatttcatatcttctagccaagtttttacatgtctgtcaccacaacataaacatgtgagttg

SEQ ID NO: 6356 - DNA, 172 bp, Homo sapiens
atagtttgttctaattattgaaatatctttattttatttttaaagatagtgccaagttttaaggggggaaaaccctagaccttaaattgactgagttgagttgtgtgtaaaacacttcccttcctttatacttcataaagttttggaataaattttatgcatatactgccag

SEQ ID NO: 6357 - DNA, 350 bp, Homo sapiens
tcagaagccgtgtctgatttattttgtatcctgtacaaaatctacaatgccttctctaattctatatgtcagagcaaagtaatatgttttctcttttgtattagaccatccctcagattctatttcttcctcacaattactgtattgccataattattcattctcatatctgctgcctatgctcaattctgagtccctgaagggcagggagcatgttctagtcatctttgtactcctgtatctgtaagagggttgggcatatgatgagtgcctgttaacttatttatccacccaacacaatacctgaaatatggtcaatgcgaaataaaaagttgatgaagtgtttgttg

SEQ ID NO: 6358 - DNA, 618 bp, Homo sapiens
taattgtgttttaaatactttgaggaatcaccaaactgccttctgcaatggctgaactaatttacattcccaccagcagtgtataagcattctcttttctttgcaacctcaccaacatctgttattttttgacttttttataatagccattctgactggtgtgagatagtattgcattgtggttttaatttgtgcttccctaatgattagtgatattgtgcattatttcatatgcttgttggccatgtgtttgtcttctgagaagtgtctgttcatgtcatttgcccatttttagaggagttctttctttctttttttcttgattttgtaaagttacttatagattctggatattaggtttctgttggatgtatagtctgcaagtgtattttcccactctctaggtggtctgtttactgtgttggtagtttctttcactatgtcaaagctccttagtttaatttggtcctgtttgtcaatttttatttttgttgaaattatttttggagtcttcaccatgaaatctttgccagaccaatatccagaatagtatttcctaggtttttctctagggttttatagttttaggttttacatttaagtctttaatccatgttg

SEQ ID NO: 6359 - DNA, 347 bp, Homo sapiens
ggtcgacgtaaagagcaactcaacatggattgaagacttaaatgtgaaacctaaaactataaaaccttatagattctggatattaggtttctgttggatgtatagtctgcaagtgtattttcccactctctaggtggtctgtttactgtgttggtagtttctttcactatgtcaaagctccttagtttaatttggtcctgtttgtcaatttttatttttgttgaaattatttttggagtcttcaccatgaaatctttgccagaccaatatccagaatagtatttcctaggtttttctctagggttttatagttttaggttttacatttaagtctttaatccatgttg

SEQ ID NO: 6360 - DNA, 539 bp, Homo sapiens
gttgaggtttccaatccatgaacatggaatatctttcctttttttgttgttgttgttgttgtcctcttcagtttgtttcatcaatctttgatagttttaattgtagacatcttttacttctttaagttaattcataagtatttaattttatttgtggctattgtaaatgggattactttttttattctatttgagattcctcactgttggcatatagaaatgctactgatttttgactgggccacggtggctcatgcctgtaatcccaatactttgggatgccgaggcaggcggatcacgaggtcaggagatcaagaccatcctggctaacatggtgaaaccccatctctactaaaaatacaaaaaaattaaccaggcatggtggcgggcacctgtagtcccagctactcaggaggctgaggcaggagaatggcgtgaacccgggaggcggagcttgcagtgagccgagatcgtaccactgcactctagcctgggtgacagagcgagactccatctcagaaaaaaaagaaaaaagatgc

SEQ ID NO: 6361 - DNA, 461 bp, Homo sapiens
ggccagtgtcacgggctgtaaaggaatttaccaagacagtcataggtaaaggcagatttattggagaaagtgtgaaaatatgttgcaaggttgcagtgagcagcacagcagagaaggggaagtctgcaaagacgcagcggcttgagggacgttttacatggtcctgctggaggggactgcttgcagaatgtagccgtgctcctggggctacctgtaggaggtcatctctcagagtaattactcattgttctcccccacctgggccccttcctctttgttgcttacttaccttgtcaggacttacttatcttatcaggactacacactatgtgctaggccactttatctcagaaaatttattatttaaaaacaacactagtatcatcctgaaagctagaagaatttaagtgtagtctccttacaaataaaagcaaaatctacaagagcctactccaaaactt

SEQ ID NO: 6362 - DNA, 561 bp, Homo sapiens
taactcaataaaaggtatctactaaaaagctatataaaatctccaacaacagtaattcaacgtgctttttaatgttggaaacaacacaaggaaagctgctaccactgctactatttaaaattgcattatgggcaggtgcacgcctataatcccagcactttagggagtccaaggtggggaggatcactgggaggccaggagtttgagaccagcctggaaaatatcgtgagactcccatctctacaaaaattaataaaaaattagccgggcatggtggtacacgcttgggaggctgatatgcaaggatcacttgagccccaggagtttgaggctgaagtgagccatgatcatgccactgcactccatcgtgggtgacagagcaagacttagtctctcttaaaaaaaaaaaaaaaaagaaaagaaaaagaaaaaaagaaaggtcgaactaaaacagcaagttgtaaagatatattattttttatttatataatcaattcaaatatgccagtatatctgtttttagtatgcccactgtatatacactgtatatacaagcacata

SEQ ID NO: 6363 - DNA, 336 bp, Homo sapiens
gccctgaacaaaagcaaagaacaatggaactttaacttaggggcttcagtaaaactgtttatagttctccccacagcctgcagtaacagatgctccctctttgtgccctgcaatgcaaagtgaaagcttaaaagactaacacagtgataacagtgatgacgacaccaagagtcagtcagcgaggcccaagacaacacccccttataagatttgtctagaaatgttatttacacttctgccaatagcatacatgtcatactgtagaagataatagttaacaccaaacataaaatttataaaatagtttgtcctgctgcaaaagaaaaaaaaacccac

SEQ ID NO: 6364 - DNA, 564 bp, Homo sapiens
ctcattgataccagaactggagaggaaatcttcacaaacttgggttgtgttggttcatgagccgtcctggacccatagtcaccctcaggtcccagatttgttatagcctgggatagttgtcaggggttcctaggtgagttcattaatacaggaaatggacctgggatgccaagcagctgaaagagcctgaccaagtcactgttctccgtcctattgtcatagtctttgatgcagagctttgggatgaaactctgcttctgccactgatttagaaaccttgggcaagttatttaaaaccttctaatgtttccagttctattcccctgtaaaattaggctattagcatcaattttatatgtctattgcatatgcatcacaaatatgtttctgagactggcgacatgagatgcatacactgaattacatttttaaaaaatataaggcccagatagacacctaagtctgttattcaccttatacttgtaatttttacttaggcattttgcacagttttgaactatgtctaaaaaacaaccaaagtgtttggtagaccatactgtgtct

SEQ ID NO: 6365 - DNA, 339 bp, Homo sapiens
ctgcctaaaatatcactcccttttttctctttccatgctgaaaattctgtgccctctttcagctacacttttgatcactgagattatatgcttatgactttctggcattaaaagatttcactgactgctcagtttttctgagggtgtctatttagactagtacccctaaattttaagcgttcaataatgtaaaatttgtgagttataatgtttcatacatagtacaaatcacacctacattgcactgctttctaacttaaaaactgtacatttcaaaaagtagtaaatttgggagttattaagagggaataaaaacattgagttttaacgtagtgtgaa

SEQ ID NO: 6366 - DNA, 525 bp, Homo sapiens
gttctctcttcagctgtgtctattctggtgtttaatttgttcatgaaggctttaaaaaaaaagtctttattttctctattcttttctagaagtagtatttggttcttttctttctttatatcatatttttattacattttctgctatctcatttaattttagtcagatttaacatatttattgtatagacacttccagactttcatattatcatcaattattagagttattaaatattgtgtgtgtctgtgtgtgtgtgtgtgtgtgtgtgtgtgttgactcattgactcattgactctctgtcatggatttttagcctgacttggttcttcttcccctctaggtagccctataagtaaagccaccccttttgggtggtaataagaagaggaaaagccaaatatttgcaggcaatagacagttccgtttctaggttaactgtcccatgaagagcagcatttttgtaaaattcttttcttatatcacaattccttctggttaattacatgaatgaattgaacagaa

SEQ ID NO: 6367 - DNA, 407 bp, Homo sapiens
agaacaagctcagatgcttgatactcagatgcttgatgctcagagcttttatagctgatgactttctgaaaaatgatattaaggtttggagttcagtatcaataccagtaaagaagggaagaaacaggcaggtgcggtggctcacgcctctaattccagtactttgggaggccgaggcaggaggattgcttaagcccaggagtttgagaccagcatgggcaacgtagcgagttcttgtctctgcaaaaaataaataaaattagcagagcatggtggtgcgtgctggtagtcccagctacttgggaggctggggcaggaggatcgtgtgaacccaggagttggaggctgcagtgagcgatgatggccactgtactccagcctgggcagcagagagatgccctgtcttt

SEQ ID NO: 6368 - DNA, 423 bp, Homo sapiens
ggagcacttgtcctttggctggcagttgcctggcttatcatctgccaagaaaataaagaatatgttaggtaggcgtaaccatgacagcagccaagtcaacatttactcatttatggaactcacatccttttagcaaaaatagcccaagtaggctgggtgcgatggctcacacctgtagtatcagcactttgggaggccgaggcatgtggatcacttgaggtcaggaggtcgagacaagcctggccaacatggtgaaacactgtctctactaaaaatacaaaagttagggtagcagacgcctataatcccagctactcaggaggttgaggcaggagaatcacttgagcacgggaagtagaggttgcagtgagccgagatcacaccactgcactccagcctgggcaacggagaaagaatgtctca

SEQ ID NO: 6369 - DNA, 429 bp, Homo sapiens
tcctgccgagtggcctctgagaacctgcacagctgtgtgcttgggacccgaggccctggtggcgtgagctcacgaggggacctcctgatccatgggttgcacatatcagtgggaaaagtgtggtttcccggatggggtagcacaatcactcgccacttcccttggctgggggtgggaggtccccttgccttgggtggctcctgggtaggctgtcactccaccctgctttttctcgcccttcgtgggtcacgccaaccgcctagtcagtcccagtgagaacctggacacctcagatgctggcgcaggattcactcgctgtttttattctgcttggtgggagtctccaaccatagctgtttctagttggccatcttggccccagaaatgctctttttctagattttgggttatcagttggggccccatctt

SEQ ID NO: 6370 - DNA, 840 bp, Homo sapiens
gagctgggatctgaacccagggaatttgacttcagcctgtacttgtaactactgttctctatgggtagaagtcaaaaaatggaaaggaggcaaatgatagaaaaaatgttgcagagatttaatctctagtatttctaagtgggtacatgggaaatggtttgaatgaaaagggaatgtgtaagagggtgaggtcgcctgaggttttaagaaggatgaggttacctgagattttgagatttggtgactgacaggctgaattgagatgccattgacagagaagaaagtatagtaacactgaagccctggaaggagaaaatttcaaggagaatggtctgattcaacagtgtcaaatcctatgtgtttaagctatgcctttcttttaagagtttatgctttgctaggggaggtatgataaatgtataaccacagtagagttcagaaataagctaagagtcatataattggaaatatgacattcagagggagactggtggcgttaggatgcggtggggtggcaggggagaggccatttccagcctcatcagtggtctgtgaaggaagacctctctagtggaggtggtatttaagctataggctgaattgaaagtaggcatggtagatggaggaaatggtttgtgtgtagacatggagttgtgaaacccaggtagtgctaatgaaacaacatagaccagattgatgggatgaggtttatgtaatgaagcagtgagagagccagcttgaaagacaaacggacagaattatgtgaagggtgaggtgaaggaatttggtatttatttagtagttaaattatcctaagcacattggattaaaaaaaaaaga

SEQ ID NO: 6371 - DNA, 614 bp, Homo sapiens
attcatggagacctcttaagagtcaacagcaaaattccaagcacagatcatggtggattagaacaagaagttagtagtggaggtagtaaaaatggaagcccaaaggttattctcattccagcttctaattagtgtcagttcctctcagattctggcattagataattgtcttgattttgtgcgtttttcttaattttcggttttcatgattgttagataccattctgaattagatattgtcctgaatattcaactgtacctaattatgatcctgtacttaatatgcttaaaacatggcagatgcttggtaaattcttacaatgaatgtgtatcttaaagggtttgggtagaatgaagtagatttatcttcacaagcctattttcaggaccacatttctattgttattgcttttctctctatgattagcatatatacccatactttagctacttgtgttctttaggcttatttaggagatggatggtggatttgtatagtttaattttaaccttaatactcagtctttctttttaagggtttcacttcagaatatgtgtgtttgtgtatgcatgtgtatatacatatgtaataaaaatcagatatattcaaaagt

SEQ ID NO: 6372 - DNA, 633 bp, Homo sapiens
tccatattgattgcaacttgtgtctcattctgtcatctaaatcatgtggtttagagataggccttagtgtccacctggccaggcacaagtctggcgttaaggacctacctgctttaatgatccactctcagggagtcagaacagttaagtactaaaaagacaaggatctggagtgagagtccctagggctatgtcactggattcatgtttctttatgggcaagctacttaacatctctgcatccccatctctcaaaataaccataacactacctacctcacaagggtgctgtgaggcttaccatgaaaagcatgaggaaatggtatatagaattggggacctagtagaaaggggggggggggggggggggcgggggcgcgggggggtgggcggggggggggcgccgcgggggcccgtttgccagaatatgtctaatctctttacggctagaatctaaaatggtgttggccatcgattggcttaggttatctttaatgtcattgacttttacaaaattcgtaacgacacctctttctcagagagatgctggattggaaaaattattaaattaattttaacaaaggagaacaaaaatgattcacttccaggtgctgggtgtggcggaacagttat

SEQ ID NO: 6373 - DNA, 341 bp, Homo sapiens
ggcatgatcactggcccaacagctgtcaaaagttccttaagattcagggctcaaaatgtttgtgctggataggcctttagcaaacttctctgtcttattttaaaaatgaggaaactgtcaggtgcggtggctcacatctgtaatcccagcactttgggattacaggcatgaaccatcactcctggccctcatttaaaaattttctaaccttgattgaccatgggcaaatgaaactgcagaaagtgaaactgcggataggggggatgactgtattcaatagattccgacattatgtctgcaaaacacttgtatgataaagtattaaacttttgttgctgttg

SEQ ID NO: 6374 - DNA, 416 bp, Homo sapiens
ttttttccaaacattttgctcttactcaattttacagccgatctgtgagacccaaactccctcagatgttctgtctattccccatcctaaatgtcaggatgggagaacaggttaaaggggaaaatcttaaaaatatgcatatttaaaattttaaaaacatctttggaacatgtattttaaaataaatgtaagtcagcttgagtttaagggcctcagtaatatccctgataaaaacaagagctacattctgtaattgctatagtccatgataaataaaaaggaaatatacattttgtacttacagagaagccactgtataatgacaacctacttgtaaacacaatctgggtttactaacttgcatctgataacaatgccatacacagggcatcaagtcctagagggtcaaggctgcg

SEQ ID NO: 6375 - DNA, 584 bp, Homo sapiens
atccgagatcgcaccactgcactccagccagggcgacagagtgagactctggctcaaaaaaaaaaaaaaaaaaagttaatagaatgagatgggaaatgtttggcctgcctacatgaagataacctgtccatcttcactggtggattgagtatgtactcttttggatagttcctgcccgcaagaggagaaagttgctaagccagataaattctttcagattttattaatcagttatgtctaccacctcctggaaggtaaataaaataagagaggccaggaatgccaggtgcagtggcttattcctataatcccagcactttggaaggctaaggcaggaggattgcttgagcccaagagtttgagaccatcctggaccacatagtgagaccccccatttctaccaaaaaaaaaccaaaactaaataataacaatgaataataataataaaagaccagaaatatgtttagagagaagccctcttcatggaaaccagaaagctggagaaaaggcagttttctctaacaatttatacctatatgattgataaagtagttagaaactttaccattcattccaaaaaatct

SEQ ID NO: 6376 - DNA, 456 bp, Homo sapiens
aactttgtattttaggattgatgctgatggatctagtacttccttaatccactttccaccccagaataaggtttgtccctttccttctccctccctgtctctcccttctctcccaccctctctctctctcctctctccccaaataaatgtcctggcaaaaggaagagtccctgaattgttttgctctgtgtcacaacaacattttatttttcttaaagtttgctggtttacatgtccacacacctggttttgaggcaggtatttttcttgtgccacttatttctctcctccataaagtctccctccaaacaaagacttgttatctgaggtaggaacagagttctaagaaatttcagccctagaaggcccccagaatgcatgaacagctgccttcacaattaaagccaaggtcttgggagaagggctgtggacttgctagaaatgatgaatgggagt

SEQ ID NO: 6377 - DNA, 499 bp, Homo sapiens
ggctgccagcagacagcagtctaggcccaggggcttccatcttgtgccatgtactttctctggcaccttgacccaatcatttttagctctgagcctccgtttcctcatctggaatagaataatacctgatataacagccttgcagagcagctgtgagtttattgatatcagagcccatgaatgtggaaaggctttgaaaacggacaaaagcacaggaaaaaaaaaaaaaaaaaaaaggtaaggcggcatttgctccgcatctggtttccatattgtctcaggcattttgtgttcggagagctgcctgggagacagctgcttaagttccaggtttaggcctcagggtccccagtggtgaagagaagaatttctggataataagaataaccaggacatggtattctacccttcatagaggcctttttttttgcaggagggacctcatttcgtcctcacaggctactggtggaaccataggacaggtattgcaaacaccatt

SEQ ID NO: 6378 - DNA, 282 bp, Homo sapiens
ttagattcagtatgttgatagctacaaaatagcttgctagaattttgactggggttgtactgaagaatctacagatcaaatagagaagtactaaaattgtaacaatgttgaatatttcaatacataaacatggggcatgtcatcatttatttagatctgtaatttctttcctcagtgttttgtaatcttctgcaacagatattggacatactttgttagatccatgctaagtattctgttctattggtgccattatagcattggtttttaaatgtgaaattc

SEQ ID NO: 6379 - DNA, 440 bp, Homo sapiens
aatcagtaaacaaggcctatctgttctaccatggaaataatttctctggagtggctcacagtcttccaacaaaatctttctaaacatgtgtcataattatataaaaagtaaaaggatgtgttgctggatgttagatgaggatgcctatatgtttttaagaaggtcactaaatgtcaagtttaacctatgactagaaaagaatacgtatgtcagaatctagggaaagaaggcaaagaggatgctgtaacactgcaagcagggcattcttcttattccatgacaatcattgtctatccactgttggcaaaaacaggctacaggggcagccctttctacctttctgaagtatcccatagacatttcatttagggaggcacacttgggttagaagaacacagcaggaagaggggcttcaaaggcataaaattcagggctcctct

SEQ ID NO: 6380 - DNA, 626 bp, Homo sapiens
aggtccatgagacagagaactttgccaaggctttacaacacagaggcactccagtaagtttaaaagaaaaggctgaaagccaaacacattgctttaaccaaccaacaacaacaacaccaaaagggcaagcctatcttatttctataacctactggtgagacttccttgtggacgtcactatatcccaggcagattcaagtgttcttctccccaaaacacacacttggcaagtctatcactgcatgttggccaacccatgccagtaccagccacacaggaatctgcgctaaagacctactgtaccttacaactcaagggaatgtgagaactgtgtctaggaagaaacaaaacaaacccgtcagcaatttaaatcttaggacaaccttaggacatttgcagaaatctggacatgtactggataccagataatgtttcagaagtacagttttcttaggcctggttattcttaggagacacatgcttaaggatttaggggtagtgtcataacatctgccacttcaatggtaaagaaacacacacacatgcacacacatacagcaaaatgttaggcaggttgaagagatacataggtgccctaagtacagcaggctccatctcctaaatga

SEQ ID NO: 6381 - DNA, 564 bp, Homo sapiens
cagtgatgggcatccagagagctggttatcaaacggcgcagtcagctggcaaaagccgaaacgtgcagttggcacatctggacggagccgccacagccgagggtgaacaatgactcctggcaagcatccaaattgcttgcagacgctagcaggtctcatctacaaccgcccctaccagcatctctctctctctctcttttttatgagaatcagattttcattgctccattcaattgctctcctctgccattttttacagctcttatcgttcccctggaatatggccttgagacagctcatccgtgtccttcactgtgttatctcttctaacttttattaaaacttcagctttcatctgaagatagctaattaaatctggaacagattatatgcctccccttaaaaagagcacaaaactattttcttcaaccccagcaatgctttttttcctttccaaaaggtaaaatcaaaggtgtttaagaagtctctttatttacagagctaagatattcaacacgtcatatatgagttgatttatattaaagttgtctgtgatatgacaaa

SEQ ID NO: 6382 - DNA, 283 bp, Homo sapiens
ctttccaaagctgtgttcattaacgcaagccctgactgcttcttaatgcatgaaatctgtcaattcacttgttaattcatacattcacttcattcattcattcaccaaatatttactgagcacctgctatatgccaggcaccattccaggaatattgacacagcacagcagcaatcaaggctgactttgctttgtccccagggagtgaccatttcttggggaggatatagacaaacaagtaaatatctaagtaaataagtctatactgtaattcaacagatcc

SEQ ID NO: 6383 - DNA, 502 bp, Homo sapiens
gctttcttattttattgattaaaacatcctgagattcagaagtagggactttgtgccagggccctggaggcagtccctgccactgaagagatgaccctgctttccgggacttcccggaggcttctgtctgtagaccagggagaaggtgttcgccggtggctcctgagtggtagtaaaagacacatggacacaggaagctttagcgttagaagctgctctcaaatatctcaacagaaacacacagtgtggccgcgcgcggtgcctcacgcctgtcatcctagcactttgggaggccgaggcgggcgggtcacctgcggtggggagctccagacacagctatgtgaaacgaaagctatctgttgctgtctcagattccataaggactgagacttgtttcaaaagaaactgaaattctgtcttgttctcagtaatgaaagtcttttataccataattgtatatataacttctgacttacaggaaaattacaaaaattcccatatc

SEQ ID NO: 6384 - DNA, 406 bp, Homo sapiens
aaattaactgaacccaagaagggggtcatgggaaccccaatttatggctggtcatagacacaggtcacaacctggagcatgcatctgaagtggtgggggggatggcgccatcttgtgggactgagaccttatcctacagcatttaacactatctacaggtagacagctgttagattggaactaaatcatagggcaaccagctgttcttcactggagtctatggtgtcagaattgcttggtgtccagcaaaacaatctccatacatttagtgtaagaggtgctgtgtggccaagtgcatatgtggctcactcttgtaatcccagcactttgagaggtcgaagcagaaggatcacttgaggctaggagtttgagaccagcccaggcaagatagcaaaactccgcctct

SEQ ID NO: 6385 - DNA, 951 bp, Homo sapiens
tcagcacacccacacccaccataggtctctctcctccggtcttcccagaagggtaaaactcccagcctaccctgctccagcttcagcccaggtagttggtgtgtctcaatatgaatagggggtgagtagcttcatagaaagaatggggaactcccttggcctcaagccagtatagtttggaagttgggggtcggggatgttaagggtggggagtatcctgcctgtgacctctaggttatgaaaactatcttagaaggtgcttttagaaagaaccaggagaacaaccaaagcagcttacagacgcctgaacggagaatgaagtgtttcaagtaagcgagtctgcaagttctcagaagcagacagatatccaatctggactgcagccagggaagtcctctctctcgctctctctctctctctctctctctctcattgcttgtatgacttcacaagcaactcaggatcattctagcaggctttcccactgtcaaacagagacttcattctaaaaagagaagtgataaacagagctccagctctgctagctctatatatttactgattagtggaaagcactgaccaaggagacttttaagccagtggttcttcagaatcacctagatgcctccaccctccagagatccagagtccaggagtctgaagtggggccccaggtgatgtcattgctgctggtcccaggaccacattttaacaatcaatgttttcagatgtctcatgaggaacactacttaatgcagtgggaaagaaaatatttcagaggagaattttttcttaaagaagctgcatattctggactctaatttagtttaattcactccaggatggcacgcaggattcctaattcttaaatgccattcagtctggacttcaaatcacttgtcttcagaaaataaaagatttgttccacccgggtgtgtggacatggatgcg

SEQ ID NO: 6386 - DNA, 435 bp, Homo sapiens
tgtaatttctcctgccatacatgtagtcattgtaaaaataatagtgtaagggtaccttttataaaactgattattttccaaatagactggtaccttttggtttagaaaaaaaatgatggaagaagattgtagttcaggagagcaagcagaaagcagtcatttttcagcctttcattttattgtacctttggtcacatttttgaagaaaggcccaaaattgccatatgtatgaaagaatattggtaatggggtagagttggaatgaaagtgagattttcagagtaacaaggtcactttcttctgtggcttgtagaaacagatatgtgatcacaacaggtccagcagccagggttggggggagtagagagttcatgtaatttgtatcatgcttaaatttccatatttgaaaaagcaactagagaacaggattttgtc

SEQ ID NO: 6387 - DNA, 681 bp, Homo sapiens
actatatgcttctggattccttctgatccacactatgctaagttttgccaggtatcttaaggggtggctggaactacactgagcagattgcatcacattttctacaactgcagggaaaaggggtaagccccccacacttcccacaaatccagacagcatgtacacaacctggtgttctctcaggacaactcagtaggcacagccaggtccaactagccagcagtgctaccaccgtgccttgtgatttttttttttttttttttgaggcagggtctcactctgtctacccagggtggagtgcagtggcttctgggctcaagcgattctcctgcctgagctgcctgagtagttgagactaaaggcgtatgcaccacgtctggctaatttttgtatttttggtagagatggggtttcaccatgttggccaggctggtctcgaactcctgacctcaggtgatccgcccaccctggcctcccaaaatgctgggattacaggcgtgaccaccgcgcccagctgtgacctctttttataagttctttcttcatacagaaaactttggaaagagggagaacataaaattttctaagttttcacctatgttggttaaagaaaaagaaagtaggttattcagttagtaatgccaaagctagaaccatagaaagaaagatactttttttcct

SEQ ID NO: 6388 - DNA, 3111 bp, Homo sapiens
  misc_feature (49)..(49): n is a, c, g, or t
atgtactcccaattacttctggaagtttctcaaagtactcctttatatntactgcagagtgtatttttcttcctcctcaactgagatctttccaacttgccaccatgcagctgccaatggtcctagttaagtaaaatgctgccatacctattttagactcagggaaaaatagcacccactcatttttatttttgctcaatataaaaatgaggatacttatgaggatacttaaacttttaggattagctagttttctaaaaatcgaattattcactcctttgtaaagtatgtaataggaatttgctctaataatcaatagattaaggtttaaaatttgaaaccatagtaatgtatgtttaacaccaatattttaagcctttttaaaaaccacaacccacattaagaaatacatttcatactgtgatcaagtacacacgcacacacacactctatacatatatgtctgtccaattaaaagtttcacagaaatttccaaggaggtatgctaaatattatctctttgattctactttatttttaaaaagtggtatcaacccacaaaatggatttcataacccactacgcagtttgataagatgctgttttagaccatgcttttcaccagttttgtggtcctattttgtccttttcatgtctatacaggatgcttctagtgctagttgctagcttttctctgatttccaggatggtaataggttaagaatttctctaaatggttatttcttttctttctgcagctctcacgtgtgaatatgtgtctagtgcatccttaacctgaggacttcaccagttcgaaattacagttttcaccatcaactaccttatcctttttggcctggttttcttcctcaaacagtggaaacatttttaaagttgcttttgttgcagagttaaacaaatggctgatagtggcttagataaaaaatccacaaaatgccccgactgttcatctgcttctcagaaagatgtactttgtgtatgttccagcaaaacaagggttcctccagttttggtggtggaaatgtcacagacatcaagcattggtagtgcagaatctttaatttcactggagagaaaaaaagaaaaaaatatcaacagagatataacctccaggaaagatttgccctcaagaacctcaaatgtagagagaaaagcatctcagcaacaatggggtcggggcaactttacagaaggaaaagttcctcacataaggattgagaatggagctgctattgaggaaatctatacctttggaagaatattgggaaaagggagctttggaatagtcattgaagctacagacaaggaaacagaaacgaagtgggcaattaaaaaagtgaacaaagaaaaggctggaagctctgctgtgaagttacttgaacgagaggtgaacattctgaaaagtgtaaaacatgaacacatcatacatctggaacaagtatttgaaacgccaaagaaaatgtaccttgtgatggagctttgtgaggatggagaactcaaagaaattctggataggaaagggcatttctcagagaatgagacaaggtggatcattcaaagtctcgcatcagctatagcatatcttcacaataatgatattgtacatagagatctgaaactggaaaatataatggttaaaagcagtcttattgatgataacaatgaaataaacttaaacataaaggtgactgattttggcttagcggtgaagaagcaaagtaggagtgaagccatgctgcaggccacatgtgggactcctatctatatggcccctgaagttatcagtgcccacgactatagccagcagtgtgacatttggagcataggcgtcgtaatgtacatgttattacgtggagaaccaccctttttggcaagctcagaagagaagctttttgagttaataagaaaaggagaactacattttgaaaatgcagtctggaattccataagtgactgtgctaaaagtgttttgaaacaacttatgaaagtagatcctgctcacagaatcacagctaaggaactactagataaccagtggttaacaggcaataaactttcttcggtgagaccaaccaatgtattagagatgatgaaggaatggaaaaataacccagaaagtgttgaggaaaacacaacagaagagaagaataagccgtccactgaagaaaagttgaaaagttaccaaccctggggaaatgtccctgatgccaattacacttcagatgaagaggaggaaaaacagtctactgcttatgaaaagcaatttcctgcaaccagtaaggacaactttgatatgtgcagttcaagtttcacatctagcaaactccttccagctgaaatcaagggagaaatggagaaaacccctgtgactccaagccaaggaacagcaaccaagtaccctgctaaatccggcgccctgtccagaaccaaaaagaaactctaaggttccctccagtgttggacagtacaaaaacaaagctgctcttgttagcactttgatgagggggtaggaggggaagaagacagccctatgctgagcttgtagccttttagctccacagagccccgccatgtgtttgcaccagcttaaaattgaagctgcttatctccaaagcagcataagctgcacatggcattaaaggacagccaccagtaggcttggcagtgggctgcagtggaaatcaactcaagatgtacacgaaggttttttaggggggcagataccttcaatttaaggctgtgggcacacttgctcatttttacttcaaattcttatgtttaggcacagctatttataggggaaaacaagaggccaaatatagtaatggaggtgccaaataattatgtgcactttgcactagaagactttgttagaaaattactaataaacttgccatacgtattacagcagaagtgcttcagtcattcacatgtgttcgtgagattttaggttgctatagattgtttaagacagcttattttaaatgtagaaaaataggagattttgtaactgcttgccattaacttgctgctaaattcccaatgtattgattaaatcaataaaaaacagatgttactcaaaaaaaaaaa

SEQ ID NO: 6389 - DNA, 902 bp, Homo sapiens
aattgatgtgcattgctttgtgtctgaaaattaatcaagaccttttatttgcagtctactgcttatgaaaagcaatttcctgcaaccagtaaggacaactttgatatgtgcagttcaagtttcacatctagcaaactccttccagctgaaatcaagggagaaatggagaaaacccctgtgactccaagccaaggaacagcaaccaagtaccctgctaaatccggcgccctgtccagaaccaaaaagaaactctaaggttccctccagtgttggacagtacaaaaacaaagctgctcttgttagcactttgatgagggggtaggaggggaagaagacagccctatgctgagcttgtagccttttagctccacagagccccgccatgtgtttgcaccagcttaaaattgaagctgcttatctccaaagcagcataagctgcacatggcattaaaggacagccaccagtaggcttggcagtgggctgcagtggaaatcaactcaagatgtacacgaaggttttttaggggggcagataccttcaatttaaggctgtgggcacacttgctcatttttacttcaaattcttatgtttaggcacagctatttataggggaaaacaagaggccaaatatagtaatggaggtgccaaataattatgtgcactttgcactagaagactttgttagaaaattactaataaacttgccatacgtattacagcagaagtgcttcagtcattcacatgtgttcgtgagattttaggttgctatagattgtttaagacagcttattttaaatgtagaaaaataggagattttgtaactgcttgccattaacttgctgctaaattcccaatgtattgattaaatcaataaaaaacagatgttactcaaaaaaaaaaa

SEQ ID NO: 6390 - DNA, 813 bp, Homo sapiens
aagcagttgtatcaacgcagagtgcccattacggccgggtagcaaactccttccagctgaaatcaagggagaaatggagaaaacccctgtgactccaagccaaggaacagcaaccaagtaccctgctaaatccggcgccctgtccagaaccaaaaagaaactctaaggttccctccagtgttggacagtacaaaaacaaagctgctcttgttagcactttgatgagggggtaggaggggaagaagacagccctatgctgagcttgtagccttttagctccacagagccccgccatgtgtttgcaccagcttaaaattgaagctgcttatctccaaagcagcataagctgcacatggcattaaaggacagccaccagtaggcttggcagtgggctgcagtggaaatcaactcaagatgtacacgaaggttttttaggggggcagataccttcaatttaaggctgtgggcacacttgctcatttttacttcaaattcttatgtttaggcacagctatttataggggaaaacaagaggccaaatatagtaatggaggtgccaaataattatgtgcactttgcactagaagactttgttagaaaattactaataaacttgccatacgtattacagcagaagtgcttcagtcattcacatgtgttcgtgagattttaggttgctatagattgtttaagacagcttattttaaatgtagaaaaataggagattttgtaactgcttgccattaacttgctgctaaattcccaatgtattgattaaatcaataaaaaacagatgttactcaaaaaaaaaaa

SEQ ID NO: 6391 - DNA, 829 bp, Homo sapiens
  misc_feature (566)..(566): n is a, c, g, or t
cttcttcaatagccgtcactctcacgtactacaagagacctccaggggcaataaactttcttcggtgagaccaaccaatgtattagagatgatgaaggaatggaaaaataacccagaaagtgttgaggaaaacacaacagaagagaagaataagccgtccactgaagaaaagttgaaaagttaccaaccctggggaaatgtccctgatgccaattacacttcagatgaagaggaggaaaaacaggctactgcttatgataagaatacaccctgtttttatttacgactttttttttttccccttttgaagtttttcatttaggcatcttctttgttttcactttatcggacaatcgctcagaatgtccgatgccagcccccagcgtacaccccatatcccgctctcttccccctccgcgccccttccaatttcactactagtcctttgtccccactcttgtgcctcacattcgttcctgttccttctcgtcactgcccccctcccgcccccctgtctttcagattttccacccatccccgccacttgttctatcttccttttagcnctctttccttattttttagcgtcgcctgtacccccccactggaccttttctcaccccccccctccttgaccccccaattctccctcgtctcccgcccaccccaatccatttctcctcctctccattcatgtcactattctcactcctactcagcccccatacatgcgtgtagtgtgatctgtttatcgcgactccctattctccccgcttccgcgtatgctcgtactcactcgttttatgctctgaatacgtttcactgtcac

SEQ ID NO: 6392 - DNA, 2517 bp, Homo sapiens
agcgtggtggcctctgggtatctcgctgccggccggctggtaaccccccagcggagggaccgggccgagcccgcggacccctccgagtgtctcctggggcccagccgttggtaccccatttcccccgggtccggtatttggggtggtctctgtctgccccggttcatctccaccgtctcaccttcaccccatcttgggacgtgaaactttttgaaagtttagaagcgaacttactgtgggctctcacgtgtgaatatgtgtctagtgcatccttaacctgaggacttcaccagttcgaaattacagttttcaccatcaactaccttatcctttttggcctggttttcttcctcaaacagtggaaacatttttaaagttgcttttgttgcagagttaaacaaatggctgatagtggcttagataaaaaatccacaaaatgccccgactgttcatctgcttctcagaaagatgtactttgtgtatgttccagcaaaacaagggttcctccagttttggtggtggaaatgtcacagacatcaagcattggtagtgcagaatctttaatttcactggagagaaaaaaagaaaaaaatatcaacagagatataacctccaggaaagatttgccctcaagaacctcaaatgtagagagaaaagcatctcagcaacaatggggtcggggcaactttacagaaggaaaagttcctcacataaggattgagaatggagctgctattgaggaaatctatacctttggaagaatattgggaaaagggagctttggaatagtcattgaagctacagacaaggaaacagaaacgaagtgggcaattaaaaaagtgaacaaagaaaaggctggaagctctgctgtgaagttacttgaacgagaggtgaacattctgaaaagtgtaaaacatgaacacatcatacatctggaacaagtatttgaaacgccaaagaaaatgtaccttgtgatggagctttgtgaggatggagaactcaaagaaattctggataggaaagggcatttctcagagaatgagacaaggtggatcattcaaagtctcgcatcagctatagcatatcttcacaataatgatattgtacatagagatctgaaactggaaaatataatggttaaaagcagtcttattgatgataacaatgaaataaacttaaacataaaggtgactgattttggcttagcggtgaagaagcaaagtaggagtgaagccatgctgcaggccacatgtgggactcctatctatatggattacgtggagaaccaccctttttggcaagctcagaagagaagctttttgagttaataagaaaaggagaactacattttgaaaatgcagtctggaattccataagtgactgtgctaaaagtgttttgaaacaacttatgaaagtagatcctgctcacagaatcacagctaaggaactactagataaccagtggttaacaggcaataaactttcttcggtgagaccaaccaatgtattagagatgatgaaggaatggaaaaataacccagaaagtgttgaggaaaacacaacagaagagaagaataagccgtccactgaagaaaagttgaaaagttaccaaccctggggaaatgtccctgatgccaattacacttcagatgaagaggaggaaaaacagtctactgcttatgaaaagcaatttcctgcaaccagtaaggacaactttgatatgtgcagttcaagtttcacatctagcaaactccttccagctgaaatcaagggagaaatggagaaaacccctgtgactccaagccaaggaacagcaaccaagtaccctgctaaatccggcgccctgtccagaaccaaaaagaaactctaaggttccctccagtgttggacagtacaaaaacaaagctgctcttgttagcactttgatgagggggtaggaggggaagaagacagccctatgctgagcttgtagccttttagctccacagagccccgccatgtgtttgcaccagcttaaaattgaagctgcttatctccaaagcagcataagctgcacatggcattaaaggacagccaccagtaggcttggcagtgggctgcagtggaaatcaactcaagatgtacacgaaggttttttaggggggcagataccttcaatttaaggctgtgggcacacttgctcatttttacttcaaattcttatgtttaggcacagctatttataggggaaaacaagaggccaaatatagtaatggaggtgccaaataattatgtgcactttgcactagaagactttgttagaaaattactaataaacttgccatacgtattacagcagaagtgcttcagtcattcacatgtgttcgtgagattttaggttgctatagattgtttaagacagcttattttaaatgtagaaaaataggagattttgtaactgcttgccattaacttgctgctaaattcccaatgtattgattaaatcaataaaaaacagatgttactcaaaaaaaaaaa

SEQ ID NO: 6393 - DNA, 2267 bp, Homo sapiens
agcgtggtggcctctgggtatctcgctgccggccggctggtaaccccccagcggagggaccgggccgagcccgcggacccctccgagtgtctcctggggcccagccgttggtaccccatttcccccgggtccggtatttggggtggtctctgtctgccccggttcatctccaccgtctcaccttcaccccatcttgggacgtgaaactttttgaaagtttagaagcgaacttactgtgggcaaaacaagggttcctccagttttggtggtggaaatgtcacagacatcaagcattggtagtgcagaatctttaatttcactggagagaaaaaaagaaaaaaatatcaacagagatataacctccaggaaagatttgccctcaagaacctcaaatgtagagagaaaagcatctcagcaacaatggggtcggggcaactttacagaaggaaaagttcctcacataaggattgagaatggagctgctattgaggaaatctatacctttggaagaatattgggaaaagggagctttggaatagtcattgaagctacagacaaggaaacagaaacgaagtgggcaattaaaaaagtgaacaaagaaaaggctggaagctctgctgtgaagttacttgaacgagaggtgaacattctgaaaagtgtaaaacatgaacacatcatacatctggaacaagtatttgaaacgccaaagaaaatgtaccttgtgatggagctttgtgaggatggagaactcaaagaaattctggataggaaagggcatttctcagagaatgagacaaggtggatcattcaaagtctcgcatcagctatagcatatcttcacaataatgatattgtacatagagatctgaaactggaaaatataatggttaaaagcagtcttattgatgataacaatgaaataaacttaaacataaaggtgactgattttggcttagcggtgaagaagcaaagtaggagtgaagccatgctgcaggccacatgtgggactcctatctatatggattacgtggagaaccaccctttttggcaagctcagaagagaagctttttgagttaataagaaaaggagaactacattttgaaaatgcagtctggaattccataagtgactgtgctaaaagtgttttgaaacaacttatgaaagtagatcctgctcacagaatcacagctaaggaactactagataaccagtggttaacaggcaataaactttcttcggtgagaccaaccaatgtattagagatgatgaaggaatggaaaaataacccagaaagtgttgaggaaaacacaacagaagagaagaataagccgtccactgaagaaaagttgaaaagttaccaaccctggggaaatgtccctgatgccaattacacttcagatgaagaggaggaaaaacagtctactgcttatgaaaagcaatttcctgcaaccagtaaggacaactttgatatgtgcagttcaagtttcacatctagcaaactccttccagctgaaatcaagggagaaatggagaaaacccctgtgactccaagccaaggaacagcaaccaagtaccctgctaaatccggcgccctgtccagaaccaaaaagaaactctaaggttccctccagtgttggacagtacaaaaacaaagctgctcttgttagcactttgatgagggggtaggaggggaagaagacagccctatgctgagcttgtagccttttagctccacagagccccgccatgtgtttgcaccagcttaaaattgaagctgcttatctccaaagcagcataagctgcacatggcattaaaggacagccaccagtaggcttggcagtgggctgcagtggaaatcaactcaagatgtacacgaaggttttttaggggggcagataccttcaatttaaggctgtgggcacacttgctcatttttacttcaaattcttatgtttaggcacagctatttataggggaaaacaagaggccaaatatagtaatggaggtgccaaataattatgtgcactttgcactagaagactttgttagaaaattactaataaacttgccatacgtattacagcagaagtgcttcagtcattcacatgtgttcgtgagattttaggttgctatagattgtttaagacagcttattttaaatgtagaaaaataggagattttgtaactgcttgccattaacttgctgctaaattcccaatgtattgattaaatcaataaaaaacagatgttactcaaaaaaaaaaa

SEQ ID NO: 6394 - DNA, 2420 bp, Homo sapiens
tgtggcagtgtaggtgtagagaggcggaatggagacaaaattttagcctgacattaaatcatttggaaagtgatacaggagaggactctgctatgaaacttcctgagtgaaatgataagtggcatgaagaaaaacaaagcaagctctcacgtgtgaatatgtgtctagtgcatccttaacctgaggacttcaccagttcgaaattacagttttcaccatcaactaccttatcctttttggcctggttttcttcctcaaacagtggaaacatttttaaagttgcttttgttgcagagttaaacaaatggctgatagtggcttagataaaaaatccacaaaatgccccgactgttcatctgcttctcagaaagatgtactttgtgtatgttccagcaaaacaagggttcctccagttttggtggtggaaatgtcacagacatcaagcattggtagtgcagaatctttaatttcactggagagaaaaaaagaaaaaaatatcaacagagatataacctccaggaaagatttgccctcaagaacctcaaatgtagagagaaaagcatctcagcaacaatggggtcggggcaactttacagaaggaaaagttcctcacataaggattgagaatggagctgctattgaggaaatctatacctttggaagaatattgggaaaagggagctttggaatagtcattgaagctacagacaaggaaacagaaacgaagtgggcaattaaaaaagtgaacaaagaaaaggctggaagctctgctgtgaagttacttgaacgagaggtgaacattctgaaaagtgtaaaacatgaacacatcatacatctggaacaagtatttgaaacgccaaagaaaatgtaccttgtgatggagctttgtgaggatggagaactcaaagaaattctggataggaaagggcatttctcagagaatgagacaaggtggatcattcaaagtctcgcatcagctatagcatatcttcacaataatgatattgtacatagagatctgaaactggaaaatataatggttaaaagcagtcttattgatgataacaatgaaataaacttaaacataaaggtgactgattttggcttagcggtgaagaagcaaagtaggagtgaagccatgctgcaggccacatgtgggactcctatctatatggattacgtggagaaccaccctttttggcaagctcagaagagaagctttttgagttaataagaaaaggagaactacattttgaaaatgcagtctggaattccataagtgactgtgctaaaagtgttttgaaacaacttatgaaagtagatcctgctcacagaatcacagctaaggaactactagataaccagtggttaacaggcaataaactttcttcggtgagaccaaccaatgtattagagatgatgaaggaatggaaaaataacccagaaagtgttgaggaaaacacaacagaagagaagaataagccgtccactgaagaaaagttgaaaagttaccaaccctggggaaatgtccctgatgccaattacacttcagatgaagaggaggaaaaacagtctactgcttatgaaaagcaatttcctgcaaccagtaaggacaactttgatatgtgcagttcaagtttcacatctagcaaactccttccagctgaaatcaagggagaaatggagaaaacccctgtgactccaagccaaggaacagcaaccaagtaccctgctaaatccggcgccctgtccagaaccaaaaagaaactctaaggttccctccagtgttggacagtacaaaaacaaagctgctcttgttagcactttgatgagggggtaggaggggaagaagacagccctatgctgagcttgtagccttttagctccacagagccccgccatgtgtttgcaccagcttaaaattgaagctgcttatctccaaagcagcataagctgcacatggcattaaaggacagccaccagtaggcttggcagtgggctgcagtggaaatcaactcaagatgtacacgaaggttttttaggggggcagataccttcaatttaaggctgtgggcacacttgctcatttttacttcaaattcttatgtttaggcacagctatttataggggaaaacaagaggccaaatatagtaatggaggtgccaaataattatgtgcactttgcactagaagactttgttagaaaattactaataaacttgccatacgtattacagcagaagtgcttcagtcattcacatgtgttcgtgagattttaggttgctatagattgtttaagacagcttattttaaatgtagaaaaataggagattttgtaactgcttgccattaacttgctgctaaattcccaatgtattgattaaatcaataaaaaacagatgttactcaaaaaaaaaaa

SEQ ID NO: 6395 - DNA, 2401 bp, Homo sapiens
taagttgttccccaacaacaaccactgagcctacattaatctttttgaaagtgatacaggagaggactctgctatgaaacttcctgagtgaaatgataagtggcatgaagaaaaacaaagcaagctctcacgtgtgaatatgtgtctagtgcatccttaacctgaggacttcaccagttcgaaattacagttttcaccatcaactaccttatcctttttggcctggttttcttcctcaaacagtggaaacatttttaaagttgcttttgttgcagagttaaacaaatggctgatagtggcttagataaaaaatccacaaaatgccccgactgttcatctgcttctcagaaagatgtactttgtgtatgttccagcaaaacaagggttcctccagttttggtggtggaaatgtcacagacatcaagcattggtagtgcagaatctttaatttcactggagagaaaaaaagaaaaaaatatcaacagagatataacctccaggaaagatttgccctcaagaacctcaaatgtagagagaaaagcatctcagcaacaatggggtcggggcaactttacagaaggaaaagttcctcacataaggattgagaatggagctgctattgaggaaatctatacctttggaagaatattgggaaaagggagctttggaatagtcattgaagctacagacaaggaaacagaaacgaagtgggcaattaaaaaagtgaacaaagaaaaggctggaagctctgctgtgaagttacttgaacgagaggtgaacattctgaaaagtgtaaaacatgaacacatcatacatctggaacaagtatttgaaacgccaaagaaaatgtaccttgtgatggagctttgtgaggatggagaactcaaagaaattctggataggaaagggcatttctcagagaatgagacaaggtggatcattcaaagtctcgcatcagctatagcatatcttcacaataatgatattgtacatagagatctgaaactggaaaatataatggttaaaagcagtcttattgatgataacaatgaaataaacttaaacataaaggtgactgattttggcttagcggtgaagaagcaaagtaggagtgaagccatgctgcaggccacatgtgggactcctatctatatggattacgtggagaaccaccctttttggcaagctcagaagagaagctttttgagttaataagaaaaggagaactacattttgaaaatgcagtctggaattccataagtgactgtgctaaaagtgttttgaaacaacttatgaaagtagatcctgctcacagaatcacagctaaggaactactagataaccagtggttaacaggcaataaactttcttcggtgagaccaaccaatgtattagagatgatgaaggaatggaaaaataacccagaaagtgttgaggaaaacacaacagaagagaagaataagccgtccactgaagaaaagttgaaaagttaccaaccctggggaaatgtccctgatgccaattacacttcagatgaagaggaggaaaaacagtctactgcttatgaaaagcaatttcctgcaaccagtaaggacaactttgatatgtgcagttcaagtttcacatctagcaaactccttccagctgaaatcaagggagaaatggagaaaacccctgtgactccaagccaaggaacagcaaccaagtaccctgctaaatccggcgccctgtccagaaccaaaaagaaactctaaggttccctccagtgttggacagtacaaaaacaaagctgctcttgttagcactttgatgagggggtaggaggggaagaagacagccctatgctgagcttgtagccttttagctccacagagccccgccatgtgtttgcaccagcttaaaattgaagctgcttatctccaaagcagcataagctgcacatggcattaaaggacagccaccagtaggcttggcagtgggctgcagtggaaatcaactcaagatgtacacgaaggttttttaggggggcagataccttcaatttaaggctgtgggcacacttgctcatttttacttcaaattcttatgtttaggcacagctatttataggggaaaacaagaggccaaatatagtaatggaggtgccaaataattatgtgcactttgcactagaagactttgttagaaaattactaataaacttgccatacgtattacagcagaagtgcttcagtcattcacatgtgttcgtgagattttaggttgctatagattgtttaagacagcttattttaaatgtagaaaaataggagattttgtaactgcttgccattaacttgctgctaaattcccaatgtattgattaaatcaataaaaaacagatgttactcaaaaaaaaaaa

SEQ ID NO: 6396 - DNA, 2666 bp, Homo sapiens
agcgtggtggcctctgggtatctcgctgccggccggctggtaaccccccagcggagggaccgggccgagcccgcggacccctccgagtgtctcctggggcccagccgttggtaccccatttcccccgggtccggtatttggggtggtctctgtctgccccggttcatctccaccgtctcaccttcaccccatcttgggacgtgaaactttttgaaagtttagaagcgaacttactgtggggaccttcctctggggttagttctctggtgccaccttcagtgatctgtgtggcagctctgctgctcacttctggctttactgggttttggtatttaactgttgcttacgcacactggaaattttcacctgcagtttttcttctgcctaagctctcacgtgtgaatatgtgtctagtgcatccttaacctgaggacttcaccagttcgaaattacagttttcaccatcaactaccttatcctttttggcctggttttcttcctcaaacagtggaaacatttttaaagttgcttttgttgcagagttaaacaaatggctgatagtggcttagataaaaaatccacaaaatgccccgactgttcatctgcttctcagaaagatgtactttgtgtatgttccagcaaaacaagggttcctccagttttggtggtggaaatgtcacagacatcaagcattggtagtgcagaatctttaatttcactggagagaaaaaaagaaaaaaatatcaacagagatataacctccaggaaagatttgccctcaagaacctcaaatgtagagagaaaagcatctcagcaacaatggggtcggggcaactttacagaaggaaaagttcctcacataaggattgagaatggagctgctattgaggaaatctatacctttggaagaatattgggaaaagggagctttggaatagtcattgaagctacagacaaggaaacagaaacgaagtgggcaattaaaaaagtgaacaaagaaaaggctggaagctctgctgtgaagttacttgaacgagaggtgaacattctgaaaagtgtaaaacatgaacacatcatacatctggaacaagtatttgaaacgccaaagaaaatgtaccttgtgatggagctttgtgaggatggagaactcaaagaaattctggataggaaagggcatttctcagagaatgagacaaggtggatcattcaaagtctcgcatcagctatagcatatcttcacaataatgatattgtacatagagatctgaaactggaaaatataatggttaaaagcagtcttattgatgataacaatgaaataaacttaaacataaaggtgactgattttggcttagcggtgaagaagcaaagtaggagtgaagccatgctgcaggccacatgtgggactcctatctatatggattacgtggagaaccaccctttttggcaagctcagaagagaagctttttgagttaataagaaaaggagaactacattttgaaaatgcagtctggaattccataagtgactgtgctaaaagtgttttgaaacaacttatgaaagtagatcctgctcacagaatcacagctaaggaactactagataaccagtggttaacaggcaataaactttcttcggtgagaccaaccaatgtattagagatgatgaaggaatggaaaaataacccagaaagtgttgaggaaaacacaacagaagagaagaataagccgtccactgaagaaaagttgaaaagttaccaaccctggggaaatgtccctgatgccaattacacttcagatgaagaggaggaaaaacagtctactgcttatgaaaagcaatttcctgcaaccagtaaggacaactttgatatgtgcagttcaagtttcacatctagcaaactccttccagctgaaatcaagggagaaatggagaaaacccctgtgactccaagccaaggaacagcaaccaagtaccctgctaaatccggcgccctgtccagaaccaaaaagaaactctaaggttccctccagtgttggacagtacaaaaacaaagctgctcttgttagcactttgatgagggggtaggaggggaagaagacagccctatgctgagcttgtagccttttagctccacagagccccgccatgtgtttgcaccagcttaaaattgaagctgcttatctccaaagcagcataagctgcacatggcattaaaggacagccaccagtaggcttggcagtgggctgcagtggaaatcaactcaagatgtacacgaaggttttttaggggggcagataccttcaatttaaggctgtgggcacacttgctcatttttacttcaaattcttatgtttaggcacagctatttataggggaaaacaagaggccaaatatagtaatggaggtgccaaataattatgtgcactttgcactagaagactttgttagaaaattactaataaacttgccatacgtattacagcagaagtgcttcagtcattcacatgtgttcgtgagattttaggttgctatagattgtttaagacagcttattttaaatgtagaaaaataggagattttgtaactgcttgccattaacttgctgctaaattcccaatgtattgattaaatcaataaaaaacagatgttactcaaaaaaaaaaa

SEQ ID NO: 6397 - DNA, 2400 bp, Homo sapiens
aaacttaggctaggtacgaggctgggtggtgggcgtatgagatgcaggcctggagtggggaggggcgtagtgagatgcaggaggagatgagccagaagttaaatcatttggaaagtgatacagctctcacgtgtgaatatgtgtctagtgcatccttaacctgaggacttcaccagttcgaaattacagttttcaccatcaactaccttatcctttttggcctggttttcttcctcaaacagtggaaacatttttaaagttgcttttgttgcagagttaaacaaatggctgatagtggcttagataaaaaatccacaaaatgccccgactgttcatctgcttctcagaaagatgtactttgtgtatgttccagcaaaacaagggttcctccagttttggtggtggaaatgtcacagacatcaagcattggtagtgcagaatctttaatttcactggagagaaaaaaagaaaaaaatatcaacagagatataacctccaggaaagatttgccctcaagaacctcaaatgtagagagaaaagcatctcagcaacaatggggtcggggcaactttacagaaggaaaagttcctcacataaggattgagaatggagctgctattgaggaaatctatacctttggaagaatattgggaaaagggagctttggaatagtcattgaagctacagacaaggaaacagaaacgaagtgggcaattaaaaaagtgaacaaagaaaaggctggaagctctgctgtgaagttacttgaacgagaggtgaacattctgaaaagtgtaaaacatgaacacatcatacatctggaacaagtatttgaaacgccaaagaaaatgtaccttgtgatggagctttgtgaggatggagaactcaaagaaattctggataggaaagggcatttctcagagaatgagacaaggtggatcattcaaagtctcgcatcagctatagcatatcttcacaataatgatattgtacatagagatctgaaactggaaaatataatggttaaaagcagtcttattgatgataacaatgaaataaacttaaacataaaggtgactgattttggcttagcggtgaagaagcaaagtaggagtgaagccatgctgcaggccacatgtgggactcctatctatatggattacgtggagaaccaccctttttggcaagctcagaagagaagctttttgagttaataagaaaaggagaactacattttgaaaatgcagtctggaattccataagtgactgtgctaaaagtgttttgaaacaacttatgaaagtagatcctgctcacagaatcacagctaaggaactactagataaccagtggttaacaggcaataaactttcttcggtgagaccaaccaatgtattagagatgatgaaggaatggaaaaataacccagaaagtgttgaggaaaacacaacagaagagaagaataagccgtccactgaagaaaagttgaaaagttaccaaccctggggaaatgtccctgatgccaattacacttcagatgaagaggaggaaaaacagtctactgcttatgaaaagcaatttcctgcaaccagtaaggacaactttgatatgtgcagttcaagtttcacatctagcaaactccttccagctgaaatcaagggagaaatggagaaaacccctgtgactccaagccaaggaacagcaaccaagtaccctgctaaatccggcgccctgtccagaaccaaaaagaaactctaaggttccctccagtgttggacagtacaaaaacaaagctgctcttgttagcactttgatgagggggtaggaggggaagaagacagccctatgctgagcttgtagccttttagctccacagagccccgccatgtgtttgcaccagcttaaaattgaagctgcttatctccaaagcagcataagctgcacatggcattaaaggacagccaccagtaggcttggcagtgggctgcagtggaaatcaactcaagatgtacacgaaggttttttaggggggcagataccttcaatttaaggctgtgggcacacttgctcatttttacttcaaattcttatgtttaggcacagctatttataggggaaaacaagaggccaaatatagtaatggaggtgccaaataattatgtgcactttgcactagaagactttgttagaaaattactaataaacttgccatacgtattacagcagaagtgcttcagtcattcacatgtgttcgtgagattttaggttgctatagattgtttaagacagcttattttaaatgtagaaaaataggagattttgtaactgcttgccattaacttgctgctaaattcccaatgtattgattaaatcaataaaaaacagatgttactcaaaaaaaaaaa

SEQ ID NO: 6398 - DNA, 2356 bp, Homo sapiens
  misc_feature (77)..(77): n is a, c, g, or t
gggtgcagaattccgggctcagcgacagcctgcgccgagtgtgcgcacctgtcggagacccgccagtccgccggccncgctctcacgtgtgaatatgtgtctagtgcatccttaacctgaggacttcaccagttcgaaattacagttttcaccatcaactaccttatcctttttggcctggttttcttcctcaaacagtggaaacatttttaaagttgcttttgttgcagagttaaacaaatggctgatagtggcttagataaaaaatccacaaaatgccccgactgttcatctgcttctcagaaagatgtactttgtgtatgttccagcaaaacaagggttcctccagttttggtggtggaaatgtcacagacatcaagcattggtagtgcagaatctttaatttcactggagagaaaaaaagaaaaaaatatcaacagagatataacctccaggaaagatttgccctcaagaacctcaaatgtagagagaaaagcatctcagcaacaatggggtcggggcaactttacagaaggaaaagttcctcacataaggattgagaatggagctgctattgaggaaatctatacctttggaagaatattgggaaaagggagctttggaatagtcattgaagctacagacaaggaaacagaaacgaagtgggcaattaaaaaagtgaacaaagaaaaggctggaagctctgctgtgaagttacttgaacgagaggtgaacattctgaaaagtgtaaaacatgaacacatcatacatctggaacaagtatttgaaacgccaaagaaaatgtaccttgtgatggagctttgtgaggatggagaactcaaagaaattctggataggaaagggcatttctcagagaatgagacaaggtggatcattcaaagtctcgcatcagctatagcatatcttcacaataatgatattgtacatagagatctgaaactggaaaatataatggttaaaagcagtcttattgatgataacaatgaaataaacttaaacataaaggtgactgattttggcttagcggtgaagaagcaaagtaggagtgaagccatgctgcaggccacatgtgggactcctatctatatggattacgtggagaaccaccctttttggcaagctcagaagagaagctttttgagttaataagaaaaggagaactacattttgaaaatgcagtctggaattccataagtgactgtgctaaaagtgttttgaaacaacttatgaaagtagatcctgctcacagaatcacagctaaggaactactagataaccagtggttaacaggcaataaactttcttcggtgagaccaaccaatgtattagagatgatgaaggaatggaaaaataacccagaaagtgttgaggaaaacacaacagaagagaagaataagccgtccactgaagaaaagttgaaaagttaccaaccctggggaaatgtccctgatgccaattacacttcagatgaagaggaggaaaaacagtctactgcttatgaaaagcaatttcctgcaaccagtaaggacaactttgatatgtgcagttcaagtttcacatctagcaaactccttccagctgaaatcaagggagaaatggagaaaacccctgtgactccaagccaaggaacagcaaccaagtaccctgctaaatccggcgccctgtccagaaccaaaaagaaactctaaggttccctccagtgttggacagtacaaaaacaaagctgctcttgttagcactttgatgagggggtaggaggggaagaagacagccctatgctgagcttgtagccttttagctccacagagccccgccatgtgtttgcaccagcttaaaattgaagctgcttatctccaaagcagcataagctgcacatggcattaaaggacagccaccagtaggcttggcagtgggctgcagtggaaatcaactcaagatgtacacgaaggttttttaggggggcagataccttcaatttaaggctgtgggcacacttgctcatttttacttcaaattcttatgtttaggcacagctatttataggggaaaacaagaggccaaatatagtaatggaggtgccaaataattatgtgcactttgcactagaagactttgttagaaaattactaataaacttgccatacgtattacagcagaagtgcttcagtcattcacatgtgttcgtgagattttaggttgctatagattgtttaagacagcttattttaaatgtagaaaaataggagattttgtaactgcttgccattaacttgctgctaaattcccaatgtattgattaaatcaataaaaaacagatgttactcaaaaaaaaaaa

SEQ ID NO: 6399 - DNA, 2183 bp, Homo sapiens
  misc_feature (77)..(77): n is a, c, g, or t
gggtgcagaattccgggctcagcgacagcctgcgccgagtgtgcgcacctgtcggagacccgccagtccgccggccncgggccactacttctcagcacatccggccttctggctcatctcctccctgcatctcactacgcccctccccactccaggcaaaacaagggttcctccagttttggtggtggaaatgtcacagacatcaagcattggtagtgcagaatctttaatttcactggagagaaaaaaagaaaaaaatatcaacagagatataacctccaggaaagatttgccctcaagaacctcaaatgtagagagaaaagcatctcagcaacaatggggtcggggcaactttacagaaggaaaagttcctcacataaggattgagaatggagctgctattgaggaaatctatacctttggaagaatattgggaaaagggagctttggaatagtcattgaagctacagacaaggaaacagaaacgaagtgggcaattaaaaaagtgaacaaagaaaaggctggaagctctgctgtgaagttacttgaacgagaggtgaacattctgaaaagtgtaaaacatgaacacatcatacatctggaacaagtatttgaaacgccaaagaaaatgtaccttgtgatggagctttgtgaggatggagaactcaaagaaattctggataggaaagggcatttctcagagaatgagacaaggtggatcattcaaagtctcgcatcagctatagcatatcttcacaataatgatattgtacatagagatctgaaactggaaaatataatggttaaaagcagtcttattgatgataacaatgaaataaacttaaacataaaggtgactgattttggcttagcggtgaagaagcaaagtaggagtgaagccatgctgcaggccacatgtgggactcctatctatatggattacgtggagaaccaccctttttggcaagctcagaagagaagctttttgagttaataagaaaaggagaactacattttgaaaatgcagtctggaattccataagtgactgtgctaaaagtgttttgaaacaacttatgaaagtagatcctgctcacagaatcacagctaaggaactactagataaccagtggttaacaggcaataaactttcttcggtgagaccaaccaatgtattagagatgatgaaggaatggaaaaataacccagaaagtgttgaggaaaacacaacagaagagaagaataagccgtccactgaagaaaagttgaaaagttaccaaccctggggaaatgtccctgatgccaattacacttcagatgaagaggaggaaaaacagtctactgcttatgaaaagcaatttcctgcaaccagtaaggacaactttgatatgtgcagttcaagtttcacatctagcaaactccttccagctgaaatcaagggagaaatggagaaaacccctgtgactccaagccaaggaacagcaaccaagtaccctgctaaatccggcgccctgtccagaaccaaaaagaaactctaaggttccctccagtgttggacagtacaaaaacaaagctgctcttgttagcactttgatgagggggtaggaggggaagaagacagccctatgctgagcttgtagccttttagctccacagagccccgccatgtgtttgcaccagcttaaaattgaagctgcttatctccaaagcagcataagctgcacatggcattaaaggacagccaccagtaggcttggcagtgggctgcagtggaaatcaactcaagatgtacacgaaggttttttaggggggcagataccttcaatttaaggctgtgggcacacttgctcatttttacttcaaattcttatgtttaggcacagctatttataggggaaaacaagaggccaaatatagtaatggaggtgccaaataattatgtgcactttgcactagaagactttgttagaaaattactaataaacttgccatacgtattacagcagaagtgcttcagtcattcacatgtgttcgtgagattttaggttgctatagattgtttaagacagcttattttaaatgtagaaaaataggagattttgtaactgcttgccattaacttgctgctaaattcccaatgtattgattaaatcaataaaaaacagatgttactcaaaaaaaaaaa

SEQ ID NO: 6400 - DNA, 312 bp, Homo sapiens
aagacatttcttagtcttggaggaaattttttattaaatataaattactacctctcaaagtaaaatttacattatatctataacaatatgaaatatcttatttagctacaaccagatactattatttgactgtttagaacacagaacaaaatccttctaaaaccggtaccttggaggatgttgtctttctttgaattaaagccacaactaacaagccaggcacagtggcaagcacctgtagtcccagctacttggaaggttgtggcaatagaatcccttgagcccaggagctccaagcccagtccaggtaac

SEQ ID NO: 6401 - DNA, 296 bp, Homo sapiens
agtttttacatgcacttttgtgtgtgtgtgtgtgtgtgtgtgtgtgtgtgcgcgcgcgcgcgcacgcgcgtacgtatatgtgcaattattctttgcagttttatcacatgtatagattcatataactaccaccacaaccaaaatacagagctgttccatcaacacaaagaaactgccccgtgctattcaggacacttttgaaaaattaatcatcacaatactgctgtcacacatcaaaagacttttgttaaaaatttctactgttaaggaaataaacagccgttattggactatca

SEQ ID NO: 6402 - DNA, 367 bp, Homo sapiens
aaaagtactgcccaagagggatcttatgaaactggagtaatttcttccagtttcattgaggtattctatttccattcactttagttactagaaggcttttagtacaactgtacatttagggtaataatacattagttggattcaccccaatcccaattgtagaagttttcatttaatcttttttttttttttttctcagacagggtctggctcttttgcccatgctggagtgcagtggtacaatcaaggctcactgcagcctcaacttcctgggctcaaactatcctcctcagcacccccatcctcaaatagctgggactacaagcgcatgccactaagcccagctaatttttaaatttctttgtag

SEQ ID NO: 6403 - DNA, 440 bp, Homo sapiens
aggggtctcataatgctagccaggctggtctcgaactcctggccttaagcaatcctcttgcctcagcctcccaaagtgttgggattacaggcatgagccaacacacctggctaaaactgcatttagaaaacaattttgtcagattgggcatggttcctacacattgtgtaattttatattcttaggaaggtttttgtctttctctttccagctgtatcctatggaaaaggaacctattttgctgtggatgccagttattctgccaaggacacctactccaagccagacagcaatgggagaaagcacatgtacgttgtgcgagtacttactggagtcttcacaaagggacgtgcaggattagtcacccctccacccaagaatcctcacaatcccacagatctctttgactcagtgacaaacaatacacgatctccaaagct

SEQ ID NO: 6404 - DNA, 442 bp, Homo sapiens
agttcacccgaacttgttcttcctacgcaatagagaagattgagaggatacagaatgcatttctctggcagagctaccaggtaaagaaaaggcaaatggatatcaagaatgaccataagaataatgagagactcctcttccatgggacagatgcagactcagtgccatatgtcaatcagcacggctttaatagaagttgtgctgggaaaaatgctgtatcctatggaaaaggaacctattttgctgtggatgccagttattctgccaaggacacctactccaagccagacagcaatgggagaaagcacatgtacgttgtgcgagtacttactggagtcttcacaaagggacgtgcaggattagtcacccctccacccaagaatcctcacaatcccacagatctctttgactcagtgacaaacaatacacgatctccaaagct

SEQ ID NO: 6405 - DNA, 274 bp, Homo sapiens
tatactaaaataacagcacataatatgatgaaaacctgaagcagtttcctaagtgactgatgcctaactcagctgaatattgacttacaaagggacttcaagtatagacctaaggaggttgctacctacctgtctctgagattctcgtggacttcagtgtgaatatagtaatggaacacctgaaaaggaagggagtaatacagaagaaaaatggtaggcaaagaaaatggggtgtagagaagcagactactgtgcctccatccctttccagaaa

SEQ ID NO: 6406 - DNA, 745 bp, Homo sapiens
ggacaaggcacatctagggaagaaaagggattggtggttgccagaggctgtttcctgattgtgctgaggcttacagacacagctctgtgtgtgtcaaagtttgaaaaacctgcattaaaaatgatgagtttattttactgtatctttacgctttaatttttaaaaatgaaaaggaaagaaaaaatgcttgtagcatccctacttctcccccaacccccgacccccccaaaaaatatatatatgtgtatttttagacatagtctccctctgtcacccaggcttgagtgcagtggtacgatcaggtgcacgccaccacatctggctaatttttaaaaatgtattctagggacagggtctccctgtgttgcccagggtggtcttgaactcctgacctcaaagtgatcctcctgtctcagcctcccaaagtggttacatgcatctatccatgtgttaaaatcggtagaactgaggccgggaacagtggctatcacctataatcccaccactttgggaggccaaggcaggccgattgcttgagctcaggagttcgagaccagcttgggcaaggtggtgaaaccccgtctctaccaaaaatacaaaaattagctgggcatggtggctcacacttgggtagtcccagctacttgggaggctgaggtgggaggattgttggagcctagaaggcggaggttgctgtgagccgagatcgcaccactgcactccagcctgggcaacagagggagga

SEQ ID NO: 6407 - DNA, 519 bp, Homo sapiens
tgtgtgtaaatacactttgtgacattcacacaatgacaaaacccactagagataaatttctcagaatgtatctctatcattaaatgatgcatgaccatatttctaatgcaaattaaaatgccatcaagaccatcttgatttatttttccttccagagctattagtattagtaatgaagttctcttaatctgacctagtttggggtgaagaataaatacctaatccagtattacagaagtatgtgggtaagttaactttaacagtgtcatgggctcactcacattctgctcttctgattgggttatctgtaaaaagaacagagatctgtggagattttaaagagtgctcatctcatctgaaaaccagccaggcataatattcctaggttagtttttagccaagaatcactcaagtttaccgtagatctcctgtctttgaagcattaacatagacacaatacatatgggatcccttaactgttcctggaggtatcagaaagtaatctaaatcctgagttta

SEQ ID NO: 6408 - DNA, 434 bp, Homo sapiens
cagggttttttttttctctttaattttagccaatctagtaggtgtatagtggtatttcagtgtggttttaattttcatttcttgatgactaatgatgttgagcatctttttaggttctttttggtcatttgtgttttcttgatggagaatctgtccgaatcttttgcctttttggtactgggttaatctgttgttaagtagtaaggactgtttatatattctagatacaagtcctttgttatttgtgttatgaatattttctcctaatctgtaacttaaaaattttatataaagaaggttttggcctagtatggtggctcatccttgtaatcccagtgctttgggaggccaaggtgagaggaccgcttgaggccaggagtttgagacgagcctgggtgacacagtgagactctgtctctacaaaaataaaagta

SEQ ID NO: 6409 - DNA, 209 bp, Homo sapiens
gcttcatggccaactataattattagtcctctagtaagcagcaacacaaatatacctactcaatagcattaagtgggaacaaaaaatatttcctactttaaacaaaatttaaagctagattcagaattaaataatgactctataatatgtaaacaaaaaagcagttatgatttttttaaacgtgttatggagtcttacaaggcttagat

SEQ ID NO: 6410 - DNA, 341 bp, Homo sapiens
tgcccacagccacggagcaaaagcagggctggcatttcactatgtaattttgagagtgaaaatagattcatgctcagaaacacacacctctcacaggcctgggtatttaaccgttgctaggtctccttccatgaaagcaacaatctcgtttaattcaactttccatccccagggcccactcctctactcaataatgcacaaagtggatgaatgcatccctaggaatcactgctgaagaacaagtggcatcagaaccaacgggacactgtttccttcagtgctatgagatccgacctcatagtccagggggatagatacaatccaccagtaagtccactaaa

SEQ ID NO: 6411 - DNA, 442 bp, Homo sapiens
aacagattatgttggtatcagccgaaacctggactttgctccaggcgtgcgcatgcagacattccaagtgaccatccttgatgacctgggacagcctaccttggaaggccccagagaagtttgaattacttcttcagatgccctatgggtgcagtgcttggagaaccaaataaaactaccattttcatcgaggacaccatcacggactgtaagcagagtgcttgtagttcctttgattgaaagactttaagagggaaaaaaacagccaagatatgtctcctaacaacagaatgaaactctactgtttatagatcttagcaattctgggatatcagtgatattgtactgtcattggtgttatattctggtgatatgtggaaatgtaatttatatgactgcatggagatagaaatatatatacctagaaaacattgagcccaca

SEQ ID NO: 6412 - DNA, 553 bp, Homo sapiens
aacagattatgttggtatcagccgaaacctggactttgctccaggcgtgcgcatgcagacattccaagtgaccatccttgatgacctgggacagcctaccttggaaggccccagagaagtttgaattacttcttcagatgccctatgggtgcagtgcttggagaaccaaataaaactaccattttcatcgaggacaccatcacggactgtaagcagagtgcttgtagttcctttgattgaaagactttaagagggaaaaaaacagccaagatatgtctcctaacaacagaatgaaactctactgtttatagatcttagcaattctgggatatcagtgatattgtactgtcattggtgttatattctggtgatatgtggaaatgtaatttatatgactgcatggagatagaaatatatatacctagaaaacattgagcccacaaataattagactgtgttcatgttctttttctattttgttttactttgtttctgaggcaagtaagaaatccactgtgatcaattaaatcaaaagttaagatcaaagaattaa

SEQ ID NO: 6413 - DNA, 362 bp, Homo sapiens
tttaagatattctgaaacagaattatactaattatggggtttttaaagttgaactctttttggcttaaacacaaatttattatcttatagttctggaggtcagaagtcctaaactagtcttacggtgctaaaagcaaggtgtctgcagggctttgttccttctgaggcggtaggggagaatgtttcctccttagcttgtggcctctgcttccatcttcaaagcacatcattccagcctctgcttccgttgtcacattgccttctctgactctgaccctttttcctccctcttataaggaccctttcaattacattaggcccacctggataatccaggaaaatctccacatctccaagtcctt

SEQ ID NO: 6414 - DNA, 706 bp, Homo sapiens
gtgcccacatgggtaatagagagggcgaacatgtcaccaccttgatccactctaaactctgtacagttgcttataggcagctctagagccgaaacaacatggtgattgaaagcttggacacagatccttccacatgtaaatagtgcccactcatagggggaaaaaaaaaagaactataaacaagagatgacctttttctaatttgtatcacggagtatcaaatgtgagggtaaattgcttcaacttctattcatgttgattgacaaaataaaatacattgttctttttgtttgtttgtttgtttgtctgttttgagacagggtctccttctgttactcaggctggagtgtagtgacccaattgccactcactgcggcctccaactcctgagttcaagtgttcctcccgtcttggcctcccaacgtgctgggactacaggcataagccactgcgcctggcacctgtctaggagctccaaaaacacaaagtgttgaagttttagaaacactaacaagaggctctgaaactttaagataaagaacaatgaaaggaaaagcaatgacattcaataatgcaaacacatcattgccgggatctggcacagtaattctcagtaattctcatctaactgggagaatatagtatatcccagcccctccccctccaccatcctcttcttcataaatcaggcaaaatgcctgattaa

SEQ ID NO: 6415 - DNA, 7238 bp, Homo sapiens
  misc_feature (5875)..(5875): n is a, c, g, or t
tatttgaaaatactggatttaatagaaaatatcacattgtaaacaaatccattgatccatgagcttaaaacagaatgacggcacaatcacatagaaaagctaaagacaaaatactggtaccaaacatagcccttaggcctgggctaggctctcaaaggtctttcccagaaatggaggcagcagtagcttcaaacaggcacaaaaacagccaggaggaggcaacatccactccatgaaggcctaagacaatgaaaggaagccagagcaacagaccaccttgggatccggggagaagggtaaatcgggcaaaagggttgtatttcctgatgctctcagaacatcagaccacaccatgtgaatttaagcaggactattttaagtggggaaacaatactagaagcatttggtgtattttcctggcactcacctcctaggtaagcaggagagcgggacactcaggagttgtgactaaactcacacttaagctgcctgtccagaccgtccccttggctgaacacaacactgaaattgtggcagtgtctgttgccccagtggacctcccacttactaatgagtatgtaaaacagaggagccacagtgaggcctttcacaaaaacacagggctctgggggaaaaacggcttccaccttctgccttttggtgctggagagtccctgagggagagaagtttgacgtggctgggccccttgaggctctggatttatcaatagaagcctcctctttggccccacccacccaaatccacccccaggttctcctagttcagagaaaagctgtgaaagtggaagaaggaagggatcgttttctttccattgcacttgttactgaccaaagagactgcttccttgcacttattttagatattgagagtttgtgccttcacttggaacaatggttctcaaccaaggggcaggcctgtgcaagaaggactctcaagaggtggtatccaatatacataagcccctaattccctcccacttgaaaatcagtgcgtgtaaggagagaaattcctgacgggagtgtgtcatatgtgtgaaccatggctgaagcagaacaaaaagtttaaaactcccaacctgggtttggcagacatcaaaatgatggagtacattttgcagatattttttttctgattaagttacaaacattctccctatagctaaactccgtgactaggctcccagcctcatggccaagaacaataagttcacccacttatctggagtaaccatactagattaaagaaatacaattctttcttctaaagacaatttccagaaagacctgcctttccctatgggtacttgacactaggtcccagcacaggctaatcgctgtatggtttcttcgaagattggcttttcctcgtgccgaattcggcacgagaaaaaagaattagtaaaacgatgaaaaaaatcatacatactgttcgaaaatggctacttagatggtctagcctgctaaatctttttccacaagcttgacatggatagggcctttctcctgtatgacaacgaaggtggcgctttaggtctgccttccgcttcaccacatgtgtgcagtacgggcacttgaatcgcatccgaggcagatcatctgtcaagagacgctttgattaaatcactggaaagttcataacaattctaataacagaaagaatccaatccaagcccaatggaaacaagagaaagaaaaaaatctcgtgccgaattcggcacgagggctactgcagagctgggctggacggccaatcctgcgtccgggtgggaagaagtcagtggctacgatgaaaacctgaacaccatccgcacctaccaggtgtgcaatgtcttcgagcccaaccagaacaattggctgctcaccaccttcatcaaccggcggggggcccatcgcatctacacagagatgcgcttcactgtgagagactgcagcagcctccctaatgtcccaggatcctgcaaggagaccttcaacttgtattactatgagactgactctgtcattgccaccaagaagtcagccttctggtctgaggccccctacctcaaagtagacaccattgctgcagatgagagcttctcccaggtggactttaggggaaggctgatgaaggtaaacacagaagtcaggagctttgggcctcttactcggaatggtttttacctcgcttttcaggattatggtgcctgtatgattctactttctgtccgtgtcttcttcaaaaagtgtcccagcattgtgcaaaattttgcagtgtttccagagactatgacaggggcagagagcacatctctggtgattgctcggggcacatgcatccccaacgcagaggaagtggacgtgcccatcaaactctactgcaacggggacggggaatggatggtgcctattgggcgatgcacctgcaagcctggctatgagcctgagaacagcgtggcatgcaaggcttgccctgcagggagattcaaggccagccaggaagctgaaggctgctcccactgcccctccaacagccgctcccctgcagaggcgtctcccatctgcacctgtcggaccggttattaccgagcggactttgaccctccagaagtggcatgcactagcgtcccatcaggtccccgcaatgttatctccatcgtcaatgagagctccatcattctggagtggcaccctccaagggagacaggtgggcgggatgatgtgacctacaacatcatctgcaaaaagtgccgggcagacggccggagctgctcccgctgtgacgacaatgtggagtttgtgcccaggcagctgggcctgacggagtgccgcgtctccatcagcagcctgtgggcccacaccccctacacctttgacatccaggccatcaatggagtctccagcaagagtcccttccccccacagcacgtctctgtcaacatcaccacaaaccaagccgccccctccaccgttcccatcatgcaccaagtcagtgccactatgaggagcatcaccttgtcatggccacagccggagcagcccaatggcatcatcctggactatgagatccggtactatgagaaggaacacaatgagttcaactcctccatggccagtagtcagaccaacacagcaaggattgatgggctgcggcctggcatggtatatgtggtacaggtgcgtgcccgcactgttgctggctacggcaagttcagtggcaagatgtgcttccagactctgactgacgatgattacaagtcagagctgagggagcagctgcccctgattgctggctcggcagcggccggggtcgtgttcgttgtgtccttggtggccatctctatcgtctgtagcaggaaacgggcttatagcaaagaggctgtgtacagcgataagctccagcattacagcacaggccgaggctccccagggatgaagatctacattgaccccttcacttacgaggatcccaacgaagctgtccgggagtttgccaaggagattgatgtatcttttgtgaaaattgaagaggtcatcggagcaggggagtttggagaagtgtacaaggggcgtttgaaactgccaggcaagagggaaatctacgtggccatcaagaccctgaaggcagggtactcggagaagcagcgtcgggactttctgagtgaggcgagcatcatgggccagttcgaccatcctaacatcattcgcctggagggtgtggtcaccaagagtcggcctgtcatgatcatcacagagttcatggagaatggtgcattggattctttcctcaggcaaaatgacgggcagttcaccgtgatccagcttgtgggtatgctcaggggcatcgctgctggcatgaagtacctggctgagatgaattatgtgcatcgggacctggctgctaggaacattctggtcaacagtaacctggtgtgcaaggtgtccgactttggcctctcccgctacctccaggatgacacctcagatcccacctacaccagctccttgggagggaagatccctgtgagatggacagctccagaggccatcgcctaccgcaagttcacttcagccagcgacgtttggagctatgggatcgtcatgtgggaagtcatgtcatttggagagagaccctattgggatatgtccaaccaagatgtcatcaatgccatcgagcaggactaccggctgcccccacccatggactgtccagctgctctacaccagctcatgctggactgttggcagaaggaccggaacagccggccccggtttgcggagattgtcaacaccctagataagatgatccggaacccggcaagtctcaagactgtggcaaccatcaccgccgtgccttcccagcccctgctcgaccgctccatcccagacttcacggcctttaccaccgtggatgactggctcagcgccatcaaaatggtccagtacagggacagcttcctcactgctggcttcacctccctccagctggtcacccagatgacatcagaagacctcctgagaataggcatcaccttggcaggccatcagaagaagatcctgaacagcattcattctatgagggtccagataagtcagtcaccaacggcaatggcatgagaactcttgtttcttggggaaggagaggagggaaaaggaccagggtcaagggggaccagaggttgaccactgtggaatgtactggagagactggcttctcagctgaggaatgcatttccatcagtgaagaatcaaccggacctgttgctagcaggcaatctccatttctcagtgacagaagcatgtttgagatgccgtgggaaaccaaatatataataataaaaatataaaaaggtgatgttcaacagaagtgaagacaaaacaatatgcatcaggagaacaagagtaaacccagctcccactctcagtgggctgcagttgcccaaccacaggaagaaagggaaggaggtagagggaagaaacagaagcagtgttccattttcttcctcaccaatgacattcttttcttttctcctttcgtactcctccctgagagtcccctcccttctcccacactcgtttccctttgctcatgactcctgtagggaagtttcttcaaacaaaacccagctcctgagtctccagatgttgttctgtcagttgccaaaggactttgctgaccactgcatggggatccaaccaattcaattaatgtcttcatattgaagaagagatgtaccttcaattgaaaacctcgtttttcttttgtttgcattttctcggttccgattcggcacgagcggcacgagcgctgagcagcggagggggagcgtgcagagccgctgcggccctcacagtcggacgccggccgtgccgtgccgtagggaacatgcacttttccattcccgaaaccgagtcccgcagcggggacagcgggtccgcctacgtggcctataacattcacgtgaatggagtcctgcactgtcgggtgcgctacagccagctcctggggtgcacgagcagcttcggaaggagtatggggccaatgtgcttcctcattccccccaaagaagcttttctctctgactcctgctgaggtagaacagaggagagagcagttagagaagtacatgcaagctgttcggcaagacccattgcttgggagcagcgagactttcaacagtttcctgcgtcgggcacaacaggagacacagcaggtccccacagaggaagtgtccttggaagtgctgctcagcaacgggcagaaagttctggtcaacgtgctaacttcagatcagactgaggatgtcctggaggctgtagctgcaaagctggatcttccagatgacttgattggatactttagtctattcttagnttcgagaaaaagaggatggagccttttctttttggtacggaagttggcaagaggtttggagctgccttatgtgtcttgtcaccagccttcggagtcaagagtataagattgtgctaaggaagagttattgggactctgcctatggatgacgatgtcacggagaaccgggttggcctgaacctgctttatgctcagacggtatcagatattgagcgtgggtggatcttggtcaccaaggaacagcaccggcaactcaaatctctgcaagagaaagtctccaagaaggagttcctgagactggcccagacgctgcggcactatggctacttgcgctttgatgcctgtgtggctgacttcccagaaaaggactgtcctgtggtggtgagcgcgggcaacagtgagctcaggcctgcacgctccgcctgcctggccagcaactcctgagaaggctccttccgggtcacccgcatgcgatgctggcgggtcacctcctctgtaccattgcccagtggaagcacgagcccaggccggggccggggtgaggtgcgcctggaactggcttttgaatacctcatgagcaaggaccttctacagtgggtcaccatcactagcccccaggctatcatgatgagcatctgcttgcagtccatggttgatgaactgatggtgaagaaatctggcggcagtatcaggaagatctgtcgccggcgggtggggggtactctgagacgctcagacagccagccaagccagtgaagtccccaccactgcttgagtcacctgatgccacccgggagtctatggtcaaactctcaagtaagctgagtgccgtgagcttgcggggaattggcagtcccagcacagatgccagtgccagtgatgtccacggcaatttcgccttcgagggcattggagatgaggatctgtaatctccactgcttggatgtctgccctctaccccagaggaatttacagaaacttgccctgtgcctgtgtcccccatgctaaggggcggaggggtcttttccttcttctttcctacctaccccttttctcttgccaggggcctcgtatcctacctttccttgtcccctgggctggctgcacagaggattgccccttctcttttcagatctggccctcgatgccaaattagcatttagtattttgcacaaagtctaaggaccatggctgcctgcttgggagaccatagctcctctgggccgcttctggcctcttggagggatggcaaaggccaaggggatgggagaggtctgtgtttggtctcccggagttccccatcattaaactcaccgtcgactggtcctaaaaaaaaaaccggacgacgtcgtgccgaattaat

SEQ ID NO: 6416 - DNA, 6465 bp, Homo sapiens
  misc_feature (257)..(257): n is a, c, g, or t
  misc_feature (5102)..(5102): n is a, c, g, or t
ggtgaccccattttaatgagggagagaccccacgataaacaaaatcgattagtaaataccaacccatgctagagagtgaagagctctggaggagaggcacgggtgcgcccctggagttgctctaaacagggtaggcagggtgctcttgtcacagagaagatgaacgaaggctcgtttgatcatttaaagcggatccagtcctgggtgggatgtaagggcacgaggcctccccagctccttcgctgggcaccctatgnggggacagggtgagttgggcgggccgctgcggttctccgagagcaccacgagggggagcccggacccctcctagcgccttccgagccctcccgcacagccttgcaagcaaaagtttttcttaaactaacaatgccagtgtaaggaggtgctcgcgcctgattggccgggggaattttgcaggtttgattccttgattggacaggaggtgttaggggtggggagagagctgatggtgggggatcccgctccctcccgcgtcagtctggccggctccgtcctcccgtaggctccgctgtagctagcaatgtgacaccaggacgcactcgctctcgcgcgctctcccaggctcgttctccctcgccctctctctctcacacacgcacgcacacacccacctctcccataaacacacacacacacatgcacacccacacccacgcgcgcccgcaccgccccacgcgcacacactcctgcccacgcccacgcagcgctccgggaagtccggtccgggcgagagcgcgaaaggataccgagaagccacccgcggagagcgcagcggcgccctgggacgcggcgctctcccggcgctgctgcctcggcttggtctcggcctgcgggccgtcggccggcgatggccctggattatctactactgctcctcctggcatccgcagtggctgcgatggaagaaacgttaatggacaccagaacggctactgcagagctgggctggacggccaatcctgcgtccgggtgggaagaagtcagtggctacgatgaaaacctgaacaccatccgcacctaccaggtgtgcaatgtcttcgagcccaaccagaacaattggctgctcaccaccttcatcaaccggcggggggcccatcgcatctacacagagatgcgcttcactgtgagagactgcagcagcctccctaatgtcccaggatcctgcaaggagaccttcaacttgtattactatgagactgactctgtcattgccaccaagaagtcagccttctggtctgaggccccctacctcaaagtagacaccattgctgcagatgagagcttctcccaggtggactttaggggaaggctgatgaaggtaaacacagaagtcaggagctttgggcctcttactcggaatggtttttacctcgcttttcaggattatggtgcctgtatgattctactttctgtccgtgtcttcttcaaaaagtgtcccagcattgtgcaaaattttgcagtgtttccagagactatgacaggggcagagagcacatctctggtgattgctcggggcacatgcatccccaacgcagaggaagtggacgtgcccatcaaactctactgcaacggggacggggaatggatggtgcctattgggcgatgcacctgcaagcctggctatgagcctgagaacagcgtggcatgcaaggcttgccctgcagggagattcaaggccagccaggaagctgaaggctgctcccactgcccctccaacagccgctcccctgcagaggcgtctcccatctgcacctgtcggaccggttattaccgagcggactttgaccctccagaagtggcatgcactagcgtcccatcaggtccccgcaatgttatctccatcgtcaatgagagctccatcattctggagtggcaccctccaagggagacaggtgggcgggatgatgtgacctacaacatcatctgcaaaaagtgccgggcagacggccggagctgctcccgctgtgacgacaatgtggagtttgtgcccaggcagctgggcctgacggagtgccgcgtctccatcagcagcctgtgggcccacaccccctacacctttgacatccaggccatcaatggagtctccagcaagagtcccttccccccacagcacgtctctgtcaacatcaccacaaaccaagccgccccctccaccgttcccatcatgcaccaagtcagtgccactatgaggagcatcaccttgtcatggccacagccggagcagcccaatggcatcatcctggactatgagatccggtactatgagaaggaacacaatgagttcaactcctccatggccagtagtcagaccaacacagcaaggattgatgggctgcggcctggcatggtatatgtggtacaggtgcgtgcccgcactgttgctggctacggcaagttcagtggcaagatgtgcttccagactctgactgacgatgattacaagtcagagctgagggagcagctgcccctgattgctggctcggcagcggccggggtcgtgttcgttgtgtccttggtggccatctctatcgtctgtagcaggaaacgggcttatagcaaagaggctgtgtacagcgataagctccagcattacagcacaggccgaggctccccagggatgaagatctacattgaccccttcacttacgaggatcccaacgaagctgtccgggagtttgccaaggagattgatgtatcttttgtgaaaattgaagaggtcatcggagcaggggagtttggagaagtgtacaaggggcgtttgaaactgccaggcaagagggaaatctacgtggccatcaagaccctgaaggcagggtactcggagaagcagcgtcgggactttctgagtgaggcgagcatcatgggccagttcgaccatcctaacatcattcgcctggagggtgtggtcaccaagagtcggcctgtcatgatcatcacagagttcatggagaatggtgcattggattctttcctcaggcaaaatgacgggcagttcaccgtgatccagcttgtgggtatgctcaggggcatcgctgctggcatgaagtacctggctgagatgaattatgtgcatcgggacctggctgctaggaacattctggtcaacagtaacctggtgtgcaaggtgtccgactttggcctctcccgctacctccaggatgacacctcagatcccacctacaccagctccttgggagggaagatccctgtgagatggacagctccagaggccatcgcctaccgcaagttcacttcagccagcgacgtttggagctatgggatcgtcatgtgggaagtcatgtcatttggagagagaccctattgggatatgtccaaccaagatgtcatcaatgccatcgagcaggactaccggctgcccccacccatggactgtccagctgctctacaccagctcatgctggactgttggcagaaggaccggaacagccggccccggtttgcggagattgtcaacaccctagataagatgatccggaacccggcaagtctcaagactgtggcaaccatcaccgccgtgccttcccagcccctgctcgaccgctccatcccagacttcacggcctttaccaccgtggatgactggctcagcgccatcaaaatggtccagtacagggacagcttcctcactgctggcttcacctccctccagctggtcacccagatgacatcagaagacctcctgagaataggcatcaccttggcaggccatcagaagaagatcctgaacagcattcattctatgagggtccagataagtcagtcaccaacggcaatggcatgagaactcttgtttcttggggaaggagaggagggaaaaggaccagggtcaagggggaccagaggttgaccactgtggaatgtactggagagactggcttctcagctgaggaatgcatttccatcagtgaagaatcaaccggacctgttgctagcaggcaatctccatttctcagtgacagaagcatgtttgagatgccgtgggaaaccaaatatataataataaaaatataaaaaggtgatgttcaacagaagtgaagacaaaacaatatgcatcaggagaacaagagtaaacccagctcccactctcagtgggctgcagttgcccaaccacaggaagaaagggaaggaggtagagggaagaaacagaagcagtgttccattttcttcctcaccaatgacattcttttcttttctcctttcgtactcctccctgagagtcccctcccttctcccacactcgtttccctttgctcatgactcctgtagggaagtttcttcaaacaaaacccagctcctgagtctccagatgttgttctgtcagttgccaaaggactttgctgaccactgcatggggatccaaccaattcaattaatgtcttcatattgaagaagagatgtaccttcaattgaaaacctcgtttttcttttgtttgcattttctcggttccgattcggcacgagcggcacgagcgctgagcagcggagggggagcgtgcagagccgctgcggccctcacagtcggacgccggccgtgccgtgccgtagggaacatgcacttttccattcccgaaaccgagtcccgcagcggggacagcgggtccgcctacgtggcctataacattcacgtgaatggagtcctgcactgtcgggtgcgctacagccagctcctggggtgcacgagcagcttcggaaggagtatggggccaatgtgcttcctcattccccccaaagaagcttttctctctgactcctgctgaggtagaacagaggagagagcagttagagaagtacatgcaagctgttcggcaagacccattgcttgggagcagcgagactttcaacagtttcctgcgtcgggcacaacaggagacacagcaggtccccacagaggaagtgtccttggaagtgctgctcagcaacgggcagaaagttctggtcaacgtgctaacttcagatcagactgaggatgtcctggaggctgtagctgcaaagctggatcttccagatgacttgattggatactttagtctattcttagnttcgagaaaaagaggatggagccttttctttttggtacggaagttggcaagaggtttggagctgccttatgtgtcttgtcaccagccttcggagtcaagagtataagattgtgctaaggaagagttattgggactctgcctatggatgacgatgtcacggagaaccgggttggcctgaacctgctttatgctcagacggtatcagatattgagcgtgggtggatcttggtcaccaaggaacagcaccggcaactcaaatctctgcaagagaaagtctccaagaaggagttcctgagactggcccagacgctgcggcactatggctacttgcgctttgatgcctgtgtggctgacttcccagaaaaggactgtcctgtggtggtgagcgcgggcaacagtgagctcaggcctgcacgctccgcctgcctggccagcaactcctgagaaggctccttccgggtcacccgcatgcgatgctggcgggtcacctcctctgtaccattgcccagtggaagcacgagcccaggccggggccggggtgaggtgcgcctggaactggcttttgaatacctcatgagcaaggaccttctacagtgggtcaccatcactagcccccaggctatcatgatgagcatctgcttgcagtccatggttgatgaactgatggtgaagaaatctggcggcagtatcaggaagatctgtcgccggcgggtggggggtactctgagacgctcagacagccagccaagccagtgaagtccccaccactgcttgagtcacctgatgccacccgggagtctatggtcaaactctcaagtaagctgagtgccgtgagcttgcggggaattggcagtcccagcacagatgccagtgccagtgatgtccacggcaatttcgccttcgagggcattggagatgaggatctgtaatctccactgcttggatgtctgccctctaccccagaggaatttacagaaacttgccctgtgcctgtgtcccccatgctaaggggcggaggggtcttttccttcttctttcctacctaccccttttctcttgccaggggcctcgtatcctacctttccttgtcccctgggctggctgcacagaggattgccccttctcttttcagatctggccctcgatgccaaattagcatttagtattttgcacaaagtctaaggaccatggctgcctgcttgggagaccatagctcctctgggccgcttctggcctcttggagggatggcaaaggccaaggggatgggagaggtctgtgtttggtctcccggagttccccatcattaaactcaccgtcgactggtcctaaaaaaaaaaccggacgacgtcgtgccgaattaat

SEQ ID NO: 6417 - DNA, 1906 bp, Homo sapiens
  misc_feature (257)..(257): n is a, c, g, or t
  misc_feature (949)..(949): n is a, c, g, or t
  misc_feature (972)..(972): n is a, c, g, or t
  misc_feature (995)..(995): n is a, c, g, or t
  misc_feature (1344)..(1344): n is a, c, g, or t
  misc_feature (1752)..(1752): n is a, c, g, or t
ggtgaccccattttaatgagggagagaccccacgataaacaaaatcgattagtaaataccaacccatgctagagagtgaagagctctggaggagaggcacgggtgcgcccctggagttgctctaaacagggtaggcagggtgctcttgtcacagagaagatgaacgaaggctcgtttgatcatttaaagcggatccagtcctgggtgggatgtaagggcacgaggcctccccagctccttcgctgggcaccctatgnggggacagggtgagttgggcgggccgctgcggttctccgagagcaccacgagggggagcccggacccctcctagcgccttccgagccctcccgcacagccttgcaagcaaaagtttttcttaaactaacaatgccagtgtaaggaggtgctcgcgcctgattggccgggggaattttgcaggtttgattccttgattggacaggaggtgttaggggtggggagagagctgatggtgggggatcccgctccctcccgcgtcagtctggccggctccgtcctcccgtaggctccgctgtagctagcaatgtgacaccaggacgcactcgctctcgcgcgctctcccaggctcgttctccctcgccctctctctctcacacacgcacgcacacacccacctctcccataaacacacacacacacatgcacacccacacccacgcgcgcccgcaccgccccacgcgcacacactcctgcccacgcccacgcagcgctccgggaagtccggtccgggcgagagcgcgaaaggataccgagaagccacccgcggagagcgcagcggcgccctgggacgcggcgctctcccggcgctgctgcctcggcttggtctcggcctgcgggccgtcggccggcgatggccctggattatctactactgctcctcctggcatccgcagtggctgcgatggaaggnaacgtaccctccacggagcaagntggctgctggtgccggccgcctngggactgctgtgctccgcggttcgcggggttcctctggctgctttgcggtgcaggcatcccgggacccgagggcaaggaggtttgggagcctcggccgctgccgagcgcggggcttgggcggcacccaccagagcgcccccggctggctcttagcgcccgaaactggctcgcgagtcccccggcttcctcgccccggcactccctggtagcctcggtctcccgcagcccccgctcggagagctcggagcccgctgcattgcggtgcatgctccttagctctggggcagagccagagctgggcgttggggagaaaggggtgcctctggccatccggctcctggagtactngcgcccgtctgctcccaggcacggatacgcttctgagcagccgcgcgccacctccttttctccagctcgcagtccacgggctagtggactctgcttggcgtgcaagcactgcgcgcgggggccggagaagctctgccgtggtatcccgcaagtggccgccgaaggagaggggtggagttcattggccgtacccttggggaccagtctggtggtccgggcgcctgcgggactgcacgtttccagggtcagtcggggagaggtggaaacccttttcgcctcttgagccttggaacaggagtgggctggggtgagtggtcggtcctacctaaagtctcccagcctctccaccaccccggagaggatactcggcggccgggagtcgtcgggcagcgtcactctctgccagcncagacttggcggtgcctccggcttggtggctgggaaagcgcgctccaaagacaccgtgcccggcgcagcggggagcctggggcgctcggtagcgctcgcgaatccctgtgggaaatcccggcccagctccccgcctcccgccccttcccccgcc

SEQ ID NO: 6418 - DNA, 5193 bp, Homo sapiens
  misc_feature (257)..(257): n is a, c, g, or t
ggtgaccccattttaatgagggagagaccccacgataaacaaaatcgattagtaaataccaacccatgctagagagtgaagagctctggaggagaggcacgggtgcgcccctggagttgctctaaacagggtaggcagggtgctcttgtcacagagaagatgaacgaaggctcgtttgatcatttaaagcggatccagtcctgggtgggatgtaagggcacgaggcctccccagctccttcgctgggcaccctatgnggggacagggtgagttgggcgggccgctgcggttctccgagagcaccacgagggggagcccggacccctcctagcgccttccgagccctcccgcacagccttgcaagcaaaagtttttcttaaactaacaatgccagtgtaaggaggtgctcgcgcctgattggccgggggaattttgcaggtttgattccttgattggacaggaggtgttaggggtggggagagagctgatggtgggggatcccgctccctcccgcgtcagtctggccggctccgtcctcccgtaggctccgctgtagctagcaatgtgacaccaggacgcactcgctctcgcgcgctctcccaggctcgttctccctcgccctctctctctcacacacgcacgcacacacccacctctcccataaacacacacacacacatgcacacccacacccacgcgcgcccgcaccgccccacgcgcacacactcctgcccacgcccacgcagcgctccgggaagtccggtccgggcgagagcgcgaaaggataccgagaagccacccgcggagagcgcagcggcgccctgggacgcggcgctctcccggcgctgctgcctcggcttggtctcggcctgcgggccgtcggccggcgatggccctggattatctactactgctcctcctggcatccgcagtggctgcgatggaagaaacgttaatggacaccagaacggctactgcagagctgggctggacggccaatcctgcgtccgggtgggaagaagtcagtggctacgatgaaaacctgaacaccatccgcacctaccaggtgtgcaatgtcttcgagcccaaccagaacaattggctgctcaccaccttcatcaaccggcggggggcccatcgcatctacacagagatgcgcttcactgtgagagactgcagcagcctccctaatgtcccaggatcctgcaaggagaccttcaacttgtattactatgagactgactctgtcattgccaccaagaagtcagccttctggtctgaggccccctacctcaaagtagacaccattgctgcagatgagagcttctcccaggtggactttaggggaaggctgatgaaggtaaacacagaagtcaggagctttgggcctcttactcggaatggtttttacctcgcttttcaggattatggtgcctgtatgattctactttctgtccgtgtcttcttcaaaaagtgtcccagcattgtgcaaaattttgcagtgtttccagagactatgacaggggcagagagcacatctctggtgattgctcggggcacatgcatccccaacgcagaggaagtggacgtgcccatcaaactctactgcaacggggacggggaatggatggtgcctattgggcgatgcacctgcaagcctggctatgagcctgagaacagcgtggcatgcaaggcttgccctgcagggagattcaaggccagccaggaagctgaaggctgctcccactgcccctccaacagccgctcccctgcagaggcgtctcccatctgcacctgtcggaccggttattaccgagcggactttgaccctccagaagtggcatgcactagcgtcccatcaggtccccgcaatgttatctccatcgtcaatgagagctccatcattctggagtggcaccctccaagggagacaggtgggcgggatgatgtgacctacaacatcatctgcaaaaagtgccgggcagacggccggagctgctcccgctgtgacgacaatgtggagtttgtgcccaggcagctgggcctgacggagtgccgcgtctccatcagcagcctgtgggcccacaccccctacacctttgacatccaggccatcaatggagtctccagcaagagtcccttccccccacagcacgtctctgtcaacatcaccacaaaccaagccgccccctccaccgttcccatcatgcaccaagtcagtgccactatgaggagcatcaccttgtcatggccacagccggagcagcccaatggcatcatcctggactatgagatccggtactatgagaaggaacacaatgagttcaactcctccatggccagtagtcagaccaacacagcaaggattgatgggctgcggcctggcatggtatatgtggtacaggtgcgtgcccgcactgttgctggctacggcaagttcagtggcaagatgtgcttccagactctgactgacgatgattacaagtcagagctgagggagcagctgcccctgattgctggctcggcagcggccggggtcgtgttcgttgtgtccttggtggccatctctatcgtctgtagcaggaaacgggcttatagcaaagaggctgtgtacagcgataagctccagcattacagcacaggccgaggctccccagggatgaagatctacattgaccccttcacttacgaggatcccaacgaagctgtccgggagtttgccaaggagattgatgtatcttttgtgaaaattgaagaggtcatcggagcaggggagtttggagaagtgtacaaggggcgtttgaaactgccaggcaagagggaaatctacgtggccatcaagaccctgaaggcagggtactcggagaagcagcgtcgggactttctgagtgaggcgagcatcatgggccagttcgaccatcctaacatcattcgcctggagggtgtggtcaccaagagtcggcctgtcatgatcatcacagagttcatggagaatggtgcattggattctttcctcaggcaaaatgacgggcagttcaccgtgatccagcttgtgggtatgctcaggggcatcgctgctggcatgaagtacctggctgagatgaattatgtgcatcgggacctggctgctaggaacattctggtcaacagtaacctggtgtgcaaggtgtccgactttggcctctcccgctacctccaggatgacacctcagatcccacctacaccagctccttgggagggaagatccctgtgagatggacagctccagaggccatcgcctaccgcaagttcacttcagccagcgacgtttggagctatgggatcgtcatgtgggaagtcatgtcatttggagagagaccctattgggatatgtccaaccaagatgtcatcaatgccatcgagcaggactaccggctgcccccacccatggactgtccagctgctctacaccagctcatgctggactgttggcagaaggaccggaacagccggccccggtttgcggagattgtcaacaccctagataagatgatccggaacccggcaagtctcaagactgtggcaaccatcaccgccgtgccttcccagcccctgctcgaccgctccatcccagacttcacggcctttaccaccgtggatgactggctcagcgccatcaaaatggtccagtacagggacagcttcctcactgctggcttcacctccctccagctggtcacccagatgacatcagaagacctcctgagaataggcatcaccttggcaggccatcagaagaagatcctgaacagcattcattctatgagggtccagataagtcagtcaccaacggcaatggcatgagaactcttgtttcttggggaaggagaggagggaaaaggaccagggtcaagggggaccagaggttgaccactgtggaatgtactggagagactggcttctcagctgaggaatgcatttccatcagtgaagaatcaaccggacctgttgctagcaggcaatctccatttctcagtgacagaagcatgtttgagatgccgtgggaaaccaaatatataataataaaaatataaaaaggtgatgttcaacagaagtgaagacaaaacaatatgcatcaggagaacaagagtaaacccagctcccactctcagtgggctgcagttgcccaaccacaggaagaaagggaaggaggtagagggaagaaacagaagcagtgttccattttcttcctcaccaatgacattcttttcttttctcctttcgtactcctccctgagagtcccctcccttctcccacactcgtttccctttgctcatgactcctgtagggaagtttcttcaaacaaaacccagctcctgagtctccagatgttgttctgtcagttgccaaaggactttgctgaccactgcatggggatccaaccaattcaattaatgtcttcatattgaagaagagatgtaccttcaattgaaaacctcgtttttcttttgtttgcattttctgcaaaaaggaaaaagaaaccacaaattggggaaaaaaaaagaagaaaaacctgtttccgtgtgcaaaagcacacatatgtatgtctgtgttataaaatgactgtgcttgttcgtaacagatgcaaacaagaaagaagaactgggaagtctttgtccctaggaaatccaaaggggctggaatatggtgttggtttggctttctggttggcccaatcggcctattggctcaatgggaagagaggagagggagaaaaataaaatgaaaggaaaaaaaaaagtttgcaaattcagacaggaaacaggtgagtggtttgaattggatgcagtgtgggccatcctggaatgatactgactgattaattattcctgataacatctcaagaaaaggagaaggaaagtgtttctggagaatgttctttcacatcactggaatctgcaattcaagaagtgacaagggagaattcttgctttacctatggactggcttaagccgtgtggcatccgaggaatgtttcaaatgtgtctgtgtttctctttacattccttgttgtacctcattgttcaattcacttttgtaaattccacctaacatttaattattttaaatttctccttttaccttaatctccttgctaattttatctgtctaattaaaaagagcagaagcatgtctgggtttacgtaaaaaa

SEQ ID NO: 6419 - DNA, 4647 bp, Homo sapiens
  misc_feature (257)..(257): n is a, c, g, or t
  misc_feature (4576)..(4576): n is a, c, g, or t
  misc_feature (4589)..(4589): n is a, c, g, or t
  misc_feature (4608)..(4608): n is a, c, g, or t
  misc_feature (4638)..(4638): n is a, c, g, or t
ggtgaccccattttaatgagggagagaccccacgataaacaaaatcgattagtaaataccaacccatgctagagagtgaagagctctggaggagaggcacgggtgcgcccctggagttgctctaaacagggtaggcagggtgctcttgtcacagagaagatgaacgaaggctcgtttgatcatttaaagcggatccagtcctgggtgggatgtaagggcacgaggcctccccagctccttcgctgggcaccctatgnggggacagggtgagttgggcgggccgctgcggttctccgagagcaccacgagggggagcccggacccctcctagcgccttccgagccctcccgcacagccttgcaagcaaaagtttttcttaaactaacaatgccagtgtaaggaggtgctcgcgcctgattggccgggggaattttgcaggtttgattccttgattggacaggaggtgttaggggtggggagagagctgatggtgggggatcccgctccctcccgcgtcagtctggccggctccgtcctcccgtaggctccgctgtagctagcaatgtgacaccaggacgcactcgctctcgcgcgctctcccaggctcgttctccctcgccctctctctctcacacacgcacgcacacacccacctctcccataaacacacacacacacatgcacacccacacccacgcgcgcccgcaccgccccacgcgcacacactcctgcccacgcccacgcagcgctccgggaagtccggtccgggcgagagcgcgaaaggataccgagaagccacccgcggagagcgcagcggcgccctgggacgcggcgctctcccggcgctgctgcctcggcttggtctcggcctgcgggccgtcggccggcgatggccctggattatctactactgctcctcctggcatccgcagtggctgcgatggaagaaacgttaatggacaccagaacggctactgcagagctgggctggacggccaatcctgcgtccgggtgggaagaagtcagtggctacgatgaaaacctgaacaccatccgcacctaccaggtgtgcaatgtcttcgagcccaaccagaacaattggctgctcaccaccttcatcaaccggcggggggcccatcgcatctacacagagatgcgcttcactgtgagagactgcagcagcctccctaatgtcccaggatcctgcaaggagaccttcaacttgtattactatgagactgactctgtcattgccaccaagaagtcagccttctggtctgaggccccctacctcaaagtagacaccattgctgcagatgagagcttctcccaggtggactttaggggaaggctgatgaaggtaaacacagaagtcaggagctttgggcctcttactcggaatggtttttacctcgcttttcaggattatggtgcctgtatgattctactttctgtccgtgtcttcttcaaaaagtgtcccagcattgtgcaaaattttgcagtgtttccagagactatgacaggggcagagagcacatctctggtgattgctcggggcacatgcatccccaacgcagaggaagtggacgtgcccatcaaactctactgcaacggggacggggaatggatggtgcctattgggcgatgcacctgcaagcctggctatgagcctgagaacagcgtggcatgcaaggcttgccctgcagggagattcaaggccagccaggaagctgaaggctgctcccactgcccctccaacagccgctcccctgcagaggcgtctcccatctgcacctgtcggaccggttattaccgagcggactttgaccctccagaagtggcatgcactagcgtcccatcaggtccccgcaatgttatctccatcgtcaatgagagctccatcattctggagtggcaccctccaagggagacaggtgggcgggatgatgtgacctacaacatcatctgcaaaaagtgccgggcagacggccggagctgctcccgctgtgacgacaatgtggagtttgtgcccaggcagctgggcctgacggagtgccgcgtctccatcagcagcctgtgggcccacaccccctacacctttgacatccaggccatcaatggagtctccagcaagagtcccttccccccacagcacgtctctgtcaacatcaccacaaaccaagccgccccctccaccgttcccatcatgcaccaagtcagtgccactatgaggagcatcaccttgtcatggccacagccggagcagcccaatggcatcatcctggactatgagatccggtactatgagaaggaacacaatgagttcaactcctccatggccagtagtcagaccaacacagcaaggattgatgggctgcggcctggcatggtatatgtggtacaggtgcgtgcccgcactgttgctggctacggcaagttcagtggcaagatgtgcttccagactctgactgacgatgattacaagtcagagctgagggagcagctgcccctgattgctggctcggcagcggccggggtcgtgttcgttgtgtccttggtggccatctctatcgtctgtagcaggaaacgggcttatagcaaagaggctgtgtacagcgataagctccagcattacagcacaggccgaggctccccagggatgaagatctacattgaccccttcacttacgaggatcccaacgaagctgtccgggagtttgccaaggagattgatgtatcttttgtgaaaattgaagaggtcatcggagcaggggagtttggagaagtgtacaaggggcgtttgaaactgccaggcaagagggaaatctacgtggccatcaagaccctgaaggcagggtactcggagaagcagcgtcgggactttctgagtgaggcgagcatcatgggccagttcgaccatcctaacatcattcgcctggagggtgtggtcaccaagagtcggcctgtcatgatcatcacagagttcatggagaatggtgcattggattctttcctcaggcaaaatgacgggcagttcaccgtgatccagcttgtgggtatgctcaggggcatcgctgctggcatgaagtacctggctgagatgaattatgtgcatcgggacctggctgctaggaacattctggtcaacagtaacctggtgtgcaaggtgtccgactttggcctctcccgctacctccaggatgacacctcagatcccacctacaccagctccttgggagggaagatccctgtgagatggacagctccagaggccatcgcctaccgcaagttcacttcagccagcgacgtttggagctatgggatcgtcatgtgggaagtcatgtcatttggagagagaccctattgggatatgtccaaccaagatgtcatcaatgccatcgagcaggactaccggctgcccccacccatggactgtccagctgctctacaccagctcatgctggactgttggcagaaggaccggaacagccggccccggtttgcggagattgtcaacaccctagataagatgatccggaacccggcaagtctcaagactgtggcaaccatcaccgccgtgccttcccagcccctgctcgaccgctccatcccagacttcacggcctttaccaccgtggatgactggctcagcgccatcaaaatggtccagtacagggacagcttcctcactgctggcttcacctccctccagctggtcacccagatgacatcagaagacctcctgagaataggcatcaccttggcaggccatcagaagaagatcctgaacagcattcattctatgagggtccagataagtcagtcaccaacggcaatggcatgagaactcttgtttcttggggaaggagaggagggaaaaggaccagggtcaagggggaccagaggttgaccactgtggaatgtactggagagactggcttctcagctgaggaatgcatttccatcagtgaagaatcaaccggacctgttgctagcaggcaatctccatttctcagtgacagaagcatgtttgagatgccgtgggaaaccaaatatataataataaaaatataaaaaggtgatgttcaacagaagtgaagacaaaacaatatgcatcaggagaacaagagtaaacccagctcccactctcagtgggctgcagttgcccaaccacaggaagaaagggaaggaggtagagggaagaaacagaagcagtgttccattttcttcctcaccaatgacattcttttcttttctcctttcgtactcctccctgagagtcccctcccttctcccacactcgtttccctttgctcatgactcctgtagggaagtttcttcaaacaaaacccagctcctgagtctccagatgttgttctgtcagttgccaaaggactttgctgaccactgcatggggatccaaccaattcaattaatgtcttcatattgaagaagagatgtaccttcaattgaaaacctcgtttttcttttgtttgcattttctgcaaaaaggaaaaagaaaccacaaattggggaaaaaaaaagaagaaaaaaaaaaccctgttttcccggtggngccaaaaaagccnccccaataatggtaatggncctgggggttaataaaaaaaggaactgggnggctttggt

SEQ ID NO: 6420 - DNA, 5070 bp, Homo sapiens
  misc_feature (257)..(257): n is a, c, g, or t
ggtgaccccattttaatgagggagagaccccacgataaacaaaatcgattagtaaataccaacccatgctagagagtgaagagctctggaggagaggcacgggtgcgcccctggagttgctctaaacagggtaggcagggtgctcttgtcacagagaagatgaacgaaggctcgtttgatcatttaaagcggatccagtcctgggtgggatgtaagggcacgaggcctccccagctccttcgctgggcaccctatgnggggacagggtgagttgggcgggccgctgcggttctccgagagcaccacgagggggagcccggacccctcctagcgccttccgagccctcccgcacagccttgcaagcaaaagtttttcttaaactaacaatgccagtgtaaggaggtgctcgcgcctgattggccgggggaattttgcaggtttgattccttgattggacaggaggtgttaggggtggggagagagctgatggtgggggatcccgctccctcccgcgtcagtctggccggctccgtcctcccgtaggctccgctgtagctagcaatgtgacaccaggacgcactcgctctcgcgcgctctcccaggctcgttctccctcgccctctctctctcacacacgcacgcacacacccacctctcccataaacacacacacacacatgcacacccacacccacgcgcgcccgcaccgccccacgcgcacacactcctgcccacgcccacgcagcgctccgggaagtccggtccgggcgagagcgcgaaaggataccgagaagccacccgcggagagcgcagcggcgccctgggacgcggcgctctcccggcgctgctgcctcggcttggtctcggcctgcgggccgtcggccggcgatggccctggattatctactactgctcctcctggcatccgcagtggctgcgatggaagaaacgttaatggacaccagaacggctactgcagagctgggctggacggccaatcctgcgtccgggtgggaagaagtcagtggctacgatgaaaacctgaacaccatccgcacctaccaggtgtgcaatgtcttcgagcccaaccagaacaattggctgctcaccaccttcatcaaccggcggggggcccatcgcatctacacagagatgcgcttcactgtgagagactgcagcagcctccctaatgtcccaggatcctgcaaggagaccttcaacttgtattactatgagactgactctgtcattgccaccaagaagtcagccttctggtctgaggccccctacctcaaagtagacaccattgctgcagatgagagcttctcccaggtggactttaggggaaggctgatgaaggtaaacacagaagtcaggagctttgggcctcttactcggaatggtttttacctcgcttttcaggattatggtgcctgtatgattctactttctgtccgtgtcttcttcaaaaagtgtcccagcattgtgcaaaattttgcagtgtttccagagactatgacaggggcagagagcacatctctggtgattgctcggggcacatgcatccccaacgcagaggaagtggacgtgcccatcaaactctactgcaacggggacggggaatggatggtgcctattgggcgatgcacctgcaagcctggctatgagcctgagaacagcgtggcatgcaaggcttgccctgcagggagattcaaggccagccaggaagctgaaggctgctcccactgcccctccaacagccgctcccctgcagaggcgtctcccatctgcacctgtcggaccggttattaccgagcggactttgaccctccagaagtggcatgcactagcgtcccatcaggtccccgcaatgttatctccatcgtcaatgagagctccatcattctggagtggcaccctccaagggagacaggtgggcgggatgatgtgacctacaacatcatctgcaaaaagtgccgggcagacggccggagctgctcccgctgtgacgacaatgtggagtttgtgcccaggcagctgggcctgacggagtgccgcgtctccatcagcagcctgtgggcccacaccccctacacctttgacatccaggccatcaatggagtctccagcaagagtcccttccccccacagcacgtctctgtcaacatcaccacaaaccaagccgccccctccaccgttcccatcatgcaccaagtcagtgccactatgaggagcatcaccttgtcatggccacagccggagcagcccaatggcatcatcctggactatgagatccggtactatgagaaggaacacaatgagttcaactcctccatggccagtagtcagaccaacacagcaaggattgatgggctgcggcctggcatggtatatgtggtacaggtgcgtgcccgcactgttgctggctacggcaagttcagtggcaagatgtgcttccagactctgactgacgatgattacaagtcagagctgagggagcagctgcccctgattgctggctcggcagcggccggggtcgtgttcgttgtgtccttggtggccatctctatcgtctgtagcaggaaacgggcttatagcaaagaggctgtgtacagcgataagctccagcattacagcacaggccgaggctccccagggatgaagatctacattgaccccttcacttacgaggatcccaacgaagctgtccgggagtttgccaaggagattgatgtatcttttgtgaaaattgaagaggtcatcggagcaggggagtttggagaagtgtacaaggggcgtttgaaactgccactggagggtgtggtcaccaagagtcggcctgtcatgatcatcacagagttcatggagaatggtgcattggattctttcctcaggcaaaatgacgggcagttcaccgtgatccagcttgtgggtatgctcaggggcatcgctgctggcatgaagtacctggctgagatgaattatgtgcatcgggacctggctgctaggaacattctggtcaacagtaacctggtgtgcaaggtgtccgactttggcctctcccgctacctccaggatgacacctcagatcccacctacaccagctccttgggagggaagatccctgtgagatggacagctccagaggccatcgcctaccgcaagttcacttcagccagcgacgtttggagctatgggatcgtcatgtgggaagtcatgtcatttggagagagaccctattgggatatgtccaaccaagatgtcatcaatgccatcgagcaggactaccggctgcccccacccatggactgtccagctgctctacaccagctcatgctggactgttggcagaaggaccggaacagccggccccggtttgcggagattgtcaacaccctagataagatgatccggaacccggcaagtctcaagactgtggcaaccatcaccgccgtgccttcccagcccctgctcgaccgctccatcccagacttcacggcctttaccaccgtggatgactggctcagcgccatcaaaatggtccagtacagggacagcttcctcactgctggcttcacctccctccagctggtcacccagatgacatcagaagacctcctgagaataggcatcaccttggcaggccatcagaagaagatcctgaacagcattcattctatgagggtccagataagtcagtcaccaacggcaatggcatgagaactcttgtttcttggggaaggagaggagggaaaaggaccagggtcaagggggaccagaggttgaccactgtggaatgtactggagagactggcttctcagctgaggaatgcatttccatcagtgaagaatcaaccggacctgttgctagcaggcaatctccatttctcagtgacagaagcatgtttgagatgccgtgggaaaccaaatatataataataaaaatataaaaaggtgatgttcaacagaagtgaagacaaaacaatatgcatcaggagaacaagagtaaacccagctcccactctcagtgggctgcagttgcccaaccacaggaagaaagggaaggaggtagagggaagaaacagaagcagtgttccattttcttcctcaccaatgacattcttttcttttctcctttcgtactcctccctgagagtcccctcccttctcccacactcgtttccctttgctcatgactcctgtagggaagtttcttcaaacaaaacccagctcctgagtctccagatgttgttctgtcagttgccaaaggactttgctgaccactgcatggggatccaaccaattcaattaatgtcttcatattgaagaagagatgtaccttcaattgaaaacctcgtttttcttttgtttgcattttctgcaaaaaggaaaaagaaaccacaaattggggaaaaaaaaagaagaaaaacctgtttccgtgtgcaaaagcacacatatgtatgtctgtgttataaaatgactgtgcttgttcgtaacagatgcaaacaagaaagaagaactgggaagtctttgtccctaggaaatccaaaggggctggaatatggtgttggtttggctttctggttggcccaatcggcctattggctcaatgggaagagaggagagggagaaaaataaaatgaaaggaaaaaaaaaagtttgcaaattcagacaggaaacaggtgagtggtttgaattggatgcagtgtgggccatcctggaatgatactgactgattaattattcctgataacatctcaagaaaaggagaaggaaagtgtttctggagaatgttctttcacatcactggaatctgcaattcaagaagtgacaagggagaattcttgctttacctatggactggcttaagccgtgtggcatccgaggaatgtttcaaatgtgtctgtgtttctctttacattccttgttgtacctcattgttcaattcacttttgtaaattccacctaacatttaattattttaaatttctccttttaccttaatctccttgctaattttatctgtctaattaaaaagagcagaagcatgtctgggtttacgtaaaaaa

SEQ ID NO: 6421 - DNA, 4922 bp, Homo sapiens
  misc_feature (257)..(257): n is a, c, g, or t
ggtgaccccattttaatgagggagagaccccacgataaacaaaatcgattagtaaataccaacccatgctagagagtgaagagctctggaggagaggcacgggtgcgcccctggagttgctctaaacagggtaggcagggtgctcttgtcacagagaagatgaacgaaggctcgtttgatcatttaaagcggatccagtcctgggtgggatgtaagggcacgaggcctccccagctccttcgctgggcaccctatgnggggacagggtgagttgggcgggccgctgcggttctccgagagcaccacgagggggagcccggacccctcctagcgccttccgagccctcccgcacagccttgcaagcaaaagtttttcttaaactaacaatgccagtgtaaggaggtgctcgcgcctgattggccgggggaattttgcaggtttgattccttgattggacaggaggtgttaggggtggggagagagctgatggtgggggatcccgctccctcccgcgtcagtctggccggctccgtcctcccgtaggctccgctgtagctagcaatgtgacaccaggacgcactcgctctcgcgcgctctcccaggctcgttctccctcgccctctctctctcacacacgcacgcacacacccacctctcccataaacacacacacacacatgcacacccacacccacgcgcgcccgcaccgccccacgcgcacacactcctgcccacgcccacgcagcgctccgggaagtccggtccgggcgagagcgcgaaaggataccgagaagccacccgcggagagcgcagcggcgccctgggacgcggcgctctcccggcgctgctgcctcggcttggtctcggcctgcgggccgtcggccggcgatggccctggattatctactactgctcctcctggcatccgcagtggctgcgatggaagaaacgttaatggacaccagaacggctactgcagagctgggctggacggccaatcctgcgtccgggtgggaagaagtcagtggctacgatgaaaacctgaacaccatccgcacctaccaggtgtgcaatgtcttcgagcccaaccagaacaattggctgctcaccaccttcatcaaccggcggggggcccatcgcatctacacagagatgcgcttcactgtgagagactgcagcagcctccctaatgtcccaggatcctgcaaggagaccttcaacttgtattactatgagactgactctgtcattgccaccaagaagtcagccttctggtctgaggccccctacctcaaagtagacaccattgctgcagatgagagcttctcccaggtggactttaggggaaggctgatgaaggtaaacacagaagtcaggagctttgggcctcttactcggaatggtttttacctcgcttttcaggattatggtgcctgtatgattctactttctgtccgtgtcttcttcaaaaagtgtcccagcattgtgcaaaattttgcagtgtttccagagactatgacaggggcagagagcacatctctggtgattgctcggggcacatgcatccccaacgcagaggaagtggacgtgcccatcaaactctactgcaacggggacggggaatggatggtgcctattgggcgatgcacctgcaagcctggctatgagcctgagaacagcgtggcatgcaaggcttgccctgcagggagattcaaggccagccaggaagctgaaggctgctcccactgcccctccaacagccgctcccctgcagaggcgtctcccatctgcacctgtcggaccggttattaccgagcggactttgaccctccagaagtggcatgcactagcgtcccatcaggtccccgcaatgttatctccatcgtcaatgagagctccatcattctggagtggcaccctccaagggagacaggtgggcgggatgatgtgacctacaacatcatctgcaaaaagtgccgggcagacggccggagctgctcccgctgtgacgacaatgtggagtttgtgcccaggcagctgggcctgacggagtgccgcgtctccatcagcagcctgtgggcccacaccccctacacctttgacatccaggccatcaatggagtctccagcaagagtcccttccccccacagcacgtctctgtcaacatcaccacaaaccaagccgccccctccaccgttcccatcatgcaccaagtcagtgccactatgaggagcatcaccttgtcatggccacagccggagcagcccaatggcatcatcctggactatgagatccggtactatgagaaggaacacaatgagttcaactcctccatggccagtagtcagaccaacacagcaaggattgatgggctgcggcctggcatggtatatgtggtacaggtgcgtgcccgcactgttgctggctacggcaagttcagtggcaagatgtgcttccagactctgactgacgatgattacaagtcagagctgagggagcagctgcccctgattgctggctcggcagcggccggggtcgtgttcgttgtgtccttggtggccatctctatcgtctgtagcaggaaacgggcttatagcaaagaggctgtgtacagcgataagctccagcattacagcacaggccgaggctccccagggatgaagatctacattgaccccttcacttacgaggatcccaacgaagctgtccgggagtttgccaaggagattgatgtatcttttgtgaaaattgaagaggtcatcggagcaggggagtttggagaagtgtacaaggggcgtttgaaactgccactggagggtgtggtcaccaagagtcggcctgtcatgatcatcacagagttcatggagaatggtgcattggattctttcctcaggcaaaatgacgggcagttcaccgtgatccagcttgtgggtatgctcaggggcatcgctgctggcatgaagtacctggctgagatgaattatgtgcatcgggacctggctgctaggaacattctggtcaacagtaacctggtgtgcaaggtgtccgactttggcctctcccgctacctccaggatgacacctcagatcccacctacaccagctccttgggagggaagatccctgtgagatggacagctccagaggccatcgcctaccgcaagttcacttcagccagcgacgtttggagctatgggatcgtcatgtgggaagtcatgtcatttggagagagaccctattgggatatgtccaaccaagatgtcatcaatgccatcgagcaggactaccggctgcccccacccatggactgtccagctgctctacaccagctcatgctggactgttggcagaaggaccggaacagccggccccggtttgcggagattgtcaacaccctagataagatgatccggaacccggcaagtctcaagactgtggcaaccatcaccgccgtgccttcccagcccctgctcgaccgctccatcccagacttcacggcctttaccaccgtggatgactggctcagcgccatcaaaatggtccagtacagggacagcttcctcactgctggcttcacctccctccagctggtcacccagatgacatcagaagacctcctgagaataggcatcaccttggcaggccatcagaagaagatcctgaacagcattcattctatgagggtccagataagtcagtcaccaacggcaatggcatgagaactcttgtttcttggggaaggagaggagggaaaaggaccagggtcaaggggaaaccaaatatataataataaaaatataaaaaggtgatgttcaacagaagtgaagacaaaacaatatgcatcaggagaacaagagtaaacccagctcccactctcagtgggctgcagttgcccaaccacaggaagaaagggaaggaggtagagggaagaaacagaagcagtgttccattttcttcctcaccaatgacattcttttcttttctcctttcgtactcctccctgagagtcccctcccttctcccacactcgtttccctttgctcatgactcctgtagggaagtttcttcaaacaaaacccagctcctgagtctccagatgttgttctgtcagttgccaaaggactttgctgaccactgcatggggatccaaccaattcaattaatgtcttcatattgaagaagagatgtaccttcaattgaaaacctcgtttttcttttgtttgcattttctgcaaaaaggaaaaagaaaccacaaattggggaaaaaaaaagaagaaaaacctgtttccgtgtgcaaaagcacacatatgtatgtctgtgttataaaatgactgtgcttgttcgtaacagatgcaaacaagaaagaagaactgggaagtctttgtccctaggaaatccaaaggggctggaatatggtgttggtttggctttctggttggcccaatcggcctattggctcaatgggaagagaggagagggagaaaaataaaatgaaaggaaaaaaaaaagtttgcaaattcagacaggaaacaggtgagtggtttgaattggatgcagtgtgggccatcctggaatgatactgactgattaattattcctgataacatctcaagaaaaggagaaggaaagtgtttctggagaatgttctttcacatcactggaatctgcaattcaagaagtgacaagggagaattcttgctttacctatggactggcttaagccgtgtggcatccgaggaatgtttcaaatgtgtctgtgtttctctttacattccttgttgtacctcattgttcaattcacttttgtaaattccacctaacatttaattattttaaatttctccttttaccttaatctccttgctaattttatctgtctaattaaaaagagcagaagcatgtctgggtttacgtaaaaaa

SEQ ID NO: 6422 - DNA, 4089 bp, Homo sapiens
  misc_feature (257)..(257): n is a, c, g, or t
ggtgaccccattttaatgagggagagaccccacgataaacaaaatcgattagtaaataccaacccatgctagagagtgaagagctctggaggagaggcacgggtgcgcccctggagttgctctaaacagggtaggcagggtgctcttgtcacagagaagatgaacgaaggctcgtttgatcatttaaagcggatccagtcctgggtgggatgtaagggcacgaggcctccccagctccttcgctgggcaccctatgnggggacagggtgagttgggcgggccgctgcggttctccgagagcaccacgagggggagcccggacccctcctagcgccttccgagccctcccgcacagccttgcaagcaaaagtttttcttaaactaacaatgccagtgtaaggaggtgctcgcgcctgattggccgggggaattttgcaggtttgattccttgattggacaggaggtgttaggggtggggagagagctgatggtgggggatcccgctccctcccgcgtcagtctggccggctccgtcctcccgtaggctccgctgtagctagcaatgtgacaccaggacgcactcgctctcgcgcgctctcccaggctcgttctccctcgccctctctctctcacacacgcacgcacacacccacctctcccataaacacacacacacacatgcacacccacacccacgcgcgcccgcaccgccccacgcgcacacactcctgcccacgcccacgcagcgctccgggaagtccggtccgggcgagagcgcgaaaggataccgagaagccacccgcggagagcgcagcggcgccctgggacgcggcgctctcccggcgctgctgcctcggcttggtctcggcctgcgggccgtcggccggcgatggccctggattatctactactgctcctcctggcatccgcagtggctgcgatggaagaaacgttaatggacaccagaacggctactgcagagctgggctggacggccaatcctgcgtccgggtgggaagaagtcagtggctacgatgaaaacctgaacaccatccgcacctaccaggtgtgcaatgtcttcgagcccaaccagaacaattggctgctcaccaccttcatcaaccggcggggggcccatcgcatctacacagagatgcgcttcactgtgagagactgcagcagcctccctaatgtcccaggatcctgcaaggagaccttcaacttgtattactatgagactgactctgtcattgccaccaagaagtcagccttctggtctgaggccccctacctcaaagtagacaccattgctgcagatgagagcttctcccaggtggactttaggggaaggctgatgaaggtaaacacagaagtcaggagctttgggcctcttactcggaatggtttttacctcgcttttcaggattatggtgcctgtatgattctactttctgtccgtgtcttcttcaaaaagtgtcccagcattgtgcaaaattttgcagtgtttccagagactatgacaggggcagagagcacatctctggtgattgctcggggcacatgcatccccaacgcagaggaagtggacgtgcccatcaaactctactgcaacggggacggggaatggatggtgcctattgggcgatgcacctgcaagcctggctatgagcctgagaacagcgtggcatgcaaggcttgccctgcagggagattcaaggccagccaggaagctgaaggctgctcccactgcccctccaacagccgctcccctgcagaggcgtctcccatctgcacctgtcggaccggttattaccgagcggactttgaccctccagaagtggcatgcactagcgtcccatcaggtccccgcaatgttatctccatcgtcaatgagagctccatcattctggagtggcaccctccaagggagacaggtgggcgggatgatgtgacctacaacatcatctgcaaaaagtgccgggcagacggccggagctgctcccgctgtgacgacaatgtggagtttgtgcccaggcagctgggcctgacggagtgccgcgtctccatcagcagcctgtgggcccacaccccctacacctttgacatccaggccatcaatggagtctccagcaagagtcccttccccccacagcacgtctctgtcaacatcaccacaaaccaagccgccccctccaccgttcccatcatgcaccaagtcagtgccactatgaggagcatcaccttgtcatggccacagccggagcagcccaatggcatcatcctggactatgagatccggtactatgagaaggaacacaatgagttcaactcctccatggccagtagtcagaccaacacagcaaggattgatgggctgcggcctggcatggtatatgtggtacaggtgcgtgcccgcactgttgctggctacggcaagttcagtggcaagatgtgcttccagactctgactgacgatgattacaagtcagagctgagggagcagctgcccctgattgctggctcggcagcggccggggtcgtgttcgttgtgtccttggtggccatctctatcgtctgtagcaggaaacgggcttatagcaaagaggctgtgtacagcgataagctccagcattacagcacaggccgaggctccccagggatgaagatctacattgaccccttcacttacgaggatcccaacgaagctgtccgggagtttgccaaggagattgatgtatgagaactcttgtttcttggggaaggagaggagggaaaaggaccagggtcaagggggaccagaggttgaccactgtggaatgtactggagagactggcttctcagctgaggaatgcatttccatcagtgaagaatcaaccggacctgttgctagcaggcaatctccatttctcagtgacagaagcatgtttgagatgccgtgggaaaccaaatatataataataaaaatataaaaaggtgatgttcaacagaagtgaagacaaaacaatatgcatcaggagaacaagagtaaacccagctcccactctcagtgggctgcagttgcccaaccacaggaagaaagggaaggaggtagagggaagaaacagaagcagtgttccattttcttcctcaccaatgacattcttttcttttctcctttcgtactcctccctgagagtcccctcccttctcccacactcgtttccctttgctcatgactcctgtagggaagtttcttcaaacaaaacccagctcctgagtctccagatgttgttctgtcagttgccaaaggactttgctgaccactgcatggggatccaaccaattcaattaatgtcttcatattgaagaagagatgtaccttcaattgaaaacctcgtttttcttttgtttgcattttctgcaaaaaggaaaaagaaaccacaaattggggaaaaaaaaagaagaaaaacctgtttccgtgtgcaaaagcacacatatgtatgtctgtgttataaaatgactgtgcttgttcgtaacagatgcaaacaagaaagaagaactgggaagtctttgtccctaggaaatccaaaggggctggaatatggtgttggtttggctttctggttggcccaatcggcctattggctcaatgggaagagaggagagggagaaaaataaaatgaaaggaaaaaaaaaagtttgcaaattcagacaggaaacaggtgagtggtttgaattggatgcagtgtgggccatcctggaatgatactgactgattaattattcctgataacatctcaagaaaaggagaaggaaagtgtttctggagaatgttctttcacatcactggaatctgcaattcaagaagtgacaagggagaattcttgctttacctatggactggcttaagccgtgtggcatccgaggaatgtttcaaatgtgtctgtgtttctctttacattccttgttgtacctcattgttcaattcacttttgtaaattccacctaacatttaattattttaaatttctccttttaccttaatctccttgctaattttatctgtctaattaaaaagagcagaagcatgtctgggtttacgtaaaaaa

SEQ ID NO: 6423 - DNA, 5142 bp, Homo sapiens
  misc_feature (257)..(257): n is a, c, g, or t
ggtgaccccattttaatgagggagagaccccacgataaacaaaatcgattagtaaataccaacccatgctagagagtgaagagctctggaggagaggcacgggtgcgcccctggagttgctctaaacagggtaggcagggtgctcttgtcacagagaagatgaacgaaggctcgtttgatcatttaaagcggatccagtcctgggtgggatgtaagggcacgaggcctccccagctccttcgctgggcaccctatgnggggacagggtgagttgggcgggccgctgcggttctccgagagcaccacgagggggagcccggacccctcctagcgccttccgagccctcccgcacagccttgcaagcaaaagtttttcttaaactaacaatgccagtgtaaggaggtgctcgcgcctgattggccgggggaattttgcaggtttgattccttgattggacaggaggtgttaggggtggggagagagctgatggtgggggatcccgctccctcccgcgtcagtctggccggctccgtcctcccgtaggctccgctgtagctagcaatgtgacaccaggacgcactcgctctcgcgcgctctcccaggctcgttctccctcgccctctctctctcacacacgcacgcacacacccacctctcccataaacacacacacacacatgcacacccacacccacgcgcgcccgcaccgccccacgcgcacacactcctgcccacgcccacgcagcgctccgggaagtccggtccgggcgagagcgcgaaaggataccgagaagccacccgcggagagcgcagcggcgccctgggacgcggcgctctcccggcgctgctgcctcggcttggtctcggcctgcgggccgtcggccggcgatggccctggattatctactactgctcctcctggcatccgcagtggctgcgatggaagaaacgttaatggacaccagaacggctactgcagagctgggctggacggccaatcctgcgtccgggtgggaagaagtcagtggctacgatgaaaacctgaacaccatccgcacctaccaggtgtgcaatgtcttcgagcccaaccagaacaattggctgctcaccaccttcatcaaccggcggggggcccatcgcatctacacagagatgcgcttcactgtgagagactgcagcagcctccctaatgtcccaggatcctgcaagaagtcagccttctggtctgaggccccctacctcaaagtagacaccattgctgcagatgagagcttctcccaggtggactttaggggaaggctgatgaaggtaaacacagaagtcaggagctttgggcctcttactcggaatggtttttacctcgcttttcaggattatggtgcctgtatgattctactttctgtccgtgtcttcttcaaaaagtgtcccagcattgtgcaaaattttgcagtgtttccagagactatgacaggggcagagagcacatctctggtgattgctcggggcacatgcatccccaacgcagaggaagtggacgtgcccatcaaactctactgcaacggggacggggaatggatggtgcctattgggcgatgcacctgcaagcctggctatgagcctgagaacagcgtggcatgcaaggcttgccctgcagggagattcaaggccagccaggaagctgaaggctgctcccactgcccctccaacagccgctcccctgcagaggcgtctcccatctgcacctgtcggaccggttattaccgagcggactttgaccctccagaagtggcatgcactagcgtcccatcaggtccccgcaatgttatctccatcgtcaatgagagctccatcattctggagtggcaccctccaagggagacaggtgggcgggatgatgtgacctacaacatcatctgcaaaaagtgccgggcagacggccggagctgctcccgctgtgacgacaatgtggagtttgtgcccaggcagctgggcctgacggagtgccgcgtctccatcagcagcctgtgggcccacaccccctacacctttgacatccaggccatcaatggagtctccagcaagagtcccttccccccacagcacgtctctgtcaacatcaccacaaaccaagccgccccctccaccgttcccatcatgcaccaagtcagtgccactatgaggagcatcaccttgtcatggccacagccggagcagcccaatggcatcatcctggactatgagatccggtactatgagaaggaacacaatgagttcaactcctccatggccagtagtcagaccaacacagcaaggattgatgggctgcggcctggcatggtatatgtggtacaggtgcgtgcccgcactgttgctggctacggcaagttcagtggcaagatgtgcttccagactctgactgacgatgattacaagtcagagctgagggagcagctgcccctgattgctggctcggcagcggccggggtcgtgttcgttgtgtccttggtggccatctctatcgtctgtagcaggaaacgggcttatagcaaagaggctgtgtacagcgataagctccagcattacagcacaggccgaggctccccagggatgaagatctacattgaccccttcacttacgaggatcccaacgaagctgtccgggagtttgccaaggagattgatgtatcttttgtgaaaattgaagaggtcatcggagcaggggagtttggagaagtgtacaaggggcgtttgaaactgccaggcaagagggaaatctacgtggccatcaagaccctgaaggcagggtactcggagaagcagcgtcgggactttctgagtgaggcgagcatcatgggccagttcgaccatcctaacatcattcgcctggagggtgtggtcaccaagagtcggcctgtcatgatcatcacagagttcatggagaatggtgcattggattctttcctcaggcaaaatgacgggcagttcaccgtgatccagcttgtgggtatgctcaggggcatcgctgctggcatgaagtacctggctgagatgaattatgtgcatcgggacctggctgctaggaacattctggtcaacagtaacctggtgtgcaaggtgtccgactttggcctctcccgctacctccaggatgacacctcagatcccacctacaccagctccttgggagggaagatccctgtgagatggacagctccagaggccatcgcctaccgcaagttcacttcagccagcgacgtttggagctatgggatcgtcatgtgggaagtcatgtcatttggagagagaccctattgggatatgtccaaccaagatgtcatcaatgccatcgagcaggactaccggctgcccccacccatggactgtccagctgctctacaccagctcatgctggactgttggcagaaggaccggaacagccggccccggtttgcggagattgtcaacaccctagataagatgatccggaacccggcaagtctcaagactgtggcaaccatcaccgccgtgccttcccagcccctgctcgaccgctccatcccagacttcacggcctttaccaccgtggatgactggctcagcgccatcaaaatggtccagtacagggacagcttcctcactgctggcttcacctccctccagctggtcacccagatgacatcagaagacctcctgagaataggcatcaccttggcaggccatcagaagaagatcctgaacagcattcattctatgagggtccagataagtcagtcaccaacggcaatggcatgagaactcttgtttcttggggaaggagaggagggaaaaggaccagggtcaagggggaccagaggttgaccactgtggaatgtactggagagactggcttctcagctgaggaatgcatttccatcagtgaagaatcaaccggacctgttgctagcaggcaatctccatttctcagtgacagaagcatgtttgagatgccgtgggaaaccaaatatataataataaaaatataaaaaggtgatgttcaacagaagtgaagacaaaacaatatgcatcaggagaacaagagtaaacccagctcccactctcagtgggctgcagttgcccaaccacaggaagaaagggaaggaggtagagggaagaaacagaagcagtgttccattttcttcctcaccaatgacattcttttcttttctcctttcgtactcctccctgagagtcccctcccttctcccacactcgtttccctttgctcatgactcctgtagggaagtttcttcaaacaaaacccagctcctgagtctccagatgttgttctgtcagttgccaaaggactttgctgaccactgcatggggatccaaccaattcaattaatgtcttcatattgaagaagagatgtaccttcaattgaaaacctcgtttttcttttgtttgcattttctgcaaaaaggaaaaagaaaccacaaattggggaaaaaaaaagaagaaaaacctgtttccgtgtgcaaaagcacacatatgtatgtctgtgttataaaatgactgtgcttgttcgtaacagatgcaaacaagaaagaagaactgggaagtctttgtccctaggaaatccaaaggggctggaatatggtgttggtttggctttctggttggcccaatcggcctattggctcaatgggaagagaggagagggagaaaaataaaatgaaaggaaaaaaaaaagtttgcaaattcagacaggaaacaggtgagtggtttgaattggatgcagtgtgggccatcctggaatgatactgactgattaattattcctgataacatctcaagaaaaggagaaggaaagtgtttctggagaatgttctttcacatcactggaatctgcaattcaagaagtgacaagggagaattcttgctttacctatggactggcttaagccgtgtggcatccgaggaatgtttcaaatgtgtctgtgtttctctttacattccttgttgtacctcattgttcaattcacttttgtaaattccacctaacatttaattattttaaatttctccttttaccttaatctccttgctaattttatctgtctaattaaaaagagcagaagcatgtctgggtttacgtaaaaaa

SEQ ID NO: 6424 - DNA, 4464 bp, Homo sapiens
tttttccacgtgtgaaaacatctattggggaaatggaaaaatcatttgacctcatattcctcatagctgacatgacaaaaccaaaatgtggtggtgagccaacttcaattttgcagaaactgacttggaaagaactgattacctgaaggaccgtgaggatcaaagttgtcccactgaccaggctgtaaactttggaactgataagtgagagagataagaaacgttaatggacaccagaacggctactgcagagctgggctggacggccaatcctgcgtccgggtgggaagaagtcagtggctacgatgaaaacctgaacaccatccgcacctaccaggtgtgcaatgtcttcgagcccaaccagaacaattggctgctcaccaccttcatcaaccggcggggggcccatcgcatctacacagagatgcgcttcactgtgagagactgcagcagcctccctaatgtcccaggatcctgcaaggagaccttcaacttgtattactatgagactgactctgtcattgccaccaagaagtcagccttctggtctgaggccccctacctcaaagtagacaccattgctgcagatgagagcttctcccaggtggactttaggggaaggctgatgaaggtaaacacagaagtcaggagctttgggcctcttactcggaatggtttttacctcgcttttcaggattatggtgcctgtatgattctactttctgtccgtgtcttcttcaaaaagtgtcccagcattgtgcaaaattttgcagtgtttccagagactatgacaggggcagagagcacatctctggtgattgctcggggcacatgcatccccaacgcagaggaagtggacgtgcccatcaaactctactgcaacggggacggggaatggatggtgcctattgggcgatgcacctgcaagcctggctatgagcctgagaacagcgtggcatgcaaggcttgccctgcagggagattcaaggccagccaggaagctgaaggctgctcccactgcccctccaacagccgctcccctgcagaggcgtctcccatctgcacctgtcggaccggttattaccgagcggactttgaccctccagaagtggcatgcactagcgtcccatcaggtccccgcaatgttatctccatcgtcaatgagagctccatcattctggagtggcaccctccaagggagacaggtgggcgggatgatgtgacctacaacatcatctgcaaaaagtgccgggcagacggccggagctgctcccgctgtgacgacaatgtggagtttgtgcccaggcagctgggcctgacggagtgccgcgtctccatcagcagcctgtgggcccacaccccctacacctttgacatccaggccatcaatggagtctccagcaagagtcccttccccccacagcacgtctctgtcaacatcaccacaaaccaagccgccccctccaccgttcccatcatgcaccaagtcagtgccactatgaggagcatcaccttgtcatggccacagccggagcagcccaatggcatcatcctggactatgagatccggtactatgagaaggaacacaatgagttcaactcctccatggccagtagtcagaccaacacagcaaggattgatgggctgcggcctggcatggtatatgtggtacaggtgcgtgcccgcactgttgctggctacggcaagttcagtggcaagatgtgcttccagactctgactgacgatgattacaagtcagagctgagggagcagctgcccctgattgctggctcggcagcggccggggtcgtgttcgttgtgtccttggtggccatctctatcgtctgtagcaggaaacgggcttatagcaaagaggctgtgtacagcgataagctccagcattacagcacaggccgaggctccccagggatgaagatctacattgaccccttcacttacgaggatcccaacgaagctgtccgggagtttgccaaggagattgatgtatcttttgtgaaaattgaagaggtcatcggagcaggggagtttggagaagtgtacaaggggcgtttgaaactgccaggcaagagggaaatctacgtggccatcaagaccctgaaggcagggtactcggagaagcagcgtcgggactttctgagtgaggcgagcatcatgggccagttcgaccatcctaacatcattcgcctggagggtgtggtcaccaagagtcggcctgtcatgatcatcacagagttcatggagaatggtgcattggattctttcctcaggcaaaatgacgggcagttcaccgtgatccagcttgtgggtatgctcaggggcatcgctgctggcatgaagtacctggctgagatgaattatgtgcatcgggacctggctgctaggaacattctggtcaacagtaacctggtgtgcaaggtgtccgactttggcctctcccgctacctccaggatgacacctcagatcccacctacaccagctccttgggagggaagatccctgtgagatggacagctccagaggccatcgcctaccgcaagttcacttcagccagcgacgtttggagctatgggatcgtcatgtgggaagtcatgtcatttggagagagaccctattgggatatgtccaaccaagatgtcatcaatgccatcgagcaggactaccggctgcccccacccatggactgtccagctgctctacaccagctcatgctggactgttggcagaaggaccggaacagccggccccggtttgcggagattgtcaacaccctagataagatgatccggaacccggcaagtctcaagactgtggcaaccatcaccgccgtgccttcccagcccctgctcgaccgctccatcccagacttcacggcctttaccaccgtggatgactggctcagcgccatcaaaatggtccagtacagggacagcttcctcactgctggcttcacctccctccagctggtcacccagatgacatcagaagacctcctgagaataggcatcaccttggcaggccatcagaagaagatcctgaacagcattcattctatgagggtccagataagtcagtcaccaacggcaatggcatgagaactcttgtttcttggggaaggagaggagggaaaaggaccagggtcaagggggaccagaggttgaccactgtggaatgtactggagagactggcttctcagctgaggaatgcatttccatcagtgaagaatcaaccggacctgttgctagcaggcaatctccatttctcagtgacagaagcatgtttgagatgccgtgggaaaccaaatatataataataaaaatataaaaaggtgatgttcaacagaagtgaagacaaaacaatatgcatcaggagaacaagagtaaacccagctcccactctcagtgggctgcagttgcccaaccacaggaagaaagggaaggaggtagagggaagaaacagaagcagtgttccattttcttcctcaccaatgacattcttttcttttctcctttcgtactcctccctgagagtcccctcccttctcccacactcgtttccctttgctcatgactcctgtagggaagtttcttcaaacaaaacccagctcctgagtctccagatgttgttctgtcagttgccaaaggactttgctgaccactgcatggggatccaaccaattcaattaatgtcttcatattgaagaagagatgtaccttcaattgaaaacctcgtttttcttttgtttgcattttctgcaaaaaggaaaaagaaaccacaaattggggaaaaaaaaagaagaaaaacctgtttccgtgtgcaaaagcacacatatgtatgtctgtgttataaaatgactgtgcttgttcgtaacagatgcaaacaagaaagaagaactgggaagtctttgtccctaggaaatccaaaggggctggaatatggtgttggtttggctttctggttggcccaatcggcctattggctcaatgggaagagaggagagggagaaaaataaaatgaaaggaaaaaaaaaagtttgcaaattcagacaggaaacaggtgagtggtttgaattggatgcagtgtgggccatcctggaatgatactgactgattaattattcctgataacatctcaagaaaaggagaaggaaagtgtttctggagaatgttctttcacatcactggaatctgcaattcaagaagtgacaagggagaattcttgctttacctatggactggcttaagccgtgtggcatccgaggaatgtttcaaatgtgtctgtgtttctctttacattccttgttgtacctcattgttcaattcacttttgtaaattccacctaacatttaattattttaaatttctccttttaccttaatctccttgctaattttatctgtctaattaaaaagagcagaagcatgtctgggtttacgtaaaaaa

SEQ ID NO: 6425 - DNA, 268 bp, Homo sapiens
cagctatccctgaacatctgaatcactctggagttttttaaaaaatgcaaatatcctggtcccagtctctcattcttggggtgagggggcaaaagtacctgtctctgggtattttttctttcatattgaaaaatgcatttaaatgcaagacaattaactactaatattccttccatctattatcaaccgctgttaacatttggacatatcactttcattttttcctgtgtcattgcagtttcaaatattacaaattaacatatcattt

SEQ ID NO: 6426 - DNA, 421 bp, Homo sapiens
ccagagatttgttgggtatgtggaagaacttctcagaattgactaagaattttcttggaaatttcttggaaacatttaaatgattagtgctgaagttgtgggagagtaatttccttctccatgtaagatgactagaaagagagagtgtgtttggttccggttacaaccccctgaagaagtgagacttcaaaagaaggccgtgctgcccacaggtcagctgtccactccttccatatgagggcgtctcctcccacttttgccacagctcatctctaaccctgctcctccgctcctcccaaaacagaaacttgaatggaaagtccattgctgatttgtcagagtggaaaggaccacttctccagaagaccgagttctccccttcctgttctgacatgtctgctttaagtaaatccgtatgcac

SEQ ID NO: 6427 - DNA, 899 bp, Homo sapiens
gaattactaaaatatcacacagagacatgaaataagcatatgctattggaaaaaatggcactgatagacttgcttgatgcaggcagtgttgccataaacctccaataaaattagtatataaagaccccaactccattgtccctcagatgaaataactctaaggaacatgcattacatttttccccagagtcgctcagtaggattgagtttcagttgtccaccaagaaaacacatgaattaataacacttgcctaataacacattattggctttcttccttccttgtctctcttctccaatcttctattaatgtttgttcggattacttccactttataaacaaactaaattcaaatctttttttcagagtctatttttggggaacttcaaaataagatagcaactaatctccaggtacctcaacttcccccgttgttaagtaagtttttcctctacatcatgaataagccatttttttttttctttaaagggccaaatacaggccttacagggcatactttcagctttacccttacagataatacataaatagatgagcctgtgtttcaataaaactttataaaaagagactgctgaccagatttagctcatgaactatagtttgctgatccctgctctaaattaattccaagttttttcatggtctaaaattcagtactgtatgcctctgaattcggacaacactttggaaatcctacaaattgcaagagattatcagtagctctataaagagattataaagtttataaaaatcaaacaatctaaaattgttgctaagcattagaatttcaaaatttattctctaatgataaaagtgatgtatttattactgttgttgtttttattatcttaaaagtagataattatttttattatat

SEQ ID NO: 6428 - DNA, 368 bp, Homo sapiens
tctttagaacagttgaaagtgggataagcgtaggagctgagttccacccccatgataaagaaattttattggccgggcgcggtggctcatgccggtaatcccaacactttgggaggccgaggcaggcagatcacttgagctcaggagttcaagaccagcctggccaacacgatgaaaccccacctctactaaaaatatatatatatatatatatatatatacatacatatatacacacacaaaaattagctgagtgtggtggtgtgtgcctgtagtcccagctactcgggaggctgaggcaggagaattgcttgaacccgggaggcggaggttacagtgagccgagattgcgccactgcactgcagcc

SEQ ID NO: 6429 - DNA, 944 bp, Homo sapiens
actctgccatgctacggggggtgggggggcggtcagtgcatgctgttcctagtctgaaacttgtgtcctgtgggtgcctggtggggaacccttgcgggaaggcctggtgggtttgtccctgcttcccagccagcctgtgtccccgggtatgggctggggtctggcatgggcctctgcagctggccacagactgaggggctccaaacagcactgggaacagcctcagggtatctggttgggggctgcagacaggggtggggtcttctgcttggccttgacaggttgcaggcaggttgtcagccggatctgcaatctcatgggggcttggggtcttcccggctcacgaggttatggcagaattcagctcctggtggctggggactgggtcccacctccctgctggctgttggcccttcccagcatggcggttgcttccccttcagggccagcaggactggcctgaatttctccctttctggcgttgaaacaccctctggagggcttcgtgatcgggccatgcccgcctaggatgctctcccttctgatgagctcaagtcaccggttagggtccttaatcacatcgacaacacccaccccacctggcgagtacaacgtgatcaggtctggagtgggactgactggctccagacagaccatgttctacacagaggtgacagatgcccagcgtagcggtccaggtgggggcctggtggaggagggtgagctcattgaggtggtgcacctgcccctggaaggcgcccaggcctttgcagacgacccggacatccccaagaccctcggcgtcatctttggtgtctcatggttcctcagccaggtggcccccaacctggatctccagtgagactccagggttctagacagaggccagtcttggccactcaccccacaccccgcggaccccaataaaggcttgcatagctcca

SEQ ID NO: 6430 - DNA, 828 bp, Homo sapiens
ggtcacgcgcccgcccgaaggctcctgtcgggacagggcgccgccccgtgtcggcccccgcctgtccgggcgccgccatggagcgcatcgagggggcgtccgtgggccgctgcgccgcctcaccctacctgcggccgctcacgctgcattaccgccagaatggtgcccagaagtcctgggacttcatgaagacgcatgacagcgtgaccgttctcttattcaactcttctcggaggagcctggtgttggtgaagcagttccggccagctgtgtatgcgggtgaggtggagcgccgcttcccagggtccctagcagctgtagaccaggacgggcctcgggagctacagccagccctgcccggctcagcgggggtgacagttgagctgtgtgccggcctcgtggaccagcctgggctctcgctggaggaagtggcttgcaaggaggcttgggaggagtgtggctaccacttggccccctctgatctgcgccgggtcgccacatactggtctggagtgggactgactggctccagacagaccatgttctacacagaggtgacagatgcccagcgtagcggtccaggtgggggcctggtggaggagggtgagctcattgaggtggtgcacctgcccctggaaggcgcccaggcctttgcagacgacccggacatccccaagaccctcggcgtcatctttggtgtctcatggttcctcagccaggtggcccccaacctggatctccagtgagactccagggttctagacagaggccagtcttggccactcaccccacaccccgcggaccccaataaaggcttgcatagctcca

SEQ ID NO: 6431 - DNA, 428 bp, Homo sapiens
cccagtaacatatattggcgagccagccaggaggccttcccagcatgtggaaggggccagcggggccagcgtgggtgactcagcagaccctgtctcaacccgtaggtctggagtgggactgactggctccagacagaccatgttctacacagaggtgacagatgcccagcgtagcggtccaggtgggggcctggtggaggagggtgagctcattgaggtggtgcacctgcccctggaaggcgcccaggcctttgcagacgacccggacatccccaagaccctcggcgtcatctttggtgtctcatggttcctcagccaggtggcccccaacctggatctccagtgagactccagggttctagacagaggccagtcttggccactcaccccacaccccgcggaccccaataaaggcttgcatagctcca

SEQ ID NO: 6432 - DNA, 846 bp, Homo sapiens
ggtcacgcgcccgcccgaaggctcctgtcgggacagggcgccgccccgtgtcggcccccgcagagctcgcggcccccgcctgtccgggcgccgccatggagcgcatcgagggggcgtccgtgggccgctgcgccgcctcaccctacctgcggccgctcacgctgcattaccgccagaatggtgcccagaagtcctgggacttcatgaagacgcatgacagcgtgaccgttctcttattcaactcttctcggaggagcctggtgttggtgaagcagttccggccagctgtgtatgcgggtgaggtggagcgccgcttcccagggtccctagcagctgtagaccaggacgggcctcgggagctacagccagccctgcccggctcagcgggggtgacagttgagctgtgtgccggcctcgtggaccagcctgggctctcgctggaggaagtggcttgcaaggaggcttgggaggagtgtggctaccacttggccccctctgatctgcgccgggtcgccacatactggtctggagtgggactgactggctccagacagaccatgttctacacagaggtgacagatgcccagcgtagcggtccaggtgggggcctggtggaggagggtgagctcattgaggtggtgcacctgcccctggaaggcgcccaggcctttgcagacgacccggacatccccaagaccctcggcgtcatctttggtgtctcatggttcctcagccaggtggcccccaacctggatctccagtgagactccagggttctagacagaggccagtcttggccactcaccccacaccccgcggaccccaataaaggcttgcatagctcca

SEQ ID NO: 6433 - DNA, 919 bp, Homo sapiens
ggtcacgcgcccgcccgaaggctcctgtcgggacagggcgccgccccgtgtcggcccccgcagagctcgcggcccccgcctgtccgggcgccgccatggagcgcatcgagggggcgtccgtgggccgctgcgccgcctcaccctacctgcggccgctcacgctgcattaccgccagaatggtgcccagaagtcctgggacttcatgaagacgcatgacagcgtgaccgttctcttattcaactcttctcggaggagcctggtgttggtgaagcagttccggccagctgtgtatgcgggtgaggtggagcgccgcttcccagggtccctagcagctgtagaccaggacgggcctcgggagctacagccagccctgcccggctcagcgggggtgacagttgagctgtgtgccggcctcgtggaccagcctgggctctcgctggaggaagtggcttgcaaggaggcttgggaggagtgtggctaccacttggccccctctgatctgcgccgggtcgccacatactggtctggagtgggactgactggctccagacagaccatgttctacacagaggtgacagatgcccagcgtagcggtccaggtgggggcctggtggaggagggtgagctcattgaggtggtgcacctgcccctggaaggcgcccaggcctttgcagacgacccggacatccccaagaccctcggcgtcatctttggtgtctcatggttcctcagccaggtggcccccaacctggatctccagtgagactccagggttctagacagaggccagtcttggccactcaccaaaccggaccataagtgctagtccgaaaaaaaaaaaccggggcctttgtggggcaaagtagaaggcctggttgttcgcccttttgaaagggatcgcggcctaggcgttatacg

SEQ ID NO: 6434 - DNA, 701 bp, Homo sapiens
tctagaggatctcccccgactagcccgacagaatggtgcccagaagtcctgggacttcatgaagacgcatgacagcgtgaccgttctcttattcaactcttctcggaggagcctggtgttggtgaagcagttccggccagctgtgtatgcgggtgaggtggagcgccgcttcccagggtccctagcagctgtagaccaggacgggcctcgggagctacagccagccctgcccggctcagcgggggtgacagttgagctgtgtgccggcctcgtggaccagcctgggctctcgctggaggaagtggcttgcaaggaggcttgggaggagtgtggctaccacttggccccctctgatctgcgccgggtcgccacatactggtctggagtgggactgactggctccagacagaccatgttctacacagaggtgacagatgcccagcgtagcggtccaggtgggggcctggtggaggagggtgagctcattgaggtggtgcacctgcccctggaaggcgcccaggcctttgcagacgacccggacatccccaagaccctcggcgtcatctttggtgtctcatggttcctcagccaggtggcccccaacctggatctccagtgagactccagggttctagacagaggccagtcttggccactcaccccacaccccgcggaccccaataaaggcttgcatagctcca

SEQ ID NO: 6435 - DNA, 925 bp, Homo sapiens
actctgccatgctacggggggtgggggggcggtcagtgcatgctgttcctagtctgaaacttgtgtcctgtgggtgcctggtggggaacccttgcgggaaggcctggtgggtttgtccctgcttcccagccagcctgtgtccccgggtatgggctggggtctggcatgggcctctgcagctggccacagactgaggggctccaaacagcactgggaacagcctcagggtatctggttgggggctgcagacaggggtggggtcttctgcttggccttgacaggttgcaggcaggttgtcagccggatctgcaatctcatgggggcttggggtcttcccggctcacgaggttatggcagaattcagctcctggtggctggggactgggtcccacctccctgctggctgttggcccttcccagcatggcggttgcttccccttcagggccagcaggactggcctgaatttctccctttctggcgttgaaacaccctctggagggcttcgtgatcgggccatgcccgcctaggatgctctcccttctgatgagctcaagtcaccggttagggtccttaatcacatcgacaacacccaccccacctggtctggagtgggactgactggctccagacagaccatgttctacacagaggtgacagatgcccagcgtagcggtccaggtgggggcctggtggaggagggtgagctcattgaggtggtgcacctgcccctggaaggcgcccaggcctttgcagacgacccggacatccccaagaccctcggcgtcatctttggtgtctcatggttcctcagccaggtggcccccaacctggatctccagtgagactccagggttctagacagaggccagtcttggccactcaccccacaccccgcggaccccaataaaggcttgcatagctcca

SEQ ID NO: 6436 - DNA, 610 bp, Homo sapiens
ggtcacgcgcccgcccgaaggctcctgtcgggacagggcgccgccccgtgtcggcccccgcagagctcgcggcccccgcctgtccgggcgccgccatggagcgcatcgagggggcgtccgtgggccgctgcgccgcctcaccctacctgcggccgctcacgctgcattaccgccagaatggtgcccagaagtcctgggacttcatgaagacgcatgacagcctggtgttggtgaagcagttccggccagctgtgtatgcgggtgaggtggagcgccgcttcccagggtccctagcagctgtagaccaggacgggcctcgggagctacagccagccctgcccggctcagcgggggtgacagttgagctgtgtgccggcctcgtggaccagcctgggctctcgctggaggaagtggcttgcaaggaggcttgggaggagtgtggctaccacttggccccctctgatctgcgccgggtcgccacatactgggacgctacgatgggctcctgaccccagctgaggtcttggggaaggaggagggtgtcacagacccccacccccaccagctgagcaccagcctccacagcctcctccagaggccagggcccgct

SEQ ID NO: 6437 - DNA, 413 bp, Homo sapiens
ggtcacgcgcccgcccgaaggctcctgtcgggacagggcgccgccccgtgtcggcccccgcagagctcgcggcccccgcctgtccgggcgccgccatggagcgcatcgagggggcgtccgtgggccgctgcgccgcctcaccctacctgcggccgctcacgctgcattaccgccagaatggtgcccagaagtcctgggacttcatgaagacgcatgacagcgtgaccgttctcttattcaactcttctcggaggagcctggtgttggtgaagcagttccggccagctgtgtatgcgggtgattaaacagacatttcccgtgggtaaatatatttgcaaggtggttcctggtattaagccttttgagtattaagaccggctcagcgggggtgacagttgagctgtgtgccggcc

SEQ ID NO: 6438 - DNA, 378 bp, Homo sapiens
taccaccaagacaaataaataaccacactgaggtacctggattttgctagaccgacagaaaagtgtaccattaagctaggaataatattaaatgcccaatatcataaaaataaagaggaaaataaagtccatggaaaatgattgcagaaaattaggaaatgaaacttcacatatagacactaaggagaccctaccattagcaaaaaataatcgagaagcagaagaaaactgttcagttggcattctaaacagattaagtatacccaaatatacgttgagaatatgagaaactacctcaactcagatagtcaaaaaataaaaacagaggccaggaaacaaaaaacagggataaataaaataaagtttataggactcagg

SEQ ID NO: 6439 - DNA, 346 bp, Homo sapiens
caataaaatctcatacctcattagtgagtcttatttactgtgaggaacttgataagctaacccttctccacatctaggatagttacagattctcttacaaattcatggcaacctcaagaaaggatggtgaaaaagcactaatgtacagtctcaggcatgatagatgttttttacatcatggggaatatgccaacaattatgagagttatgccattaatattccttacctgaaaatgccttgtatgtatgtgggtacccctttgaaataattaaacaagttatacatcagctagttgccttcagatagtcaacatctcagaacatgtcacttctcatggtaccaagt

SEQ ID NO: 6440 - DNA, 905 bp, Homo sapiens
agggtgggaggattgcttgagcccaggagttcaagaccagctggagcaacataccaagactttatctctaaaaataaattcacttttaaaatctctctgcagtcccattcctcacaacagaagatttttttttctgtctttaaaacttttcttccccaagtacctgactgtctctgactcctcatggcccagccaccctacacctaaccccttttcctgcctcttagatattcttcccaccatagccctatactctgtcccattttttggctcatttctctccatttttctttttcagttttgcattttatgcatttttctacttgtctcaataaaagcctggtcatagagcaatagcaagagaagttctgagctggtaaggaaggcaggatgtcatgaataagagaaatgaatcacagcaatggtgctacctggctaagatgcttcttctcttgtgtgtgtacttaggagaggtatgcaaaatgctttgtccaagtcaaaatccagggatccttagagctgtgctggtatttctgataggtgagtgggacagagatttgtttttagaaaaacctttttcaggaatgaattaatggcatttgcagcaacctggatgggattggaggctattattctaagtcaagtaactcaggaatggaaaaccaaacatcacatgttctcactcataagtgggagctaagctatgaggatgcaaagacattaaaatgatacagtggacttaagggactcagggcaaaagggtgggaagggggtgagggataaaagacctgaaactgggttcagtgtatactgcttgggtgatgcgtgcaccaaattctcacaaatcacccctaaagaacttattcatgtaaccaaataccacttgttccccccaaaaactatgg

SEQ ID NO: 6441 - DNA, 536 bp, Homo sapiens
gtctctacagctcagggaggttcactcgtgggaactgccttagctcaggaaaacacactgcttctgctcacagtacagtctgtcgggcacaggtcacaaggctccaacttcactgctggagaagctggaaaacaaacaggaagcacatggatatttgatgagctcagtctcagtcatccatacatttaattggttctgaattttctcatctgtgaaacaaggataatcaaatctgctttgttttaaggaattattatgagtttcaaatcaaataagcttttcctacagctcctcaaaacatgtaaactttaaacaaatgttaatatgttatttaaaaaggaaaatgatgtattttaacctagtaggcattttgttataccttcttatttattctcaatagaaggcatttaaaaagagacgttggtattcatatatcaataaggaaggcataactgtgttttagtttccgttgctatttactcctatcacattaggttggtattacttgggttagtttacagtacatcattaaagag

SEQ ID NO: 6442 - DNA, 386 bp, Homo sapiens
taattaagataatgtcttgctctgttgcccaggctggagtgcagtggtgtcttgctctgttgcccaggctggagtgcagtagtgtgattatggctcactgcaaccttgaacgcctgggctcaaaagatcctcccacctcagcctcctgagtagctgggactacaagtgtgtgtcactgcacccagctaatttttgtagtttttgtagagatgggattttgcaatgttgcccaggctggtctcaaattcctgggcccaagcaatccacttgcctgggcctcccaaagtatggtgattacaggagtgagctgctgcatccagtcttgtgctattatattcttaaactggtatttcaatgtaatgtttcaaaataaataactctaccca

SEQ ID NO: 6443 - DNA, 1534 bp, Homo sapiens
  misc_feature (1)..(2): n is a, c, g, or t
  misc_feature (4)..(4): n is a, c, g, or t
  misc_feature (7)..(8): n is a, c, g, or t
  misc_feature (10)..(10): n is a, c, g, or t
  misc_feature (19)..(20): n is a, c, g, or t
  misc_feature (22)..(26): n is a, c, g, or t
  misc_feature (29)..(29): n is a, c, g, or t
nntngcnncnggccagaanncnnnnngangggtctggagcttggaggagaagtctgaactaaggataaactaaagagaggccaatgagacttgaaccctgagcctaagttgtcaccagcaggactgatgtgcacacagaaggaatgaagtatggatgtgaaagaacgcaggccttactgctccctgaccaagagcagacgagagaaggaacggcgctacacaaattcctccgcagacaatgaggagtgccgggtacccacacagaagtcctacagttccagcgagacattgaaagcttttgatcatgattcctcgcggctgctttacggcaacagagtgaaggatttggttcacagagaagcagacgagttcactagacaaggacagaattttaccctaaggcagttaggagtttgtgaaccagcaactcgaagaggactggcattttgtgcggaaatggggctccctcacagaggttactctatcagtgcagggtcagatgctgatactgaaaatgaagcagtgatgtccccagagcatgccatgagactttggggcaggggggtcaaatcaggccgcagctcctgcctgtcaagtcggtccaactcagccctcaccctgacagatacggagcacgaaaacaagtccgacagtgagaatgagcaacctgcaagcaatcaaggccagtctaccctgcagcccttgccgccttcccataagcagcactctgcacagcatcatccatccatcacttctctcaacagaaactccctgaccaatagaaggaaccagagtccggccccgccggctgctttgcccgccgagctgcaaaccacacccgagtccgtccagctgcaggacagctgggtccttggcagtaatgtaccactggaaagcaggcatttcctattcaaaacaggaacaggtacaacgccactgttcagtactgcaaccccaggatacacaatggcatctggctctgtttattcaccacctactcggccactacctagaaacaccctatcaagaagtgcttttaaattcaagaagtcttcaaagtactgtagctggaaatgcactgcactgtgtgccgtaggggtctcggtgctcctggcaatactcctgtcttattttatagcaatgcatctctttggcctcaactggcagctacagcagactgaaaatgacacatttgagaatggaaaagtgaattctgataccatgccaacaaacactgtgtcattaccttctggagacaatggaaaattaggtggatttacgcaagaaaataacaccatagattccggagaacttgatattggccgaagagcaattcaagagattcctcccgggatcttctggagatcacagctcttcattgatcagccacagtttcttaaattcaatatctctcttcagaaggatgcattgattggagtatatggccggaagaagttaccgccttcccatactcaggtaagactaggctttcttatcaataaaataaaaactgccagttgcattttttgaaatt

SEQ ID NO: 6444 - DNA, 855 bp, Homo sapiens
  misc_feature (1)..(2): n is a, c, g, or t
  misc_feature (4)..(4): n is a, c, g, or t
  misc_feature (7)..(8): n is a, c, g, or t
  misc_feature (10)..(10): n is a, c, g, or t
  misc_feature (19)..(20): n is a, c, g, or t
  misc_feature (22)..(26): n is a, c, g, or t
  misc_feature (29)..(29): n is a, c, g, or t
nntngcnncnggccagaanncnnnnngangggtctggagcttggaggagaagtctgaactaaggataaactaaagagaggccaatgagacttgaaccctgagcctaagttgtcaccagcaggactgatgtgcacacagaaggaatgaagtatggatgtgaaagaacgcaggccttactgctccctgaccaagagcagacgagagaaggaacggcgctacacaaattcctccgcagacaatgaggagtgccgggtacccacacagaagtcctacagttccagcgagacattgaaagcttttgatcatgattcctcgcggctgctttacggcaacagagtgaaggatttggttcacagagaagcagacgagttcactagacaaggacagaattttaccctaaggcagttaggagtttgtgaaccagcaactcgaagaggactggcattttgtgcggaaatggggctccctcacagaggttactctatcagtgcagggtcagatgctgatactgaaaatgaagcagtgatgtccccagagcatgccatgagactttggggcaggggggtcaaatcaggccgcagctcctgcctgtcaagtcggtccaactcagccctcaccctgacagatacggagcacgaaaacaagtccgacagtgagaatgcttgagatgtgttcttggaagttctattgtatcactaaaggttgaaaagagaaggagatggatgaaataactcaccaaaaggaaacgaatttaagagccagatgctgatgtgttttcatctggtttaacatgagagcttgccttgactgttttcttcatttgaaataactgtgaatgaggctgtttttcccaga

SEQ ID NO: 6445 - DNA, 1527 bp, Homo sapiens
gccactgcgcccggccttactgttttcatatctgccatttctagatctgtttctatagtttgattttctttttttttcttcttctgggtaatgagtcatgttttcctgcttttttttttttttttgacaaaatgcctgtcatttttaagtttgattcagaatattgtgaatttcacattattggttgctggattttgttgtattattttaaatgttttgttggactttgttctggcatcctgtcaaattaacctcgaattatttggatccttttgaggcttgcttttaagtttttgaaaagactttggtagagcaaactttagcctggggctatttattcatactaccgcggtgatacctggagagatctgaatcatcccccgtattacaaggtcatcctactcttgaacaggtagcaatacagagtactcctggccatgtgtgttctttgggaattgttagcctaatgctttcttgtggttctggggttctttctctggccacaggtgctttcttctcatgaatgcacagatcagttttcagccaaaatatgtctgtagatgtagttttaagatcacagatcagttttcagccaaaatacgtcggtagatgtatttttaagatcagagcttttttgtgcagctccatcatcatcagtactctgtttcccaaattctagctgccttgaaagacttgtgtttcctcaactcagtgaaactagtaagtaggctctgttaacctccccttcccccagctacttctaggcctcaagctttggcagccacaggactcacttgatttgtttcccttttgttaggtatacagttctgtgctaccttgtgtgtagagtttgaaaaccattgtttttttgtgtgtgtgtctaattttctagttgttaaaggtgggtgggaggtttaaatctaatttctgttagttgggagtggaagttacctctgctttaatctaaatagttccctagtttttgtttgtcttttatgacttgacattttgaataccactttggagagcatccctcaattcgtgtttgtttgatagttcctcaagattagattgaggtaatgcatttttggcatgaatacctcataagcggtgttgtgtccctcttcgtgcacatcaggaagcacatgatgtctatgttttccattattgtgtgttaacttgtttaaggggatgtctgtcaggtttctccagggtaaagttgctatttttccctctgtatctgtttaagttaagcaaacttttcacccactatttttagcatctgttgtcaattagaaaaaaatccttaaattacaaagttagaataagtctgctaaaagaaaaattgtaaattaaacagtaatagagaaaagtaaaacatgatggtatatacatttttaaaccgttttttctctgcacagacaaatcttgcaatatgaagagatgatttccaggttttattgaataaatgaattgtaatttttacttgaaattatcttatttagtataataaatattacaatatta

SEQ ID NO: 6446 - DNA, 412 bp, Homo sapiens
acaatgcaggccttgtctgctatcaaaaggacactgacttctgtgagtgagatgggataactctgggcaacttttgaagactagactgtatgcaggaaggaaggccaacagttaggatttatatttgtgcttgcctttggatcttcaaaatatcttcctcaaattatttttaacacatgtattaattgtatttaactattcatggaagctcagcaatgccatctagttttcaaattgatccattgtttaaagaatgaggtcaagaattgtcttacactcaaccacgtaatcaataaaccaagagtgttattcataccaagtcacacattgaactttatattaatcaaatcttctctatacatgtggtaattattaagtttagaaattattcattgtcattgtcattattctt

SEQ ID NO: 6447 - DNA, 414 bp, Homo sapiens
agcttataggatggtggactggtaggaactcaagggggagggatcaccagtcaaattctgcaaaaccctttcattactcactcagaaaaggacaacacacacctgccatagaaataacaggcaaggccgggcatgaatgctcacacctgtaatcccagcactttaggtggccgaggtgggtggatcacctgaggtcaggagttcaagaccagcctggccaacatggtgaaaccctgactctactaaaactacaaaaaattagccggccgtgatggtgcacacctgcacctgtaatcccagttgcttgggaggctgaggcaggagaatcgcttgaatgcaggaggtggaggttgcagtgagctgagatcgccccattgtactccaacctgggcagcagggtgaaactccgtctca

SEQ ID NO: 6448 - DNA, 598 bp, Homo sapiens
tctcttgagtttgtatctacatatagaactggatgtctcaaatctaatatccagtgagcatacatttttattagatagggtgatcggaatggagaatttgaaaaaccaggatatacagacccaatactgtgggggaatatccaagcacaggatgggaggaggtaattagcatttttacctgctttcctccacaacacaacctaattttctggagtagagtagatcatgggagggtctaaaaggtgttcaaaggatccaaaccttatgcttatggagaaatcattttctcaaggagagaacaccttctcagagctactgttgccttccctgcccccatctgcctgctagtcagaggtagggatggcagaattaggattgtaggaagtaaggtcacaaagctttaatttatttagacacattttgtatttttaattgcaagtctagaatagggtagttttttcctaagagaaataagtatgtgcagttaattcaatatatttgtgtatatactttttcccatttggaattttattatgcaattcagtcatgtattgaataagttcttttaggatccagtaaataaaagtatatgaattat

SEQ ID NO: 6449 - DNA, 841 bp, Homo sapiens
tagaatcctaacaatcctcatgtgggtgcccatgtggttaataacaaaaaccaaatagatagatgtttgggtcacttgaattatttcttgtttaaaaaatatcttttattgattctgagggagttcatgctaatattgggcccgacccttaacactatttgcatatttattagtgaccaacacattttcatgatcatatcttaatagttgtaaacttgcagcaagaaattattcactcacattaagtttcaataaaattttctaactgggtaactgctggtgtaaggtacactatagtgaggatttagtttacatgtatcagataatcatgcaaactttataaattttcaagaaccacaccccaggcctcatttgatatgaagaaaaatgataaaatgctgtatatttttactttaaatataaccaatgtaatgcctgaaatctaaagtcagtaaaattttgaatgacttgacaaaagtaaaaaatgatatataatttcctcacagtttaaagtatgaagcttttggttctagtttctctaattttgttgttaaaggttttctataaacattctgtaagtgaaaatgagagctgcacaccactgtgtccaccgtctttgggagagaagggtgaagttgacctgaaatcagagctgtttttcactcttccattcactcacattgtaaatttggaagaagcacattatctgttgtgaatctcaggttcctcatatgtaaagtggagtggttatctttttgctgcttctactcatgggtatggagtgaagatttaatgcaataatatatgtgaatgaataaagagctttttttggcaaaaaaaa

SEQ ID NO: 6450 - DNA, 460 bp, Homo sapiens
ggttgtcaattttctaaaccttttcctctagattattctggccctaggcctttcagcaaccccactaatcaattattagatcctgccccaaggagcagtggcttgggggctggatttagggaggaaaacctgattaaactgttttgcttagtactggttacagctgtagctggagaagagtttataatcataaagtacatttttgttattaccttgtggattttaattatccatcttgtctaatcttgttctctgtcatcctagataatgaggtgtttgtgggagcagagctctgcacacaccaggggatgtaataaatgtttgcacttggcccagtatattatgaatgtggcacagtaaataaagtttgtgtacaaaatactagtttatttctatgggagccattatgttcaggatatataaaatgtatctaattaaacaattttgaatctaaaatgtg

SEQ ID NO: 6451 - DNA, 886 bp, Homo sapiens
gagatgaggtctcacccagactcgactcgaactcctgggcttaagggttcctcccaccactgagccccgctgagattctcttaatgtgtgctccaacatcttcaagaggaatgaaaaaagatataagtccttcattgcaatagaaagtagatccaataataaaaaaaaatcctaagtatatttgcttttatgaaattgtgattgtctttgttatttttcaagagaagtttatttttagtattaaatcagtccttgaactggtatcaaggaaaaagatatctcacagaagagttttctttctgcaagcaactggcagaaatgtgacatgtttgattatgtatccatttgtattccctatgtattttaatgtttcccaaactgttgttcatcataaaatgaaaaatatgtaaagctctgtttaattatgtctttgcatatccatgtactctttttttttggcaggtggggaaggtagctttaaatactctattaatttgtgtaggctttcttgattttgtcatttaaaaaagatttcatacattgagatagatgtgtattatagacatcatctataggctcttaaaatgaaattgctgtttccacaattaaacaaattccttgcaagattagtcaggaagagaaacggaaatataccaaaatataacaaagtatattttagaaaatatcaaagcactataaataccaccctcttctccatcaggtgcagactgtgattcctccctaaattatagatctgtgagtttgaaagaacagaaggaatttgataacatttcattgcagcaaagtttttgccaaaccgcttttcacagagcccttgtatcttacatctcagtgtttctgaaagagccaaaattagttcttattg

SEQ ID NO: 6452 - DNA, 828 bp, Homo sapiens
gagatgaggtctcacccagactcgactcgaactcctgggcttaagggttcctcccaccactgagccccgctgagattctcttaatgtgtgctccaacatcttcaagaggaatgaaaaaagatataagtccttcattgcaatagaaagtagatccaataataaaaaaaaatcctaagtatatttgcttttatgaaattgtgattgtctttgttatttttcaagagaagtttatttttagtattaaatcagtccttgaactggtatcaaggaaaaagatatctcacagaagagttttctttctgcaagcaactggcagaaatgtgacatgtttgattatgtatccatttgtattccctatgtattttaatgtttcccaaactgttgttcatctttttttttggcaggtggggaaggtagctttaaatactctattaatttgtgtaggctttcttgattttgtcatttaaaaaagatttcatacattgagatagatgtgtattatagacatcatctataggctcttaaaatgaaattgctgtttccacaattaaacaaattccttgcaagattagtcaggaagagaaacggaaatataccaaaatataacaaagtatattttagaaaatatcaaagcactataaataccaccctcttctccatcaggtgcagactgtgattcctccctaaattatagatctgtgagtttgaaagaacagaaggaatttgataacatttcattgcagcaaagtttttgccaaaccgcttttcacagagcccttgtatcttacatctcagtgtttctgaaagagccaaaattagttcttattg

SEQ ID NO: 6453 - DNA, 672 bp, Homo sapiens
ggaaccggctgcgcgggagcgcgcctgagggaggccgcggggggcagggccgggactgcgttgagacagtcgccgtgcctcagtttcctcctctgcgaagggcgggaggagtcggacgcgccctagagccccgcgcgttcctggtgtagcctgctgggcccgtgttctttaagttcctcttcctcggagccgcgcgttcgaccctcgctcccgtttgtccactgatgtcccgtttcgagcccgggagatcctgcatctcggaagccccctgagtcccgaggcaaatcgggaccgtgagcccccctaccctgcagggctccatggggccaaaaaccacgtggtccttctggaagggaactggctaagccaggactgcttttctggagtgataatgtgcttgccttcccgtgtctaaggtcgaccagatggctgtgtgcaccaacctaatagaacatcataagtatcttgagttcaagataaatccataccttacctacactgtctcccaattattatcaattgtcttctgccatctcttaagtcattattatgtcaaataattaaagtcggtgtttcctttagttttgtcactggtgatactactacttgctcttcaaaatgtatctttattcatctaacattttgcaaagtaaagtttcaaagttgttcagc

SEQ ID NO: 6454 - DNA, 588 bp, Homo sapiens
ggaaccggctgcgcgggagcgcgcctgagggaggccgcggggggcagggccgggactgcgttgagacagtcgccgtgcctcagtttcctcctctgcgaagggcgggaggagtcggacgcgccctagagccccgcgcgttcctggtgtagcctgctgggcccgtgttctttaagttcctcttcctcggagccgcgcgttcgaccctcgctcccgtttgtccactgatgtcccgtttcgagcccgggagatcctgcatctcggaagccccctgagtcccgaggcaaatcgggaccgtgagcccccctaccctgcagggctccatggggccaaaaaccacgtggtccttctggaagggaactggctaagccaggactgcttttctggagtgataatgtgcttgcaagagaaaggtgaagaattgggaaacccatgggtgtcacgaagggtggtgagactggggaacgttttagaaaacctggtgagttgcgtcctgcttttgatagatttatctggaggtacctttatggggaacagggatgagaaggaaaagtttcttcctaaggagtacagtttctgtttcacctctta

SEQ ID NO: 6455 - DNA, 382 bp, Homo sapiens
atcatattaggttggtgcaaggtctaccagatgtgtcttgccttcccatgtgtaaggtcaaccagatagctctcacctttccatgtctaaggtcaaccagggggtgcttgccttcccgtgtctaaggtcgaccagatggctgtgtgcaccaacctaatagaacatcataagtatcttgagttcaagataaatccataccttacctacactgtctcccaattattatcaattgtcttctgccatctcttaagtcattattatgtcaaataattaaagtcggtgtttcctttagttttgtcactggtgatactactacttgctcttcaaaatgtatctttattcatctaacattttgcaaagtaaagtttcaaagttgttcagc

SEQ ID NO: 6456 - DNA, 1388 bp, Homo sapiens
ggaaccggctgcgcgggagcgcgcctgagggaggccgcggggggcagggccgggactgcgttgagacagtcgccgtgcctcagtttcctcctctgcgaagggcgggaggagtcggacgcgccctagagccccgcgcgttcctggtgtagcctgctgggcccgtgttctttaagttcctcttcctcggagccgcgcgttcgaccctcgctcccgtttgtccactgatgtcccgtttcgagcccgggagatcctgcatctcggaagccccctgagtcccgaggcaaatcgggaccgtgagcccccctaccctgcagggctccatggggccaaaaaccacgtggtccttctggaagggaactggctaagccaggactgcttttctggagtgataatgtgcttgctaccctggctgataaatgggacttggattttaaataccattggataataaatgtatgtgatggctttggagcaaattgattgacaatggctaggagacagcttcccaaggctggaaagaggggagtgcggaacatgcctccaccataccactgcccacctcctgtgacctctgcagcaaaacctgaagccccaaagaggcagcttctcaaagtaaaagtggaatgaagttcctggtgacctgaattcccatggaggaaagaggaaaaggacattatgcaaggagatggcatctcgtgtccctggtgaaccaaattccattaggaagacggtgcagtgtgaggtggacctggacctggataaaatgggtgtttaacaagtatttgttgagtaggtggtggaggaggcacgactagatgcagggtctagctgagttgacaagagctaacaccaggtgtggaccaggacagggggaccttaagcgaagacaccctgccagatgtgtcttgttcccttgactgtggggaggcccttggtggtggggtgacggtcccccagtctgaggattttccctggatgtagcctctcagtgctaaaatgggacagtcccaggcaaaccaggtcagttggtcactctactcagtgagccccgtgctgtgttcaaattttcctcttaacagatgtggatggatttcggaaacttagaaaccaccatttctctgtgcctgggaggagagttaaatcttctcaccagaatccttttatgtgtgagagaaataaatatctatcctttttatatctcttttgttttggattctttgtcaccagcagccaaacccaattcttacataaacgtgatactaattaaattcatttgcataaactcaccagttttatccttaattactgtgatatacactcatgaagtatgtaccctaaaataccactgtaagttttatttgattacagcattaaacttaatttacaga

SEQ ID NO: 6457 - DNA, 1039 bp, Homo sapiens
acagaatctcactctgtagtcacccaggctggaatgcagtggtgcgatcttggctcactgcaacctccacctcccagatgcaagcgattcttgtgcctcagcctcccgagtagctgggattaaaggcatgcgccaccacgcccaggagacagcttcccaaggctggaaagaggggagtgcggaacatgcctccaccataccactgcccacctcctgtgacctctgcagcaaaacctgaagccccaaagaggcagcttctcaaagtaaaagtggaatgaagttcctggtgacctgaattcccatggaggaaagaggaaaaggacattatgcaaggagatggcatctcgtgtccctggtgaaccaaattccattaggaagacggtgcagtgtgaggtggacctggacctggataaaatgggtgtttaacaagtatttgttgagtaggtggtggaggaggcacgactagatgcagggtctagctgagttgacaagagctaacaccaggtgtggaccaggacagggggaccttaagcgaagacaccctgccagatgtgtcttgttcccttgactgtggggaggcccttggtggtggggtgacggtcccccagtctgaggattttccctggatgtagcctctcagtgctaaaatgggacagtcccaggcaaaccaggtcagttggtcactctactcagtgagccccgtgctgtgttcaaattttcctcttaacagatgtggatggatttcggaaacttagaaaccaccatttctctgtgcctgggaggagagttaaatcttctcaccagaatccttttatgtgtgagagaaataaatatctatcctttttatatctcttttgttttggattctttgtcaccagcagccaaacccaattcttacataaacgtgatactaattaaattcatttgcataaactcaccagttttatccttaattactgtgatatacactcatgaagtatgtaccctaaaataccactgtaagttttatttgattacagcattaaacttaatttacaga

SEQ ID NO: 6458 - DNA, 442 bp, Homo sapiens
acacactaaattaaatggtaataatttctatggagaaaaataaagcaggaaagtccttgtgcgatggtgacatttgagccatgacctcaaggaaataacagtgagccatgaaaaaatctgaaggaagaactgcactctaggcagaaaaaattgacaagcgcaaagaggtcttggtggtgcatgcctggtgtgtctgtctggaaagcaacagggatgcatgtggctggagcacagtaaatcaggtaggagtataggaggagaagcggtcttagagagaacatgctaccagattatttggggcccacaggctattgtaatgactctggcttttacagaaaaagatgggaaaccagtgggagctttgagtatccaggggtgtgatctgtattttgacaggctcactctggctgctgttgagaacagactgaaggaagccaaggac

SEQ ID NO: 6459 - DNA, 343 bp, Homo sapiens
caaaggtctattgataggaagctgagatagggaaaatgaaagtgttctgaaggtctcttgatactggaaagggtgaaacgttagaagaaaaagttacttgattgggaaaatgttacctcttggtaggagtataattgatatcttactttaaataataatggaaactgttgtctaaaatatgttcaagcaatgtgtccaaccagaaaagagcgaggtaaacattaaagaaaatggaaaaaggggtggtaaacgttaacagaatagaaaagtatattacaatttcaaattaacaatgagaagaaatggaaggactatcaacatggccaaaccattaaaaatgaag

SEQ ID NO: 6460 - DNA, 549 bp, Homo sapiens
ataccttgggagatcgattctctagtaatatgtatttggttgttgttcaacctcagtgagacacagagactgagatgggtcccagaaggagtagggaagagggactgaagagggtctgagtgagggatggaggtggttgttggcatttatttaggagcattgcagagttgccttttaaagatctctttaaagacaatagaaaggagtagagaccgatccctttataacgtgggggtttagcattatctcatttttgatatgcagaaggatatctcattattgtgttggatgccccttaaatgcttcaaactttcttcctgaatgtacccagggcaattttgggggtgttaatgtggcctcgcaggcaaagggagatgaacaggatgacctcttgcgaggtagtcctagcatctctaaccctacggttgtcaagtctctgacaccattctgcttctgacgtgtctcttaaacttcaagtgacctatatttaggagattacgtaaaaagtattgaaagcaaatggccattctgctctaaggtcagagttct

SEQ ID NO: 6461 - DNA, 515 bp, Homo sapiens
ccctgctgattgtcatcgttttaattatctgttaacatatactcatcacctccccctgacaggcctgttaattgttctggtagaggagtgaggccaccaagtgcagtcccacagaacgatgtgattggtgaggggttaggacactgaacatcttctctgtcctgagcaaatgccatccatttaacccatttgtcagtttggggaagtgattctgacaggtcacctttcataatggctgcacttctatttatagaaccagctgatgattgcacatggtcaactcggattcttcttaccctgagtgaatttataatgtcgctgcagcgtactgtttatccccacagtgagaagtggcgtgctctctcagtcccttcatcttcctattttcaggagctggtgggcaccagccaggaactggctctcaccttctggcatttactgtgagccggcctaacaggtgtgggcctggcctggctccacagaggcagtgcccctcagcagactcagactctgtc

SEQ ID NO: 6462 - DNA, 427 bp, Homo sapiens
aaattttcagaatgcaatacaatattattaactatagtcctcatgctgtgcattagattcctagaactatttatccaacagagctgcaactttgtaccctttgacctatttatgtcaatttaaaagtagaggagataactaaattttattaagcactgtctagtgaagctttatgctacatgcatatgttatcttattcagttttcccaactgcattgccttgtcatgtacataatgtataccactttttggattagaaaattggtatagagaaaatgttaagtaacatatccaactgacaaaaatccaagagttaattagtagaagaataacatatcaaccccagtcatctgagatccaaaatccaaatcatgtctttttatagggtgtccaactgactgggataccatttactacactgtcttca

SEQ ID NO: 6463 - DNA, 447 bp, Homo sapiens
aacatacactgaaggccagaagtgaactgtcaattatataaaaatgttttggaaaggttaaaaataactgtgaaagccaagagagtcttttgttgatttcaggtgtttcaacagtgcctacggattttacagatgtcacgttccctgtcatccgcatgctctttagatcagtggttctttaactgcgatgcccttaacagcctcgtggggatcctttaaaactccctatgtccagtctagcctcaaacaattaaatcagactctaggattggaccaggcagccagactattttcatcctgattgtgcacagctgggagcctctgctttctgtgggatgtgtaagctcacattgtgtaatgtcatatgaggagtacacttaataacaaaggttttttgtttgtttgtttgtttgttttgagatggagtcttgctctgtctcccaggct

SEQ ID NO: 6464 - DNA, 275 bp, Homo sapiens
aaacggcaacagcaagaagtggtagctactacaagcttgaaaaagggaaggaggccaggcatggtggctcacgcttaaaatcctaagctttaggaggctgaggcaggcagattgcttgagcccaggagctcgagaccagtctgggcaacatggtgaaactccatctctacaaaaaatgcaaaaattggctgggcccaggaggctgaggcaggggcatcgattgagtctgggaggtcgaggctgcagtgagccatgatcacaccagtgaaccccag

SEQ ID NO: 6465 - DNA, 455 bp, Homo sapiens
atggcattcttattcactatgggtagtataaatttagtatggcatagtacagtaagtagtatgacagtttccagtaaattttaggcattcacataatgcagtcagaagaaagtccacattaagataaatacactatagaaatttaggcacaatgcttatagcagcataaatatttagcaaaaactcaaatgtccatgaatgaatgaatgcatgcattaaatgtaatagaagatggaactattacatcagatcttcatttgtatcagcaatttaatgccttaatatgctattgagtgaaaacaattacagaaagataaattcagtaagatagaaaatcgcagcctggcatggtggctcatgcctgtaattgcagcacttttggagttgaaggtgggagtattgcttgagctccaggagtttgagaccagcctaggcaacatagtgagaccctgttt

SEQ ID NO: 6466 - DNA, 442 bp, Homo sapiens
tgagacagagtctcactctgttgcccaggctggagtacagtggcttgatctcagctcactgaaagctctgcctcccgggttcatgccattctcctacctcagcctcccaagtagctgtgactacaggcatccgccaccacgcccagctaattttttgtatttttagtagagatggggtttcaccatgttagccaagatggtctcaatctcctgaccttgtgatcagcctgcctcagcctcccaaagtgctgaaattacaggcatgagccaccgctctgggctgtgttctgccttttataatattcccctcataaagaatctcactactttgccttcacctgggaaaataaacaatacacctggactgttatgccccaacgatttactaaggccctacatatttctcatgaacctatttgatggagttaaaattcccagaaga

SEQ ID NO: 6467 - DNA, 340 bp, Homo sapiens
ggtggcatgcacctgtagttccatctgcttgggagtctgaggcaggagaattgctggaggtggaggttggagtgtgctgtgatcgcaccactgtactctaggctgggcgacagaggaagaccctgtctccagtcaatcaatcagtcaatcagtcaatcaatgtaagggtcttaaaccatccccaaagcaaaggagtctatgtttatgtcccgggcatcttaaccctccaattcaatcagtgtttattaagcatcttatagagctaagaattttgaaggttgactttaatagctttacctgtggagagtctcatggcagggaacatgagaggtgctggcgt

SEQ ID NO: 6468 - DNA, 498 bp, Homo sapiens
cggtaagtgaaataagccagtcacaaaaaggccaatactgaatgattccacttatgtgaggtatctagagtagtcatattcatagagacagaaaatagaatgattgttgccagcaactgggaggaagggggtgtgaaaagttgtttaatggatattgagtttgttttcccagacgaagaagttctgaaggttggttacatgatgtgaatatactaaacactactgaactgtgtacttagaatggttaagataaattttatgcgttttcactacaataacaagtagaacagtagaacagatgattagtcacagcagaaaagatgaaagataggtcaaaacaggttattagaaaatatccaaactgaagatgaagaagaaaatcatttttagtagaaaatatccaaactgatatataaagacataaaggaatttgtggaggcagaggggagataaggcaataaaggacatgtgggacacatccaaaaaaaaaaaaaatcc

SEQ ID NO: 6469 - DNA, 477 bp, Homo sapiens
tgcaccaagaaaactttatttacaaaagtaggtggcaggctggatttggcccctgggcccttagtttaccagcccctagtctacagcctccataaaattctccaatggtcaatgagctggaaggacttaaccactatgcctttatagaaaaacatgcagggaggttactcccaggccctcatcttctacgaaatgtctgctctttgtgaatgaggacgtaggacagtggccagactgcatgtgaattatctaacagagccggtggctctgggagagcgagggcatcaacagctcctcagcagtcctgggcccatggtgctgacaacatgtggcaggcaaccaaccaagcaggtccttcataaaaggaaaactcaggccgggcgcggtggctcatgcctgtaatcccagcactttgggaggctgaggcgggcggatcacctgaggtcaggagttcgagaccagcctggccaacatggt

SEQ ID NO: 6470 - DNA, 535 bp, Homo sapiens
tagaatcttcccagcctccctcatcctcccgagtctccctggggggcatttaacacactggactctaattgaggggtcctttctctccagatcctgagctctttgagggcagggacttcctcatccttgtgtccccaggacctggcacattgggtgctcatccaatgttaacagaacctaaacagaaaccatcaacagattcaaaaaggacatccaggcaccgtacgttagggcgtcgagcctactggttcactctcgtacctctgtactccaggaggtattctgagtgtcgcagaatcacatctactgtcagggagctgcagtcaaaggaaaccaaggactggaaggaagagttgcactgaggaggggcagagtcagctccttaacctccctaaggcttctcacagtgagccctctagaaaggtttatttatttatcttttacttttactttttgatttgtattatttatttatttatttatttgagatcacgctactgcattgcagcctgggcgacagagcaagacatcatct

SEQ ID NO: 6471 - DNA, 336 bp, Homo sapiens
atttgacagtttggatcacactgtcatactgtcaccaagaactcaaaccaatgcccagtgctcttaggtactggcttgctgtaaaagacatatcttgagaggccgaggcaggcggatcgcaaggtcaggagttcaagaccagcctgatcaacatggtgaaaccccgtctctactaaatatacaaaaattagctgggcatggtggcacgcacctgtaatcccagctactcaggaggctgatgcaggagaatcaccggaacccaggaggcggaagttgcagtgagccaagattacgccactgcactccagccaggggacagagcaagactctgtcaca

SEQ ID NO: 6472 - DNA, 417 bp, Homo sapiens
aaacaagaaggtggtgctcaatatatattggttgatttgactgttctatgctagataaagccaatgcaaaatcgtgtatatgtaacacaaccgtgccaactatcaagtgtccattatgtgctaggcatattgtcttcaaagctcatggcctctctgtaaagtaaattatatcaaccttttttattagatgaaaaaactctggggctcagagagtttaaacggttgaaggaggtcaaacagtaagtagcagagattgggacctaattaacataggttggaaaacactttggaaaggttgatttaaatgatttgtacaatgtcaaccctgggtgaatttaaagagcatgggctatgtcttgctcaaggcgcaacttcttccctcaattcatgctaccttttggcttttcttaaaaaaaa

SEQ ID NO: 6473 - DNA, 449 bp, Homo sapiens
aattctgcctcagcctcccaagtagctgggactacagatgcacactgctacacacggctaatttcttttgtattttagtagagatggtgtttcaccttgttgctcagtctggtcttgaactcctgagctcaggcaatctgcccatctccgcctcccaatgtgctaggattacaggcatgagccaccgttcccggccaaatataaattttaaattagtaagtgtctaattagggttatattactgtatgtcagagccttgtagttttctatttgaacacaaaaatgtacaatttaattcttatactctttccaaggaattaagttactagaaataacttgctttaaaattctttcacttataacgtggttccatggcatgaatcactaagggtacatacttattcttattcacaaaatttccctctatggcttttctaaagtatgatagc

SEQ ID NO: 6474 - DNA, 327 bp, Homo sapiens
ggagaataaaagtaagcatttgttctctcctcagctgactttgaggtaaacaaaaatgcttttagaatcccagaatcaatcaaactataaaacataattacagtatataattcagtgtacaacatataattcaattgaagtaaaagaaaaccgagattttcctatctggaagtctgatttgctttataccagaagcgctctactcccgcgggctgaatggcctaaggaggccctgtggagacccccatcttctaccacccgctcccccgagcccagtgttcttcttccccccaggctctcactcatagatgagctctctgagctccc

SEQ ID NO: 6475 - DNA, 379 bp, Homo sapiens
aaagcaggaaacaaattatgtacaccttattacaattgtttcatattaaaaacaaatgcattagtgaaagattagaagggaatataccagactactgtaacagagattttgttagggtactacatactttctcttttaatttttctataatgtggttatattgtttttataatgaaaaagacacagggttaaaaaggaaatttcagtgtctgacatgcttggagaagattctagagcacttctagatttctagaagtacttggacctgagatttcgtctgccaagccaagtactagcattcagttctataaagcaagtaacagtatcctttacttcactcttaacagtttctttttgaaaaaacagactccaatgtaaa

SEQ ID NO: 6476 - DNA, 457 bp, Homo sapiens
attcgcggccgcgtcgacccactcactgcctgacttcctgttctgcgcatgggctcccaggaagttaatatacactatggacaggtagcaagttatggacagatagcaagatagccagttaatatactctatggatgacccagcaagtttgctgtttcagaatcctcctcttctgttttttgaactttcgaaaacaaaagatgtgctgggagacgcggcccctagagtgtgcttactccaggtccttgattgtccagactgtggagggggaagggcagatctatgccaagaggggaacaggctgtagaggccacagctgattcatttttgtgaccttagcactctgcccagcacctggaatatagtaggtgctccataaacctgtgttcaaggagagaatctgtccatagcatatgtattaatgggacctttatagtcaatggacatccttagaaat

SEQ ID NO: 6477 - DNA, 623 bp, Homo sapiens
agaattgatggaagccatgatcatcagattcaggaaaaatggcaagttccacacaagatagacacagataaagaaaaacctagacatagtgaaactgcagagaaccaaagaaactaacttgcaaaaacaactggagacaatagattattgacaaaaatcactgggtggattagctaatgcctataatcccagcactttgggaggccaaagtggaaggatagcttaaggccaggagttagagaccagcctgggcaacataacgagatgctgtctttaccaaaaataaatcatttctttttaatattgttggatttgctttgctaatattttatggagaatttatgtgtctaagttcatgaaagatattggcctgtacttttttttggttttgactggtttggttatttggcaatagcaacctcataaaatgagttgaagtgttctctcaccttctgtattctggaatattatataacattggtgttaattcttctttaaatatttggtagaattcaccagtgaaaccatctgggcctggagatttattttatgaatctttaaaattatgcatgtaattgttaatgatgataaaactattcagattttctgttttatcttgtgtt

SEQ ID NO: 6478 - DNA, 413 bp, Homo sapiens
tagaaatggggtctccctgtgttccccaggctgatctagaactcctgggctgaagcagtcctcccacctcagcttcccaaagtgctggtattacaggcatgagccactgtgcctggcaaccctatcctttctctctgttttacaaataatccgcaaaacaaccatcatcataaaattgtcctccttttatactctggaagataagtcaggagaattgtgttgttcaaggccagcctgggcaatacagcaagacccccatctctttaaaaaaaaaaattgtgctcctttccacctatgattttttttaatttttaattattatttgtttttaaattttttttagagatgaggtctcactctatcacccagattagagtgcagtgctgcagtcgtagctcactgcagcctcaaac

SEQ ID NO: 6479 - DNA, 645 bp, Homo sapiens
ctgtgctttccaatttgccccagtctccactgctccctattgctctttggctctgagtcactgtttgtcatcacgctggtcccgttgttcttcttacagaggtaagaggagagtgagatatgtcttactcctcttgttacttgtccctgagagcattgaatttgcaacctttagataagatggcatgtatcttccccagggcctcacgggcatcccaaaactcaacaggtcccaaaacaaacccctggtttcacccatagtctctgcccccccatcacaagtttccccatcttagtaaatggcagcccccaggaatcccagaacttcaccccaaacctgggggctctctttgactcctgtctttcaccagctcccctcgcccccattcgatccagcaaaagatcctgccagctttactttcaaaatataattaaaaggttgggagcgtggctgcccttgggggaggggcagtgatttggagggggcttctggggacttctagggggatggacaagttctatttcttgagcttgatgctggttatgtgggtggattgggtttgtaaaacttcatgaaactgcaggcatgtttatatgtgtacttttcagtatttatgttgtacttcaataaaaagctgtgaggcca

SEQ ID NO: 6480 - DNA, 372 bp, Homo sapiens
ttgagacagagtctcactctgtcacccagactggagtacagtggcttgatcttggctcactgcaacctccgccacccggattcaagtgattctcccgcctcagcctcccaagtagctgggattacaagtgtgagccaccacgcctggctaatttttatattgttagtacagatagggtttcaccatgttggccaggctgatctcgaactcctgacctcaagtgatccacctgccttggtctcccaaagtactgggattacaggtgtgagtcaccacacctggccatttttgaactttaaataagtggaacctacatatctatctatctatctatctatctatctatctatctatctatccgtctctctgtct

SEQ ID NO: 6481 - DNA, 400 bp, Homo sapiens
tgcatagttgattttaatctagatgattaaaaggataagtgctggtttttaaagcactgatttggataaataacatcatcactcttggagagaagtagagaagagccatcctgcaaagtaggagcaattctctgtgcttctcctttcattccgcccactgcagagggggccaggcagaggcagaaactgggaaggaggtagccttttcaggaaggcagatttaaagggctgaatttaaatacatcaatgattgaaaagaccctatcccaaattttttattattattattattattattattattatttgaaacagagtcttgctctgttgtccaggctggatgagctgagatggcgccattgctctcccagcctgggtgacaagagcaaaactccgtctc

SEQ ID NO: 6482 - DNA, 362 bp, Homo sapiens
aaaaaaatttaaaaaaataaaaatcctgctgggcaaatatatgcagggttctttgggctgggacttgagacccacccagcatctgtggcattcctgcatggcttgtgccaataatatgtggcaggggcattacagaatcagtgtataaaggaaattgtgtgctcatttggagttcgcttgtcaatgtcagtgatgactatcacttgatcttagccaaaagactgaaaagcaataatgatgactatcactattcagagctgtgctgcccaatacgtagccattcatgaattcaaattcaaattcaaatttaattacaattaaataaaattttaaattcatctttctcagctggattctgagaa

SEQ ID NO: 6483 - DNA, 342 bp, Homo sapiens
tcattaagagtgggggagggtggagagatgaatcaacggcaaagaggtaaccctgcagctcccactctccactgagctctgaccttaaagttcggtcaggttccttaaggaaaagaatgtatcgccctccccccacctctcccagctggggcctctcgaacaacctcccctcccccaaactcagcagaaattgtatggggaaggaaacgccagcagctgggcagggaaaagttgccgctccctaaacttgctgatgaattagtagaggcttcagctgtttcaggatgtgtcttctggtcccccaagcccgacatgggtgcttgagctcacagttcacctgga

SEQ ID NO: 6484 - DNA, 87 bp, Homo sapiens
tgctgccattattaaactttttccagaactatgggattatgtgattattttgatttttaaaaaactagaataaaatattgatatacc

SEQ ID NO: 6485 - DNA, 379 bp, Homo sapiens
ctaaattttgttcatttaagtttgttctttctgctgggatcccgggggaactttcccttataataaaagctgaaggatgtccagattatgctcttctcctccatctgcctgttaagtccttaatctcctacacctgggtgttctaatcctttatttgctttaagtaccaagtggttccaagtcggacaagttctgtgtccaatatgccaagtaagattcattgtgccatagaagggcatgctactccccaagatctcctggagaataaagtgggttgctgttcacaaatggacctgctggttttaatgcagcccagttaataaatggcattcactcagcatacagccaagagtactccattgattggcagcaggaagct

SEQ ID NO: 6486 - DNA, 308 bp, Homo sapiens
tctttctgtgctggagaaacacgatctgtctgtcacagaaagcttgggtaattgttaaaccagtgtttagctacataccttgatttgtttggggcctaggatccccctggaaaagagcttcaacgctgaaaaccaactggaattcagacatctaaggtcatgtgttaaagactgtgaggatgggggtttgtggggctgcagaaaggaaagctagactgtaaagggcaacaacaggttccctgagagaaaagtccccacaagggagaatattggcctcgtggaaatctagaccagcaacttcaatagaa

SEQ ID NO: 6487 - DNA, 1376 bp, Homo sapiens
ttcactctggagaaaggccacatgagtgtggagaatgtggaaagtgttttcgtcaaaagggaaacctcattaaacatcaacgagttcacacgggagaaagacatcatgaatgttgaaaatttggcagatctgttggtaaaaagagcaccctcattcaacattcgtgagatcacactggaaagcacttatgagtatggagaatgtgcaaaatcatctagccaaaaggttggcctcattcaacaatagcaagatcacactggggaaaggctttctgagtgtagagaatgtatgaaatcctgtacatagaagttttgcctcaccaaataccagaagggtcacactggagaaagaccctatagttatggggaatttgggaaattacctaacaagaagtcccacctcactgaacactactgagttcacagttgagaaaggccatatgactgtaaggaatttgtaaaattatttagccagaagagctgcattactattcatcagataatttacaatggagaaaggccacataataatttctcacataataaatgtgagaaatcatttccgtacagctctgcgctccatgttcgtaagagttcacactggacaaagccttatgagagcagcgagtagaaaatcctttgtgggaaaactctggtttcattaaacacaggagagttcatgctagagaaaggcctcaacagtgtagcaaatatggaaagacattcactagaagctctgccctgcaagttcacactagagaaagcccttctcagtgaagtaaatttggaaaattgattagtcaaacctctatgctccttcaaaatcagagttcacactggatcaaggctttatggtgtgacaaatatggcacattctttatctaaatgtctaacatattatgcacagacaagctcctgctgtggaagtgccttttgagtgcagagcatttgcgagggcttcactcttctttcactggataccagaatgttgacaggagaaaaataacatagatgtgtgggaatattacttcttgtccagtgtaactgtgggagagagcccttatgaggacaccatcaacctatattgaatgtcatatgtccagtagctgcataaattccaggtatatgggagctgtattgcatttcttatcctgcgtatgtccttgccagatttatttcattcttaggtctctggcaaaagccatttcatctctaccacttggcaggtacctacagtgcatcactcatgcactccatcatattccagaaaaaaagttcaagttgtctcccattcagcagtggtatttttgagtagcctctgcactcgttcctttctcatttctctatgaagagttaggccatggacctgactcagtt

SEQ ID NO: 6488 - DNA, 1440 bp, Homo sapiens
  misc_feature (407)..(407): n is a, c, g, or t
ttcactctggagaaaggccacatgagtgtggagaatgtggaaagtgttttcgtcaaaagggaaacctcattaaacatcaacgagttcacacgggagaaagacatcatgaatgttgaaaatttggcagatctgttggtaaaaagagcaccctcattcaacattcgtgagatcacactggaaagcacttatgagtatggagaatgtgcaaaatcatctagtgccaagaagcgttgtgctctcacttgcgaaccaataggcagagatccacacgtggcgcgaaatggctattactgatgcttgtagaagaactgctcatgacaactccgtagtagccatagtaatgtcttgtgcgctcgaccagagatatccatgagagtggtccacgactcgtacgatatagaaccatnaatagttattgggggaacttgtgaggaacattaccttaatcccgagaaagtcccacctcactgaacactactgagttcacagttgagaaaggccatatgactgtaaggaatttgtaaaattatttagccagaagagctgcattactattcatcagataatttacaatggagaaaggccacataataatttctcacataataaatgtgagaaatcatttccgtacagctctgcgctccatgttcgtaagagttcacactggacaaagccttatgagagcagcgagtagaaaatcctttgtgggaaaactctggtttcattaaacacaggagagttcatgctagagaaaggcctcaacagtgtagcaaatatggaaagacattcactagaagctctgccctgcaagttcacactagagaaagcccttctcagtgaagtaaatttggaaaattgattagtcaaacctctatgctccttcaaaatcagagttcacactggatcaaggctttatggtgtgacaaatatggcacattctttatctaaatgtctaacatattatgcacagacaagctcctgctgtggaagtgccttttgagtgcagagcatttgcgagggcttcactcttctttcactggataccagaatgttgacaggagaaaaataacatagatgtgtgggaatattacttcttgtccagtgtaactgtgggagagagcccttatgaggacaccatcaacctatattgaatgtcatatgtccagtagctgcataaattccaggtatatgggagctgtattgcatttcttatcctgcgtatgtccttgccagatttatttcattcttaggtctctggcaaaagccatttcatctctaccacttggcaggtacctacagtgcatcactcatgcactccatcatattccagaaaaaaagttcaagttgtctcccattcagcagtggtatttttgagtagcctctgcactcgttcctttctcatttctctatgaagagttaggccatggacctgactcagtt

SEQ ID NO: 6489 - DNA, 1148 bp, Homo sapiens
gaaagcagagcagagacagtcaagtgttagttatacttcagtggaagtctcaatacaggtacatgcgtgcgcacacccacaaagcacatcaagaaaggggacccaggagttccccaccaacaaaaagattttgtttctcccatcagcttttattctgctgaaagtcattagagactattgaaattttttatttttaattatatctcaaagtggattgatactgcagttggtgaagtagattccacagtaaatatgtgagtaggtgtttcagaagtactgactttgattttttggtagcatttgagataatacaggttttactctacttctaaaaatattttatttaaaagaaaaatgaaatgaaggtttatataaaaaggcatcacagttttggactgttttactctgatatttagaattgtttcagatggattttttagatctgatatgttttactggtgtagaatattggcaggctgtatgaagaaaacgtggaagagattttggctttccttctctctgtgcctatctcctattatatttcttctcactccctttttaggtttgttaactaaccataatatggaatacatattgttatttctcacatttctagaatacatctttgtgatctgcatttattttatattcaattctgattactatattctgtattatagctgcttaaagatgtactccaatcttatttccatttttaaatgactataattttagcttatgtttatcacttttttcagttcaattaagaaaaaagtttctgcccatatgtatgtactacctgaagctttcataaaatgagcacttgagacactgtgtaaaatgtatagaatcctggccaggcatggtaactgacacctgtaatctcagcattttgggatgccaagttgggaggatcacttaaggcctggagttcgagactagcttgggcaacatagtgagacctcatctctaaaaaattattttttaattaggcaagtgtcgtggtacacacctgtatttctagctacttgggaggctgaggcaggaggatcacttgagcccaggagttcaaagttacagtgagttattattgtaccaatgtactcctgcgtgggcaacagattgagaccctgtgtctttaaaaaaaa

SEQ ID NO: 6490 - DNA, 465 bp, Homo sapiens
tggctcacgcctgtaatcccagcactttgggaggccaaggcgggtttattaaaatatattttttggctaagagcaaaaacctcattgtttaatgaggttttcaatgtatgcagaagtaataaaagacaagtaggatgtaaagggagaagaataaagtgacctaaaatggtggtaagattcctcctacattccagctgaggtggtaaaatattgattctaagtatactgtggaaagttaaggatgtacactgtcatctctaaaaaaataaaattaaactatacaaagatgcagagtcaaaatcacaataaattaaaatggaagactaaaaaatgttcaaataacccaaaaagcagaagaaaaagtttcccttgaaaatcacaaaatgctaaaactcacccaagataagaaagataacctgaatagtcctgtaattgtttaagaaattgaatttgtggtttaaaatc

SEQ ID NO: 6491 - DNA, 360 bp, Homo sapiens
agagagagagaaacctaagatatctttgagatttgtcctatgtaactacatggatgatggtatattttcctgagataataaattttgaaggtagagtaggtgtgggggtgttgagttcaattgtgatgaatgataactgcaaggtgcatgagtgacttttcagctgctgtggagagtgtgctactgggcatagggccctggagcttagcagggatgtgggtatgtgtttatagatgaatttatagatgatagttacatgtttgcagatgaaactgcctaggcagtgtggacaagaagaaaaggcaaagggtagagccttgaggtacaccaacattcatggagggcacactagagaatcct

SEQ ID NO: 6492 - DNA, 363 bp, Homo sapiens
atttgacaggaacatgcaggtacctcagtggcccaattttgagaaatagagggaattttttcatcgtaaggatggtagattaggtcctaggtgagtaatgaaaagaaggctgaaaaacaaaattccttattagaaccagaagtgttaacctgacaaacacattcattcaaactctttagcacgtgaaatatatatatgaaatacatatggtactcattttcccttaaaatgagccatgattgaaaaaagaaacaattttacattctcaaggttggaaatagaggaagatatgcattggcgataatattgatttaaaaaaaaatctgctgaaaggctattattagacatagattatagttacag

SEQ ID NO: 6493 - DNA, 372 bp, Homo sapiens
ttgcagtgagccgagattgtgccactgccctccagcctggcaacaagagtaagactccatctcaaaatagtaataataataataataatacccatcatataaggttgctgtgggaattaaatgactctgtacagagaacacatagtgcatggtttcatacatagcaagaatacctgaagatcccaaggaaatgtcaattccacggccacctctgggtgctcaagggctgagcaccttcaccagcagggcaagcctggtccctttcctctcctataaccttccttttgatcacactacacctcaatcagctattccaaggggcaaacatgcttctctagagtgcaacacgcttagaggcaggttcttagagag

SEQ ID NO: 6494 - DNA, 456 bp, Homo sapiens
tacagaatgaagtagtgactttctggaaaggaattggggccactggaaagggtatgggttccacatactaccagatctaatgattctattaatagtctatcagtgaggattcattcatttgcataccgcctccttcctgaagggatttaaggcatctttctaaaagcaaaatgcagcttggcacagtggcccacgcctgtaatcccagcactttgggaggccgaggtgggcagatcccaaggtcaagagatcgagaccatcctggccaacatggtgaaaccctgtctctactaaaaatacaaaaattagcagctgggtgtggtggtgcacacctgtagccccagctacttgggaggctgaggcaggagaatcgcttgaacctgggaagcagaggttgcagtgagctgagatcgcgccactgcactccagtctggtgacagagcgagactctgtctc

SEQ ID NO: 6495 - DNA, 973 bp, Homo sapiens
gagccaaagccttcactggggcccagggtgtcatctatgcaggtttcccctggaggttctaactggggggtttagagcaagcaggcatgagccccggggactcacgctgtgactgagaggggtcggtgtgggtaggatatcggcatggtccatgtgggtgtgggggtcagtgggacaagtcaagcaggtggtatccagctgtccatgggaaggtggtcccaggaggcggttttgtaaggcagatgtctggatcgaccaccttggggaacagtgagaagttgtataactggaaactgtgttactaatccctgcttctagtatgagaaagtccaacttacattcaaatagatgctcaggaaacataaaattcaaagaattcccaaacttgagcttcctgagcctcagtttttgcatctgtcaaatgggtatggggagaccctttgcctaatgttgagagaatccaagcctgagcagggctggtctactgtggacacttagttgtggaccccaacaggccaaagcccttgcctgctgagggctgctcccaggaggcctcacacattcatccggcctcccaggaaacccctgagatgtgctgggcttttgccgtggaacggtgtcggtgagcatgtggccagtagccagagtcttcaacataggtgggaggtctgaaattcgtgcgagaatgaaccaagggtgtggctgtatccttcatggtgagcttggggcctgggcagccttccctctgctgagtcctttggtcaaatgtcatggtgttctgaaccagcactgcagatagaagtataatgtaagtcacacacgtacttctttaaaaagatatgttcttcagtgactattagacaaacagataaatgaaggtaaagggaaaaaatggcaactttagcttttttccccatgtatgtaattttaaattttcttatagccccattaaaaaaaggaaagagacacaagt

SEQ ID NO: 6496 - DNA, 402 bp, Homo sapiens
cctatatctgtgagctggggcaggggagagtggagggtctggactggcccaatttaacttcatttaccacactttaagaaatcttccccaggctgggagcagtggttcacacttgtaatcccagcactttggaaggtcaaggtgggaggatcacttgagcccaggagtttgaaaccagcctgggcagcatagtgagaccctgtctctaccaaaaaaaaaaaaaaaaaactgggtatggtggcacatggctgtggtcccagatacttggaaggactgcttaaacccacaaggtcatggttgcagtgagctgtgatcatgccactacactccagcctgggtgacagtcagacctgtctcaaagaaaaaaaagtcgaccggccgcgaatttagtagtagtagtag

SEQ ID NO: 6497 - DNA, 1483 bp, Homo sapiens
aagaaccttcagagaaacccaccctctgacaggctctgcccatgcccacaaagatctgagctgcttggctggttgtttttgtaacaggcatgctctgttgctattttttaatgacaggaggaacttggtgtacctggcactttgggctgcacagacgcattagcagactcaccttgtcctgtttcatccctcgccctccacaatttcttattttctttctttctctttttattttttgagacagagtttcactcttgttacccaggctggagtgcaatgatgcgatcttggttcaccgaaacctccgcctcccgggttcaagcgattctcctgctgcagcctctcggtagctgggattacaggcatgtgccaccatgcccggctaattgtttttgtatttttagtagagacggggtttctccatgttggtcaggctggtctggaactcctgacctcaggtgatccacctgcctcggcctcccaaagtgccgggattacaggtatgagccactgcgcccagcccacaatatcttattttcatgtttttttgtgtgttttgttttatttttcgagatggagtctctctgttgcccaagctggagtgcaatggcgcgatcttggctcacttcctgggttcaagcgattctcctgccttagcctcccaagtaactgggattgcaggcacccaccatcatgccctgctaaattttgtacttttgtagagatggagtttcaccatgttggtcaggctggtcttgaactgctgacctcaggtgatctgcccaccttggcctcccaaagtgctgggattacaggtgtgagccaccatgcctggactcgttgttgttgttgtttttaattagtgaggagctacaagaacacatttataaaaattaagaggaaacagccccactgcatttgagaaggttaccatttccttcgaagttcctgctgttgccccttcctggtgggggagacactgtcctgtttcagtcattccgttgctttgctttatagttttattaatgtgtttgtgttggctttgcatgttttcaaatatatgaatgaaatcatgcagagtttattcttttacagtttgccttttcacttgattatgttcctgagatgtatccggattattgtgtgtagctgtatggcattccttttccctgctgcctagtgatccattgaaaatacaataattgatttttctatgtggttccactggtcatttttctgcccctgtgccctttgggaatcatctcctaaactctagtctcggcccttgctcttccatgtaaccttgagaatcagcttgtcaaattccccccaaaaaccccttgagatgtagaatggaacccagctgaatctatagatcagtctggataaaatcagcacctgtgtaaaattgaattttcccattcatgagcagggtttatttctgcactcaatgttttcaataaagttgtgtaccttttcccat

SEQ ID NO: 6498 - DNA, 692 bp, Homo sapiens
agtagagacgaggtttcaccgtgttagccaggatggtctcgatctcctgaccttgtgatccacctgcctcggcctcccaaagtgctgggattacaggtgtgagccaccactcctggccggccagcatggtcttgatctactgacctcgtgatctgcccgccttggcctcccaaagtgctgggattacaggtgtgagccaccgtgcccggccgcctggctgacattttcaaagatggaaagtggatggagaattaagagctgaaattatgtgttcccaaaaggtggggccaaaaggcaagtggaattacctgccagagccccggaggggctcaggaactccacaatttcttattttctttctttctctttttattttttgagacagagtttcactcttgttacccaggctggagtgcaatgatgcgatcttggttcaccgaaacctccgcctcccgggttcaagcgattctcctgctgcagcctctcggtagctgggattacaggcatgtgccaccatgcccatctctactaaaaatacaaaagaattagccaggcgtggtggtgcatgcctgtggtgccagctacttggggggctgaggtgaaaggatctcttgagctcggtgagttgaggctgcagtgagctatgatcatgcccctgtattccagcctgggaacagagtgagaacctgtca

SEQ ID NO: 6499 - DNA, 660 bp, Homo sapiens
agtagagacgaggtttcaccgtgttagccaggatggtctcgatctcctgaccttgtgatccacctgcctcggcctcccaaagtgctgggattacaggtgtgagccaccactcctggccggccagcatggtcttgatctactgacctcgtgatctgcccgccttggcctcccaaagtgctgggattacaggtgtgagccaccgtgcccggccgcctggctgacattttcaaagatggaaagtggatggagaattaagagctgaaattatgtgttcccaaaaggtggggccaaaaggcaagtggaattacctgccagagccccggaggggctcaggaactccaccaggaccatggagggtgaggtgaggcttcggccaacaatggggaccgatggaaagtctatgtaaggatcagtggggtgccgctcccccacatcccacccacaccccacccacatcatgcagccagcagctacacctctgggtggggtggtgtgacgtgaggattatttgaaggataaatggaaccagagaagcttcgggtcttaggcgtactggggagggtattattaattttatggtttaattgggagttttgaattttttatatatttttatatatatttaaatgttttaggaattatttttgtttttaataattt

SEQ ID NO: 6500 - DNA, 623 bp, Homo sapiens
agtagagacgaggtttcaccgtgttagccaggatggtctcgatctcctgaccttgtgatccacctgcctcggcctcccaaagtgctgggattacaggtgtgagccaccactcctggccggccagcatggtcttgatctactgacctcgtgatctgcccgccttggcctcccaaagtgctgggattacaggtgtgagccaccgtgcccggccgcctggctgacattttcaaagatggaaagtggatggagaattaagagctgaaattatgtgttcccaaaaggtggggccaaaaggcaagtggaattacctgccagagccccggaggggctcaggaactccaccaggaccatggagggtgaggtgaggcttcggccaacaatggggaccgatggaaagtctatgtaaggatcagtggggtgccgctcccccacatcccacccacaccccacccacatcatgcagccagcagctacacctctgggtggggtggtgtgacgtgaggattatttgaaggataaatggaaccagagaagcttcgggtcttaggcgtactggggaggggtgggtgagaggctagaccaaaaaatggggttaagtgaaagtccatagatactgctggggg

SEQ ID NO: 6501 - DNA, 1624 bp, Homo sapiens
agtagagacgaggtttcaccgtgttagccaggatggtctcgatctcctgaccttgtgatccacctgcctcggcctcccaaagtgctgggattacaggtgtgagccaccactcctggccggccagcatggtcttgatctactgacctcgtgatctgcccgccttggcctcccaaagtgctgggattacaggtgtgagccaccgtgcccggccgcctggctgacattttcaaagatggaaagtggatggagaattaagagctgaaattatgtgttcccaaaaggtggggccaaaaggcaagtggaattacctgccagagccccggaggggctcaggaactccacaatttcttattttctttctttctctttttattttttgagacagagtttcactcttgttacccaggctggagtgcaatgatgcgatcttggttcaccgaaacctccgcctcccgggttcaagcgattctcctgctgcagcctctcggtagctgggattacaggcatgtgccaccatgcccggctaattgtttttgtatttttagtagagacggggtttctccatgttggtcaggctggtctggaactcctgacctcaggtgatccacctgcctcggcctcccaaagtgccgggattacaggtatgagccactgcgcccagcccacaatatcttattttcatgtttttttgtgtgttttgttttatttttcgagatggagtctctctgttgcccaagctggagtgcaatggcgcgatcttggctcacttcctgggttcaagcgattctcctgccttagcctcccaagtaactgggattgcaggcacccaccatcatgccctgctaaattttgtacttttgtagagatggagtttcaccatgttggtcaggctggtcttgaactgctgacctcaggtgatctgcccaccttggcctcccaaagtgctgggattacaggtgtgagccaccatgcctggactcgttgttgttgttgtttttaattagtgaggagctacaagaacacatttataaaaattaagaggaaacagccccactgcatttgagaaggttaccatttccttcgaagttcctgctgttgccccttcctggtgggggagacactgtcctgtttcagtcattccgttgctttgctttatagttttattaatgtgtttgtgttggctttgcatgttttcaaatatatgaatgaaatcatgcagagtttattcttttacagtttgccttttcacttgattatgttcctgagatgtatccggattattgtgtgtagctgtatggcattccttttccctgctgcctagtgatccattgaaaatacaataattgatttttctatgtggttccactggtcatttttctgcccctgtgccctttgggaatcatctcctaaactctagtctcggcccttgctcttccatgtaaccttgagaatcagcttgtcaaattccccccaaaaaccccttgagatgtagaatggaacccagctgaatctatagatcagtctggataaaatcagcacctgtgtaaaattgaattttcccattcatgagcagggtttatttctgcactcaatgttttcaataaagttgtgtaccttttcccat

SEQ ID NO: 6502 - DNA, 279 bp, Homo sapiens
  misc_feature (3)..(3): n is a, c, g, or t
cancctccactccacctcccttcctcctgcgatcgtccacaccacctccatcctcctcatccagcccccatctgaatcctgtaacagacacaaccacatctacacagtttccacataccacttggaattgctggttatgctgcaatgagagaatgtctttgtctttaaattgtaagcttcatgagggcagggaccatctgtttctctgtctctcctcacagtgccttgagcagtacgttgtctggaatgtcagaaccaataaatacttgtggattgaaa

SEQ ID NO: 6503 - DNA, 3797 bp, Homo sapiens
gagccagcctctgggaccgaggaaataccagaaatagcccaccaccctacgggtttcatctctcaccagaagaaatgaggagacagcggcttcacagattcgatagccagtgaggtggcatcttgggaagacatggcctattcgtgtaattattgcccatttggctcattccccaagcccctaattcattttaattcattttaaacaaaagcagagtacaccggtattgctccagatcgctcacatcacctgggacagtcccatggcccctatgagtcaactcacagcttgcggggagtgggccttctcctggccttgttcttgctcataaacaggtcacttcctccatgaagagaccagtttccacgctcccatctctcactgctgactcagcgatgcctctgcctcggtctgcttttgaagactgtgaccttcaccaggaggttttacttacaccagtcgggaagattagtccctcattctgcctggagtgccccgtgtttgacttggcagcgggtgtggagccatccccgcgtcctcctggcgcattgccactgtggctgtccaggaacaggatgtggctgccttggccgaatgttgtcctactctccccaaccccggcgcctcagctcctcagctcctcgggcccctgcgtctggctggtgtttgcagggctttcgctctgctctggtattgctctgcctttatagaaagtcttattgaagaagtgtaagaaagacctaaggtggggaagactcctacacacaccattagtatcagtgacaccagcaatgtaggttcccagccccttcccagtggcagcttgtgtgtccaggagataggacatcatttaacgcatcagcaaagtagcagcagatgccacatacagagtagagcgaaggcatttggtggatcggtcactagagatctatcttgcagaaagtatgtttttcctcataaaagtgcctcttaattggccattgtaccagccacttgtcctagccaaatgtccaaaacacgcccttgggccccgccacgttacaatccacagattgtctgtctgagtcgtttaaggcatttcctggtgcttgtgttccatgaataaaaggacaaagtcagaagatcactgatgtcttactgtcaacagagatattttaaaagagagaagcaggaaaagatcttccttttttgatctacaacttatatagttttctgattatgcacataatagatatgccttccagatgcataaggcaaacatctggaaagaaatatacccaaatcttagcaggggttatctttgggagtggagtacatgggattttgctttcttcatttttataattttatattactgtcttggaagatgtgtttatgtgtgtgtgttacttttacaatcaggaaaacatatttaataacatatagtcaagaaaacagacttaaaaataaatactatgtgtccattgagaaaattcacaatataaacagaaatacaaataaatacatacacaattttaaagtcacctgtagccctacccttagaggtacccagggttaacattttggtggtattgtcttatcaatttttccgttgatacattcagcaaatttggagcacattgaccatggagttttgtgtccaaatccaatctgaatttacctggaagaggccttgacacctgcatggaaatgagctaagaaaaccactggagccttgggagctctttggcctcctggctggcccagtaatatctgagctcctttggttaatttataactgatataaaactacatcttctttataatataaattgtacctgtgagtctagaagctttaaatgtgtttaaattaaaatattcaagctaaatgttactgctctctcccaaattctgtaagtttgactcccgttaccccaattagaagtaacttctttgtttcatgccacttttatagcatttggtaattctgctataacacatcttgcccctattattaactgtgcacagctacacaaaggtgtgccttctacgtgggaacatggattgtgaatgactctgtaatgaggcctgagtcttagttatctttccactcactccccgtctcccctttccaaccccaaaggctcacgataggggctcactaaatgtcagtgtttcaccaaagtattttttccattgtattaagagtccagtcactgtatatggaagtattttattttttatttttttatatcacttgagtccactagtagtacttccttgctctgtttgacttgtcagatacaaagacacgggattagattttgggtggtaaaattgtgatacgcatggctgttgatggagtggaacatcttagtgatgtgagaaaggtcattttagttataaatgtaaaccaattactttagcacaacaataaagatgttctggaaattattataaaaaaaaaaaagttaatggacttgcctgtaacaagtgcttatgtttggaatgtccattttattttattttcctctacaataaggaatccctaaagttatgccaacaaactggaattggattgagaaagacaaaagcaagtgagcaagtgtattagactaattatctctagtagggaataagcacttagagctaattttttaatttggtttatttattagtagctccctgattgtctgttaagcccctggttcccacagtttggtgtggtcagtcaacttaagcgaccttttaatgcagaatctttacttggttctgaagaggaggcagtagttaaaattgcttcctcttaatgactctgaatgtattgcctgtgattccaaagttgtacataattgttcagacctcctccatccttttaaattgcctgctgcagtaaataactagtttgagtagaactagatcctgtctatctatttggcacatgttctgctgcctggggagtaagcaagctaaagggatgagaaagaccacctccccctaccctggaaattgcactgcaaggcagggcgagaatggggtagctggcagacctggcctccttgttcccagtcttagtttttcttgagagattcagtattcagtaaagaatagcattcaattagtcaaaaaatatatatataacttcttcctttcccttcccatgaatcattgcagtcattccctaagtttcttctctttttttttcatggctgctagtattttattttagaatcacagactctcagcttagagagtcacagtatctcaattatttgctctgttcaatacttaacaatacctcctcactcaattctacataactccagcttagtcttccaaaattcactttcatgatgccactcagcatctcaaatacctttcattggctctctgctgccaaaggataaaggtcaaagtcattagcctcaacagtgggcttcaaccagcctttggacctcagccccatttatccatcacagaggctggtaactagtctcactgctcaggctgtgagtgttcctgatcttgtgacattctgtgctgtgcttttacatggaacagctctttcctctctcttggcccattcagatcctcctcatccagcccccatctgaatcctgtaacagacacaaccacatctacacagtttccacataccacttggaattgctggttatgctgcaatgagagaatgtctttgtctttaaattgtaagcttcatgagggcagggaccatctgtttctctgtctctcctcacagtgccttgagcagtacgttgtctggaatgtcagaaccaataaatacttgtggattgaaa

SEQ ID NO: 6504 - DNA, 1641 bp, Homo sapiens
ggcaggacgaggccggggtgaatcggccgagggcctgtttgactgtcagatacaaaatctaatcccgtgtcttgtatctgacaagtcaaacagagcaaggaagtactactagtggactcaagtgatacaaagacacgggattagattttgggtggtaaaattgtgatacgcatggctgttgatggagtggaacatcttagtgatgtgagaaaggtcattttagttataaatgtaaaccaattactttagcacaacaataaagatgttctggaaattattataaaaaaaaaaaagttaatggacttgcctgtaacaagtgcttatgtttggaatgtccattttattttattttcctctacaataaggaatccctaaagttatgccaacaaactggaattggattgagaaagacaaaagcaagtgagcaagtgtattagactaattatctctagtagggaataagcacttagagctaattttttaatttggtttatttattagtagctccctgattgtctgttaagcccctggttcccacagtttggtgtggtcagtcaacttaagcgaccttttaatgcagaatctttacttggttctgaagaggaggcagtagttaaaattgcttcctcttaatgactctgaatgtattgcctgtgattccaaagttgtacataattgttcagacctcctccatccttttaaattgcctgctgcagtaaataactagtttgagtagaactagatcctgtctatctatttggcacatgttctgctgcctggggagtaagcaagctaaagggatgagaaagaccacctccccctaccctggaaattgcactgcaaggcagggcgagaatggggtagctggcagacctggcctccttgttcccagtcttagtttttcttgagagattcagtattcagtaaagaatagcattcaattagtcaaaaaatatatatataacttcttcctttcccttcccatgaatcattgcagtcattccctaagtttcttctctttttttttcatggctgctagtattttattttagaatcacagactctcagcttagagagtcacagtatctcaattatttgctctgttcaatacttaacaatacctcctcactcaattctacataactccagcttagtcttccaaaattcactttcatgatgccactcagcatctcaaatacctttcattggctctctgctgccaaaggataaaggtcaaagtcattagcctcaacagtgggcttcaaccagcctttggacctcagccccatttatccatcacagaggctggtaactagtctcactgctcaggctgtgagtgttcctgatcttgtgacattctgtgctgtgcttttacatggaacagctctttcctctctcttggcccattcagatcctcctcatccagcccccatctgaatcctgtaacagacacaaccacatctacacagtttccacataccacttggaattgctggttatgctgcaatgagagaatgtctttgtctttaaattgtaagcttcatgagggcagggaccatctgtttctctgtctctcctcacagtgccttgagcagtacgttgtctggaatgtcagaaccaataaatacttgtggattgaaa

SEQ ID NO: 6505 - DNA, 2433 bp, Homo sapiens
gagccagcctctgggaccgaggaaataccagaaatagcccaccaccctacgggtttcatctctcaccagaagaaatgaggagacagcggcttcacagattcgatagccagtgaggtggcatcttgggaagacatggcctattcgtgtaattattgcccatttggctcattccccaagcccctaattcattttaattcattttaaacaaaagcagagtacaccggtattgctccagatcgctcacatcacctgggacagtcccatggcccctatgagtcaactcacagcttgcggggagtgggccttctcctggccttgttcttgctcataaacaggtcacttcctccatgaagagaccagtttccacgctcccatctctcactgctgactcagcgatgcctctgcctcggtctgcttttgaagactgtgaccttcaccaggaggttttacttacaccagtcgggaagattagtccctcattctgcctggagtgccccgtgtttgacttggcagcgggtgtggagccatccccgcgtcctcctggcgcattgccactgtggctgtccaggaacaggatgtggctgccttggccgaatgttgtcctactctccccaaccccggcgcctcagctcctcagctcctcgggcccctgcgtctggctggtgtttgcagggctttcgctctgctctggtattgctctgcctttatagaaagtcttattgaagaagtgtaagaaagacctaaggtggggaagactcctacacacaccattagtatcagtgacaccagcaatgtaggttcccagccccttcccagtggcagcttgtgtgtccaggagataggacatcatttaacgcatcagcaaagtagcagcagatgccacatacagagtagagcgaaggcatttggtggatcggtcactagagatctatcttgcagaaagtatgtttttcctcataaaagtgcctcttaattggccattgtaccagccacttgtcctagccaaatgtccaaaacacgcccttgggccccgccacgttacaatccacagattgtctgtctgagtcgtttaaggcatttcctggtgcttgtgttccatgaataaaaggacaaagtcagaagatcactgatgtcttactgtcaacagagatattttaaaagagagaagcaggaaaagatcttccttttttgatctacaacttatatagttttctgattatgcacataatagatatgccttccagatgcataaggcaaacatctggaaagaaatatacccaaatcttagcaggggttatctttgggagtggagtacatgggattttgctttcttcatttttataattttatattactgtcttggaagatgtgtttatgtgtgtgtgttacttttacaatcaggaaaacatatttaataacatatagtcaagaaaacagacttaaaaataaatactatgtgtccattgagaaaattcacaatataaacagaaatacaaataaatacatacacaattttaaagtcacctgtagccctacccttagaggtacccagggttaacattttggtggtattgtcttatcaatttttccgttgatacattcagcaaatttggagcacattgaccatggagttttgtgtccaaatccaatctgaatttacctggaagaggccttgacacctgcatggaaatgagctaagaaaaccactggagccttgggagctctttggcctcctggctggcccagtaatatctgagctcctttggttaatttataactgatataaaactacatcttctttataatataaattgtacctgtgagtctagaagctttaaatgtgtttaaattaaaatattcaagctaaatgttactgctctctcccaaattctgtaagtttgactcccgttaccccaattagaagtaacttctttgtttcatgccacttttatagcatttggtaattctgctataacacatcttgcccctattattaactgtgcacagctacacaaaggtgtgccttctacgtgggaacatggattgtgaatgactctgtaatgaggcctgagtcttagttatctttccactcactccccgtctcccctttccaaccccaaaggctcacgataggggctcactaaatgtcagtgtttcaccaaagtattttttccattgtattaagagtccagtcactgtatatggaagtattttattttttatttttttatatcacttgagtccactagtagtacttccttgctctgtttgacttgtcagatacaaagacacgggattagattttgggtggtaaaattgtgatacgcatggctgttgatggagtggaacatcttagtgatgtgagaaaggtcattttagttataaatgtaaaccaattactttagcacaacaataaagatgttctggaaatta

SEQ ID NO: 6506 - DNA, 4230 bp, Homo sapiens
  misc_feature (4128)..(4128): n is a, c, g, or t
gagccagcctctgggaccgaggaaataccagaaatagcccaccaccctacgggtttcatctctcaccagaagaaatgaggagacagcggcttcacagattcgatagccagtgaggtggcatcttgggaagacatggcctattcgtgtaattattgcccatttggctcattccccaagcccctaattcattttaattcattttaaacaaaagcagagtacaccggtattgctccagatcgctcacatcacctgggacagtcccatggcccctatgagtcaactcacagcttgcggggagtgggccttctcctggccttgttcttgctcataaacaggtcacttcctccatgaagagaccagtttccacgctcccatctctcactgctgactcagcgatgcctctgcctcggtctgcttttgaagactgtgaccttcaccaggaggttttacttacaccagtcgggaagattagtccctcattctgcctggagtgccccgtgtttgacttggcagcgggtgtggagccatccccgcgtcctcctggcgcattgccactgtggctgtccaggaacaggatgtggctgccttggccgaatgttgtcctactctccccaaccccggcgcctcagctcctcagctcctcgggcccctgcgtctggctggtgtttgcagggctttcgctctgctctggtattgctctgcctttatagaaagtcttattgaagaagtgtaagaaagacctaaggtggggaagactcctacacacaccattagtatcagtgacaccagcaatgtaggttcccagccccttcccagtggcagcttgtgtgtccaggagataggacatcatttaacgcatcagcaaagtagcagcagatgccacatacagagtagagcgaaggcatttggtggatcggtcactagagatctatcttgcagaaagtatgtttttcctcataaaagtgcctcttaattggccattgtaccagccacttgtcctagccaaatgtccaaaacacgcccttgggccccgccacgttacaatccacagattgtctgtctgagtcgtttaaggcatttcctggtgcttgtgttccatgaataaaaggacaaagtcagaagatcactgatgtcttactgtcaacagagatattttaaaagagagaagcaggaaaagatcttccttttttgatctacaacttatatagttttctgattatgcacataatagatatgccttccagatgcataaggcaaacatctggaaagaaatatacccaaatcttagcaggggttatctttgggagtggagtacatgggattttgctttcttcatttttataattttatattactgtcttggaagatgtgtttatgtgtgtgtgttacttttacaatcaggaaaacatatttaataacatatagtcaagaaaacagacttaaaaataaatactatgtgtccattgagaaaattcacaatataaacagaaatacaaataaatacatacacaattttaaagtcacctgtagccctacccttagaggtacccagggttaacattttggtggtattgtcttatcaatttttccgttgatacattcagcaaatttggagcacattgaccatggagttttgtgtccaaatccaatctgaatttacctggaagaggccttgacacctgcatggaaatgagctaagaaaaccactggagccttgggagctctttggcctcctggctggcccagtaatatctgagctcctttggttaatttataactgatataaaactacatcttctttataatataaattgtacctgtgagtctagaagctttaaatgtgtttaaattaaaatattcaagctaaatgttactgctctctcccaaattctgtaagtttgactcccgttaccccaattagaagtaacttctttgtttcatgccacttttatagcatttggtaattctgctataacacatcttgcccctattattaactgtgcacagctacacaaaggtgtgccttctacgtgggaacatggattgtgaatgactctgtaatgaggcctgagtcttagttatctttccactcactccccgtctcccctttccaaccccaaaggctcacgataggggctcactaaatgtcagtgtttcaccaaagtattttttccattgtattaagagtccagtcactgtatatggaagtattttattttttatttttttatatcacttgagtccactagtagtacttccttgctctgtttgacttgtcagatacaaagacacgggattagattttgggtggtaaaattgtgatacgcatggctgttgatggagtggaacatcttagtgatgtgagaaaggtcattttagttataaatgtaaaccaattactttagcacaacaataaagatgttctggaaattattataaaaaaaaaaaagttaatggacttgcctgtaacaagtgcttatgtttggaatgtccattttattttattttcctctacaataaggaatccctaaagttatgccaacaaactggaattggattgagaaagacaaaagcaagtgagcaagtgtattagactaattatctctagtagggaataagcacttagagctaattttttaatttggtttatttattagtagctccctgattgtctgttaagcccctggttcccacagtttggtgtggtcagtcaacttaagcgaccttttaatgcagaatctttacttggttctgaagaggaggcagtagttaaaattgcttcctcttaatgactctgaatgtattgcctgtgattccaaagttgtacataattgttcagacctcctccatccttttaaattgcctgctgcagtaaataactagtttgagtagaactagatcctgtctatctatttggcacatgttctgctgcctggggagtaagcaagctaaagggatgagaaagaccacctccccctaccctggaaattgcactgcaaggcagggcgagaatggggtagctggcagacctggcctccttgttcccagtcttagtttttcttgagagattcagtattcagtaaagaatagcattcaattagtcaaaaaatatatatataacttcttcctttcccttcccatgaatcattgcagtcattccctaagtttcttctctttttttttcatggctgctagtattttattttagaatcacagactctcagcttagagagtcacagtatctcaattatttgctctgttcaatacttaacaatacctcctcactcaattctacataactccagcttagtcttccaaaattcactttcatgatgccactcagcatctcaaatacctttcattggctctctgctgccaaaggataaaggtcaaagtcattagcctcaacagtgggcttcaaccagcctttggacctcagccccatttatccatcacagaggctggtaactagtctcactgctcaggctgtgagtgttcctgatcttgtgacattctgtgctgtgcttttacatggaacagctctttcctctctcttggcccattcagatcctcctcatccagcccccatctgaatcctgtaacagacacaaccacatctacacagtttccacataccacttggaattgctggttatgctgcaatgagagaatgtctttgtctttaaattgtaagcttcatgagggcagggaccatctgtttctctgtctctcctcacagtgccttgagcagtacgttgtctggaatgtcagaaccaataaatacttgtggattgaaacaaaaagagaagctcatttatactgtcaccagtggcgcacataaacactagtgcctggtgcttattgatatcattgtaggtcttttttttttcccttgaatcaatcacatcaaggaaagaatgatggaaagcatttgctggtagaaatagagacttcagggcctttgtcagcctgaagacatgtcccactgcatcgaatgctgtgacctggtacacaaagctcaagattcccacacgaccaagaagtgtcaccaaggagtccctgtgagtagtaccgaatcttgccatgtgctttttacaggtctgcgttggatgtgtttgtggctaacanttttttccttctgtggtatttaggggcagagagagaatgatcttaacatctcgatcagatgatagatgaattggcagatttagatatgtgatttatacttta

SEQ ID NO: 6507 - DNA, 314 bp, Homo sapiens
atgtccttgacttccctgaaatggttgttatgattaatatctcttgttctgcttgtgttccatagtggactataattattatgatctttttaaatcgtttgcccattctgaatctctcccttttcttatggcaaaagttcagagtctaagtttataaggaatcaatggacagactttagaagctccttgaactctgtacttttgttttaaattttgtgtttggacttaaaaaaaaaaactggtaaaaggatatgttggtttcctcaaatttctcccaaaataaaaatcccttttaaaagaggattaaagaatta

SEQ ID NO: 6508 - DNA, 420 bp, Homo sapiens
tatacacacaatgaaataaaaagatctgataacatagttgttcacaatatagcaggtgaaaggaaaaaaggacagttgccaaaaaagcacagtaatgactaaaaattactaagaacataaaaattaagtcacacacaaatgtacacaccccaaagtgtatgcctcgcttggaaaggaatcatagatgcttttatgatcttcttttttgctcatctgtgtgaggatctcattacttctactgccgctgctaactcattcagggattgtctcagtttccttggataataaggggcttcactgcatttaaggcttcctgatttattcaaacagtaactacacaaatgcacgcacacatacacacacacacacacacacacagtctcctatatgttgctatgcagagatctctagacacattta

SEQ ID NO: 6509 - DNA, 390 bp, Homo sapiens
gatcacttgaggccaggagtcctgagcaggcatggtgaaactccgtctctactaaaaatacaaaaattagccgggtatggtggggcatgcttgtaatcccagcgactcagaaggccgaggcacgagaattaattgaacccgggaggcagaggttgcagtctgatgagattgtgccactgaacaccagcctgggtgacagagtgagactctatctcaaacccctgtacccccatcccccccaaaaaaacccattccaaatcttttcatctcctctctctgtggagtgctctctgttgctcagcgctccatgcccattgctgtggagctgacctggggagtgactgatggctcctgaggctgaaggatgggaaatagcaggagggctcctgg

SEQ ID NO: 6510 - DNA, 618 bp, Homo sapiens
atatctagctgttactaagctgcccttcccataacggtctgccccaaaaaggtgtgtgtgcagaggagaataaaaactaaaaccctaagatcatcttatttacttgccctatttctgcctcttttctctccctgccatctctggggtccagaagtagaagctttttattgcctccggagtttattcttatacatcaaggataaacattcatgacctaacatcatctctcttgttttctcccgccaaagctataaggatagtctaatcatgaaaaaacattaaacaaactcaaaatggggacagtctataaaatacctaaccagttctcttcagaacagttaaggtcctgaaaggcgaggagagaagaagaaacaatcacaacttggaggacattaatgcactaaatttaatatggtttcataagttgggctgaaaagaaaaggacagtagaaaagctgggatatgagaatacagtctaagtgtagtactaatgttaagtttttaatctctaacttgatggcatggttatagaaaatagaaacattaggcaaagctgggtgaaaggtatacaggaactctactatctatacaacttttctgtaaacataaaattatttc

SEQ ID NO: 6511 - DNA, 672 bp, Homo sapiens
ttgtttcatcacactgaatcgttggccaagaaatgcttgaaaatcaaaacattaatatcatctttcttcttttttttaaaggtgacttaagagattaaaattaatttggttgctgttggttctgaacaaataatgagttcttttatttgaggtatgccattttgaagactgagacgttggagttttatcctagaggataaaggaaatctttgggaaagtcagtattttatatagcaaaaatatgaacctcaaactgaatcctctaaaggccccatacaatgaagtagacattggtggaaacatttacacccagtcagcttgaagagtttcaaatggaccctaccactgagaaatcaagatggcagtctactatggggaattgaggaaaaatggattaatacaagagtcctgtgataatatacaaccaagacagggttcttttaacatggattccatgcagtgaatgaagacataggtttcttacccaacacaaatggacagtggatttgactttctaaagactttttttgtggacattttgacatttggagaagaaagatggcacactaacccagataatagtttttatgcctggaattttttgcagtttgatttgtatgcgtatgacctcttgaaatgttaatttttaataaaatttgtaacacttaaaaa

SEQ ID NO: 6512 - DNA, 2676 bp, Homo sapiens
  misc_feature (701)..(701): n is a, c, g, or t
gaaaggaacatgtagagggttttgatatctaaaccctacccagttttctgtaggatcttgattttattttaatgcaagactgctgaccccatgatcctgtgtgttcttcagagatactcttactgatgatgtataaatgaactttgattcagtaaggtcagtttgtaggtctcaaagtactttggttattgtggtacatcagaatgatagctagtatttactgagatctttctatatgtcaggtaataaaaatcctataaaagtattctttctacagccacaggaggtaggtactatttttattttacagatgaagaactgtggattttgtttctaagaaaatttccaggctcacagaactaagcctaatttctttttattttttagcaaatacagtttttataagaatttgaattctatgaaaataaatggattactcctaaatctctgatgcctcagtgaacactttttccttattaacaaaattctcacttttggctttggattggctttgcaggagtgcagattgatcatagcttttttcatgtcctaagagttgtcagagttttctcttgtagcatttttttctttactttttttttttactatctttaaatatatgactgtaagagtatgataaatatgctgttttctaatctctgctgttgtcacataaactaatatattttgagtaattttgnaatgatattaataatgtcattagattttctttggattttttgaaaaaaataatggttttagaaggaaatctggataaattttatctctgtcctgtgtcagaaaaatataaaacttgagttttttaaattaaggtactaagatgaataaattgcatctatagatattgaaatatgactgtaatttgataatgcattttcattctcagtgtcattgttcatcataatagtatctacatcaccaacttcatttagagcttgaatcttgtaacaatagagattgaaaataaattggtttataattaactctgacagagaatgatgtttttacttttatacttctctatagaagtacatgtcccttaattttaaggaatgaacaagtcagatggaagatttttactgagatcaggaatgaattgagtaatttagttttctttttaaagctggggagaaatgagcaaaatcaaggagaaatatcttgcttttgatatttattactgatgctgtgacactccctttaatcaatgttttttaatatgggtggcagtatctcagttaaccaaatagttaagtaagtagatttttgtattgtatatagtaaacagtatcctaattgttgccaaggagacaaggaattacctaatgggcaaaaatgcccttatatttatttacctcaaattcagtcacacttgactgtatctccacaaattcagatggagagctggaaaatttatagagaagaccagggtttaaatcttgttttttcaaattatgtttggtcatgatgaatctgaatcatttatttaatgataaaatcatctgacttctcacttctcacttctcccttcagttaaaattatttaagtaatggatttgtttttctatgagagacatttggtattttggtaatgaaagtgtattattttagttgcatataatttgaaaacagcattttatggcaaatctatcaagccaggcagatactttgcatttttgatcttttttttttttttttttggtggctacatcttttctgtattctcagatatgtcgttaaagatggtgccacctatagtggccattttcgttatctaaacaaaaccaacatctgttggattgaaaaactatgctatgatcgactgctttatgtgtgtatgttttttttttttttcaaatcccttaagattcttttctataattagttttctttgaagaagcttggaaagttttctgcattgagatttagaatccacagtgtttctgtaatttagctttccaggaattttgaattttaatttttgtttttactttttatgtacacagtataatgatgttagtgttaaatattaaaaatctgactcttcactgggacttttttatagatacaaatgtatctgtggtagtacaaggactttgttactttggcgtgcagtcttatcaaggagttgtgtgtgtgttttgcatacaactttacaatttcatagttgaaagctgttacaaaatgaaagttttgtgtatggtaggatatcttcaaggtgggtggatgttttctgtttaaaagattaagatgccaacagcgtttttttcttttaattttttcatcaagcaccacccagtcagcttgaagagtttcaaatggaccctaccactgagaaatcaagatggcagtctactatggggaattgaggaaaaatggattaatacaagagtcctgtgataatatacaaccaagacagggttcttttaacatggattccatgcagtgaatgaagacataggtttcttacccaacacaaatggacagtggatttgactttctaaagactttttttgtggacattttgacatttggagaagaaagatggcacactaacccagataatagtttttatgcctggaattttttgcagtttgatttgtatgcgtatgacctcttgaaatgttaatttttaataaaatttgtaacacttaaaaa

SEQ ID NO: 6513 - DNA, 491 bp, Homo sapiens
gtgtatcttaaccatcttttataccatttccttgcagcagccagttaaagtaacacaaatatgaacctcaaactgaatcctctaaaggccccatacaatgaagtagacattggtggaaacatttacacccagtcagcttgaagagtttcaaatggaccctaccactgagaaatcaagatggcagtctactatggggaattgaggaaaaatggattaatacaagagtcctgtgataatatacaaccaagacagggttcttttaacatggattccatgcagtgaatgaagacataggtttcttacccaacacaaatggacagtggatttgactttctaaagactttttttgtggacattttgacatttggagaagaaagatggcacactaacccagataatagtttttatgcctggaattttttgcagtttgatttgtatgcgtatgacctcttgaaatgttaatttttaataaaatttgtaacacttaaaaa

SEQ ID NO: 6514 - DNA, 789 bp, Homo sapiens
atctcggaagaagctcggaacctgtactggcattgaaattgataatccacgttgtctctgtaaatccagctcaccacgaatgctgaatttcatctccaagtaaaaactgcccgatgtacaccgaataattcgagtgattagattctagaattattatacaagtctgtactcttcgctgtggacttaatcaggattgatacaaatgtatctgtggtagtacaaggactttgttactttggcgtgcagtcttatcaaggagttgtgtgtgtgttttgcatacaactttacaatttcatagttgaaagctgttacaaaatgaaagttttgtgtatggtaggatatcttcaaggtgggtggatgttttctgtttaaaagattaagatgccaacagcgtttttttcttttaattttttcatcaagcaccacccagtcagcttgaagagtttcaaatggaccctaccactgagaaatcaagatggcagtctactatggggaattgaggaaaaatggattaatacaagagtcctgtgataatatacaaccaagacagggttcttttaacatggattccatgcagtgaatgaagacataggtttcttacccaacacaaatggacagtggatttgactttctaaagactttttttgtggacattttgacatttggagaagaaagatggcacactaacccagataatagtttttatgcctggaattttttgcagtttgatttgtatgcgtatgacctcttgaaatgttaatttttaataaaatttgtaacacttaaaaa

SEQ ID NO: 6515 - DNA, 492 bp, Homo sapiens
  misc_feature (54)..(54): n is a, c, g, or t
  misc_feature (56)..(56): n is a, c, g, or t
aaaattgtaaataactcattacttatcaaagaggaagaaagagtttataagatncncaaatatgaacctcaaactgaatcctctaaaggccccatacaatgaagtagacattggtggaaacatttacacccagtcagcttgaagagtttcaaatggaccctaccactgagaaatcaagatggcagtctactatggggaattgaggaaaaatggattaatacaagagtcctgtgataatatacaaccaagacagggttcttttaacatggattccatgcagtgaatgaagacataggtttcttacccaacacaaatggacagtggatttgactttctaaagactttttttgtggacattttgacatttggagaagaaagatggcacactaacccagataatagtttttatgcctggaattttttgcagtttgatttgtatgcgtatgacctcttgaaatgttaatttttaataaaatttgtaacacttaaaaa

SEQ ID NO: 6516 - DNA, 489 bp, Homo sapiens
cccaccacccaagctcatttttgatcggcagtaagaatgaacaagaaaattttgaaatatgaacctcaaactgaatcctctaaaggccccatacaatgaagtagacattggtggaaacatttacacccagtcagcttgaagagtttcaaatggaccctaccactgagaaatcaagatggcagtctactatggggaattgaggaaaaatggattaatacaagagtcctgtgataatatacaaccaagacagggttcttttaacatggattccatgcagtgaatgaagacataggtttcttacccaacacaaatggacagtggatttgactttctaaagactttttttgtggacattttgacatttggagaagaaagatggcacactaacccagataatagtttttatgcctggaattttttgcagtttgatttgtatgcgtatgacctcttgaaatgttaatttttaataaaatttgtaacacttaaaaa

SEQ ID NO: 6517 - DNA, 491 bp, Homo sapiens
atttattttttaatacttacaatataaaaaaacaacaaaaaaggctatagttgcacaaatatgaacctcaaactgaatcctctaaaggccccatacaatgaagtagacattggtggaaacatttacacccagtcagcttgaagagtttcaaatggaccctaccactgagaaatcaagatggcagtctactatggggaattgaggaaaaatggattaatacaagagtcctgtgataatatacaaccaagacagggttcttttaacatggattccatgcagtgaatgaagacataggtttcttacccaacacaaatggacagtggatttgactttctaaagactttttttgtggacattttgacatttggagaagaaagatggcacactaacccagataatagtttttatgcctggaattttttgcagtttgatttgtatgcgtatgacctcttgaaatgttaatttttaataaaatttgtaacacttaaaaa

SEQ ID NO: 6518 - DNA, 477 bp, Homo sapiens
gcggatgtagtcaggacgtgtagaggagcgcgacgggggcttaaatatgaacctcaaactgaatcctctaaaggccccatacaatgaagtagacattggtggaaacatttacacccagtcagcttgaagagtttcaaatggaccctaccactgagaaatcaagatggcagtctactatggggaattgaggaaaaatggattaatacaagagtcctgtgataatatacaaccaagacagggttcttttaacatggattccatgcagtgaatgaagacataggtttcttacccaacacaaatggacagtggatttgactttctaaagactttttttgtggacattttgacatttggagaagaaagatggcacactaacccagataatagtttttatgcctggaattttttgcagtttgatttgtatgcgtatgacctcttgaaatgttaatttttaataaaatttgtaacacttaaaaa

SEQ ID NO: 6519 - DNA, 422 bp, Homo sapiens
tagtgtgtttataagtcagagggggtggaaggggggtgtgggcttgctcccacacacacccagtcagcttgaagagtttcaaatggaccctaccactgagaaatcaagatggcagtctactatggggaattgaggaaaaatggattaatacaagagtcctgtgataatatacaaccaagacagggttcttttaacatggattccatgcagtgaatgaagacataggtttcttacccaacacaaatggacagtggatttgactttctaaagactttttttgtggacattttgacatttggagaagaaagatggcacactaacccagataatagtttttatgcctggaattttttgcagtttgatttgtatgcgtatgacctcttgaaatgttaatttttaataaaatttgtaacacttaaaaa

SEQ ID NO: 6520 - DNA, 388 bp, Homo sapiens
  misc_feature (4)..(5): n is a, c, g, or t
  misc_feature (12)..(12): n is a, c, g, or t
gagnnggaatancggcgactagcacccagtcagcttgaagagtttcaaatggaccctaccactgagaaatcaagatggcagtctactatggggaattgaggaaaaatggattaatacaagagtcctgtgataatatacaaccaagacagggttcttttaacatggattccatgcagtgaatgaagacataggtttcttacccaacacaaatggacagtggatttgactttctaaagactttttttgtggacattttgacatttggagaagaaagatggcacactaacccagataatagtttttatgcctggaattttttgcagtttgatttgtatgcgtatgacctcttgaaatgttaatttttaataaaatttgtaacacttaaaaa

SEQ ID NO: 6521 - DNA, 1071 bp, Homo sapiens
agctcctgccgccgccgcagccgctgccgccgcagcgaagaggccatgttgtgtggtgtgtggggcggggggaggaggaggagggagtaaagcctagagaggagacgggagagagacaccacacacacggcacaagatggccggagaggcagcagcaccccgagctgtcaggcgttccgccgcggccgcgaggcccgccggccggcggggagctacgcccggacggccagcaggcccgcgggagtggggctgccgcggctgaggcgaggcgggccgcgcgcgtcggcgtcacagcccgcggcagaggcgcccagggcggccgggcccacgacgccgaaagcgccgctgcggttgccgcctcggaggctcccccgggccccggcggctggacccggcgcgggcgggaggctcgggcgggcggtccggcccgggactcgggtttgggcgaccaggaggtgccggtggccgcgctcggacccggtgacttaagagattaaaattaatttggttgctgttggttctgaacaaataatgagttcttttatttgaggtatgccattttgaagactgagacgttggagttttatcctagaggataaaggaaatctttgggaaagtcagtattttatatagcaaaaatatgaacctcaaactgaatcctctaaaggccccatacaatgaagtagacattggtggaaacatttacacccagtcagcttgaagagtttcaaatggaccctaccactgagaaatcaagatggcagtctactatggggaattgaggaaaaatggattaatacaagagtcctgtgataatatacaaccaagacagggttcttttaacatggattccatgcagtgaatgaagacataggtttcttacccaacacaaatggacagtggatttgactttctaaagactttttttgtggacattttgacatttggagaagaaagatggcacactaacccagataatagtttttatgcctggaattttttgcagtttgatttgtatgcgtatgacctcttgaaatgttaatttttaataaaatttgtaacacttaaaaa

SEQ ID NO: 6522 - DNA, 2396 bp, Homo sapiens
agctcctgccgccgccgcagccgctgccgccgcagcgaagaggccatgttgtgtggtgtgtggggcggggggaggaggaggagggagtaaagcctagagaggagacgggagagagacaccacacacacggcacaagatggccggagaggcagcagcaccccgagctgtcaggcgttccgccgcggccgcgaggcccgccggccggcggggagctacgcccggacggccagcaggcccgcgggagtggggctgccgcggctgaggcgaggcgggccgcgcgcgtcggcgtcacagcccgcggcagaggcgcccagggcggccgggcccacgacgccgaaagcgccgctgcggttgccgcctcggaggctcccccgggccccggcggctggacccggcgcgggcgggaggctcgggcgggcggtccggcccgggactcgggtttgggcgaccaggaggtgccggtggccgcgctcggacccggtgacttaagagattaaaattaatttggttgctgttggttctgaacaaataatgagttcttttatttgaggtatgccattttgaagactgagacgttggagttttatcctagaggataaaggaaatctttgggaaagtcagtattttatatagcaaaaatatgaacctcaaactgaatcctctaaaggccccatacaatgaagtagacattggtggaaacatttacacccagtcagcttgaagagtttcaaatggaccctaccactgagaaatcaagatggcagtctactatggggaattgaggaaaaatggattaatacaagagtcctgtgataatatacaaccaagacagggttcttttaacatggattccatgcagtgaatgaagacataggtttcttacccaacacaaatggacagtggatttgactttctaaagactttttttgtggacattttgacatttggagaagaaagatggcacactaacccagataatagtttttatgcctggaattttttgcagtttgatttgtatgcgtatgacctcttgaaatgttaatttttaataaaatttgtaacacttaaaaatttctcagtttgggtttttttttttaagtggaagtttaattaaatgtttagttttattttagtaatactttggcctttgtagttgccgagtggtaaagtgtactgaatatgaataaagctggtaaattggaaatggtgtaatcgaaaacattttacttggtttatgaagatttacgtttttcacaaagttgtgctcttagatggtcatttggtttaaatactgttttgtttgtgctttcatgaaacacctttcaaaacaactcaatgggtaataatagaatctgattttaatctgccacaagattttaatgaacttgaaacaaactgcttgttgctcgaaaattcaggatgagtgatacacatatacttctgaattattttgtgttgattgaaatggtttcttaagctttttaatactataaatacatcttgctatagaatattcatctgaatatttaaattaatgtctcctattgtcttactattagaggaagaagtgttggatttatgggttagggtccttggagtattcacaattttttaaatttgaaattatgtgtgtaatccattttatataactttgaagtaggattaatatcttgtatcgtctttattttgtacaattggggatttagaataaatgaattgcaccctgccatagattacttacgtttgatttttaaatgccaggttttcatttattactaatcaactgataccagttttggtaactattacaaaggtggtaggcattattttggtagacaaaatgagttcttgattctgttttcccattttacatgagaagaataaatagttcaggttaaattgttttgtgttaatcatactgtttgtgattcatgtcaaatactgcagcatacacatccatggttaatacacgagcaccatttgttattgactgatgtgaggtggttggtctttgttaaattcaaaaatggaattttggatattgttcttgctacgaaatttatctttgtgtgtagagtatggaattgaaacagtttggattatggattttacctagattggacattgttgcttttgtttggtgtaaatctaaagtggatttcttcagtgagggagagacatggttctggcagattatgttgaataaggaaagttgattggatttttttgggtgtgtgaatatgcttgtctgaatggagtgcttggtaggatattgtttctggaattagtaatttgtttctgtggatctcatggttttgatatttaggagaatttgctttgtgacattactttgataatttgcaatcacgtatgtcctattgttaataacattgttg

SEQ ID NO: 6523 - DNA, 1265 bp, Homo sapiens
agctcctgccgccgccgcagccgctgccgccgcagcgaagaggccatgttgtgtggtgtgtggggcggggggaggaggaggagggagtaaagcctagagaggagacgggagagagacaccacacacacggcacaagatggccggagaggcagcagcaccccgagctgtcaggcgttccgccgcggccgcgaggcccgccggccggcggggagctacgcccggacggccagcaggcccgcgggagtggggctgccgcggctgaggcgaggcgggccgcgcgcgtcggcgtcacagcccgcggcagaggcgcccagggcggccgggcccacgacgccgaaagcgccgctgcggttgccgcctcggaggctcccccgggccccggcggctggacccggcgcgggcgggaggctcgggcgggcggtccggcccgggactcgggtttgggcgaccaggaggtgccggtggccgcgctcggacccggttctccaacggaggagctttttaacctctttccggtgaggtgggaactcatcttcatgatcgaatttaaaagaacaatggaaccctgactacgtttcaacaaaaataaaacttgtttttttccctcctattgggtgttggcttttaactctttcaaagccgattttgaaacggctgcagtgatacatgcgaaggtgacttaagagattaaaattaatttggttgctgttggttctgaacaaataatgagttcttttatttgaggtatgccattttgaagactgagacgttggagttttatcctagaggataaaggaaatctttgggaaagtcagtattttatatagcaaaaatatgaacctcaaactgaatcctctaaaggccccatacaatgaagtagacattggtggaaacatttacacccagtcagcttgaagagtttcaaatggaccctaccactgagaaatcaagatggcagtctactatggggaattgaggaaaaatggattaatacaagagtcctgtgataatatacaaccaagacagggttcttttaacatggattccatgcagtgaatgaagacataggtttcttacccaacacaaatggacagtggatttgactttctaaagactttttttgtggacattttgacatttggagaagaaagatggcacactaacccagataatagtttttatgcctggaattttttgcagtttgatttgtatgcgtatgacctcttgaaatgttaatttttaataaaatttgtaacacttaaaaa

SEQ ID NO: 6524 - DNA, 1141 bp, Homo sapiens
agctcctgccgccgccgcagccgctgccgccgcagcgaagaggccatgttgtgtggtgtgtggggcggggggaggaggaggagggagtaaagcctagagaggagacgggagagagacaccacacacacggcacaagatggccggagaggcagcagcaccccgagctgtcaggcgttccgccgcggccgcgaggcccgccggccggcggggagctacgcccggacggccagcaggcccgcgggagtggggctgccgcggctgaggcgaggcgggccgcgcgcgtcggcgtcacagcccgcggcagaggcgcccagggcggccgggcccacgacgccgaaagcgccgctgcggttgccgcctcggaggctcccccgggccccggcggctggacccggcgcgggcgggaggctcgggcgggcggtccggcccgggactcgggtttgggcgaccaggaggtgccggtggccgcgctcggacccggttctccaacggaggagctttttaacctctttccgccgattttgaaacggctgcagtgatacatgcgaaggtgacttaagagattaaaattaatttggttgctgttggttctgaacaaataatgagttcttttatttgaggtatgccattttgaagactgagacgttggagttttatcctagaggataaaggaaatctttgggaaagtcagtattttatatagcaaaaatatgaacctcaaactgaatcctctaaaggccccatacaatgaagtagacattggtggaaacatttacacccagtcagcttgaagagtttcaaatggaccctaccactgagaaatcaagatggcagtctactatggggaattgaggaaaaatggattaatacaagagtcctgtgataatatacaaccaagacagggttcttttaacatggattccatgcagtgaatgaagacataggtttcttacccaacacaaatggacagtggatttgactttctaaagactttttttgtggacattttgacatttggagaagaaagatggcacactaacccagataatagtttttatgcctggaattttttgcagtttgatttgtatgcgtatgacctcttgaaatgttaatttttaataaaatttgtaacacttaaaaa

SEQ ID NO: 6525 - DNA, 806 bp, Homo sapiens
  misc_feature (34)..(34): n is a, c, g, or t
acggcagcgctgcagcgcaggcgactctagaggncccccccactctcctcttgccggtgaggtgggaactcatcttcatgatcgaatttaaaagaacaatggaaccctgactacgtttcaacaaaaataaaacttgtttttttccctcctattgggtgttggcttttaactctttcaaagccgattttgaaacggctgcagtgatacatgcgaaggtgacttaagagattaaaattaatttggttgctgttggttctgaacaaataatgagttcttttatttgaggtatgccattttgaagactgagacgttggagttttatcctagaggataaaggaaatctttgggaaagtcagtattttatatagcaaaaatatgaacctcaaactgaatcctctaaaggccccatacaatgaagtagacattggtggaaacatttacacccagtcagcttgaagagtttcaaatggaccctaccactgagaaatcaagatggcagtctactatggggaattgaggaaaaatggattaatacaagagtcctgtgataatatacaaccaagacagggttcttttaacatggattccatgcagtgaatgaagacataggtttcttacccaacacaaatggacagtggatttgactttctaaagactttttttgtggacattttgacatttggagaagaaagatggcacactaacccagataatagtttttatgcctggaattttttgcagtttgatttgtatgcgtatgacctcttgaaatgttaatttttaataaaatttgtaacacttaaaaa

SEQ ID NO: 6526 - DNA, 1277 bp, Homo sapiens
agctcctgccgccgccgcagccgctgccgccgcagcgaagaggccatgttgtgtggtgtgtggggcggggggaggaggaggagggagtaaagcctagagaggagacgggagagagacaccacacacacggcacaagatggccggagaggcagcagcaccccgagctgtcaggcgttccgccgcggccgcgaggcccgccggccggcggggagctacgcccggacggccagcaggcccgcgggagtggggctgccgcggctgaggcgaggcgggccgcgcgcgtcggcgtcacagcccgcggcagaggcgcccagggcggccgggcccacgacgccgaaagcgccgctgcggttgccgcctcggaggctcccccgggccccggcggctggacccggcgcgggcgggaggctcgggcgggcggtccggcccgggactcgggtttgggcgaccaggaggtgccggtggccgcgctcggacccggtgacttaagagattaaaattaatttggttgctgttggttctgaacaaataatgagttcttttatttgaggtatgccattttgaagactgagacgttggagttttatcctagaggataaaggaaatctttgggaaagtcagtattttatatagcaaaaatatgaacctcaaactgaatcctctaaaggccccatacaatgaagtagacattggtggaaacatttacacccagtcagcttgaagagtttcaaatggaccctaccactgagaaatcaagatggcagtctactatggggaattgaggaaaaatggattaatacaagagtcctgtgataatatacaaccaagacagggttcttttaacatggattccatgcagtgaatgaagacataggtttcttacccaacacaaatggacagtggatttgactttctaaagactttttttgtggacattttgacatttggagaagaaagatggcacactaacccagataatagtttttatgcctggaattttttgcagtttgatttgtatgcgtatgacctcttgaaatgttaatttttaataaaatttgtaacacttaaaaaaaaaaaaaaaaacaacaaaacaaacaacaaaaaaaacacccgggggcaccttaagtcggggggggggaaaaaaggggtctcagaaaggggcccgtgggccatgggtgtttcccggaccccctttttgggcccaagggggaaaactgggggggcccccaaaaagggggcggaataaattcggaaaagcccggggtaaccggataagg

SEQ ID NO: 6527 - DNA, 1560 bp, Homo sapiens
cggtgatccgtaacagaagggggttaaattttccccctagggagcctagaacttccccccgtggggtaaattatgaaaggtgaccgaatttcaacacgggccaaaaaaagtttacacattttggtttagaaaaagtttttttttttttttgtggggatagtatggaaaagggattcagaagtgatgaaaaaggtatgttacttgagatatgggaaacgctattttccatgtttagttatggggtattcaagtctaactagtggaaagtatggatacattttatttattttttgagacggagtctcgctctgttgctcaggctagagtgcagcgatgcgatctcagctcactgcaacttctgcctcctgggttcaagcaatttctggctaatttttgtatttttagtagagacggggtttgaccatgttggccaggctggtctcaaacacctgacctcaagtgatctgcctgcctccacctccccaagtgctgggattataggtgtaagccaccgggcctggccggatacatttttattatcaagtatatattttaggaatgattagtgttggtttagttgaatagattggtacaattagtagtaatttgaaatgatgcctatggtttcctaacattttgtcttagtgttgattaaagacataataatgtgaaataatatggtaatactaaggaatgagaaagtggccttacaggtgggcaatgtaaactttcctgtagaaggattgaaagtaaatagatgtaagactagaaagtgaaacaattctgtactgtaagagcaatgttggctgtgttaaataactcgttcccaaacatcagatccacctggggagcccaaatatttacctacatttttggagttcttaggggctgaaacttacgcttgtgattttgtagtaacctattctagagaggagccaaatttgtgatactcaagagcttgtatgatttctgcttggactgtattgttaatacatacatacatcttttggtctattggcaaatgacccttgcaagatgttgacattttgggtataaatcatggtgcttaataatctgttttcattttttatgtataaaattaaattctttttgtcctctgcagaaaaatatgaacctcaaactgaatcctctaaaggccccatacaatgaagtagacattggtggaaacatttacacccagtcagcttgaagagtttcaaatggaccctaccactgagaaatcaagatggcagtctactatggggaattgaggaaaaatggattaatacaagagtcctgtgataatatacaaccaagacagggttcttttaacatggattccatgcagtgaatgaagacataggtttcttacccaacacaaatggacagtggatttgactttctaaagactttttttgtggacattttgacatttggagaagaaagatggcacactaacccagataatagtttttatgcctggaattttttgcagtttgatttgtatgcgtatgacctcttgaaatgttaatttttaataaaatttgtaacacttaaaaa

SEQ ID NO: 6528 - DNA, 543 bp, Homo sapiens
tcatatacgactcgattcggtagtatgccattttgaagactgagacgttggagttttatcctagaggataaaggaaatctttgggaaagtcagtattttatatagcaaaaatatgaacctcaaactgaatcctctaaaggccccatacaatgaagtagacattggtggaaacatttacacccagtcagcttgaagagtttcaaatggaccctaccactgagaaatcaagatggcagtctactatggggaattgaggaaaaatggattaatacaagagtcctgtgataatatacaaccaagacagggttcttttaacatggattccatgcagtgaatgaagacataggtttcttacccaacacaaatggacagtggatttgactttctaaagactttttttgtggacattttgacatttggagaagaaagatggcacactaacccagataatagtttttatgcctggaattttttgcagtttgatttgtatgcgtatgacctcttgaaatgttaatttttaataaaatttgtaacacttaaaaa

SEQ ID NO: 6529 - DNA, 4001 bp, Homo sapiens
  misc_feature (701)..(701): n is a, c, g, or t
gaaaggaacatgtagagggttttgatatctaaaccctacccagttttctgtaggatcttgattttattttaatgcaagactgctgaccccatgatcctgtgtgttcttcagagatactcttactgatgatgtataaatgaactttgattcagtaaggtcagtttgtaggtctcaaagtactttggttattgtggtacatcagaatgatagctagtatttactgagatctttctatatgtcaggtaataaaaatcctataaaagtattctttctacagccacaggaggtaggtactatttttattttacagatgaagaactgtggattttgtttctaagaaaatttccaggctcacagaactaagcctaatttctttttattttttagcaaatacagtttttataagaatttgaattctatgaaaataaatggattactcctaaatctctgatgcctcagtgaacactttttccttattaacaaaattctcacttttggctttggattggctttgcaggagtgcagattgatcatagcttttttcatgtcctaagagttgtcagagttttctcttgtagcatttttttctttactttttttttttactatctttaaatatatgactgtaagagtatgataaatatgctgttttctaatctctgctgttgtcacataaactaatatattttgagtaattttgnaatgatattaataatgtcattagattttctttggattttttgaaaaaaataatggttttagaaggaaatctggataaattttatctctgtcctgtgtcagaaaaatataaaacttgagttttttaaattaaggtactaagatgaataaattgcatctatagatattgaaatatgactgtaatttgataatgcattttcattctcagtgtcattgttcatcataatagtatctacatcaccaacttcatttagagcttgaatcttgtaacaatagagattgaaaataaattggtttataattaactctgacagagaatgatgtttttacttttatacttctctatagaagtacatgtcccttaattttaaggaatgaacaagtcagatggaagatttttactgagatcaggaatgaattgagtaatttagttttctttttaaagctggggagaaatgagcaaaatcaaggagaaatatcttgcttttgatatttattactgatgctgtgacactccctttaatcaatgttttttaatatgggtggcagtatctcagttaaccaaatagttaagtaagtagatttttgtattgtatatagtaaacagtatcctaattgttgccaaggagacaaggaattacctaatgggcaaaaatgcccttatatttatttacctcaaattcagtcacacttgactgtatctccacaaattcagatggagagctggaaaatttatagagaagaccagggtttaaatcttgttttttcaaattatgtttggtcatgatgaatctgaatcatttatttaatgataaaatcatctgacttctcacttctcacttctcccttcagttaaaattatttaagtaatggatttgtttttctatgagagacatttggtattttggtaatgaaagtgtattattttagttgcatataatttgaaaacagcattttatggcaaatctatcaagccaggcagatactttgcatttttgatcttttttttttttttttttggtggctacatcttttctgtattctcagatatgtcgttaaagatggtgccacctatagtggccattttcgttatctaaacaaaaccaacatctgttggattgaaaaactatgctatgatcgactgctttatgtgtgtatgttttttttttttttcaaatcccttaagattcttttctataattagttttctttgaagaagcttggaaagttttctgcattgagatttagaatccacagtgtttctgtaatttagctttccaggaattttgaattttaatttttgtttttactttttatgtacacagtataatgatgttagtgttaaatattaaaaatctgactcttcactgggacttttttatagatacaaatgtatctgtggtagtacaaggactttgttactttggcgtgcagtcttatcaaggagttgtgtgtgtgttttgcatacaactttacaatttcatagttgaaagctgttacaaaatgaaagttttgtgtatggtaggatatcttcaaggtgggtggatgttttctgtttaaaagattaagatgccaacagcgtttttttcttttaattttttcatcaagcaccacccagtcagcttgaagagtttcaaatggaccctaccactgagaaatcaagatggcagtctactatggggaattgaggaaaaatggattaatacaagagtcctgtgataatatacaaccaagacagggttcttttaacatggattccatgcagtgaatgaagacataggtttcttacccaacacaaatggacagtggatttgactttctaaagactttttttgtggacattttgacatttggagaagaaagatggcacactaacccagataatagtttttatgcctggaattttttgcagtttgatttgtatgcgtatgacctcttgaaatgttaatttttaataaaatttgtaacacttaaaaatttctcagtttgggtttttttttttaagtggaagtttaattaaatgtttagttttattttagtaatactttggcctttgtagttgccgagtggtaaagtgtactgaatatgaataaagctggtaaattggaaatggtgtaatcgaaaacattttacttggtttatgaagatttacgtttttcacaaagttgtgctcttagatggtcatttggtttaaatactgttttgtttgtgctttcatgaaacacctttcaaaacaactcaatgggtaataatagaatctgattttaatctgccacaagattttaatgaacttgaaacaaactgcttgttgctcgaaaattcaggatgagtgatacacatatacttctgaattattttgtgttgattgaaatggtttcttaagctttttaatactataaatacatcttgctatagaatattcatctgaatatttaaattaatgtctcctattgtcttactattagaggaagaagtgttggatttatgggttagggtccttggagtattcacaattttttaaatttgaaattatgtgtgtaatccattttatataactttgaagtaggattaatatcttgtatcgtctttattttgtacaattggggatttagaataaatgaattgcaccctgccatagattacttacgtttgatttttaaatgccaggttttcatttattactaatcaactgataccagttttggtaactattacaaaggtggtaggcattattttggtagacaaaatgagttcttgattctgttttcccattttacatgagaagaataaatagttcaggttaaattgttttgtgttaatcatactgtttgtgattcatgtcaaatactgcagcatacacatccatggttaatacacgagcaccatttgttattgactgatgtgaggtggttggtctttgttaaattcaaaaatggaattttggatattgttcttgctacgaaatttatctttgtgtgtagagtatggaattgaaacagtttggattatggattttacctagattggacattgttgcttttgtttggtgtaaatctaaagtggatttcttcagtgagggagagacatggttctggcagattatgttgaataaggaaagttgattggatttttttgggtgtgtgaatatgcttgtctgaatggagtgcttggtaggatattgtttctggaattagtaatttgtttctgtggatctcatggttttgatatttaggagaatttgctttgtgacattactttgataatttgcaatcacgtatgtcctattgttaataacattgttg

SEQ ID NO: 6530 - DNA, 1518 bp, Homo sapiens
aatattagtgccatagagaaacagaaattggtgtatattttgaacagagatgctgcagcccgacttaccatttcatctcccctggaagcccacaaagcaaacactttagtgtatcatgtagttggagtagatgtcggatttgaagatccaatgtttgcttgtctggaaatggattatgaggaagcagacaatgatccaacaggggaagcagcagctaatacccagcagacacttgactgtatctccacaaattcagatggagagctggaaaatttatagagaagaccagggtttaaatcttgttttttcaaattatgtttggtcatgatgaatctgaatcatttatttaatgataaaatcatctgacttctcacttctcacttctcccttcagttaaaattatttaagtaatggatttgtttttctatgagagacatttggtattttggtaatgaaagtgtattattttagttgcatataatttgaaaacagcattttatggcaaatctatcaagccaggcagatactttgcatttttgatcttttttttttttttttttggtggctacatcttttctgtattctcagatatgtcgttaaagatggtgccacctatagtggccattttcgttatctaaacaaaaccaacatctgttggattgaaaaactatgctatgatcgactgctttatgtgtgtatgttttttttttttttcaaatcccttaagattcttttctataattagttttctttgaagaagcttggaaagttttctgcattgagatttagaatccacagtgtttctgtaatttagctttccaggaattttgaattttaatttttgtttttactttttatgtacacagtataatgatgttagtgttaaatattaaaaatctgactcttcactgggacttttttatagatacaaatgtatctgtggtagtacaaggactttgttactttggcgtgcagtcttatcaaggagttgtgtgtgtgttttgcatacaactttacaatttcatagttgaaagctgttacaaaatgaaagttttgtgtatggtaggatatcttcaaggtgggtggatgttttctgtttaaaagattaagatgccaacagcgtttttttcttttaattttttcatcaagcaccacccagtcagcttgaagagtttcaaatggaccctaccactgagaaatcaagatggcagtctactatggggaattgaggaaaaatggattaatacaagagtcctgtgataatatacaaccaagacagggttcttttaacatggattccatgcagtgaatgaagacataggtttcttacccaacacaaatggacagtggatttgactttctaaagactttttttgtggacattttgacatttggagaagaaagatggcacactaacccagataatagtttttatgcctggaattttttgcagtttgatttgtatgcgtatgacctcttgaaatgttaatttttaataaaatttgtaacacttaaaaa

SEQ ID NO: 6531 - DNA, 994 bp, Homo sapiens
atataagataaatatagtggatcatgtagatatgatattaaagtactatattttataaggaaggtggattattgtatatttaccactgttttctgcttaagaaccaaggtgatacttatataattgtttttaccctagcattttgggataattcttgagtcataaaaatctcctgatcaacttggtgattgaattggattgcattagttctgatagaaactgtttaaaaaattacctgacattctatagaaatgaaaggagccatgctgtgtaatcacaaggctttcatgacatgacatttatagattatatgaaataggtaatttcaaatgtaaattttaagttttatttactattagtcatcgttttttgattatttaaaaatttgtactatggacaactaattaattttactttttatcctctgagatttgattgtggagcggcataagggggagaaagataagttgaggacgtctctttatcttttgttaatcagaggtggtgatagagtggaaaatataacacgtttcggcattcaggagacctaccttccaataaatatgaacctcaaactgaatcctctaaaggccccatacaatgaagtagacattggtggaaacatttacacccagtcagcttgaagagtttcaaatggaccctaccactgagaaatcaagatggcagtctactatggggaattgaggaaaaatggattaatacaagagtcctgtgataatatacaaccaagacagggttcttttaacatggattccatgcagtgaatgaagacataggtttcttacccaacacaaatggacagtggatttgactttctaaagactttttttgtggacattttgacatttggagaagaaagatggcacactaacccagataatagtttttatgcctggaattttttgcagtttgatttgtatgcgtatgacctcttgaaatgttaatttttaataaaatttgtaacacttaaaaa

SEQ ID NO: 6532 - DNA, 506 bp, Homo sapiens
  misc_feature (39)..(39): n is a, c, g, or t
tgtatgttgtgttgctactctcgcgttattttcaacagncaagaaaacaaatgccttattagtaaaacaacaaatatgaacctcaaactgaatcctctaaaggccccatacaatgaagtagacattggtggaaacatttacacccagtcagcttgaagagtttcaaatggaccctaccactgagaaatcaagatggcagtctactatggggaattgaggaaaaatggattaatacaagagtcctgtgataatatacaaccaagacagggttcttttaacatggattccatgcagtgaatgaagacataggtttcttacccaacacaaatggacagtggatttgactttctaaagactttttttgtggacattttgacatttggagaagaaagatggcacactaacccagataatagtttttatgcctggaattttttgcagtttgatttgtatgcgtatgacctcttgaaatgttaatttttaataaaatttgtaacacttaaaaa

SEQ ID NO: 6533 - DNA, 486 bp, Homo sapiens
agtgatagattatttaactttgaaacataagaaagaggctcatagtaacacaaatatgaacctcaaactgaatcctctaaaggccccatacaatgaagtagacattggtggaaacatttacacccagtcagcttgaagagtttcaaatggaccctaccactgagaaatcaagatggcagtctactatggggaattgaggaaaaatggattaatacaagagtcctgtgataatatacaaccaagacagggttcttttaacatggattccatgcagtgaatgaagacataggtttcttacccaacacaaatggacagtggatttgactttctaaagactttttttgtggacattttgacatttggagaagaaagatggcacactaacccagataatagtttttatgcctggaattttttgcagtttgatttgtatgcgtatgacctcttgaaatgttaatttttaataaaatttgtaacacttaaaaa

SEQ ID NO: 6534 - DNA, 490 bp, Homo sapiens
ggggagtgaaagttctgagatgacaatatctatatcacgaacgagggagctcaggaaatatgaacctcaaactgaatcctctaaaggccccatacaatgaagtagacattggtggaaacatttacacccagtcagcttgaagagtttcaaatggaccctaccactgagaaatcaagatggcagtctactatggggaattgaggaaaaatggattaatacaagagtcctgtgataatatacaaccaagacagggttcttttaacatggattccatgcagtgaatgaagacataggtttcttacccaacacaaatggacagtggatttgactttctaaagactttttttgtggacattttgacatttggagaagaaagatggcacactaacccagataatagtttttatgcctggaattttttgcagtttgatttgtatgcgtatgacctcttgaaatgttaatttttaataaaatttgtaacacttaaaaa

SEQ ID NO: 6535 - DNA, 495 bp, Homo sapiens
aggcagtctccctccttcaggattggggagatcctgggaaagtattatgtttatatagcaaaatatgaacctcaaactgaatcctctaaaggccccatacaatgaagtagacattggtggaaacatttacacccagtcagcttgaagagtttcaaatggaccctaccactgagaaatcaagatggcagtctactatggggaattgaggaaaaatggattaatacaagagtcctgtgataatatacaaccaagacagggttcttttaacatggattccatgcagtgaatgaagacataggtttcttacccaacacaaatggacagtggatttgactttctaaagactttttttgtggacattttgacatttggagaagaaagatggcacactaacccagataatagtttttatgcctggaattttttgcagtttgatttgtatgcgtatgacctcttgaaatgttaatttttaataaaatttgtaacacttaaaaa

SEQ ID NO: 6536 - DNA, 479 bp, Homo sapiens
accaagtgcgttaatgaggtcgagtcagaaggaggcggggacttaaatatgaacctcaaactgaatcctctaaaggccccatacaatgaagtagacattggtggaaacatttacacccagtcagcttgaagagtttcaaatggaccctaccactgagaaatcaagatggcagtctactatggggaattgaggaaaaatggattaatacaagagtcctgtgataatatacaaccaagacagggttcttttaacatggattccatgcagtgaatgaagacataggtttcttacccaacacaaatggacagtggatttgactttctaaagactttttttgtggacattttgacatttggagaagaaagatggcacactaacccagataatagtttttatgcctggaattttttgcagtttgatttgtatgcgtatgacctcttgaaatgttaatttttaataaaatttgtaacacttaaaaa

SEQ ID NO: 6537 - DNA, 2246 bp, Homo sapiens
agctcctgccgccgccgcagccgctgccgccgcagcgaagaggccatgttgtgtggtgtgtggggcggggggaggaggaggagggagtaaagcctagagaggagacgggagagagacaccacacacacggcacaagatggccggagaggcagcagcaccccgagctgtcaggcgttccgccgcggccgcgaggcccgccggccggcggggagctacgcccggacggccagcaggcccgcgggagtggggctgccgcggctgaggcgaggcgggccgcgcgcgtcggcgtcacagcccgcggcagaggcgcccagggcggccgggcccacgacgccgaaagcgccgctgcggttgccgcctcggaggctcccccgggccccggcggctggacccggcgcgggcgggaggctcgggcgggcggtccggcccgggactcgggtttgggcgaccaggaggtgccggtggccgcgctcggacccggtgacttaagagattaaaattaatttggttgctgttggttctgaacaaataatgagttcttttatttgaggtatgccattttgaagactgagacgttggagttttatcctagaggataaaggaaatctttgggaaagtcagtattttatatagcaaaaatggattaatacaagagtcctgtgataatatacaaccaagacagggttcttttaacatggattccatgcagtgaatgaagacataggtttcttacccaacacaaatggacagtggatttgactttctaaagactttttttgtggacattttgacatttggagaagaaagatggcacactaacccagataatagtttttatgcctggaattttttgcagtttgatttgtatgcgtatgacctcttgaaatgttaatttttaataaaatttgtaacacttaaaaatttctcagtttgggtttttttttttaagtggaagtttaattaaatgtttagttttattttagtaatactttggcctttgtagttgccgagtggtaaagtgtactgaatatgaataaagctggtaaattggaaatggtgtaatcgaaaacattttacttggtttatgaagatttacgtttttcacaaagttgtgctcttagatggtcatttggtttaaatactgttttgtttgtgctttcatgaaacacctttcaaaacaactcaatgggtaataatagaatctgattttaatctgccacaagattttaatgaacttgaaacaaactgcttgttgctcgaaaattcaggatgagtgatacacatatacttctgaattattttgtgttgattgaaatggtttcttaagctttttaatactataaatacatcttgctatagaatattcatctgaatatttaaattaatgtctcctattgtcttactattagaggaagaagtgttggatttatgggttagggtccttggagtattcacaattttttaaatttgaaattatgtgtgtaatccattttatataactttgaagtaggattaatatcttgtatcgtctttattttgtacaattggggatttagaataaatgaattgcaccctgccatagattacttacgtttgatttttaaatgccaggttttcatttattactaatcaactgataccagttttggtaactattacaaaggtggtaggcattattttggtagacaaaatgagttcttgattctgttttcccattttacatgagaagaataaatagttcaggttaaattgttttgtgttaatcatactgtttgtgattcatgtcaaatactgcagcatacacatccatggttaatacacgagcaccatttgttattgactgatgtgaggtggttggtctttgttaaattcaaaaatggaattttggatattgttcttgctacgaaatttatctttgtgtgtagagtatggaattgaaacagtttggattatggattttacctagattggacattgttgcttttgtttggtgtaaatctaaagtggatttcttcagtgagggagagacatggttctggcagattatgttgaataaggaaagttgattggatttttttgggtgtgtgaatatgcttgtctgaatggagtgcttggtaggatattgtttctggaattagtaatttgtttctgtggatctcatggttttgatatttaggagaatttgctttgtgacattactttgataatttgcaatcacgtatgtcctattgttaataacattgttg

SEQ ID NO: 6538 - DNA, 1764 bp, Homo sapiens
gttctacctactagccccatcgcctataccaagttgacataaggagcacttacagcccacacagcttgcaactcacccagtcagcttgaagagtttcaaatggaccctaccactgagaaatcaagatggcagtctactatggggaattgaggaaaaatggattaatacaagagtcctgtgataatatacaaccaagacagggttcttttaacatggattccatgcagtgaatgaagacataggtttcttacccaacacaaatggacagtggatttgactttctaaagactttttttgtggacattttgacatttggagaagaaagatggcacactaacccagataatagtttttatgcctggaattttttgcagtttgatttgtatgcgtatgacctcttgaaatgttaatttttaataaaatttgtaacacttaaaaatttctcagtttgggtttttttttttaagtggaagtttaattaaatgtttagttttattttagtaatactttggcctttgtagttgccgagtggtaaagtgtactgaatatgaataaagctggtaaattggaaatggtgtaatcgaaaacattttacttggtttatgaagatttacgtttttcacaaagttgtgctcttagatggtcatttggtttaaatactgttttgtttgtgctttcatgaaacacctttcaaaacaactcaatgggtaataatagaatctgattttaatctgccacaagattttaatgaacttgaaacaaactgcttgttgctcgaaaattcaggatgagtgatacacatatacttctgaattattttgtgttgattgaaatggtttcttaagctttttaatactataaatacatcttgctatagaatattcatctgaatatttaaattaatgtctcctattgtcttactattagaggaagaagtgttggatttatgggttagggtccttggagtattcacaattttttaaatttgaaattatgtgtgtaatccattttatataactttgaagtaggattaatatcttgtatcgtctttattttgtacaattggggatttagaataaatgaattgcaccctgccatagattacttacgtttgatttttaaatgccaggttttcatttattactaatcaactgataccagttttggtaactattacaaaggtggtaggcattattttggtagacaaaatgagttcttgattctgttttcccattttacatgagaagaataaatagttcaggttaaattgttttgtgttaatcatactgtttgtgattcatgtcaaatactgcagcatacacatccatggttaatacacgagcaccatttgttattgactgatgtgaggtggttggtctttgttaaattcaaaaatggaattttggatattgttcttgctacgaaatttatctttgtgtgtagagtatggaattgaaacagtttggattatggattttacctagattggacattgttgcttttgtttggtgtaaatctaaagtggatttcttcagtgagggagagacatggttctggcagattatgttgaataaggaaagttgattggatttttttgggtgtgtgaatatgcttgtctgaatggagtgcttggtaggatattgtttctggaattagtaatttgtttctgtggatctcatggttttgatatttaggagaatttgctttgtgacattactttgataatttgcaatcacgtatgtcctattgttaataacattgttg

SEQ ID NO: 6539 - DNA, 1751 bp, Homo sapiens
tgttaattcgtatagcgaacggggcgatacgttatgaacttcaattggaattgacagccccacccagtcagcttgaagagtttcaaatggaccctaccactgagaaatcaagatggcagtctactatggggaattgaggaaaaatggattaatacaagagtcctgtgataatatacaaccaagacagggttcttttaacatggattccatgcagtgaatgaagacataggtttcttacccaacacaaatggacagtggatttgactttctaaagactttttttgtggacattttgacatttggagaagaaagatggcacactaacccagataatagtttttatgcctggaattttttgcagtttgatttgtatgcgtatgacctcttgaaatgttaatttttaataaaatttgtaacacttaaaaatttctcagtttgggtttttttttttaagtggaagtttaattaaatgtttagttttattttagtaatactttggcctttgtagttgccgagtggtaaagtgtactgaatatgaataaagctggtaaattggaaatggtgtaatcgaaaacattttacttggtttatgaagatttacgtttttcacaaagttgtgctcttagatggtcatttggtttaaatactgttttgtttgtgctttcatgaaacacctttcaaaacaactcaatgggtaataatagaatctgattttaatctgccacaagattttaatgaacttgaaacaaactgcttgttgctcgaaaattcaggatgagtgatacacatatacttctgaattattttgtgttgattgaaatggtttcttaagctttttaatactataaatacatcttgctatagaatattcatctgaatatttaaattaatgtctcctattgtcttactattagaggaagaagtgttggatttatgggttagggtccttggagtattcacaattttttaaatttgaaattatgtgtgtaatccattttatataactttgaagtaggattaatatcttgtatcgtctttattttgtacaattggggatttagaataaatgaattgcaccctgccatagattacttacgtttgatttttaaatgccaggttttcatttattactaatcaactgataccagttttggtaactattacaaaggtggtaggcattattttggtagacaaaatgagttcttgattctgttttcccattttacatgagaagaataaatagttcaggttaaattgttttgtgttaatcatactgtttgtgattcatgtcaaatactgcagcatacacatccatggttaatacacgagcaccatttgttattgactgatgtgaggtggttggtctttgttaaattcaaaaatggaattttggatattgttcttgctacgaaatttatctttgtgtgtagagtatggaattgaaacagtttggattatggattttacctagattggacattgttgcttttgtttggtgtaaatctaaagtggatttcttcagtgagggagagacatggttctggcagattatgttgaataaggaaagttgattggatttttttgggtgtgtgaatatgcttgtctgaatggagtgcttggtaggatattgtttctggaattagtaatttgtttctgtggatctcatggttttgatatttaggagaatttgctttgtgacattactttgataatttgcaatcacgtatgtcctattgttaataacattgttg

SEQ ID NO: 6540 - DNA, 1711 bp, Homo sapiens
gtgactctacaggatcccggcacccagtcagcttgaagagtttcaaatggaccctaccactgagaaatcaagatggcagtctactatggggaattgaggaaaaatggattaatacaagagtcctgtgataatatacaaccaagacagggttcttttaacatggattccatgcagtgaatgaagacataggtttcttacccaacacaaatggacagtggatttgactttctaaagactttttttgtggacattttgacatttggagaagaaagatggcacactaacccagataatagtttttatgcctggaattttttgcagtttgatttgtatgcgtatgacctcttgaaatgttaatttttaataaaatttgtaacacttaaaaatttctcagtttgggtttttttttttaagtggaagtttaattaaatgtttagttttattttagtaatactttggcctttgtagttgccgagtggtaaagtgtactgaatatgaataaagctggtaaattggaaatggtgtaatcgaaaacattttacttggtttatgaagatttacgtttttcacaaagttgtgctcttagatggtcatttggtttaaatactgttttgtttgtgctttcatgaaacacctttcaaaacaactcaatgggtaataatagaatctgattttaatctgccacaagattttaatgaacttgaaacaaactgcttgttgctcgaaaattcaggatgagtgatacacatatacttctgaattattttgtgttgattgaaatggtttcttaagctttttaatactataaatacatcttgctatagaatattcatctgaatatttaaattaatgtctcctattgtcttactattagaggaagaagtgttggatttatgggttagggtccttggagtattcacaattttttaaatttgaaattatgtgtgtaatccattttatataactttgaagtaggattaatatcttgtatcgtctttattttgtacaattggggatttagaataaatgaattgcaccctgccatagattacttacgtttgatttttaaatgccaggttttcatttattactaatcaactgataccagttttggtaactattacaaaggtggtaggcattattttggtagacaaaatgagttcttgattctgttttcccattttacatgagaagaataaatagttcaggttaaattgttttgtgttaatcatactgtttgtgattcatgtcaaatactgcagcatacacatccatggttaatacacgagcaccatttgttattgactgatgtgaggtggttggtctttgttaaattcaaaaatggaattttggatattgttcttgctacgaaatttatctttgtgtgtagagtatggaattgaaacagtttggattatggattttacctagattggacattgttgcttttgtttggtgtaaatctaaagtggatttcttcagtgagggagagacatggttctggcagattatgttgaataaggaaagttgattggatttttttgggtgtgtgaatatgcttgtctgaatggagtgcttggtaggatattgtttctggaattagtaatttgtttctgtggatctcatggttttgatatttaggagaatttgctttgtgacattactttgataatttgcaatcacgtatgtcctattgttaataacattgttg

SEQ ID NO: 6541 - DNA, 1714 bp, Homo sapiens
agtccggggtggggaaacaaaagcacccagtcagcttgaagagtttcaaatggaccctaccactgagaaatcaagatggcagtctactatggggaattgaggaaaaatggattaatacaagagtcctgtgataatatacaaccaagacagggttcttttaacatggattccatgcagtgaatgaagacataggtttcttacccaacacaaatggacagtggatttgactttctaaagactttttttgtggacattttgacatttggagaagaaagatggcacactaacccagataatagtttttatgcctggaattttttgcagtttgatttgtatgcgtatgacctcttgaaatgttaatttttaataaaatttgtaacacttaaaaatttctcagtttgggtttttttttttaagtggaagtttaattaaatgtttagttttattttagtaatactttggcctttgtagttgccgagtggtaaagtgtactgaatatgaataaagctggtaaattggaaatggtgtaatcgaaaacattttacttggtttatgaagatttacgtttttcacaaagttgtgctcttagatggtcatttggtttaaatactgttttgtttgtgctttcatgaaacacctttcaaaacaactcaatgggtaataatagaatctgattttaatctgccacaagattttaatgaacttgaaacaaactgcttgttgctcgaaaattcaggatgagtgatacacatatacttctgaattattttgtgttgattgaaatggtttcttaagctttttaatactataaatacatcttgctatagaatattcatctgaatatttaaattaatgtctcctattgtcttactattagaggaagaagtgttggatttatgggttagggtccttggagtattcacaattttttaaatttgaaattatgtgtgtaatccattttatataactttgaagtaggattaatatcttgtatcgtctttattttgtacaattggggatttagaataaatgaattgcaccctgccatagattacttacgtttgatttttaaatgccaggttttcatttattactaatcaactgataccagttttggtaactattacaaaggtggtaggcattattttggtagacaaaatgagttcttgattctgttttcccattttacatgagaagaataaatagttcaggttaaattgttttgtgttaatcatactgtttgtgattcatgtcaaatactgcagcatacacatccatggttaatacacgagcaccatttgttattgactgatgtgaggtggttggtctttgttaaattcaaaaatggaattttggatattgttcttgctacgaaatttatctttgtgtgtagagtatggaattgaaacagtttggattatggattttacctagattggacattgttgcttttgtttggtgtaaatctaaagtggatttcttcagtgagggagagacatggttctggcagattatgttgaataaggaaagttgattggatttttttgggtgtgtgaatatgcttgtctgaatggagtgcttggtaggatattgtttctggaattagtaatttgtttctgtggatctcatggttttgatatttaggagaatttgctttgtgacattactttgataatttgcaatcacgtatgtcctattgttaataacattgttg

SEQ ID NO: 6542 - DNA, 385 bp, Homo sapiens
cggccgcgaggcccgccggccggcggggagctacgcccggacggccagcaggcccgcgggagtggggctgccgcggctgaggcgaggcgggccgcgcgcgtcggcgtcacagcccgcggcagaggcgcccagggcggccgggcccacgacgccgaaagcgccgctgcggttgccgcctcggaggctcccccgggccccggcggctggacccggcgcgggcgggaggctcgggcgggcggtccggcccgggactcgggtttgggcgaccaggaggtgccggtggccgcgctcggacccggtgagtggctccctagctccttttattgtcctttgtccttgggaggaaaagcaaaatgtccttgagcgcgcgagcaggagggggcgg

SEQ ID NO: 6543 - DNA, 411 bp, Homo sapiens
  misc_feature (364)..(365): n is a, c, g, or t
  misc_feature (402)..(403): n is a, c, g, or t
catataattggcataattgaaaatgtctgaccatagggcactactgtttatctgtagctgaatttctatttagtggtttctcatttttacccacataattagtggcatgacttagaaggcctcccacattatttcctagttacatcgccagagttcatcactgaaaccttgtctccaaagaggtgggcacctaattatgtcctgcagagctgttgatacagaactgtaatgaaaactaatgaaattgattaacccagactatatttgatgaaggagttaaatacagtatgacactgtgagccctctttcttttttttgagacggagtctcactctgtcacccaggttggagtgcagtgagccgnngaaccgccattgcgctccagcttgggcaacagagcgnnattcgtca

SEQ ID NO: 6544 - DNA, 403 bp, Homo sapiens
tcttatgggaccgtctttgtgtatggagtctgttgttaagtgattaacatcactgcgacacatgactgtatttctgtgggttttggcaaatgcagtcatggctctaccactagtcacaagtcggaacacttccattaccttatatgctgtgttttggaagaaattattaaaagtagtttgatacttaaaattcaaagaaaaatcgttttgtggattttactggtattttagcctagtttaagtgagaaatgtgtttctcccttaaggcagttgggatactaagaataggcgagatttcagttcttattttcactatgatttgatatttattgttattccagaacatggatttgtgtttccagcttttaaataattgatatttttcatataatagattgagact

SEQ ID NO: 6545 - DNA, 226 bp, Homo sapiens
aaggatttgaaattgaccctcaaagaactgaatatctttttaaataaaatgacaatattaaaaccacatgcttaaaatacgtacggctaagtgcttcagcagagactgggataccagatcctgagttcctcaaaggcaggagtgtccaagtcattcacttttgcttcaccggagcctaacacattgcctggagcagtgttggtactcaggaaaaccttctgtcgaa

SEQ ID NO: 6546 - DNA, 369 bp, Homo sapiens
gtgacttcagtggtccaagggtgaaacgctggtggctgggaccagagtggaggctgaggagtgggggagaagtggctgaattcagattttgagctctcagccttctggaagggacattaggaggaaggaggatgggcagccctgaagaggggagaggggtcaagtgctgtggctcacacctgtaatcccaggactttgggaggccgaggcgggcggatcacctgaggtcaggagttcgagatcagcctggacaacatgttgaaaccctgtctctactaaaaatacaaaaattagccagcgtggtggtacacgcctgtagtcccagctatttgggaggctgagacaggagaatcgcttgaacctgggggg

SEQ ID NO: 6547 - DNA, 548 bp, Homo sapiens
tctgctcactgcggtcagctgaacaaatgtgctgacatttcactcctcagcaggctatgaaactcttcacttgtgcccaagttcttgttaggtagcaaggctacctaggcctgttccaataatgagaatctgttctgcttgagcccacggaacacagctccactctctgctgccacttggccatctccagtgcttggcccaatgtgacccttctgcttgggccattctcatgggcagccaggtacaaattctggtctctgcctcactggcttctctgaatttaggctggcccccgagtctgcctgcagctctcctgcagcctggctactcacaaaggtcagtcccttccttgcgagggggtctgagtgtcctccccaacttggaaggaggggctcatagactgtttccctgggctggcagaaaggcaattaaagcattgtttgctagctgtgcggtttgcacacctcttctccaagaggaaacaaatattttgaggagatgacttcacagggaaggcacgttgctcgggaggtctgttttccagactc

SEQ ID NO: 6548 - DNA, 501 bp, Homo sapiens
ggggaggggcggggcggggaggggccaggcgggagcgcagagcacgttcgcgggagggtctggccttgtcatgcgcggggtcgccgcgggaaggaggatggcccgttgagggcttggcacggatacctgacggtcggaggaaggggggagagccggtaaaggaggctgacccaaaactgaggcccggtgcatcatccctcatgagaggcaagcccagaagcgccacaatactagggtcccccttcaggagacagagacccccaggacacagagggcccccaagtcactcagcccccccaggacacgcagctcctgcaggacgcagagggtgcccaagacacacagtccccaggacagagaccccccaggacacagaggacccccaagacacgcagtctccaggacacagaggtccccccaggacacacagtgcccccaggacacagaggtcccccaggacacagcactcccaggacacacagcccccccgggacacagaaa

SEQ ID NO: 6549 - DNA, 263 bp, Homo sapiens
gtttgggctgactaaacttttaaacccaagaatttctccctttatttgctttatggctgaattatgaggacagatgcaccttctctcttagcaaagagaaaaaccaaaatctttttacttacacatgacccatattataaacagcttctcatgccctgttcaacatttctatatctctgtcccccaaaagcaaacaaaaagttccaattgccagaaccattgctactgccactttaggagatgttattaagaaacaaggaaaa

SEQ ID NO: 6550 - DNA, 573 bp, Homo sapiens
gtagagtcagtttcccctctatcttgttaccccataattcctgtggaaagtttcccatgaacttgaattctgccttctaactattgtcaccatttggagatttcctattatatgttgtgtcacaactgctggagatctaccttttcactttttcatctcttcttcgtttagcctgcttcgtaatttgtaacctcccaccatctcttagaatgcacgggcagtccttatttctggcatacatcaagaaaggaatcagagcctgattgctttgaaaatgccaggattctacggccaggctcacacctgtaatcccaacactttgggaggctgaaatgggaggactgcttgagcctgggagtttgagaccagcctgtgcatatagtaagacctcgtctctacaaaagatttctttaaaaaattgccaagcatggtggcacaaacctttggtcccagctactcaggaggcttaagtgggagggtcgcttgaacctggacggcgaagagtttgcagtgagccataatggtgccactgcactccagcatgggcgacagagtgagaccttgtctgaaaaa

SEQ ID NO: 6551 - DNA, 436 bp, Homo sapiens
gcatctggagagggagaattgtaaatacttgaaaggaagccatagctttggacttccctgattgtagtgactcttataactgtcccttgtggaaattctagaagttctgcctatggagttgctactagagatactggctcctgtggtacatggggccttctgccctagggtgattctcattcatatccagtgtgaatcttctccctgtacctgatctgtgtcgactcctgtaaggactcccactgaagaggaacacctgatacttctttgttggcaatctgtgttttcctaacagataccgttttgagtaaactggcaccatgtatggcctatggctatggttgtcttataagtctggatgtttagttgagccttaagaagactttctgggccaggcccggtggctcacgtctgtaatcccagcactttgggagac

SEQ ID NO: 6552 - DNA, 424 bp, Homo sapiens
aaaatattccaagacatctttgtattaatacaaggaagtttatgagttggggcagggaaaacagagatggaggagatgaaactcgtgataagattgtcataactcccaaatatattgtaatcacagatctaggttggtttctgtcagagacatcaccattccaccagtctcccttcctggaaacctagaaatcttcactttttccgctgtcactttctacatctaatgaatagatccctattgattatttatttagaaaaatctctgaccgggcatggtggctcatgcctgtaatcccagcactttgggaggctgaggcaggcggatcatgaagtcaggagatcgagaccatcctggctaacatggtgaaaccctgtctctactaaaaaaaaaaaaaaaaaaaaattccaaaaattttatcggg

SEQ ID NO: 6553 - DNA, 530 bp, Homo sapiens
taatccaggctgacaagagcgccctgatgttgcaatgtgctgagcaagtagtcagcctgcccattcagcttcctactgtgttcttttgctaaatgctttctaatctcttaatgtctcttttgaaaggtggggacccaaactgtatgcattgttccagatgcgctcttgccaaagcagcataaagcaaatgtaacccttaggaagaaggctccctccctcactaggtaagtacaactggcagccgtggccagggccagctcacctgcccactagacctgccacaccttccactgccaggatgctggtgggacctcataaaatctgaacctgttcatccacaggacctgtggatttcaagtcaaaggaactgaccaagagcaacctctatctttacagcctctgattccatcccttccaggttctttcccaatagtttgcatctcttgggctctttgccaatcaagaacatcatcctccaatttaataattttgaggtgagctagaatttattaaaatgatgttttacctgt

SEQ ID NO: 6554 - DNA, 627 bp, Homo sapiens
taatccaggctgacaagagcgccctgatgttgcaatgtgctgagcaagtagtcagcctgcccattcagcttcctactgtgttcttttgctaaatgctttctaatctcttaatgtctcttttgaaaggtggggacccaaactgtatgcattgttccagatgcgctcttgccaaagcagcataaagcaaatgtaacccttaggaagaaggctccctccctcactaggccactgctgcaggacagtgaagctgacttaaaatgcccctgccctgggctacaaagaatgctagagtggagacaagagtccagactctgaaataacctcctttggacacagaagctaccactgttgcttatcagacgcagcgggccctgggtttttctggggccttaagcagtgaaccctggtcagctggcctgagtcccaacccaagcccatcaccacaagcctcaagacaggaagatctcagtgaaacctttcctctaatccaagtgacatcattgtcgcaggtgtttgtacatgaaagcagagtgatgaaggtgtgtgggtccacggaagaagtaaaaatacagcactagttcatatttttcctagtctctccctgttcccaggtaaagttatagcatg

SEQ ID NO: 6555 - DNA, 474 bp, Homo sapiens
ctgctttgttttttcagtgtttcctgcaagctgcaaatgggctgtgtggccataaggctggacaagagcatcacacagaaagccaaggtcctctagggtcacagccaccatcttagatttaactcttagactagcaaggagtatatatttctggcaaaattccagaaatgattaactagatcgcttatgggcaactggtgaatccacactgatctctgggatcaccgtttccttttctaagaagtcacgcaagaccaacctcatggcttttttggatcaggctactggatgggaacacgggagagtgcggcagctgagccaccacgcccagcctccacatgctttttaaaaacattcccgtgtttaaaaaaagttaaccacggggcttttaagcaccacatgctttaaatgccccttggtgacttgagtgttctactcagtttatcatgaatgtttttctgggacaactgacct

SEQ ID NO: 6556 - DNA, 2438 bp, Homo sapiens
gaataactctcatgagatctgatggcttttataaaggggcattcccctgcacacaccctctcttgcctcctgccatacgagatgtgtcttgctcctccctgtcttccaccatgattgtgagtgaggcctccccagccacatggaactgtgtcaattggacctctttcctttgtaaattgcccagtcttgggtatgtctttattagcagtgtgagaacagactaatacaagtagataggtatcttttaacttgtttccagtgactcttgctttactttcaggtggatgatgacagaatggaccccttgttcacgaacttgtggaaaaggaatgcagagcagacaagtggcctgtacccaacaactgagcaatggaacactgattagagcccgagagagggactgcattgggcccaagcccgcctctgcccagcgctgtgagggccaggactgcatgaccgtgtgggaggcgggagtgtggtctgagtgttcagtcaagtgtggcaaaggcatacgtcatcggaccgttagatgtaccaacccaagaaagaagtgtgtcctctctaccagacccagggaggctgaagactgtgaggattattcaaaatgctatgtgtggcgaatgggtgactggtctaagtgctcaattacctgtggcaaaggaatgcagtcccgtgtaatccaatgcatgcataagatcacaggaagacatggaaatgaatgtttttcctcagaaaaacctgcagcatacaggccatgccatcttcaaccctgcaatgagaaaattaatgtaaataccataacatcacccagactggctgctctgactttcaagtgcctgggagatcagtggccagtgtactgccgagtgatacgtgaaaagaacctatgtcaggacatgcggtggtatcagcgctgctgtgaaacatgcagggacttctatgcccaaaagctgcagcagaagagttgacctctagcaggctggctggatcacagctctttgcaattacattatttataaacacacacactagcatgtttttcagaccaaatattatcagattacatataatttaatcaaattaatttatttttttgcctgccaaacatccaatgtggtgcttgttttggttacacaaacattttgatttatactatatggcttcataaataattttatatgaatgaattagttggatccagtaatataataaaaagaaaaaggaaaaaaatagatcattatacttaaaacaaggtttcgttgtttgttagggctatctctaaggtgctactctctccccaccaataacattgaattatccagaatgtatactgacttagcataatagtttaggtgtatatgaagagaaactatttttgttttttggtgtcctgctgcagaattagcccattttctgtcacctgcaggagatgtgtaaacataatgaacctcatgctgttgaacaggtttttagagaatgtattatgaatttggttcagatttatagacatccataggaaaaattctgctgtaattataaccttattttgatatggaaaagaaaagtcaaaatagagactttgatcatgttcatgaacatgtacttgaacacaagtattgtaacaatgaaacactgtaatgatttacactgaatcacaattgcactgttgatatagtgtagagaaatcgttagaaatggtgacatcttacaaaaaatgtgtattattttaacatgttatcactagattttagctttttttaaatatttttaacaaagaaaacattgatccacccatttccctgtatctttttagcagatttattaaagagtatagtacttagcctcacgaatcataattagaaaatttactagtatttctcagccttttccctaggaacaaggaaaaacagaaagcatataatacggtggtcgtttcattgtgtttttcttccttttaaaaattaaaaagttttacaattatgtgaaacgttcaaaagccagcttaaaatttttcttgtgagaaaatattatacatgattcacatgatttcttagatttttcaataaaatatgtaaaacttcccactgagagacaattcttcatagacttgtcacatatccacatgtctgatgaacaaaggtactgtctacttttgttctggagtatcttctagaggatgtttatagagtgaactgccttggaagatagtatgtctcttgggagcaaagggcaaacatacttctcattataaaagtttcaggttccctaaaattggggtttctttactataagacaatccaatgtatgttctgaggtcacctggctctcttcatgtcaccctttgggaaatggggctcaacgagccagtacaggaaaagctgattccctggctactactatcgctgtgagtaataaagtcctttgtctctaatgcagga

SEQ ID NO: 6557 - DNA, 2345 bp, Homo sapiens
tcatgtggacacacacaagctgggaagattgcgatgccacttgtggaggaggagaaaggaagacaacagtgtcctgcacaaaaatcatgagcaaaaatatcagcattgtggacaatgagaaatgcaaatacttaaccaagccagagccacagattcgaaagtgcaatgagcaaccatgtcaaacaaggtggatgatgacagaatggaccccttgttcacgaacttgtggaaaaggaatgcagagcagacaagtggcctgtacccaacaactgagcaatggaacactgattagagcccgagagagggactgcattgggcccaagcccgcctctgcccagcgctgtgagggccaggactgcatgaccgtgtgggaggcgggagtgtggtctgagtgttcagtcaagtgtggcaaaggcatacgtcatcggaccgttagatgtaccaacccaagaaagaagtgtgtcctctctaccagacccagggaggctgaagactgtgaggattattcaaaatgctatgtgtggcgaatgggtgactggtctaagtgctcaattacctgtggcaaaggaatgcagtcccgtgtaatccaatgcatgcataagatcacaggaagacatggaaatgaatgtttttcctcagaaaaacctgcagcatacaggccatgccatcttcaaccctgcaatgagaaaattaatgtaaataccataacatcacccagactggctgctctgactttcaagtgcctgggagatcagtggccagtgtactgccgagtgatacgtgaaaagaacctatgtcaggacatgcggtggtatcagcgctgctgtgaaacatgcagggacttctatgcccaaaagctgcagcagaagagttgacctctagcaggctggctggatcacagctctttgcaattacattatttataaacacacacactagcatgtttttcagaccaaatattatcagattacatataatttaatcaaattaatttatttttttgcctgccaaacatccaatgtggtgcttgttttggttacacaaacattttgatttatactatatggcttcataaataattttatatgaatgaattagttggatccagtaatataataaaaagaaaaaggaaaaaaatagatcattatacttaaaacaaggtttcgttgtttgttagggctatctctaaggtgctactctctccccaccaataacattgaattatccagaatgtatactgacttagcataatagtttaggtgtatatgaagagaaactatttttgttttttggtgtcctgctgcagaattagcccattttctgtcacctgcaggagatgtgtaaacataatgaacctcatgctgttgaacaggtttttagagaatgtattatgaatttggttcagatttatagacatccataggaaaaattctgctgtaattataaccttattttgatatggaaaagaaaagtcaaaatagagactttgatcatgttcatgaacatgtacttgaacacaagtattgtaacaatgaaacactgtaatgatttacactgaatcacaattgcactgttgatatagtgtagagaaatcgttagaaatggtgacatcttacaaaaaatgtgtattattttaacatgttatcactagattttagctttttttaaatatttttaacaaagaaaacattgatccacccatttccctgtatctttttagcagatttattaaagagtatagtacttagcctcacgaatcataattagaaaatttactagtatttctcagccttttccctaggaacaaggaaaaacagaaagcatataatacggtggtcgtttcattgtgtttttcttccttttaaaaattaaaaagttttacaattatgtgaaacgttcaaaagccagcttaaaatttttcttgtgagaaaatattatacatgattcacatgatttcttagatttttcaataaaatatgtaaaacttcccactgagagacaattcttcatagacttgtcacatatccacatgtctgatgaacaaaggtactgtctacttttgttctggagtatcttctagaggatgtttatagagtgaactgccttggaagatagtatgtctcttgggagcaaagggcaaacatacttctcattataaaagtttcaggttccctaaaattggggtttctttactataagacaatccaatgtatgttctgaggtcacctggctctcttcatgtcaccctttgggaaatggggctcaacgagccagtacaggaaaagctgattccctggctactactatcgctgtgagtaataaagtcctttgtctctaatgcagga

SEQ ID NO: 6558 - DNA, 483 bp, Homo sapiens
gtgcagtgacttatattaaagaccagaaagttcctgtagtaaagatatttatttatctttgtttttaagaggagcgctaagctcccttttaaataatagctatattttattaaatactgctattcacagtttgaaaaccactgatatagatgcttaaatacctcacaaaatgtccattgacattaaaaatagcaaacattgacaaacatccaaatatcacaaaaatatagagcttgaaataaaatcagaaatgtaaggttgttttaagggttaaatgagatgatgtgaagcaatttacatggcatcaagtacatagcaagtattgaaaaaaagtactgacttatggccaggtgtggtggctcacgcctgtaatcccagcactttgggaggccgaggcaggcagatcacaaggtcaggagtttgagatcagcctggccaacatggcaaagccccatctctactataaatatctctactataaat

SEQ ID NO: 6559 - DNA, 488 bp, Homo sapiens
ttgtgagaagtcaggagtcacatcagaaacttgcttttcctcagcggcacctcctgctcgtgacgggccctgttcctttcccctcagagacgtacctgggatccatcctggcctctcagtcagggccgacttccccaccccagtgtttgctaccatgattgtgacctgttctaagctgagtttctgcagctttgccggtcacatgcattctttcctccccaagacaacccctcatcacacagcagagacagtggtcactgagaacatggtctgcctcccatctctccccttcgtgggcacctcagtggcctcctctgcgctccgaacaaaagcaagagaccctgctgaacctgggatgggttggtagaagatgggctccccacgggacccgggcggggacagccccctcagcctcacggcttcccagacagagcgaaggtgtccttccagtctctccacatgtcatcttaaataaagttagttaattc

SEQ ID NO: 6560 - DNA, 375 bp, Homo sapiens
gaacaggtaaggtgtcagggaaggtgaaatggatggtggtgatggctacacagcgtgaataaattttatgctacaaaactgtgcacttaaaattggtgaaaatgcaccacaaagaaatgataaatatttaaagtgatggatacaatacagcaattaccatgatttggtcgttacataatgtgtgcgtggatcaaaacatcataccgtacccgacgattatacataaccattatgcatcaattacaaatttaaaaattggccgggcacagtggctcacatctcttaactccaatacttcgggaggctgaggtgagaggattgtttgagtccaggggttagagatcagcctgagcaacaaagtgagacctcatctct

SEQ ID NO: 6561 - DNA, 300 bp, Homo sapiens
ggcacttgtatttccttgcttcatgtgatatttaattaaatcatatagaatattaagtacatttcatacgaagaagtagagcattctagagagagtcacctgttcacagagtgtcatcgtactctgggcatcaggcagtatgattttcaaagggaataaggggcatcaagctagtgaagtgaaggttggttaaaagcttcctttgtagttatatttagaatagtattcttgtgggaaactgtatttagtagcatgctcctatagtgtttggggagtgagataggcacttcatgtttacat

SEQ ID NO: 6562 - DNA, 406 bp, Homo sapiens
ggaaagtagtgctagcaagtcaggaggagtgtattcttctgtgtttgtacagccccagtgaaatgaatcctctgaaagtagtcagtctcttctgttttttcattttccaggttgcatgggcctcagtctagatccaagagaccggcctcttggatgaacaaatgcacgcttaacctttaacatgggaccagttcttggcttccttgcttagggagcatgaccactcttggggctgtgccgactctccgttataaccagaaagtgaagatgctttttctcctcaccccctgccttccctgcgccagtgccagcacatttctttagggacattatgctatttctctaagcctgaaagtgataaagaggaaattatgtaacatttgctcagttgctatttaaaaaacaa

SEQ ID NO: 6563 - DNA, 341 bp, Homo sapiens
gaatctaatgcctaatgatctgaggtggaacagtttcatcctgaagtcttccccgcaacccctcttcccccgagtctgtggaaaaattgccttccatgaaatcagtccctggtgccaaaatggttgggaactcctcctttagataaaactggatacatcccttataacatagacatcagtttgaataaactgtaaatggcacaggtgtaaatgtaacagcacctgaacccatgcaagtattaggagaaaacatgaatgagttccgttatataacctccgagtctggaagcaataagagaaaaggttgataaatttaagtacatttttaaaaagttggatga

SEQ ID NO: 6564 - DNA, 528 bp, Homo sapiens
gggaggtaattgaatcatggggccagtctttcccatggtattctcgtggtagtgaataagtctcacaagatctgatgggtttatcaggggtttccacttttgcttcttcatcatttttctcttgctgccgccatgtaagaaatgcctttcacctctcgccatgaatcggaggcctcctcagccatgtggaactgtaagtccaattaaacctctttttattcccagtttcaggtatgccgggtatatttaagggttttgcttttattgttaataaagccatgtttttgtgtgatggggaaggagccactggtccagaggacaaaagggtaaaagtttttgttaaaaataatttatctgacagtgaatagtgaatcattcacactcttttatttggctgttacattctatgtgcaaaaatgtatttcctaaatgtagattgaatgtaatcagtgacatctttacccataaactggaaatatgcataatatcgatctgccatggtaaataacagatttgtaactattaaaa

SEQ ID NO: 6565 - DNA, 266 bp, Homo sapiens
ggaaactccatcaagaaaaaaaaaaaagaaagaaaagaaaacgtcagctatgttgtaagcaaagcttcaatacgttgctgtgaaccataccattctacgtagcagcaacaatgactcagcaatgattcagcaaatgaatcatgcttcagtcccagcacaattttcttctggtcagtgagtatgcagctggagaagcctccttggccaagatcacagcaaggataggctgtcacaggtgcccttccagcgaggggagggagctactg

SEQ ID NO: 6566 - DNA, 419 bp, Homo sapiens
tcataggctaatcataattgataggtcatattagatatagaaaaacaacacaaaatattgtcagttctgcagttatatgtatgtctgtggcatatagacataccctataataaaaagaaatagaacgtgttgagttcaaactaaagggtaactcaaaaatcatttaaatctgcctttggtatcattatttaagattttgtgtgccgggtgtgatggctcacgcctgtaatctcagcactttgggaggccaaggcagccagatccattaagctccaggagttcaagacccgcctgagcaacatggcaaaaccatgtctttacaaaaaatttttaaaaattaggcacggtggtgcatgcctatggtcccagctactcgggaggttgaggtgggaggatcacttgagcccaggaggtcgaat

SEQ ID NO: 6567 - DNA, 341 bp, Homo sapiens
atcgaggggacgttaattacctgtctttgtgaattaagcagtttatgagcagcaagttactgaggaccgtaaataaagtcatagagagctcaaggaagtaatagcttcggtttaatcatctgcttcaaaggtgccaatttttacatactactatatgtaatgatttgttctaaattgcttgttccttttgaaaaaaatttaaggatgttttatgaaaatgaccatggaggtctcctgcttaaccaatatactttatatttatagttagagggcccctccttgatagatttgaatgaggagctggaaagcttgggtacaattttcatgactagtttgtatta

SEQ ID NO: 6568 - DNA, 461 bp, Homo sapiens
agattattctaaaatgtatttgaaaagacatgaactagaacagctgaaacaattttgagaaaaggaggataaaaagataggaatctgtatgtccggtttcaaggagttatatagctaccataaacaggatagtgaggtatttgcagagggataaacagataaatggaacagaatagagaacctagaaatatctacacacaaatatgcccaattgatttttataatggtgcaaaagtaattctgtggaagaaggatcatctttcaaaaaatggtacaagaccagttagaaactcacgggaagaaaggagaaggagaaaagaaggaaaaagagaaagacctcaccctaagtctcaaactttgtacaaaaattaattcaaaagagatcacagacttaaatgtgaaatgtaaaacaataaatcacttataaaaaacaaaaaacagaaacaaaaacaaaacaaaac

SEQ ID NO: 6569 - DNA, 260 bp, Homo sapiens
actctctgctctggtagacgggaagagcattaatgctggaggccacaaggttgggctcgccctggagttggaggcttaatccagctgaaagaaacctttgggaatggatatcagaagatttggccttaatatatttccattgtgaccagcagcaggcttttttcccccaagaagatgatcaaaacaaaggatgatctcaacaagagctgtattttaagtatttagacagttctttgttagctggtttctagttggttatc

SEQ ID NO: 6570 - DNA, 722 bp, Homo sapiens
gccttctgtgcctcagttccctcctctgtatcacatgaaggtgcatggatgggactaggtgggacaggcactcccacccactcagagctcccaagtccaactacctcacggaaggccgcctttgtccttggccccacactgggtccagtctgtcgcagtggagtgcaggcctgtggtacaatgcaaggcgaccacatgtagttcctgcaccagagagagccatgggatggggggctgagttaaaaactcatagacccctcatcaacacagtggccagcacatgtgcagccctgtgccagggaccctggagcttaccacccatgctcctccagcccatctggagctcctgcccccaaccccagcaccctatttatctatagctactgcaccctggaatgcaccctaatacattttcctggatctcacctgtgaatttccccatgcccgaaaatattcccacactggcccatctgctccagggccttggattccaccattcaaccctgacctccctttgcaatactgaactcgaagactcttgccgaggtttcaagtgtgtccccgctcccagggcctgggatctggccagggagggctggaaagaaggaaatgcgccacagatggaggaagtagcttcggcaaggtgaagcacaaaggcaaactttgctgacagaagactcttgctgctggccaaccaggcctgcctgtcatgagaatcaaaa

SEQ ID NO: 6571 - DNA, 579 bp, Homo sapiens
tttaccagatatttctagttctctcttttgggcacaaaatagaatttagtgctggggacacagtgagagacatgtgattcaccacagaagtttcaccacagaagggttgaattgagccagaaggattgaggatatggcactaactagcggtgtttgagatggtgttggctctatcagccgactgtagtgagcagagccctcctcctgatctatgactgaggcatggtctaagtgagaaactaatgttggttgtttttaagccatggaaatttgggggttattatcactaacctatcctgacatggaaatccatgaatgtagttgggtgtggtggctcacacttgtagtatcagcactttgggaggttgaggtgggtggatcacctgagtgaggtcaggagtttgagaccagcctgaccaacatggcgaaactgcatctctacaaaaaatacaaaattagccaggtgtggtggcgcatgcctgtaatcccagctatttgggaggctgaggcaggagaatcgcttgaacctgggaggcagaagttgcagtgagccgagattgcaccactgcactccagcct

SEQ ID NO: 6572 - DNA, 1667 bp, Homo sapiens
gtgaagggagccgggatcagccaggggccagcatgagccggagggagggaagtctggaagacccccagactgattcctcagtctcacttcttccccacttggaggccaagatccgtcagacacacagccttgcgcacctcctcaccaaatacgctgagcagctgctccaggaatatgtgcagctccagggagaccccttcgggctgcccagcttctcgccgccgcggctgccggtggccggcctgagcgccccggctccgagccacgcggggctgccagtgcacgagcggctgcggctggacgcggcggcgctggccgcgctgcccccgctgctggacgcagtgtgtcgccgccaggccgagctgaacccgcgcgcgccgcgcctgctgcgccgcctggaggacgcggcgcgccaggcccgggccctgggcgccgccgtggaggccttgctggccgcgctgggcgccgccaaccgcgggccccgggccgagccccccgccgccaccgcctcagccgcctccgccaccggggtcttccccgccaaggtgctggggctccgcgtttgcggcctctaccgcgagtggctgagccgcaccgagggcgacctgggccagctgctgcccgggggctcggcctgagcgccgcggggcagctcgccccgcctcctcccgctgggttccgtctctccttccgcttctttgtctttctctgccgctgtcggtgtctgtctgtctgctcttagctgtctccattgcctcggccttctttgctttttgtgggggagaggggaggggacgggcagggtctctgtcgcccaggctggggtgcagtggcgcgatcccagcactgcagcctcaacctcctgggctcaagccatccttccgcctcagcttccccagcagctgggactacaggcacgcgccaccacagccggctaattttttatttaattttttgtagagacgaggtttcgccatgttgcccaggctggtcttgaactccggggctcaagcgatcctcccgcttcagcctccctaagtgctgggattgcaggcgtgagccactttcccagcctctctttgctttgcctgccccgttctcttaactcttggaccctcctcgtctgcatggtaactccgtctgagtctaccattttcttgctctccctccttccttgggcctgcctcagttccctttggcctccccctttacccagctcttggggtgtctctgttttttccatccccacttcctgccttctcgtggccctgtgtgagcacatgtgtacatctcagccttatctcaaggaggtgacaccttctctccttgtccccatctggccgtctctctgtgcttccctggccaggggcgtgcctgctggtcctatggggggaaggctactccgcatctcagccaccttcctcaggctcactccacctacatccccagtctgccacaccccatccctttgggcctcagccctgtccctttgatgtcctcctttccttcagcccctctgccctgtccctgcacacctccactgcctcccagcagatctgtggagacaaaacaagcaacaccttaaaagagttttatttctgaaaataaattaattttttgtaaataaaatgtttaaaaataaaaaagaaactaaagttacttgtata

SEQ ID NO: 6573 - DNA, 398 bp, Homo sapiens
ttttcccctaaaagggccctttcaactctttctgagatcatacaagccctgagttttgacacccagggtctcaacttcctgagcccttgcctctcagagtcctaaatttcccctgtacattcctgagtctggccagtgatcaccctcagtcacttagggacgggagggctgggagagccctggaagattccagacagaagctggcaaaagcccagggtgtgggcaatatccactctccagcctccgtttctccactcgtaatgaggagtccttccctggggtcagcaaaccttattcaaagggagacctctcagtcacccaagattcctctagacaatgcgagctttcctacctacctacctaccagctctgagcttggtacacccagagccctgttt

SEQ ID NO: 6574 - DNA, 388 bp, Homo sapiens
gtcctgtttagggcacctggtaattagcataatggcctcttgggccctgcctcagaatgctgggtggcatgtatcacagattcatctgggaagcagcttccactaaccagggaaccaaggacaaaggagctggcaggcttcaggggagtagctgcccagtcaacagtgtattaaggacagccattagttgccacaatcagttaattagctcaacaaatgcaaaacctaaatcattaaataaagtggccctgattgcactgctgacttctgatttggtatcactaacccagcagggtgagaatgaggtagttccacaaaaaataaaaacctgtccacattgggaaaatgatataggatgggatttcattttcatgaaagttgagccctg

SEQ ID NO: 6575 - DNA, 659 bp, Homo sapiens
cctcatcatatcactttttcatttttaatacaattgcaaaatgagtcaaatacactgttctattttatagtcacagcatagagtaatgagcaaacctaggttttttcaattttggagatctaaactgccatgtacacagtctaagctaccctgcaggagagctaggtcatgaggaaaagccctggagattgaggtatcatgtcaaaggaagccacatggtaccagacatccaaaccacagccgcagctgactgcaaccacaggagagactgtgagaagaggtgttcagctgggccctggacaacccacaaaattgtgatacaataaaatggttgtcggtttaagccacaaagtttggaaatggttacacagtaatagatcattgaaatggctggctcttctttgtcttcttcttattattattattactttgagacagtcttgctctgtcacccaggctggactacagtggtgtgatctcagctcactgcaacctctgcttcctgggttcaagcgattcttgctgaaacaactggctcttattaaaaatgaagctaacttaggaaactgggactacagacatgcaccaccatacccagcaattttttttttttttttttttttttttgtagagatgagatctcactatgttgcccaggc

SEQ ID NO: 6576 - DNA, 511 bp, Homo sapiens
cttgaacccaggaggtggaggttgcagtgagctgagattgagccactgcactccagcctgggcaacagagtgagactctgtctcaaaaaacaaaacaaaatgaaacaaaacaaaacaagtcaaacagtacaaggagtcttctcttcttccttccagtcccacccctctataatgaatgagtgataatggtaacagtttggtggtctccttcctttttgatgcttatacaaacatgttcaaagatatatgtgcatataagattctttcaaacactggatcgtactgtaatatattaaaataacagactcttttcacttaacattttttcatggacatctgtccagatcaatccatttatatataacttattttttatagctatatactagtatccttagaatggatacattatttattcagctcacctccttgtttcagaaatttaggttatttctaggtttgttttttactacttcaaacaatgctgcaataaacattcttgtacatcaaa

SEQ ID NO: 6577 - DNA, 491 bp, Homo sapiens
gatgaaatatttactcttttttttcttttttctttaagttttttgttttttaagacaagatctcactctgtcacccaggctggagtacagtggcacaattacagctctctgtagcctcaatctcccaagcttaagtgatcctcccacctcagcatcctgagtattggggactacagctgcatgccacctcatctggccagttttttgtagagacagggtttcaccattttgttcaggctggtcttgaactgggctcatcaagtgatccacaccttggcctcccaaagtgctagaattataggcatgagctactgtgcatgaccaaagtatttactctctaaccgacttttctctctctctttgcaagtaagggaattatgggacttaaacctactaacaaacatctttatctcatcccagatgcttgggtggctaaggtggaaggatcgtttgagaccggcctgggcaacatagaaggaccctgtctcttt

SEQ ID NO: 6578 - DNA, 501 bp, Homo sapiens
ccggcctcctgaccgaccgtccatccaccaccaggcttctggatgttcacccatgtgggagagacgggtgtcggggaagggaccacagcttcctttcagaagacccgggaagggcagtgccgtgtgccagcctcccagttggcaccttcctttcaccttagtcgtcttcgaggcgatgtttcctcgggacaagtcattttcatgaatctgctgtaaaacgtctcccaaactccaagtgtttcccaaactgagtgaaaatcgctgcagaatgtggtttccagcagagcttttcccctctccttccttcacctctgcctgggttacagggtgcgggttccaggagtctgcctagaaggcaaaaaacaggctttgcttagaatcccctaaattgctcataaaacacagtgtttgacgtttatgtgtagacatgatccttatgtgggttaagctgaggcccctgccccagtgacacagaggcctcaaacggcacagtgcaccttc

SEQ ID NO: 6579 - DNA, 1199 bp, Homo sapiens
gtggagaatgaaccatgggggcaaaagcagaaacaagaagaccacttaagaggctcttgcaataatttatgtgagaagagtgatcatcttgactagggtggtggtggtagaggaggtgagtggtggtcaggactgagaggagccaacagaatttgctggcttgcttggatgtgggtgatgaggcaaactgagaatccaagatggcaccaaggcttataccctgagcaactgaatggatggtggtgccattcactgagatgaggacggagctgggtttgagcagggataggggaatctgtcaatcaagtgacatggctagtagcaattgcatatacaaatcaggagagactgggctaaagacacagatttaggggtcatcgtcatagagctagtacttgaaatcttgggtctggatgagatcatttgggaagtaaacgaacagagatagagaagctataatgtcccaggctgagcctgccacaatttgaagttggttggaggaggagctgctacgtgaggtcaggaatgttgaatgcacccagggtgacagtgttgaggaggacgccctgttgtgtgtcctctcccatctcatccctgccctttcccacactcccagtggcccttctcccatctttcctgcagatatgtgtataaccacattggtggggagcattccgctgtgatcccagagctggcagccacagtggccacatttgccatcaccacactgtggcttgggccttgtgacattgtctacctgtggtcattccttaactgctttggcctcaactttgagctctgggtgcaaaaactggcagagtgggggcccctagcacgaattgaggcctctctgtcagtgcagatgtcccgtagggtccgggccctgtttggagccatgaacttctgggccatcatcatgtacaaccttgtgagcctgaacagcctcaaattcacagagctggttgcccggcgcctgctactcacagggttcccccagaccacgctgtccatcctgtttgtcacctactgtggcgtccagctggtaaaggagcgtgagcgaaccttggcactggaggaggagcagaagcaggacaaagagaagccggagtaggagggagcgggtagagggatgggctctgctcagctattcttgggccagatggggcctgaccgatagaataaaagacttttctacaaca

SEQ ID NO: 6580 - DNA, 1868 bp, Homo sapiens
ggccagcagctctgcagcactcggctctgctccactctgctcagctccgctccaggaaggccacctcctcctccccctcctcctcccgctgtcaccactcaccgctcataacctcaagggggtggggaccccagggctggacacaccccaccgtggccccagagctcagccggtcgcacggacggacagttggaagccggaccccagagcctgaggtgggcagtgtgccaggtcccttgcggcctcctcaagccctgtccaggctatgggcatcaagacagcattgccggcggctgagctgggcctctactctctggtgctgagtggggccctggcctatgctggccggggcctccttgaggcttcacaagatggggcccacaggaaggccttccgggagtctgtgcgacctggctgggagtacattggccggaagatggatgtggctgacttcgagtgggtgatgtggttcacctcctttcgcaacgtcatcatctttgccctctccggacatgtgctgtttgctaaactctgcacgatggttgccccaaagctccgctcctggatgtatgctgtgtacggggccttggctgtgatgggcacaatgggcccttggtacctgctgctgctgcttggtcactgtgtgggcctctatgtggcctcgcttttgggccagccctggctctgtcttggccttggcttggccagcctggcctccttcaagatggaccccctaatctcttggcagagcgggtttgtaacaggcacttttgatcttcaagaggtgctgtttcatgggggcagcagcttcacagtgctgcgttgcaccagctttgcactggagagctgtgcccaccctgaccgccactactccttagctgacctgctcaagtacaacttctacctgcccttcttcttcttcgggcccatcatgacctttgatcgcttccatgctcaggtgagccaggtggagccagtgagacgcgagggtgagctgtggcacatccgagcccaggcaggcctaagcgtggtggccatcatggccgtcgacatcttctttcacttcttctacatcctcactatccccagcgacctcaagttcgccaaccgcctcccagacagtgccctcgctggcctagcctattcaaacctggtgtatgactgggtgaaggcggccgtcctctttggtgttgtcaacactgtggcatgcctcgaccacctggacccaccccagcctcccaagtgcatcaccgcactctacgtctttgcggaaacgcactttgaccgtggcatcaacgactggctttgcaaatatgtgtataaccacattggtggggagcattccgctgtgatcccagagctggcagccacagtggccacatttgccatcaccacactgtggcttgggccttgtgacattgtctacctgtggtcattccttaactgctttggcctcaactttgagctctgggtgcaaaaactggcagagtgggggcccctagcacgaattgaggcctctctgtcagtgcagatgtcccgtagggtccgggccctgtttggagccatgaacttctgggccatcatcatgtacaaccttgtgagcctgaacagcctcaaattcacagagctggttgcccggcgcctgctactcacagggttcccccagaccacgctgtccatcctgtttgtcacctactgtggcgtccagctggtaaaggagcgtgagcgaaccttggcactggaggaggagcagaagcaggacaaagagaagccggagtaggagggagcgggtagagggatgggctctgctcagctattcttgggccagatggggcctgaccgatagaataaaagacttttctacaaca

SEQ ID NO: 6581 - DNA, 1755 bp, Homo sapiens
agcggagggcctgaatacacagagcgctgagagagtggggcagtgtggtcacggacacaggtcatgggggccttggcaggagcggttttggcagagggtggggccggtgcctctggaaggtatgaagatgtaaatgaagccctgtccaggctatgggcatcaagacagcattgccggcggctgagctgggcctctactctctggtgctgagtggggccctggcctatgctggccggggcctccttgaggcttcacaagatggggcccacaggaaggccttccgggagtctgtgcgacctggctgggagtacattggccggaagatggatgtggctgacttcgagtgggtgatgtggttcacctcctttcgcaacgtcatcatctttgccctctccggacatgtgctgtttgctaaactctgcacgatggttgccccaaagctccgctcctggatgtatgctgtgtacggggccttggctgtgatgggcacaatgggcccttggtacctgctgctgctgcttggtcactgtgtgggcctctatgtggcctcgcttttgggccagccctggctctgtcttggccttggcttggccagcctggcctccttcaagatggaccccctaatctcttggcagagcgggtttgtaacaggcacttttgatcttcaagaggtgctgtttcatgggggcagcagcttcacagtgctgcgttgcaccagctttgcactggagagctgtgcccaccctgaccgccactactccttagctgacctgctcaagtacaacttctacctgcccttcttcttcttcgggcccatcatgacctttgatcgcttccatgctcaggtgagccaggtggagccagtgagacgcgagggtgagctgtggcacatccgagcccaggcaggcctaagcgtggtggccatcatggccgtcgacatcttctttcacttcttctacatcctcactatccccagcgacctcaagttcgccaaccgcctcccagacagtgccctcgctggcctagcctattcaaacctggtgtatgactgggtgaaggcggccgtcctctttggtgttgtcaacactgtggcatgcctcgaccacctggacccaccccagcctcccaagtgcatcaccgcactctacgtctttgcggaaacgcactttgaccgtggcatcaacgactggctttgcaaatatgtgtataaccacattggtggggagcattccgctgtgatcccagagctggcagccacagtggccacatttgccatcaccacactgtggcttgggccttgtgacattgtctacctgtggtcattccttaactgctttggcctcaactttgagctctgggtgcaaaaactggcagagtgggggcccctagcacgaattgaggcctctctgtcagtgcagatgtcccgtagggtccgggccctgtttggagccatgaacttctgggccatcatcatgtacaaccttgtgagcctgaacagcctcaaattcacagagctggttgcccggcgcctgctactcacagggttcccccagaccacgctgtccatcctgtttgtcacctactgtggcgtccagctggtaaaggagcgtgagcgaaccttggcactggaggaggagcagaagcaggacaaagagaagccggagtaggagggagcgggtagagggatgggctctgctcagctattcttgggccagatggggcctgaccgatagaataaaagacttttctacaaca

SEQ ID NO: 6582 - DNA, 2031 bp, Homo sapiens
agcggagggcctgaatacacagagcgctgagagagtggggcagtgtggtcacggacacaggcagggactgggatgtgacaggctggagctcagggacttgttgggggaatgggggtcagtgacaggctggaggcttaatgcgaggatggaggcttggctctaggggcagcacctggggtggtcatgggatctcagggaggggagtgggagtcagagaaagggtcttagagaagctggggctttgtgaggagctaagggagactcactgatcgaggtggggaccctgcaggcagaaacctgactgtagtgatagaggtggggtttctccgcacgcaggtcatgggggccttggcaggagcggttttggcagagggtggggccggtgcctctggaaggtatgaagatgtaaatgaagccctgtccaggctatgggcatcaagacagcattgccggcggctgagctgggcctctactctctggtgctgagtggggccctggcctatgctggccggggcctccttgaggcttcacaagatggggcccacaggaaggccttccgggagtctgtgcgacctggctgggagtacattggccggaagatggatgtggctgacttcgagtgggtgatgtggttcacctcctttcgcaacgtcatcatctttgccctctccggacatgtgctgtttgctaaactctgcacgatggttgccccaaagctccgctcctggatgtatgctgtgtacggggccttggctgtgatgggcacaatgggcccttggtacctgctgctgctgcttggtcactgtgtgggcctctatgtggcctcgcttttgggccagccctggctctgtcttggccttggcttggccagcctggcctccttcaagatggaccccctaatctcttggcagagcgggtttgtaacaggcacttttgatcttcaagaggtgctgtttcatgggggcagcagcttcacagtgctgcgttgcaccagctttgcactggagagctgtgcccaccctgaccgccactactccttagctgacctgctcaagtacaacttctacctgcccttcttcttcttcgggcccatcatgacctttgatcgcttccatgctcaggtgagccaggtggagccagtgagacgcgagggtgagctgtggcacatccgagcccaggcaggcctaagcgtggtggccatcatggccgtcgacatcttctttcacttcttctacatcctcactatccccagcgacctcaagttcgccaaccgcctcccagacagtgccctcgctggcctagcctattcaaacctggtgtatgactgggtgaaggcggccgtcctctttggtgttgtcaacactgtggcatgcctcgaccacctggacccaccccagcctcccaagtgcatcaccgcactctacgtctttgcggaaacgcactttgaccgtggcatcaacgactggctttgcaaatatgtgtataaccacattggtggggagcattccgctgtgatcccagagctggcagccacagtggccacatttgccatcaccacactgtggcttgggccttgtgacattgtctacctgtggtcattccttaactgctttggcctcaactttgagctctgggtgcaaaaactggcagagtgggggcccctagcacgaattgaggcctctctgtcagtgcagatgtcccgtagggtccgggccctgtttggagccatgaacttctgggccatcatcatgtacaaccttgtgagcctgaacagcctcaaattcacagagctggttgcccggcgcctgctactcacagggttcccccagaccacgctgtccatcctgtttgtcacctactgtggcgtccagctggtaaaggagcgtgagcgaaccttggcactggaggaggagcagaagcaggacaaagagaagccggagtaggagggagcgggtagagggatgggctctgctcagctattcttgggccagatggggcctgaccgatagaataaaagacttttctacaaca

SEQ ID NO: 6583 - DNA, 2069 bp, Homo sapiens
ggccagcagctctgcagcactcggctctgctccactctgctcagctccgctccaggaaggccacctcctcctccccctcctcctcccgctgtcaccactcaccgctcataacctcaagggggtggggaccccagggctggacacaccccaccgtggccccagagctcagccggtcgcacggacggacagttggaagccggaccccagagcctgaggtgggcagtgtgccaggtcccttgcggcctcctcaagccctgtccaggctatgggcatcaagacagcattgccggcggctgagctgggcctctactctctggtgctgagtggggccctggcctatgctggccggggcctccttgaggcttcacaagatggggcccacaggaaggccttccgggagtctgtgcgacctggctgggagtacattggccggaagatggatgtggctgacttcgagtgggtgatgtggttcacctcctttcgcaacgtcatcatctttgccctctccggacatgtgctgtttgctaaactctgcacgatggttgccccaaagctccgctcctggatgtatgctgtgtacggggccttggctgtgatgggcacaatgggcccttggtacctgctgctgctgcttggtcactgtgtgggcctctatgtggcctcgcttttgggccagccctggctctgtcttggccttggcttggccagcctggcctccttcaagatggaccccctaatctcttggcagagcgggtttgtaacaggcacttttgatcttcaagaggtgctgtttcatgggggcagcagcttcacagtgctgcgttgcaccagctttgcactggagagctgtgcccaccctgaccgccactactccttagctgacctgctcaagtacaacttctacctgcccttcttcttcttcgggcccatcatgacctttgatcgcttccatgctcaggtgagccaggtggagccagtgagacgcgagggtgagctgtggcacatccgagcccaggcaggcctaagcgtggtggccatcatggccgtcgacatcttctttcacttcttctacatcctcactatccccagcgacctcaagttcgccaaccgcctcccagacagtgccctcgctggcctagcctattcaaacctggtgtatgactgggtgaaggcggccgtcctctttggtgttgtcaacactgtggcatgcctcgaccacctggacccaccccagcctcccaagtgcatcaccgcactctacgtctttgcggaaacgcactttgaccgtggcatcaacgactggctttgcaaatatgtgtataaccacattggtggggagcattccgctgtgatcccagagctggcagccacagtggccacatttgccatcaccacactgtggcttgggccttgtgacattgtctacctgtggtcattccttaactgctttggcctcaactttgagctctgggtgcaaaaactggcagagtgggggcccctagcacgaattgaggcctctctgtcagtgcagatgtcccgtagggtccgggccctgtttggagccatgaacttctgggccatcatcatgtacaaccttgtgagcctgaacagcctcaaattcacagagctggttgcccggcgcctgctactcacaggtgagggacaggggtgtggggatacagaaggtgccaggcatcagcctcaaggaccgtgaccttccaaaatgcctcctatctccctcatcacccctgggactcagaagggagggcccatcaagcggggagaggggtgggaagacaaaagtcgctgaggatgcagtgctgctcctgagcatctatgactccctccccacacagggttcccccagaccacgctgtccatcctgtttgtcacctactgtggcgtccagctggtaaaggagcgtgagcgaaccttggcactggaggaggagcagaagcaggacaaagagaagccggagtaggagggagcgggtagagggatgggctctgctcagctattcttgggccagatggggcctgaccgatagaataaaagacttttctacaaca

SEQ ID NO: 6584 - DNA, 1637 bp, Homo sapiens
ggccagcagctctgcagcactcggctctgctccactctgctcagctccgctccaggaaggccacctcctcctccccctcctcctcccgctgtcaccactcaccgctcataacctcaagggggtggggaccccagggctggacacaccccaccgtggccccagagctcagccggtcgcacggacggacagttggaagccggaccccagagcctgaggtgggcagtgtgccaggtcccttgcggcctcctcaagccctgtccaggctatgggcatcaagacagcattgccggcggctgagctgggcctctactctctggtgctgagtggggccctggcctatgctggccggggcctccttgaggcttcacaagatggggcccacaggaaggccttccgggagtctgtgcgacctggctgggagtacattggccggaagatggatgtggctgacttcgagtgggtgatgtggttcacctcctttcgcaacgtcatcatctttgccctctccggacatgtgctgtttgctaaactctgcacgatggttgccccaaagctccgctcctggatgtatgctgtgtacggggccttggctgtgatgggcacaatgggcccttggtacctgctgctgctgcttggtcactgtgtgggcctctatgtggcctcgcttttgggccagccctggctctgtcttggccttggcttggccagcctggcctccttcaagatggaccccctaatctcttggcagagcgggtttgtaacaggcacttttgatcttcaagaggtgctgtttcatgggggcagcagcttcacagtgctgcgttgcaccagctttgcactggagagctgtgcccaccctgaccgccactactccttagctgacctgctcaagtacaacttctacctgcccttcttcttcttcgggcccatcatgacctttgatcgcttccatgctcaggtgagccaggtggagccagtgagacgcgagggtgagctgtggcacatccgagcccaggcaggcctaagcgtggtggccatcatggccgtcgacatcttctttcacttcttctacatcctcactatccccagcgacctcaagttcgccaaccgcctcccagacagtgccctcgctggcctagcctattcaaacctggtgtatgactgggtgaaggcggccgtcctctttggtgttgtcaacactgtggcatgcctcgaccacctggacccaccccagcctcccaagtgcatcaccgcactctacgtctttgcggaaacgcactttgaccgtggcatcaacgactggctttgcaaggtccgggccctgtttggagccatgaacttctgggccatcatcatgtacaaccttgtgagcctgaacagcctcaaattcacagagctggttgcccggcgcctgctactcacagggttcccccagaccacgctgtccatcctgtttgtcacctactgtggcgtccagctggtaaaggagcgtgagcgaaccttggcactggaggaggagcagaagcaggacaaagagaagccggagtaggagggagcgggtagagggatgggctctgctcagctattcttgggccagatggggcctgaccgatagaataaaagacttttctacaaca

SEQ ID NO: 6585 - DNA, 1214 bp, Homo sapiens
ggccagcagctctgcagcactcggctctgctccactctgctcagctccgctccaggaaggccacctcctcctccccctcctcctcccgctgtcaccactcaccgctcataacctcaagggggtggggaccccagggctggacacaccccaccgtggccccagagctcagccggtcgcacggacggacagttggaagccggaccccagagcctgaggtgggcagtgtgccaggtcccttgcggcctcctcaagccctgtccaggctatgggcatcaagacagcattgccggcggctgagctgggcctctactctctggtgctgagtggggccctggcctatgctggccggggcctccttgaggcttcacaagatggggcccacaggaaggccttccgggagtctgtgcgacctggctgggagtacattggccggaagatggatgtggctgacttcgagtgggtgatgtggttcacctcctttcgcaacgtcatcatctttgccctctccggacatgtgctgtttgctaaactctgcacgatggttgccccaaagctccgctcctggatgtatgctgtgtacggggccttggctgtgatgggcacaatgggcccttggtacctgctgctgctgcttggtcactgtgtgggcctctatgtggcctcgcttttgggccagccctggctctgtcttggccttggcttggccagcctggcctccttcaagatggaccccctaatctcttggcagagcgggtttgtaacaggcacttttgatcttcaagaggtgctgtttcatgggggcagcagcttcacagtgctgcgttgcaccagctttgcactggagagctgtgcccaccctgaccgccactactccttagctgacctgctcaagtacaacttctacctgcccatgaacttctgggccatcatcatgtacaaccttgtgagcctgaacagcctcaaattcacagagctggttgcccggcgcctgctactcacagggttcccccagaccacgctgtccatcctgtttgtcacctactgtggcgtccagctggtaaaggagcgtgagcgaaccttggcactggaggaggagcagaagcaggacaaagagaagccggagtaggagggagcgggtagagggatgggctctgctcagctattcttgggccagatggggcctgaccgatagaataaaagacttttctacaaca

SEQ ID NO: 6586 - DNA, 324 bp, Homo sapiens
gtgagcagggaagacctggggctgggactggctgggtcatagagggcgggggggcactgctgctttctggagttgtccaaacacctggcccctaatccagaactttctcaccaccaccctcttagttgtcagagcaatggctcactctgtaggaatctgcccctccctcccttctatgaggaatggagcacctgggccttgccatgttggtcaggccttgtcctctctctggacctgtttccccatgtttaacaaggagggagagctgacctggggctctccgagacccagacatagccccaagacctgactggccaggtgggt

SEQ ID NO: 6587 - DNA, 444 bp, Homo sapiens
ccccactggggtggtgggaccatgaggtggggctaggcttggctggagactgtaattccctcacccaacctgtctccccagccctgtccaggctatgggcatcaagacagcattgccggcggctgagctgggcctctactctctggtgctgagtggggccctggcctatgctggccggggcctccttgaggcttcacaaggtaatggctgtgccccggggcaggtggacaggacccttcttcccctggaggcctcagggttccaaccagcaaagccagaaagttacaggctccagacctagggtactccttctagaacacggctggatctcccttttcagcccggggttcccatctcagatagtcactggaggctgggtggagccaggttcagtcacaggaacacagagatgcagagacactgacagagagatggacacagagt

SEQ ID NO: 6588 - DNA, 434 bp, Homo sapiens
acatttcgttttaacacatttttatcattagcaaactagcatcatttgagcaatgctaaatatagtgatgttattgggttcctaacagaaaacctcatattcttgaatgtttacttctttgatactttcataatttgagtatttatatatttttaaaaattttcaaatctttgtttcccctgcccgccgcctctctctctctctctcttttttttttctttttttagggacagggtattcctctatcacccagactggagtacagtgacaaaactgtagctcaccacaacctcaatctcctgggctcaggtgatcctcctctactcaggaggctgaggcgggagaatggtatgaagccggggggcggagcttgcagtgagaagagattgcgccactgcactccagcctgggtgacagagcgagattctgtctca

SEQ ID NO: 6589 - DNA, 361 bp, Homo sapiens
aatttttcttatgtcaggaatgaatttggaggtatatggtagctggtggtgattccactgctcaaaaatgtcatcaggccagccagtggctcacgcctgtaatccctgcactttgggaggctgaggtgggaggatcgcttgagcccaggacttcaagaccagcctgggcaacatagggagaccccatctctacaaaaaataaaaaaataggcaggcatggtgacatgtgcctgtagtctcagctatttgggaggctgaggtgggaggattgcttgagcccaggaggttgaggatatagtgagctgtgatcccaccactgaactctagctagggcgacacaatgagattctgtctcaaaaaa

SEQ ID NO: 6590 - DNA, 502 bp, Homo sapiens
tgcaaactcatatgctccagacagctagatagttacaaacgcatagagaaatacttcaaggcctatatgcatatagcagcacaattcgcagttgcaaaaatgtggaaccagcccaaatgcccatcaatcaatgagtggattaaaataaactgtggtatgtatatatgatggaatactactcagccataaaaaagaatgaaataatggcattcacagcaacctgggtgggattggagactattatcctaagtaaagtaactgagtagtggaaaaccaaacaacatatgttctcactcataattgggagctaagctatgaagatgcaaaggcaaaagaatgatacaatggactttggggactcagagggaaagggagggaaggggatgagggataaacagtgtatattgctggggtgatgggtgcaccaaaagctcacaaatcaccactaaggaactggctcatgtcgccaaataccacctgttcccccaaaacctatggaaat

SEQ ID NO: 6591 - DNA, 689 bp, Homo sapiens
tctccttgactgtgacagacggcactcacactgatttctatgtcctaccagacactgccctggcgacacacaaacctcaagtaatgagggtccagataagatcattagacaataggcttccccagattactaccaacaggggtgccccagccttgaagcgccttcacactggacacatgggcttcctgattaccagcaagtctctgaaggcagaagatcaggacagtccccacaggcttctgaagtataaagtgaccagaggaccagagcatggcttcattatcaaaactggccttgggaaaccagagcactcgagtgttttacacaagctgacattgatgagatgaagatatcctatgtctttgaatgagggcagcaacgcattcaaagggacatcttctatttctctgttgaagacaatggaggaaataaactaacaaatcagcctttccatctaaactgggcttggatttgtttggagaaagagtactacattgtggatgaagattccacattcttagaagtgacccttacacgcagaggataccttggagaaacatcatttatcagcattggtaccaaagatgaaactgcaaaaaaagacaaagatttcaaatggaagaccaataaacagatccagttcaatcctggacagactacagccacatggagggtgagaattatacctg

SEQ ID NO: 6592 - DNA, 196 bp, Homo sapiens
gaagtcctgttagactgatactgtaggagaacatgtatcccattgtattgcaattactaaccatctctcttggagtagataatgattcttacctttgttgattaggatcacctgaagaactcttaaaaacaaaaacaggaatctctcagacccttaccctcgaattgttccagagtagagcctagctattgagatt

SEQ ID NO: 6593 - DNA, 154 bp, Homo sapiens
cataccaacatataaagattattttacttaaagctattttaaattcaagatatggggaacatctactctccagatggaggagaaagggctgaatcaatacagggggaattagttgtattttataatttttcaacaattagagtaaaaaaaaaat

SEQ ID NO: 6594 - DNA, 610 bp, Homo sapiens
aaaataagcaaacaaaccaactgagaaggatttacccattaaataaaagacagatagactttgggcctccatggtattcttgcctggggctgctcccatcatctctccagctcaagggtcttggtagttctaccagggcagggctggtcatgaaaaccagcagcttcactcctagcagggctcactcgtgtctagtgggactgtcagtaaaataataaggctagtaacacacatgcctcatagtctgaggttgctctcacagatcgggggcatttcaggctggcagactagccagacatttagcaaagagatcctagaaatgagagcactgcagaaagcctagataagaccccaggcagacggggatgggatgctacacacatgctcatgggacacccagaagggcccagttgaaagtaaaacccagggaagacttgaaaactgtctgaacttggaacatgctcctgttaccacatcagcagaaggtggaagctctgctggcttgaggtgtttgagcacaacatctgaccagtctttgggtgaccactaaactacaagatgcaggggaatcccgtgggaacccaggctagtaaaatgaaaataagaatta

SEQ ID NO: 6595 - DNA, 311 bp, Homo sapiens
ggtgaagttactgtgcaaagcagcatgcatagaggaataggaggaatgtagaggcattctgcagtctaccacacaggcccttacattattctcattataatcatacttaaacaccaagccactaaatgaggtgacacccttgtgcttgtaacagttatctaactatgaagctaggctcgattaaaaatgagaataccacaataagttaataaatttaaattaaggccattaatataatatgagtgatgttttgtttcgtttttgctgaaactaaattggctgtcaaaaaatggacatgtccagagaggcaa

SEQ ID NO: 6596 - DNA, 670 bp, Homo sapiens
taggcatgagcctctatgcccagcccaagaaacaaaccctgcttttagaatctttttttttttttcccagctgtcctgtgtcctaggtttataactttgactaacttctagcaacttccaatcatgggagaattagagtggttatctgggatgaattgtttgaacttcaacctgttatcttggctgcagggctttcttggccacagggccgtgctaaagggcactttgatttcttgattttaaaagagcaagagaaagtgattgccaagaggagaggtttggttggcttttcttagaactaactgcctctccagagaagcctgcattggctgctcatcatgatgagggtcgggcaaggtcagtttccactgtcttctaattgttttcagagaattggacggtacaaagcaggtgccactgacaacatttcccatcattttatggaagagtactgattccgtcttttctgctcagagtggatctgtgcaaataacttttgtttctcaaaaatttctggtttgtcttgggatgcagccaggcctctaatgtggtggtgtgtgctgtgtcacaaacctcggccccaaaagcctgagcttggctttgtcagatctgatgagtgtgcatgagcaggaagccacccttcgggagaattcaggggcaaacgtacaag

SEQ ID NO: 6597 - DNA, 265 bp, Homo sapiens
gaggatttgttgctagaaaacttactccaaaagaattgttaagggaagtttttcagatcaaagtaaaatgaaaagtaaaaggaagactttgaatatcaggaataaagagaaagcaacagaaatggtagatacttgggtaaatataacttctcgagctcttaaaaatacatttgatagataaaaacaaaattgtcatattatctgatgatttatttaatgtacatcagtgaaatatgtggggaaagtacaacataaattgaggaat

SEQ ID NO: 6598 - DNA, 642 bp, Homo sapiens
gaaggttgtcaggaagcaattttaaatttctaatatgtaaacatcggggctttggcatattttgaaccattttgatgataggaatggaggtggtaggagccaccctgattaagttcttgttgagaataaactggtgcaccagacatttacataggctgaatcaatgttgatggcagccgtgtttttaatccatgggcctaaaacagtgtccctcatacctgtctcttgctgaggcccctgtcgcaggtgagccatgtctgacttccgagccttccatcgactgctcagtccacgtcttcagccctatttcccaagcttacctagtgagtcctccttgactcaggctggttcctccattgtttctgccacctgcaggccattggtgctccttgaataccctgtggtgtcatcgctgactcgtgcctccagggctttcccgctctgacggctctgtgtttcctattgcttcatatagcttgcttctgaattagcatgcgatatgtgacactcatatgttatgtatcttggtttagtttttacagaaagatgaaagactcttaaaagggatcttggagttgttcttgtacatcttttatatctcctaagcctttgatgggcacttgttccaaatgggaaagaaaa

SEQ ID NO: 6599 - DNA, 399 bp, Homo sapiens
ttttcttaaagttgaaatcatttaccattggtattagacttcatattaaatttaggcagcatacaaacttattaatacacttgttttgagcaaacactaaagattttaatcagtggatgctgtggctcacacctgtaatcccaacactttgggtgaccaaggcagaaggatcatttgaggccaggagttcaagaccagcctgggcttcatacagagaatacatctttacaaaaaataaaaatatatattagccggcaccgtggcatgcacacctgtactcccagctactctggaggctgaggcaggaggatcactggagcctaggagtatgagactgtattaagctatgatcttagcactgcactccagcctgaacgacagataaatactttgtcacaa

SEQ ID NO: 6600 - DNA, 452 bp, Homo sapiens
tggtagtgtgattggaaggcagataaattttaggacacaatggaagttcctaagattttttatccttttccaataggaaggataaaaaaatcatctaaaactagaggaaaaatcatctaaaacaaggtataaagaaatggctcacgtgtgacccttattttactgtgacatggagcatttgatgaaggatgtgggaagggagcctgcttaactatgaagtgagtagcatcgccccaggagcaccatgacagatgcacaggacatggagggaaggaaatggcatcctgcacagccctggctctacattgagcaatgtagacaaaatcataaaggctgctctagttttctacttttagaatcaacctacagacatgtaagacttaattgtagttgtagaataaaagataaaagattattggctttcataacaataaagtcctaacaatgattca

SEQ ID NO: 6601 - DNA, 635 bp, Homo sapiens
ccctccacatttctcaggtttctgctcaaaagtcaccttttggaggggtctccacctgtcactgtgtttgtaagagctccttcagtttctttctagctcatctcactctggtaatgtctttgattaccaccaccatctgacctggtcttatgacctgttagctttcttcatcagacgtgagcaccaggatggcaggggcctcatctgtcctgttcctcctgtggcctgggtcctagcaccatgtctggtacagtgtagatgctcaagggaagtttactttgtagaaccacttacctgggagatgttactgttagtctaacctgtaccattttgtaaacctccagccattttgcagactctgatcacagtgaaacgttccatgggaacttgggccatgagaaacatccttcctaaccacgtgactgcagaaacatccttatcgcgtcctcctgggcaaaggcccaacagcctgactgcagggacatccttgccatatcctgctgggcagcaagctctaccacccagatccctccctcccagtcccatgattaccccagcctgtgagtggcagttggtgctggcactaagctggtttcctcctccccagggttttgctggcaataaagatgttgctg

SEQ ID NO: 6602 - DNA, 579 bp, Homo sapiens
ccccaccctgagttttcccctggttaggcaacgggcaggtgggggtggtggaaccaactctttagaaccagcaatgacaaacagatcccacttgggggaagttgatgttaagtgtcatgggtcctctggaattttctgaagctttcctgtttttttttttctccccctaaccagctcaactgatctcctgggatctctactaagatgttggcagcccggccagctggtctggccctggacgtgccttcatggtctggttatgcttcatgacctgcactgtggtcagtgccattttgcagactctgatcacagtgaaacgttccatgggaacttgggccatgagaaacatccttcctaaccacgtgactgcagaaacatccttatcgcgtcctcctgggcaaaggcccaacagcctgactgcagggacatccttgccatatcctgctgggcagcaagctctaccacccagatccctccctcccagtcccatgattaccccagcctgtgagtggcagttggtgctggcactaagctggtttcctcctccccagggttttgctggcaataaagatgttgctg

SEQ ID NO: 6603 - DNA, 604 bp, Homo sapiens
ccctccacatttctcaggtttctgctcaaaagtcaccttttggaggggtctccacctgtcactgtgtttgtaagagctccttcagtttctttctagctcatctcactctggtaatgtctttgattaccaccaccatctgacctggtcttatgacctgttagctttcttcatcagacgtgagcaccaggatggcaggggcctcatctgtcctgttcctcctgtggcctgggtcctagcaccatgtctggtacagtgtagatgctcaagggaagtttactttgtagaaccacttacctgggagatgttactgttagtctaacctgtaccattttgtaaacctccagccattttgcagactctgatcacagtgaaacgttccatgggaacttgggccatgagaaacatccttcctaaccacgtgactgcagaaacatccttattgccagcaaaaccctggggaggaggaaaccagcttagtgccagcaccaactgccactcacaggctggggtaatcatgggactgggagggagggatctgggtggtagagcttgctgcccagcaggatatggcaaggatgtccctgcagtcaggctgttgggcctt

SEQ ID NO: 6604 - DNA, 474 bp, Homo sapiens
ccccaccctgagttttcccctggttaggcaacgggcaggtgggggtggtggaaccaactctttagaaccagcaatgacaaacagatcccacttgggggaagttgatgttaagtgtcatgggtcctctggaattttctgaagctttcctgtttttttttttctccccctaaccagctcaactgatctcctgggatctctactaagatgttggcagcccggccagctggtctggccctggacgtgccttcatggtctggttatgcttcatgacctgcactgtggtcagtggtaagcagcacctgcttctagctttactgttgggtcagattttatccccactccagctctgcagtgcggctgcttcttgtttcatccatggaccctgcacgaaattgccccatgtttctgtttgtgcatcactgagaaaggaagcatgaaggacgcacaggtcaggccattccattgccctcctgg

SEQ ID NO: 6605 - DNA, 819 bp, Homo sapiens
ccctccacatttctcaggtttctgctcaaaagtcaccttttggaggggtctccacctgtcactgtgtttgtaagagctccttcagtttctttctagctcatctcactctggtaatgtctttgattaccaccaccatctgacctggtcttatgacctgttagctttcttcatcagacgtgagcaccaggatggcaggggcctcatctgtcctgttcctcctgtggcctgggtcctagcaccatgtctggtacagtgtagatgctcaagggaagtttactttgtagaaccacttacctgggagatgttactgttagtctaacctgtaccattttgtaaacctccagccattttgcagactctgatcacagtgaaacgttccatgggaacttgggccatgagaaacatccttcctaaccacgtgactgcagaaacatccttatcgcgtcctcctgggcaaaggcccaacagcctgactgcagggacatccttgccatatcctgctgggcagcaagctctaccacccagatccctccctcccagtcccatgattaccccagcctgtgagtggcagttggtgctggcactaagctggtttcctcctccccagggttttgctggcaataaagatgttgctgcagtcacgtggttaggaaggatgtttctcatggcccaagttcccatggaacgtttcactgtgatcagagtctgcaaaatggctggaggtttacgaaatggtacaggttagactaacagtaacatctcccaggtaagtggttttacaaagtaaacttcccttgagcatctacactgtaccagaca

SEQ ID NO: 6606 - DNA, 638 bp, Homo sapiens
tgttaactcattatttaattgaacatttccaaagctctggaaaggcatgcatttgtaggtgcacatgctttaagatttctatccatctttcagagttgaatgtaataatgtttggtatttaattcttgataattcttaaccaacttttcctgttacaggagagaaagaattgcaaatgccaggcatctgtccactttagccctcctccaatgctaagaaagagggatggtgacgtatactacagagacgcaaatgaaacaccaaacagtcttgaattacaagaaaaaaaggggattttttttttttctaatttcagacttggctttttacttagaggacattctgatttgctctcagaaacatctgatttggggttaaactaggcggctggaggatgtttacagctttgaggcttcaaataagtttccatatgcagggagtaactttaaacaatgtttgaataattaactgctaagtcttatattttatgtgtatctatttcatcctctgtctctttcttactagaataccatataagaatattttctctgcagtatttatatttatactattttgctatgagtggcctttgtattttattatatgcattaaatagtgtgtgcacaactttatcttaa

SEQ ID NO: 6607 - DNA, 423 bp, Homo sapiens
aagagtaaataagggagaggaatcattcatatacccaatgtttacccatgatatactttgtgccaggccaagtgattgctagatgcactgcaaaatatgtctgagacctgggacattgtacgtggtctgtcagaattagcccctctcttcatacatgttctgttcccttacagagtttatagtagtatgatacgtctgtgtaacaggccaacaaaaaggagacagagaaagcacacaaatttagcataatttatcctacctcccggctgtttgaagctattaacataggtgtatatagccctatatacctatgtaagccccaagcatcagtttactgtatctttgtgctatgatttatgtttattatgactgttagccatcaaataaagattaaattatgttcaatatagcttgttagtgaaa

SEQ ID NO: 6608 - DNA, 465 bp, Homo sapiens
aaaaaagaataccatggtagcacagtcataccctttaatggctcacattgttcaaacagcatgatattaacttttttttaaaatcaaagcacaaatgcttcatgcatataacttaaagagttttagatattttaagttagaaatgccaaaaatataaaaaccatgaagaaaaatttctatagaagttaggaaattaaaaatcgatcataagggaagcatctcaggtttttattgcagtatttggagatgaaaaatgactttctattgacacgatttgttatttcagcaaaatagaagtctgtcagtctaatgttggatgatctgatagtctttgcaagaaataattgcagagagtttctgcaatcactgggaaatagaaatctataaaaacatctgaaaaagtgtgagactgggccactgcctagggggatagccctgttatttctatggaacaggaaaaaaaaa

SEQ ID NO: 6609 - DNA, 392 bp, Homo sapiens
accatgttgaccaggctggtctcaaactcctggcctcaagggatccacctgtctcgatctccccaaagtgctgggattacaggtatgagccaggacccctggcctagttactatgttttaaatagctccagcccccaacacggtggttcagatttcagttaggacagtttattaactgtgcaatttcataaagcacaaagtttgcttctagcttgttataccacaaatcactttataaataacagacgtgcatcacgatctctaaccagtcattctcttcctcttaaagcctgttggtgactggtcactaacatctgctcttcagtttatacacagacagcaaggcgtgtagttgtgttgcctgtctcccagtaataaacccatgtgatatt

SEQ ID NO: 6610 - DNA, 485 bp, Homo sapiens
aactcttgtgtttctttgaattgatgatgctttatgggttttgttatacttgaggaggaaggctctaagtatagaagtattttaagccggaaggtactctcaaggtcattttgtccacttctttcactttatgaagaaatcggggacccacagaaatttgaaaccttgcctctgatgacacagccagccagggctatagtgggtgcctctgaccccttaagagagagcgctcagccttttgggactgtgcaccaccacgagcctgattattggttctttctccaggctcatgcttcgtactcatgcgttccaattaaaattggaaaggcaggaacaactttgtaccatagtgtcaggtttctctgcgaacaaatattctaacagtcctgtctcctcagtgactgtgttctcttgccattccttcctgttctgcccctttaataaagatctgttttgatttttctgggtaaacaaaaacctcacac

SEQ ID NO: 6611 - DNA, 452 bp, Homo sapiens
attttaagtaagattaggaatagtgctctgtgtagcccaaacccaaaaagcccatatagtatgggggaaatgactcacaataaggagcctgtgccctttgacattaggtagagatagttggtgtaaagctaagagcaaggatttggaatgcggtgagtctaagcctaaaccccagttccactgtggtaaaccctggatgggttacttagagtcccaaaacttctgtatgtaaaatagaaaccatcactgacatgtggtggtgtgaggatttagtgagatgatgtgcccaaaacacctaaacagtgccttagcacccagttggcatttaaagaggagaccaggaacttgtccaagaaggtccatttgcttgagatgttatatttgattcctttatcctaacaactacaaaattgttggtttgagaaagagacctcattttacaagaaaaaaaa

SEQ ID NO: 6612 - DNA, 392 bp, Homo sapiens
gtatctcccttcccaactgagtctttcccttcagcttgaaattatgaacaaatattctccacactgacaagtcctgtgttttctcactgtcaaaatagtattccatattcttctttccctttgcccttcccacttgaacttctcatttactcattagcctatggtaatatgccttctacctcttctattactctgaagttgcctccgtaaaggacaccaaggatggacttgccaaatttattggcatcttttttttttttttggagacagggtctcactgtgttgcctaggctggagtgcagtggcaccattatggctcactacagcctcaacctcccaggctcaagtgatcctcccaccacagcctcctcagtagctgggactacaggcgt

SEQ ID NO: 6613 - DNA, 291 bp, Homo sapiens
gatcatttttcttttctttctttcgtgtgtgtcagtgaagatcaccacagcatacagcacaccctgtatgtttatgggtgctgaggtggcagcaattttacctgcctctgcttctaaaccacagaagcaaatgtcagcactgagcaaaaaacatgtcagtgttcttgtgaaaatagctttgaattcacaaaggccctaaaggttcttagagacaccccctcccaagggtccatggaccacacctgcaagccactgctccggctgcctcttcccatgcatcacagaaccctc

SEQ ID NO: 6614 - DNA, 534 bp, Homo sapiens
ctgagccaattatccgtgaagcatccataatctacctactgacttgcacatccactcactcttggtaactaaagtgcttccctttctaaagaaaaccactggggaagccaaaagcatcagctaagatagataactgtgagcatgatcgtttaggaatggatatggtttgaacttattcatgtttagagagagtgtcaaattgagaactaggcagattcacctactctacaaatgactctgaagcaaattggttgaagaaattagatctgaaagattcttggtggagaattttgaacttttatcagtatatccatatttaaaaggagataaaagaagacaaaataaaaaaaattattgcaaggctgacagaacagttggattaaacatcagttcaattaaaaaggactaacagataaatcttttgaagataaattttgactccagttctttagagaaactaaggtgaccttgatgggcagtggaaagaatcatgacatgtgaaattccttgaataaaaatttattgactttaagt

SEQ ID NO: 6615 - DNA, 327 bp, Homo sapiens
gaaacaaaagttacttaaaaaaataaatcctggtgaaaccctgtctctacaaaaatacaaaaattagcggggcatgatggcgggtgcctataatcccagctattcaggaggctgaggcaggagaattgcttgaacctgggaggcagaggttgcagtgagctgagatcatgccaatgcactctagcctgggcgacagagtgaaactcagtaaatccataatagcattggattttgagaagggtgccatcaacaaactgagatagtggggacatttataaaaaatataaatcaaatggtatctgattgattggaaagccatgagaacag

SEQ ID NO: 6616 - DNA, 511 bp, Homo sapiens
ggaggtagtgtctacagagctacaagctcagatatgattatgccatgcccccgcttaaaaccctttggtgggtccctcaggatagtatccaaatgtctaagcatgctatttataaagatggttctgccttctagccttatgcttcacctacctattctcattgctttccctctctattacctatttccctacatgaacttttgcagatccaggactttgttgtctgtctgaaatactttcatttggttgttcctccagatcactctccgcccctctatatctgtgcctctggagactgaccttcgtggactgccttttccaggctttgcttctcatttgagtttggcctatgagaggcataggcaggagatttagagggtgagaggaaagtatagttaggatattgtttgcctggcttcttcctgccaggatgcagttggtgtgccatctttttcctgccaagaccttgactaatataaccactcatcttccaatacactcatttgcacac

SEQ ID NO: 6617 - DNA, 613 bp, Homo sapiens
taagatgaattaatttgattacaggacatgctaaatttgaggtggacacaccacaaaacatacagactgaggtgtgttgcttttaatcatagataaattttagaatcgaacttttgaggcattgacttaaagggtaaaattgaatttgttagagttgatagagacagggaaaagagaaacctgaggaaaaggatatagtacttcaggtaatttttgttgtctttgttgttgtttacatttaaaacattttttttccctggcaaccttcatttaactcaaagctttaggtaatgttaaaggatatggaacaggaggagggaatacaaatctttaaaccaagtcataaggaacagtgaaggatagttatgaaaaggattgagacagtgtagttgcagaaaccacgggaaatatggtggatttggttagcatgggtcagtagtgtgatggaaaagtcaaaaagttttgaaaagctgagagaaaaactttgaattaggcaaatggtaagcttgaggaggacagcttaatttgaatgatggccttaaacaccaggttgatgaagtttaggagatgatgaggtaagaataaattcagttgcatctcagatttggcaaaa

SEQ ID NO: 6618 - DNA, 471 bp, Homo sapiens
gattcttctctggagaaacaaaagcagccccaggaaaaaaaaaaaagatatttgtatttgagaaccccaacaaaatgtccagatatctacataatcatcctaccatgaagtccagtggtttagaaaggcatattgatgcacacagagcttccggtcagcctttcaatgctctattcttaaatgtcagtggatagacctccaaaacagagaaaaaaggaactcaatggaaaatgtagactttcttaatatgctcagagattgtggaaaatacagtatttctaaaataaggacagaagaaaaaaaaagtaacctgtaatcccagccacttgggagactgaggcaagaggatgacttgagcccaggaggtggagaccagcctggacaacatagcgagactctgtctccaaaaattaaaaaaaaaaaagtaaaggaaacttatatggcatgatctgtagaatatattggtaagtg

SEQ ID NO: 6619 - DNA, 260 bp, Homo sapiens
tttttttaaggcttttgctgcaagtacgagaaacaccaagagaggctgggagaaaggaaaacaccaatacgtctgggaaagcttatgaaaccaaattttaatagacaatctataacctatgtttcatactttcagggatgataataaattttgaagttttctcagaaactttttttttcttttggagacaaagtctcactcactgtcacccaggctggagtgcagtggcacgatctcagctcagggcaatttccaactcc

SEQ ID NO: 6620 - DNA, 758 bp, Homo sapiens
acttttcgctgcaagttgctacattcctgcacactcccggcccgcggcgcctctcccggcccgaagcgtgccccgtattctgccccgcgaaccgcaaacgatgggtccaatccgggtccgaactgtggtgtctgcggagaacgcgggcgcccttggctgcaggaagttcttccgctccgctcggccccttttccccgcccgtgctcgggaaaggcgcttccagttcgcctggacctgcgaaagggccaaggccgaaagaagtggagagaggatgtgcgaacccacctcctcctcctcgcgttaccccggcttgaccgagcggagcgcctgtgcgagcttaaagccgcgaggatagattggagttaaaatagataccgtgagccggcattgatgttaataaagatccattgttttcagcattaactttattttgtaattgtttcacttatctgttagtctgcaaaaactcacttgagaggggtaaacggttactgtaattgaagctttgagaccaggtctgtaactcagtgtaacttattaaaagaaacaaaaacactacattttccaaatagtgaaatcacatcaacttttttagtactcgaatttgcaatagtcactggaagccgcaacccaaaaaattagtgcgtcttcaggtacaagcattcatgcctctgtacctgtctttcatcctcaaggagctgggtccctacccctgctatccctgtgcctggcccaacggtggactccgttaatgtgga

SEQ ID NO: 6621 - DNA, 257 bp, Homo sapiens
taaattaaaaatgaacattcattaagttttactggatagtatcccattatatagtttacttattccccaaatgatagaaaaactggtttattttagtttttactattataaaattatatatataatataataatatataatatattattatatatataatataataatatataatatattattatatataattagtttttactaatataaaattattgcaattctgcaataaatatatttacacatgacattgtgaa

SEQ ID NO: 6622 - DNA, 767 bp, Homo sapiens
gcaaaagattcttaaagatccaccgactgtcatgttccacaagcaagatctcagggtagggaaaaaccagtgaatgaggttacacagcaggaaaagaaccggtttcctcccagactatgtcttacacgctgagttatgccacaagcgttatcatcaaaactatttaaggctggagtcttagacctctaaaaatagacaggaagggctgccctgagcagtgacacctttgtgtttttatgtctccgccagcgccgtaacagagcctgtttctttcccgttgagtattacttaaattcaggcttaaatgtgctatgaagggcatttttcatagtatcccatttgccttgtaagttatataaagtgcatgattataattttttccttagaaatgcaatatttagtttcatccagctcttatgaataataacctcatagattcctgatcttaatttaaataggtgctttaattttacagctttcaaaagtagttactgtaaattttactcctgttaatgctggattggtttaaaggatttataagggctgtgtttgctctttacaaggcaagatgccatacagtgttcaataatagaaggtcttgatacaaccgacattttaaatattctttatacatgaggactgcgtctttttcactgaccctatgatttcactgtgagtagggtgaactggactgcatattagtttatttgttgccataatcacatttttgaaaaataaatttaagagttttttcttaaaaaagcttg

SEQ ID NO: 6623 - DNA, 478 bp, Homo sapiens
acttctcaccctgacatcttcctcatctggttgtaacctcagcccaactctcattccagcctctgctgtgaccagttctttgtaggtacagctcctcagcaccttgaccccagccctctctgatgtctgccaggacctctaggtgctcacacaggagaaatccggaagtacaggggcccttgccaaatgggagatggaatcatggaaaagtcttcacccctccagggaaaagcagacagctcctaaatccatttcttagggctccttgcttccctcccctgccttcctctccctgctcctgacttctgctccctggcatcatttctcacataagctacctgcagcagcccctctcacgctgtgtctcagggaaaccccagccaagacaaatcatttcacgcagtaaaatttaatgaccatagttttagaatcaacaaacaggacacggcatcttacaaaagatgtttcgtccatttct

SEQ ID NO: 6624 - DNA, 291 bp, Homo sapiens
ggaacacagagagagaaaggagtagtgaatgtatttaaagaaataatgacagaaaacattcataaactagggacagatataaatgtccacacataggaagctcaaaggtctccagttatgttcagctgaaacaatgctacaataagacttagtaaaactctcagaagcgttaagacaaagagaggatcctgaaagcagcaagagaaaagaagcaaatctcatacgagagaactccattatggctatcattagatttttcaacagaaaccctgcaggtcagggatagagtga

SEQ ID NO: 6625 - DNA, 462 bp, Homo sapiens
aatgtctgctcttttgagggatatttcattatttgacaacctcaatgagaacatgtttatggttttggattactttaggcacctagtgtttctaaatcgtctatcattcttttctgtttttcaaaagcagagatggccagagtctcaacaaactgtatcttcaagtctttgtgaaattctttgcatgtggcagattattggatgtagtttcctttaactagcatataaatctggtgtgtttcagataaatgaacagcaaaatgtggtggaattaccatttggaacattgtgaatgaaaaattgtgtctctagattatgtaacaaataactatttcctaaccattgatctttggatttttataatcctactcacaaatgactagcttctcctcttgtattttgaagcagtgtgggtgctggattgataaaaaaaaaaatgaaggatgacctttcctgaacaga

SEQ ID NO: 6626 - DNA, 475 bp, Homo sapiens
tcctgccttcagctgctcctggctgcagagaagtcatcatattgacctgttgctcagtaatgccctgttctgtggtcagctgctcccaagtcacctatggccctggacagagcctcccctgcctgtcagaatcccctgtttgattcttcatttccccagtaccaatttcctgagctcctctggtatacctgatatttggtggcattcccagaaacatggggtacagacccatccctctggaagctgagcctctgatgtatgtctctgatgtatgtgcatgtagggggatggggggaagcaggatgatcacatgtgcaccacccaggagcttgcaggggccctccccaaactcactgaatcagaatctacaccttacaactttcccaggtgatgtacacgcacattaccgttggtgagacactgccctggaacacttgtttaataaatatttgttgactgatggttaaccttcatc

SEQ ID NO: 6627 - DNA, 489 bp, Homo sapiens
ggcatcttccttctggtttgtacatctagtatttagtctatatactaagtaaacattaccatctctttctttggattcagatgaaccctcaaattatttatcagcttagcacctatttatgtttttgcaagggcacaaatacattgcattgccaacagctgagaagcaccagctaaaaccttcagagtgtgcagcagctcaacaggaaatacatccttttctggttgaaatatttttaccatgatgttttgacaaaacaacgagcaattacgatgatgacatatacttatatttcagctagaattacacacaaatctacaaaccaaaacagaataaaaacaagtataagctctggctgtacacaggcacaacaaaacatttgggctgtctacttgaaaacagatactttaatatattaactctgccctgcaatgtttactcacggcctctattccgcattctcatcgccagtcccaggtactccagact

SEQ ID NO: 6628 - DNA, 550 bp, Homo sapiens
aatctccacattgcatttgtcagttgctggaaggagccacgtggtatggggcgtgccctgcctgaacttgcacccactgaggggtgagtggcacaggctgtgtgtgttcttcaggcttcggctttcctcatttgataaactgctgcttcccaccgtagaccgcagatttctctgagtaggagtcaagcaacctggctacaagggcacgctcttccgatggcccacagagccaggttagaattgacttgctctgcacctgggcagggctgcagggagacacggtagtgttaactccaggtgcatgtaaaagccatcaatggggtgggaacccaagggcaaagagtaaggggacgcagactccatcctgggcccgagtctgatccagccagcaacctcggcctctgtgcatttcactttcctcacttgtccagcgacaaggctggctggagtcatgagcggagacagccttcatggaacagttgtgcgttcccgagactcagcaggaattctaagtcatggctttggaaaagaagcattatctagaattgag

SEQ ID NO: 6629 - DNA, 380 bp, Homo sapiens
cagagagctgttaccgttgatctctggagcctccctgaaggccaggtggggcaggtgttctcatgctcctgccagggaaattggccatcagagacacagagtatcttgcttagggtcccacagcccccagcagcagggactggaaccagagactggctgctcctgctccccagcagttccttcctgcacatcaggggcttctccacctgattcaagcgacaggaaccccctgtgcatcttcatcctcctgctggctcagcctgccctaaacagatgtgacctgggccaggagtgcatgaaggcaggccctgttgtcctgcatgccgccagctggactggtggcccttccgtgtttgtcagcgtggtgatgaggagagctc

SEQ ID NO: 6630 - DNA, 1197 bp, Homo sapiens
aagtgacagcggtagagaaccaggcagcccagaaaccccaggcgtggagatggatcctgcgagagaagggggttcatcatggcggatgacctaaagcgacttcttgtataaaagaggttaccaagtgttgaagggctccatgccattgttgtgtcagatagaggtggagtacctgttattatactgacaaatgacaatagttggaccccacagcaatcattacttttgtagacagcaaagttatgctccttggcttcaggtgaagacccccagatccaggccagtggatttacaagtgagagtcagcagcactgggcatttcaggcaatagctctgaacaagccctttaccatgcgggtaggtaaaccccagaatatacagatgccccttacgatacatgggtggggagggtatgtggccgagagagcataagcttaggagacagagtggatttgaattccactgagcttttggctgtggacccatggggacgtggcatatgtctcgctgagccttagtttcctcctgcatggaatagggagagcaatagtacctgcctcattcagctaacgtgaggatctagagcagcatttgcataaatgacgcgtggggcacagagcagactcaacacagagcagcttacgttatgaggcttggcaggctgggagctcctgtcggcctctctcctcagctctgtgcccactgagctcggcacaagggttggcccatgacaggtgtttattatgtggaaataaatgagagggacaagacatttgctgatttcttcactgtttccaactgggaattcaaatgtatctcacgttcccataccctcacaataaatctgttcaggagaaaaatgtgtacgccttttaacagacagcactgagatatacagaaagtaagaactttcaggctgggcgcggtggctcacgcctgtaatcccagcactttgggaggctgaggcgggtggatcacgaggtcaggagatcgagaccatcctggctaacacagtgaaaccccgtctctactaaaaatacaaaaattagccaggtgtggtggcgggcacctgtagtcccagctactcaggaggctgaggcaggagaatggcgtgaacctggaaggcggagcttgcagtgagccaagatcgcgccactgcactccagcctgggcgacagagcaaaactccgtctcaaa

SEQ ID NO: 6631 - DNA, 856 bp, Homo sapiens
aagtgacagcggtagagaaccaggcagcccagaaaccccaggcgtggagatggatcctgcgagagaagggggttcatcatggcggatgacctaaagcgacttcttgtataaaagaggttaccaagtgttgaagggctccatgccattgttgtgtcagatagaggtggagtacctgttattatactgacaaatgacaatagttggaccccacagcaatcattacttttgtagacagcaaagttatgctccttggcttcaggtgaagacccccagatccaggccagtggatttacaagtgagagtcagcagcactgggcatttcaggcaatagctctgaacaagccctttaccatgcgggtaggtaaaccccagaatatacagatgccccttacgatacatgggtggggagggtatgtggccgagagagcataagcttaggagacagagtggatttgaattccactgagcttttggctgtggacccatggggacgtggcatatgtctcgctgagccttagtttcctcctgcatggaatagggagagcaatagtacctgcctcattcagctaacgtgaggatctagagcagcatttgcataaatgacgcgtggggcacagagcagactcaacacagagcagcttacgttatgaggcttggcaggctgggagctcctgtcggcctctctcctcagctctgtgcccactgagctcggcacaagggttggcccatgacaggtgtttattatgtggaaataaatgagagggacaagacatttgctgatttcttcactgtttccaactgggaattcaaatgtatctcacgttcccataccctcacaataaatctgttcaggaga

SEQ ID NO: 6632 - DNA, 490 bp, Homo sapiens
  misc_feature (362)..(362): n is a, c, g, or t
  misc_feature (412)..(412): n is a, c, g, or t
  misc_feature (430)..(430): n is a, c, g, or t
  misc_feature (453)..(453): n is a, c, g, or t
  misc_feature (463)..(463): n is a, c, g, or t
gttcctggaggacccaggcctgaccaagtccccggcctcagcaggcgatcatgttggcaggcttggatcttctcgctctgtgaccagcctgggccacacactggtggaatctgctctcacgaggccttccctgcccagtccccacaggacctcacctagggtggaggagagcaacagcaagctcctggagtcagagaggaagctgcaggaggagcgacaccgcaccgtggtgctggagcaacatctggagaagatacgcctggagccagggaaggcatcagcctcccagagagcagctcccaggaccaaaacagctccgttcctgggatgtatgctgtgttacggggccttggctgttgatngggcacaatggggccttgggtaacctgttgctgttgttttggtcactgtnttgggcctttatgttggncttgtttttttggggccagcctnggttctggtntttgggctttggtttggccagcttggg

SEQ ID NO: 6633 - DNA, 614 bp, Homo sapiens
ggcctcccaaagtgctgggattacaagcttgtaatcctggcccacacatttaatagtaaacacttcagattttcagacatgagataatctaatcaacgatacttattagccactggcctattcagcattgattctttagagtcatacaacttacactcccagttcacccaccttgggtgaggccaataattagactcaggtagcttcaagactgaatgaagtggggcaacacttctggatcattaaggatctgctgaccttgattaagaatctgataatgaggaacatcttaacccacctgtgacccacctagataaaatggataaacccatgtaacctggtagctgaactcgggaaataaaacttccaagaatcactgggaaatttaccagtgcatcctcaaaacttccataaagtatggtttcaaagaggaactgaacaccttaaagaagctgtgaagacaattaggtgagatagtattccatcagacaatcatttaatacccatacattgtattaaggatactgtgttagaattattgtggaaaattacacaacagatgtttgggttttttgtttttgtttttgtttgacacggagtcttgctttgtcacc

SEQ ID NO: 6634 - DNA, 1037 bp, Homo sapiens
tccctaagggcccgctcccgccccggctccgtttctgtctctctgaggaagcccggcgcagcctaaccctcacagggccgcggagagggcgcgccaggcggggatttgcgccaggcccgcggcgcatgctcagtggttggggactgggcgggtaccccgggcggggagcctgactgaacggcggctctgctgattggtcgggctgctcacgccacgcccgttgccttccgatggacagttccttacctgccgggtcggcctccgcagagagtggtggtcttgaaaacccagttttgggagaatacctgccgcgcctcccgcccaaatacccagaggtttcatagccgccatcgctgcggtggaggaggccgcctgttgcgtcccaccccaccagaaagcctaacactggcctgaagcgtaatcttaaagtggtaggggaaaataccgatctagcgcagagagcaaaacacctccgttctgggtttaatgggcaggtctggaggtgaggtatgccgtccgcactcaataattacttgcaggatcggattgtttctccagtgggtggggactgcaggatgtagcattgagtgagcctggcagattgaaagataaaacaagggtgatgataaaaacaattacacactaacccatttcctcctccgtgaaatgagggaatggcccagacattttccagacctcttctgtcctaagagtggagctgggtgacagagcaggtgcaagccggcctttccctgcctccccggggaacgcactctgttcggtgagagcaactcagctcgcattgactcctttcagctgcaggagtgtggccgttcagttctcatttgaactgttgacaacagttgtcttctgagaatcatgagttagagcctccctttaggcttctgactccctcaaaagtaccagacaacacaaacttttcccctcttgttaccttggctctctaagctgtatctacttctatacaaggcgaacaattttgtctttttaaattaaaaacaacaacaaaagcaaaa

SEQ ID NO: 6635 - DNA, 1704 bp, Homo sapiens
agcggatgtgactgagccgactgcatctctgggcaagcggcgctttgcctctctcctgtctttgtctgctcttcctgcaaggctacggcgcctggagcagggtctgcagcggccgccgcagcaacgcgagccaagtcgtgccccgcacggccgcccggggccgcaccctcgctcggtggcggcgcccgaagacgccagccgcgccacgcactgcctgcgtcccgcgccccagccgccgcgcaccaacgccgccgcttcgccgggagccaagcccgccgggccggcccggtcccaggtgggcagctcggcttgcagctggttggaggtggcggccgctgcagccctggcagcgggcacacccctaagcatacgcacccaacgcctcctccctgagccacgaggatggagcagccaccccggcccgggactggcgcaaggtgcccaagcaaggaaagaaataatgaagagacacatgtgttagctgcagccttttgaaacacgcaagaaggaaatcaatagtgtggacagggctggaacctttaccacgcttgttggagtagatgaggaatgggctcgtgattatgctgacattccagcatgaatctggtagacctgtggttaacccgttccctctccatgtgtctcctcctacaaagttttgttcttatgatactgtgctttcattctgccagtatgtgtcccaagggctgtctttgttcttcctctgggggtttaaatgtcacctgtagcaatgcaaatctcaaggaaatacctagagatcttcctcctgaaacagtcttactgtatctggactccaatcagatcacatctattcccaatgaaatttttaaggacctccatcaactgagagttctcaacctgtccaaaaatggcattgagtttatcgatgagcatgccttcaaaggagtagctgaaaccttgcagactctggacttgtccgacaatcggattcaaagtgtgcacaaaaatgccttcaataacctgaaggccagggccagaattgccaacaacccctggcactgcgactgtactctacagcaagttctgaggagcatggcgtccaatcatgagacagcccacaacgtgatctgtaaaacgtccgtgttggatgaacatgctggcagaccattcctcaatgctgccaacgacgctgacctttgtaacctccctaaaaaaactaccgattatgccatgctggtcaccatgtttggctggttcactatggtgatctcatatgtggtatattatgtgaggcaaaatcaggaggatgcccggagacacctcgaatacttgaaatccctgccaagcaggcagaagaaagcagatgaacctgatgatattagcactgtggtatagtgtccaaactgactgtcattgagaaagaaagaaagtagtttgcgattgcagtagaaataagtggtttacttctcccatccattgtaaacatttgaaactttgtatttcagtttcttttgaattatgccactgctgaacttttaacaaacactacaacataaataatttgagtttaggtgatccaccccttaattgtacccccgatggtatatttctgagtaagctactatctgaacattagttagatccatctcactatttaataatgaaatttatttttttaatttaaaagcaaataaaagcttaactttgaaccatgaaaaaaaa

SEQ ID NO: 6636 - DNA, 1544 bp, Homo sapiens
gggtacctgggggcgcgtggagacaaggaatggagcccggaatgccgggcccttgggtacttgggaaggcaggctgctgagtgcctgggatggggcgatcttcctccccagaagcaaacaaacctccccgcgagaatctgaatgcgttggcatcttgggtggtgactgaatggtcagatcgtggactagggatgcttctccaagctctaagaggaccatagtctgctctcttctctggcacccgcttgcttctacgctccttcacctctgcagccaggtgcccaagcaaggaaagaaataatgaagagacacatgtgttagctgcagccttttgaaacacgcaagaaggaaatcaatagtgtggacagggctggaacctttaccacgcttgttggagtagatgaggaatgggctcgtgattatgctgacattccagcatgaatctggtagacctgtggttaacccgttccctctccatgtgtctcctcctacaaagttttgttcttatgatactgtgctttcattctgccagtatgtgtcccaagggctgtctttgttcttcctctgggggtttaaatgtcacctgtagcaatgcaaatctcaaggaaatacctagagatcttcctcctgaaacagtcttactgtatctggactccaatcagatcacatctattcccaatgaaatttttaaggacctccatcaactgagagttctcaacctgtccaaaaatggcattgagtttatcgatgagcatgccttcaaaggagtagctgaaaccttgcagactctggacttgtccgacaatcggattcaaagtgtgcacaaaaatgccttcaataacctgaaggccagggccagaattgccaacaacccctggcactgcgactgtactctacagcaagttctgaggagcatggcgtccaatcatgagacagcccacaacgtgatctgtaaaacgtccgtgttggatgaacatgctggcagaccattcctcaatgctgccaacgacgctgacctttgtaacctccctaaaaaaactaccgattatgccatgctggtcaccatgtttggctggttcactatggtgatctcatatgtggtatattatgtgaggcaaaatcaggaggatgcccggagacacctcgaatacttgaaatccctgccaagcaggcagaagaaagcagatgaacctgatgatattagcactgtggtatagtgtccaaactgactgtcattgagaaagaaagaaagtagtttgcgattgcagtagaaataagtggtttacttctcccatccattgtaaacatttgaaactttgtatttcagtttcttttgaattatgccactgctgaacttttaacaaacactacaacataaataatttgagtttaggtgatccaccccttaattgtacccccgatggtatatttctgagtaagctactatctgaacattagttagatccatctcactatttaataatgaaatttatttttttaatttaaaagcaaataaaagcttaactttgaaccatgaaaaaaaa

SEQ ID NO: 6637 - DNA, 1700 bp, Homo sapiens
agcggaaacgcagagctaggaggtgtgggcctcgggtgaggggagacccagctcttagacctgggagcccagacagaggtggatctgcccaccttgcagctcccagaggactcctgctgccttgtaccagttgggaaaagcaaaattcagagcagttcctttttctgggtccctcgccttggccacatcagaggaaacgtcgactcgccagggctcccgggagaaatcccgaggtcagtccctcccattctggggcacccctggagcagctagctccctgcctagcggtggcaaactccagagccccaaggagcagaacggggattccctgtgcgcaggctcctggtgcagctcctgagcacaaaggccacaccctcacagaccaggcctggtgagagagccgggcttcttcagaagtacctggatacctgaggtgcccaagcaaggaaagaaataatgaagagacacatgtgttagctgcagccttttgaaacacgcaagaaggaaatcaatagtgtggacagggctggaacctttaccacgcttgttggagtagatgaggaatgggctcgtgattatgctgacattccagcatgaatctggtagacctgtggttaacccgttccctctccatgtgtctcctcctacaaagttttgttcttatgatactgtgctttcattctgccagtatgtgtcccaagggctgtctttgttcttcctctgggggtttaaatgtcacctgtagcaatgcaaatctcaaggaaatacctagagatcttcctcctgaaacagtcttactgtatctggactccaatcagatcacatctattcccaatgaaatttttaaggacctccatcaactgagagttctcaacctgtccaaaaatggcattgagtttatcgatgagcatgccttcaaaggagtagctgaaaccttgcagactctggacttgtccgacaatcggattcaaagtgtgcacaaaaatgccttcaataacctgaaggccagggccagaattgccaacaacccctggcactgcgactgtactctacagcaagttctgaggagcatggcgtccaatcatgagacagcccacaacgtgatctgtaaaacgtccgtgttggatgaacatgctggcagaccattcctcaatgctgccaacgacgctgacctttgtaacctccctaaaaaaactaccgattatgccatgctggtcaccatgtttggctggttcactatggtgatctcatatgtggtatattatgtgaggcaaaatcaggaggatgcccggagacacctcgaatacttgaaatccctgccaagcaggcagaagaaagcagatgaacctgatgatattagcactgtggtatagtgtccaaactgactgtcattgagaaagaaagaaagtagtttgcgattgcagtagaaataagtggtttacttctcccatccattgtaaacatttgaaactttgtatttcagtttcttttgaattatgccactgctgaacttttaacaaacactacaacataaataatttgagtttaggtgatccaccccttaattgtacccccgatggtatatttctgagtaagctactatctgaacattagttagatccatctcactatttaataatgaaatttatttttttaatttaaaagcaaataaaagcttaactttgaaccatgaaaaaaaa

SEQ ID NO: 6638 - DNA, 375 bp, Homo sapiens
cacaaaagagttaattgatgaaggaatctgaaggacactgagcaagcccaccccacccaggcttgatggatagatagggcggattagaagccactgggggccagacatggtggcttatgcctctaatcccagcacttggggaggccaaggcaggcacatcgcttgagctcaggagtttaagaccagtctgggcaacatggcgagaccctgtttttactgaaaatacaaaaaattatctgggcctggtggcgtgtgcctgtagtcccagctacttggggaggctgaggtgggaggatcacttgagccagaggttgaagtgagctgagatcacaccactgcactctagcctggataacagagtgagaccatgtctta

SEQ ID NO: 6639 - DNA, 446 bp, Homo sapiens
ttaagaaccagtgcctcacattcagccctgacagcagagccccctgccactgacagtcatgggacctcagccaagttcttcagccatcttgaatctcagtttcctcttctgcaaaacaagattaataataatttctactattattatatatattccatgagaacggaatgtgacagcttagttaagctgtcaagctaagttaagcttagtttaacctggtatccagttttgagaaagccctcactgtatagtattattatcctgttctctaaaccctgataaatgtataatacatgagtttgcttttgtactttaaaagcaaaacctaatcactgggcactgtagtgcatgcctgtgatcccagctattcagaaagctggagcgagaggattgcttgaagccaggagtttgagactaacctcagcaacatagcaagaccccgttcc

SEQ ID NO: 6640 - DNA, 535 bp, Homo sapiens
agatgtcagaaaagagtcagaaagcccaggtgatagaataagtgccaagaacatatacaccatggaatactgtgcagccataaaaaggaatgagttcatgtcctttgcagggacatggatgaagctggaaaccatcattctcagcaaactaacacagcaacagaaaaccaaacaccgcatgttctcactcataagtgggagttgaacaatgagaacacatggacacagattggtaaaacttcagcggttggatgacaccctcttttggtgatgccgtgggggaacgcaacatgattcaaccccaatgaaagagaagttgcaataaccgctaagactgcagatgcatttgactcagcaaacccccttcaagaaatgcatatgaaaaaaactcatgtttcaggttattcattacaacattgtttgtaatagcaaaatgtggattagaaatagtccagatgtctgtccgtaggggactgtttaataaactattgtcagtcccttagtggaaagtaattattttctcagtgaataaagg

SEQ ID NO: 6641 - DNA, 405 bp, Homo sapiens
gaaaatgatcaaaacaaatgacagggctcagggcaaggggcaaaactgttcccctgccaggctgtttgatagaaaaaggaatggttttcttagttctaaagcttcaaccacactggatccttgtgttttcacaacccttaaggttagagccaactttcaaaaagaataattaaatcgggaaataagtggggtcagcaggtttcgtagtgcttttaaacaggaagtctcagaactcatggagggaagtagctgacagcaaaactgctttcctactcatcaacccaaagaactgcttaattccagaagaagatagaggagcacatctcaccaaagacaagttgaccctaactcttaaatcatctacagccaaaaaactgattctgtacctggttgatcatgcctgta

SEQ ID NO: 6642 - DNA, 323 bp, Homo sapiens
ctttttcctccattcctccttctttctctctcttcctccattttttcctttttattatgaaattttcctaatatataaaataactctatgtgattgggctgtaagtaagcattttctgaatctatatgtcaaaaatataatgtcataataaaaaggaaaaaatggaggacgagagagagaagaaggcggaatggaaggagacagcaacagtgcgagaaagagacgaaggggagcgcggacacaaagggagcaagaaggaaggacgcacgaaagagtcacaggaaatcgcgaatccagacaggtgaccgggcaccgcactggag

SEQ ID NO: 6643 - DNA, 218 bp, Homo sapiens
ctttttcctccattcctccttctttctctctcttcctccattttttcctttttattatgaaattttcctaatatataaaataactctatgtgattgggctgtaagtaagcattttctgaatctatatgtcaaaaatataatgtcatgtatatgagaaacaagtaaacaacaggaagttattaacagagtctgaataaaaatgcctgctataattctac

SEQ ID NO: 6644 - DNA, 526 bp, Homo sapiens
  misc_feature (17)..(17): n is a, c, g, or t
atatgccgcagtctccnggagcagtccacgctcggcccctactcggcccctccccagctacagcagctccagcctctacgcccctgatgctgtggccagctctggacccatcatctccgacatcaccgactgctcctgccagccccatggcctcccccggcgggagcatagacgagaggcccctatccagcatcccctgcaaatatttattgggggccatgggtaggggtttggggggcggccggtgggggaatcccctgccttggccttgcctccccttcctgccacgtgcccctagttatttttttttttttaacaccatgtgattaaggtcggcgctgcctcccccgacccactcagcgatgggaaatgaattggcttgtctagcccccctgctgggtgcttgttcagcccccactctgggctgtggagtgggtgggcaacgggcctgggtagctgggcccaggcaacccacccctccacctctggaggtcccaccaggctattaaaggggaatgttactgca

SEQ ID NO: 6645 - DNA, 1506 bp, Homo sapiens
agcgggggagagccaaagcgggcaggcggcggaaatatccgaagcggcggggcgcccgaggccgttgccgacctccgcgctaaagccgctgctgccgcggaagacgatcctccagtacccgcccgccgtcaccgcagctgccgtgtcctcctcccacccctagccgcaccccctcgcggagggatcagctgagcggccaaacggcacggtcgggggagccccgagtccgcagctgcagcggggcctgagaccagagttggcgagggcaaggaaggagcggccccgggcagtgggggcggggccgggcgggcccgagaacagccgaatttggccgagcgctgccgagcgagtccgaggcgctgggccaggccggagccggactacgggagccgaggcgggccgcgcggtgggcgcggagaggagcggagcggcgcggcaggccgggcgggtggcggcagcagcggaggaggccgcagctgcgggtccgaggagcggaggcgacgcgggcggcggcggggggccgggtggccggggtcccgggccccgcggcggcggcagcggcggcggcggcggcaggatgatcaagctgttctcgctgaagcagcagaagaaggaggaggagtcggcgggcggcaccaagggcagcagcaagaaggcgtcggcggcgcagctgcggatccagaaggacataaacgagctgaacctgcccaagacgtgtgatatcagcttctcagatccagacgacctcctcaacttcaagctggtcatctgtcctgatgagggcttctacaagagtgggaagtttgtgttcagttttaaggtgggccagggttacccgcatgatccccccaaggtgaagtgtgagacaatggtctatcaccccaacattgacctcgagggcaacgtctgcctcaacatcctcagagaggactggaagccagtccttacgataaactccataatttatggcctgcagtatctcttcttggagcccaaccccgaggacccactgaacaaggaggccgcagaggtcctgcagaacaaccggcggctgtttgagcagaacgtgcagcgctccatgcggggtggctacatcggctccacctactttgagcgctgcctgaaatagggttggcgcatacccacccccgccacggccacaagccctggcatcccctgcaaatatttattgggggccatgggtaggggtttggggggcggccggtgggggaatcccctgccttggccttgcctccccttcctgccacgtgcccctagttatttttttttttttaacaccatgtgattaaggtcggcgctgcctcccccgacccactcagcgatgggaaatgaattggcttgtctagcccccctgctgggtgcttgttcagcccccactctgggctgtggagtgggtgggcaacgggcctgggtagctgggcccaggcaacccacccctccacctctggaggtcccaccaggctattaaaggggaatgttactgca

SEQ ID NO: 6646 - DNA, 2414 bp, Homo sapiens
agcgggggagagccaaagcgggcaggcggcggaaatatccgaagcggcggggcgcccgaggccgttgccgacctccgcgctaaagccgctgctgccgcggaagacgatcctccagtacccgcccgccgtcaccgcagctgccgtgtcctcctcccacccctagccgcaccccctcgcggagggatcagctgagcggccaaacggcacggtcgggggagccccgagtccgcagctgcagcggggcctgagaccagagttggcgagggcaaggaaggagcggccccgggcagtgggggcggggccgggcgggcccgagaacagccgaatttggccgagcgctgccgagcgagtccgaggcgctgggccaggccggagccggactacgggagccgaggcgggccgcgcggtgggcgcggagaggagcggagcggcgcggcaggccgggcgggtggcggcagcagcggaggaggccgcagctgcgggtccgaggagcggaggcgacgcgggcggcggcggggggccgggtggccggggtcccgggccccgcggcggcggcagcggcggcggcggcggcaggatgatcaagctgttctcgctgaagcagcagaagaaggaggaggagtcggcgggcggcaccaagggcagcagcaagaaggcgtcggcggcgcagctgcggatccagaaggacataaacgagctgaacctgcccaagacgtgtgatatcagcttctcagatccagacgacctcctcaacttcaagctggtcatctgtcctgatgagggcttctacaagagtgggaagtttgtgttcagttttaaggtgggccagggttacccgcatgatccccccaaggtgaagtgtgagacaatggtctatcaccccaacattgacctcgagggcaacgtctgcctcaacatcctcagagaggactggaagccagtccttacgataaactccataatttatggcctgcagtatctcttcttggagcccaaccccgaggacccactgaacaaggaggccgcagaggtcctgcagaacaaccggcggctgtttgagcagaacgtgcagcgctccatgcggggtggctacatcggctccacctactttgagcgctgcctgaaatagggttggcgcatacccacccccgccacggccacaagccctggcatcccctgcaaatatttattgggggccatgggtaggggtttggggggcggccggtgggggaatcccctgccttggccttgcctccccttcctgccacgtgcccctagttatttttttttttttaacaccatgtgattaaggtcggcgctgcctcccccgacccactcagcgatgggaaatgaattggcttgtctagcccccctgctgggtgcttgttcagcccccactctgggctgtggagtgggtgggcaacgggcctgggtagctgggcccaggcaacccacccctccacctctggaggtcccaccaggctattaaaggggaatgttactgcaaaaaaaaaaaaaaaaaaaaaaaaaaaaaaaaaaaaaaaaaaaaaaaaaaaaccctggcagcagcaggtgtggccaatggaggggggtgctggcccccaggattcccccagccaaactgtctttgtcaccacgtggggctcacttttcatccttccccaacttccctagtccccgtactaggttggacagcccccttcggctacaggaaggcaggaggggtgagtcccctactccctcttcactgtggccacagcccccttgccctccgcctgggatctgagtacatattgtggtgatggagatgcagtcacttattgtccaggtgaggcccaagagccctgtggccgccacctgaggtgggctggggctgctcccctaaccctactttgcttccgccactcagccatttccccctcctcagatggggcaccaataacaaggagctcaccctgcccgctcccaacccccctcctgctcctccctgccccccaaggttctggttccatttttcctctgttcacaaactacctctggacagttgtgttgttttttgttcaatgttccattcttcgacatccgtcattgctgctgctaccagcgccaaatgttcatcctcattgcctcctgttctgcccacgatcccctcccccaagatactctttgtggggaagaggggctggggcatggcaggctgggtgaccgactaccccagtcccagggaaggtggggccctgcccctaggatgctgcagcagagtgagcaagggggcccgaatcgaccataaagggtgtaggggccacctcccccccctctgttggggaggggtagccatgatttgtcccagcctggggctccctctctggtttcctatttgcagttacttgaataaaaaaaatatccttttctgg

SEQ ID NO: 6647 - DNA, 1198 bp, Homo sapiens
agcgggggagagccaaagcgggcaggcggcggaaatatccgaagcggcggggcgcccgaggccgttgccgacctccgcgctaaagccgctgctgccgcggaagacgatcctccagtacccgcccgccgtcaccgcagctgccgtgtcctcctcccacccctagccgcaccccctcgcggagggatcagctgagcggccaaacggcacggtcgggggagccccgagtccgcagctgcagcggggcctgagaccagagttggcgcggcaggatgatcaagctgttctcgctgaagcagcagaagaaggaggaggagtcggcgggcggcaccaagggcagcagcaagaaggcgtcggcggcgcagctgcggatccagaaggacataaacgagctgaacctgcccaagacgtgtgatatcagcttctcagatccagacgacctcctcaacttcaagctggtcatctgtcctgatgagggcttctacaagagtgggaagtttgtgttcagttttaaggtgggccagggttacccgcatgatccccccaaggtgaagtgtgagacaatggtctatcaccccaacattgacctcgagggcaacgtctgcctcaacatcctcagagaggactggaagccagtccttacgataaactccataatttatggcctgcagtatctcttcttggagcccaaccccgaggacccactgaacaaggaggccgcagaggtcctgcagaacaaccggcggctgtttgagcagaacgtgcagcgctccatgcggggtggctacatcggctccacctactttgagcgctgcctgaaatagggttggcgcatacccacccccgccacggccacaagccctggcatcccctgcaaatatttattgggggccatgggtaggggtttggggggcggccggtgggggaatcccctgccttggccttgcctccccttcctgccacgtgcccctagttatttttttttttttaacaccatgtgattaaggtcggcgctgcctcccccgacccactcagcgatgggaaatgaattggcttgtctagcccccctgctgggtgcttgttcagcccccactctgggctgtggagtgggtgggcaacgggcctgggtagctgggcccaggcaacccacccctccacctctggaggtcccaccaggctattaaaggggaatgttactgca

SEQ ID NO: 6648 - DNA, 1327 bp, Homo sapiens
agcgggggagagccaaagcgggcaggcggcggaaatatccgaagcggcggggcgcccgaggccgttgccgacctccgcgctaaagccgctgctgccgcggaagacgatcctccagtacccgcccgccgtcaccgcagctgccgtgtcctcctcccacccctagccgcaccccctcgcggagggatcagctgagcggccaaacggcacggtcgggggagccccgagtccgcagctgcagcggggcctgagaccagagttggcgagggcaaggaaggagcggccccgggcagtgggggcggggccgggcgggcccgagaacagccgaatttggccgagcgctgccgagcgagtccgaggcgctgggccaggccggagccggactacgggagccgaggcgggccgcgcggtgggcgcggagaggagcggagcggcgcggcaggccgggcgggtggcggcagcagcggaggaggccgcagctgcgggtccgaggagcggaggcgacgcgggcggcggcggggggccgggtggccggggtcccgggccccgcggcggcggcagcggcggcggcggcggcaggatgatcaagctgttctcgctgaagcagcagaagaaggaggaggagtcggcgggcggcaccaagggcagcagcaagaaggcgtcggcggcgcagctgcggatccagaaggacataaacgagctgaacctgcccaagacgtgtgatatcagcttctcagatccagacgacctcctcaacttcaagctggtcatctgtcctgatgagggcttctacaagagtgggaagtttgtgttcagttttaaggtgggccagggttacccgcatgatccccccaaggtgaagtgtgagacaatggtctatcaccccaacattgacctcgagggcaacgtctgcctcaacatcctcagagaggactggaagccagtccttacgataaactccataatttatggcctgcagtatctcttcttggagcccaaccccgaggacccactgaacaaggaggccgcagaggtcctgcagaacaaccggcggctgtttgagcagaacgtgcagcgctccatgcggggtggctacatcggctccacctactttgagcgctgcctgaaatagggttggcgcatacccacccccgccacggccacaagccctggcatcccctgcaaatatttattgggggccatgggtaggggtttggggggcggccggtgggggaatcccctgccttggccttgcctccccttcctgccacgtgcccctagttatttttttttttttaacaccatgctattaaaggggaatgttactgca

SEQ ID NO: 6649 - DNA, 1163 bp, Homo sapiens
agcgggggagagccaaagcgggcaggcggcggaaatatccgaagcggcggggcgcccgaggccgttgccgacctccgcgctaaagccgctgctgccgcggaagacgatcctccagtacccgcccgccgtcaccgcagctgccgtgtcctcctcccacccctagccgcaccccctcgcggagggatcagctgagcggccaaacggcacggtcgggggagccccgagtccgcagctgcagcggggcctgagaccagagttggccagaagaaggaggaggagtcggcgggcggcaccaagggcagcagcaagaaggcgtcggcggcgcagctgcggatccagaaggacataaacgagctgaacctgcccaagacgtgtgatatcagcttctcagatccagacgacctcctcaacttcaagctggtcatctgtcctgatgagggcttctacaagagtgggaagtttgtgttcagttttaaggtgggccagggttacccgcatgatccccccaaggtgaagtgtgagacaatggtctatcaccccaacattgacctcgagggcaacgtctgcctcaacatcctcagagaggactggaagccagtccttacgataaactccataatttatggcctgcagtatctcttcttggagcccaaccccgaggacccactgaacaaggaggccgcagaggtcctgcagaacaaccggcggctgtttgagcagaacgtgcagcgctccatgcggggtggctacatcggctccacctactttgagcgctgcctgaaatagggttggcgcatacccacccccgccacggccacaagccctggcatcccctgcaaatatttattgggggccatgggtaggggtttggggggcggccggtgggggaatcccctgccttggccttgcctccccttcctgccacgtgcccctagttatttttttttttttaacaccatgtgattaaggtcggcgctgcctcccccgacccactcagcgatgggaaatgaattggcttgtctagcccccctgctgggtgcttgttcagcccccactctgggctgtggagtgggtgggcaacgggcctgggtagctgggcccaggcaacccacccctccacctctggaggtcccaccaggctattaaaggggaatgttactgca

SEQ ID NO: 6650 - DNA, 1029 bp, Homo sapiens
agcgggggagagccaaagcgggcaggcggcggaaatatccgaagcggcggggcgcccgaggccgttgccgacctccgcgctaaagccgctgctgccgcggaagacgatcctccagtacccgcccgccgtcaccgcagctgccgtgtcctcctcccacccctagccgcaccccctcgcggagggatcagctgagcggccaaacggcacggtcgggggagccccgagtccgcagctgcagcggggcctgagaccagagttggcgagggcaaggaaggagcggccccgggcagtgggggcggggccgggcgggcccgagaacagccgaatttggccgagcgctgccgagcgagtccgaggcgctgggccaggccggagccggactacgggagccgaggcgggccgcgcggtgggcgcggagaggagcggagcggcgcggcaggccgggcgggtggcggcagcagcggaggaggccgcagctgcgggtccgaggagcggaggcgacgcgggcggcggcggggggccgggtggccggggtcccgggccccgcggcggcggcagcggcggcggcggcggcaggatgatcaagctgttctcgctgaagcagcagaagaaggaggaggagtcggcgggcggcaccaagggcagcagcaagaaggcgtcggcggcgcagctgcggatccagaaggacataaacgagctgaacctgcccaagacgtgtgatatcagcttctcagatccagacgacctcctcaacttcaagctggtcatctgtcctgatgagggcttctacaagagtgggaagtttgtgttcagttttaaggtgggccagggttacccgcatgatccccccaaggtgaagtgtgagacaatggtctatcaccccaacattgacctcgagggcaacgtctgcctcaacatcctcaggtgaggacactggccctctaatgccctcctcagcgctgcctgccaggcctccctcatggtcttgtgggcactacatcagactctgtcccttcccacccctttgtt

SEQ ID NO: 6651 - DNA, 823 bp, Homo sapiens
gtgagtcccaggcgggcagggatggctccctggacagaggaggcagcagctgaggcccttccaggcacctacccatctctcttttcttttcctggagccaggtgggccagggttacccgcatgatccccccaaggtgaagtgtgagacaatggtctatcaccccaacattgacctcgagggcaacgtctgcctcaacatcctcaggtgaggacactggccctctaatgccctcctcagcgctgcctgccaggcctccctcatggtcttgtgggcactacatcagactctgtcccttcccacccctttgttgtctgtggtttcttgatttcccagtcatcttcctcatggcctgaccttggttttctccttggcctgtcctgctccacaccctccctcccagcctctcacatgctcactctcctatgccctggatctgacctgcccaacaccagaggggcctgtggcagtctcccactcaccaagccctgaccctgatgctctctgtccacagagaggactggaagccagtccttacgataaactccataatttatggcctgcagtatctcttcttggtgagtaggaataggtggttgggtctggggagattggccttctgtccctctggcctgttgaccccccctacctgtactggccacaggagcccaaccccgaggacccactgaacaaggaggccgcagaggtcctgcagaacaaccggcggctgtttgagcagaacgtgcagcgctccatgcggggtggctacatcggctccacctactttgagcgctgcctgaaatagggttggcgcatacccacccc

SEQ ID NO: 6652 - DNA, 2106 bp, Homo sapiens
agcgggggagagccaaagcgggcaggcggcggaaatatccgaagcggcggggcgcccgaggccgttgccgacctccgcgctaaagccgctgctgccgcggaagacgatcctccagtacccgcccgccgtcaccgcagctgccgtgtcctcctcccacccctagccgcaccccctcgcggagggatcagctgagcggccaaacggcacggtcgggggagccccgagtccgcagctgcagcggggcctgagaccagagttggcgcggcaggatgatcaagctgttctcgctgaagcagcagaagaaggaggaggagtcggcgggcggcaccaagggcagcagcaagaaggcgtcggcggcgcagctgcggatccagaaggacataaacgagctgaacctgcccaagacgtgtgatatcagcttctcagatccagacgacctcctcaacttcaagctggtcatctgtcctgatgagggcttctacaagagtgggaagtttgtgttcagttttaaggtgggccagggttacccgcatgatccccccaaggtgaagtgtgagacaatggtctatcaccccaacattgacctcgagggcaacgtctgcctcaacatcctcagagaggactggaagccagtccttacgataaactccataatttatggcctgcagtatctcttcttggagcccaaccccgaggacccactgaacaaggaggccgcagaggtcctgcagaacaaccggcggctgtttgagcagaacgtgcagcgctccatgcggggtggctacatcggctccacctactttgagcgctgcctgaaatagggttggcgcatacccacccccgccacggccacaagccctggcatcccctgcaaatatttattgggggccatgggtaggggtttggggggcggccggtgggggaatcccctgccttggccttgcctccccttcctgccacgtgcccctagttatttttttttttttaacaccatgtgattaaggtcggcgctgcctcccccgacccactcagcgatgggaaatgaattggcttgtctagcccccctgctgggtgcttgttcagcccccactctgggctgtggagtgggtgggcaacgggcctgggtagctgggcccaggcaacccacccctccacctctggaggtcccaccaggctattaaaggggaatgttactgcaaaaaaaaaaaaaaaaaaaaaaaaaaaaaaaaaaaaaaaaaaaaaaaaaaaaccctggcagcagcaggtgtggccaatggaggggggtgctggcccccaggattcccccagccaaactgtctttgtcaccacgtggggctcacttttcatccttccccaacttccctagtccccgtactaggttggacagcccccttcggctacaggaaggcaggaggggtgagtcccctactccctcttcactgtggccacagcccccttgccctccgcctgggatctgagtacatattgtggtgatggagatgcagtcacttattgtccaggtgaggcccaagagccctgtggccgccacctgaggtgggctggggctgctcccctaaccctactttgcttccgccactcagccatttccccctcctcagatggggcaccaataacaaggagctcaccctgcccgctcccaacccccctcctgctcctccctgccccccaaggttctggttccatttttcctctgttcacaaactacctctggacagttgtgttgttttttgttcaatgttccattcttcgacatccgtcattgctgctgctaccagcgccaaatgttcatcctcattgcctcctgttctgcccacgatcccctcccccaagatactctttgtggggaagaggggctggggcatggcaggctgggtgaccgactaccccagtcccagggaaggtggggccctgcccctaggatgctgcagcagagtgagcaagggggcccgaatcgaccataaagggtgtaggggccacctcccccccctctgttggggaggggtagccatgatttgtcccagcctggggctccctctctggtttcctatttgcagttacttgaataaaaaaaatatccttttctgg

SEQ ID NO: 6653 - DNA, 1686 bp, Homo sapiens
agcgggggagagccaaagcgggcaggcggcggaaatatccgaagcggcggggcgcccgaggccgttgccgacctccgcgctaaagccgctgctgccgcggaagacgatcctccagtacccgcccgccgtcaccgcagctgccgtgtcctcctcccacccctagccgcaccccctcgcggagggatcagctgagcggccaaacggcacggtcgggggagccccgagtccgcagctgcagcggggcctgagaccagagttggcgagggcaaggaaggagcggccccgggcagtgggggcggggccgggcgggcccgagaacagccgaatttggccgagcgctgccgagcgagtccgaggcgctgggccaggccggagccggactacgggagccgaggcgggccgcgcggtgggcgcggagaggagcggagcggcgcggcaggccgggcgggtggcggcagcagcggaggaggccgcagctgcgggtccgaggagcggaggcgacgcgggcggcggcggggggccgggtggccggggtcccgggccccgcggcggcggcagcggcggcggcggcggcaggatgatcaagctgttctcgctgaagcagcagaagaaggaggaggagtcggcgggcggcaccaagggcagcagcaagaaggcgtcggcggcgcagctgcggatccagaaggacataaacgagctgaacctgcccaagacgtgtgatatcagcttctcagatccagacgacctcctcaacttcaagctggtcatctgtcctgatgagggcttctacaagagtgggaagtttgtgttcagttttaaggtgggccagggttacccgcatgatccccccaaggtgaagtgtgagacaatggtctatcaccccaacattgacctcgagggcaacgtctgcctcaacatcctcagagaggactggaagccagtccttacgataaactccataatttatggcctgcagtatctcttcttggagcccaaccccgaggacccactgaacaaggaggccgcagaggtcctgcagaacaaccggcggctgtttgagcagaacgtgcagcgctccatgcggggtggctacatcggctccacctactttgagcgctgcctgaaatagggttggcgcatacccacccccgccacggccacaagccctggcatcccctgcaaatatttattgggggccatgggtaggggtttggggggcggccggtgggggaatcccctgccttggccttgcctccccttcctgccacgtgcccctagttatttttttttttttaacaccatgtgattaaggtcggcgctgcctcccccgacccactcagcgatgggaaatgaattggcttgtctagcccccctgctgggtgcttgttcagcccccactctgggctgtggagtgggtgggcaacgggcctgggtagctgggcccaggcaacccacccctccacctctggaggtcccaccaggctattaaaggggaatgttactgcatggcctctgcttcttacttctatggggtgggaggggcagctgaggtccattagggcctgcaaagctggggtggtggaaggtgtggtcacaggtggcattggagcaccctacaacaggctgcccagtgcctggggcagctctaaagttggtggggataccatgactgtgcctggggttggt

SEQ ID NO: 6654 - DNA, 1266 bp, Homo sapiens
taagaggatcccctgttagaggttgtggcgctgtagagttggtggcaggattgtaggtggatccatagttagctgccaaaactaaacaaagaataaaataaccattagaatgtcagaataatactttggtggcccatagaagttctggattatttagtaactcaataaacaattgtagtttatgtttagttattctaatatatttaagtttctttatttccctaagtagacaatattatgatttcttcagaaactatcaaaaaacacttttgatcatacttcaagccaaatcaactgacctgccacaacccttgtagaggtggtggcgggcggcaggatgatcaagctgttctcgctgaagcagcagaagaaggaggaggagtcggcgggcggcaccaagggcagcagcaagaaggcgtcggcggcgcagctgcggatccagaaggacataaacgagctgaacctgcccaagacgtgtgatatcagcttctcagatccagacgacctcctcaacttcaagctggtcatctgtcctgatgagggcttctacaagagtgggaagtttgtgttcagttttaaggtgggccagggttacccgcatgatccccccaaggtgaagtgtgagacaatggtctatcaccccaacattgacctcgagggcaacgtctgcctcaacatcctcagagaggactggaagccagtccttacgataaactccataatttatggcctgcagtatctcttcttggagcccaaccccgaggacccactgaacaaggaggccgcagaggtcctgcagaacaaccggcggctgtttgagcagaacgtgcagcgctccatgcggggtggctacatcggctccacctactttgagcgctgcctgaaatagggttggcgcatacccacccccgccacggccacaagccctggcatcccctgcaaatatttattgggggccatgggtaggggtttggggggcggccggtgggggaatcccctgccttggccttgcctccccttcctgccacgtgcccctagttatttttttttttttaacaccatgtgattaaggtcggcgctgcctcccccgacccactcagcgatgggaaatgaattggcttgtctagcccccctgctgggtgcttgttcagcccccactctgggctgtggagtgggtgggcaacgggcctgggtagctgggcccaggcaacccacccctccacctctggaggtcccaccaggctattaaaggggaatgttactgca

SEQ ID NO: 6655 - DNA, 1207 bp, Homo sapiens
ggggtgcctgcgctggtgggcgcgtgagaggatgctggatgctgtgctgcggtagtgccgggcgggtggttgtgcagcatgctggaggatggcctgcagctgctgggtcctgagtgatgctggagtgctgacgtgctggtgctgtgctgtgctgtgtggtgtgcctgtggtgtgcctgtgggatccctgtggcccctgatggcgggctgtggcatgctggctggctggatggctgtgcagtgatgatcacacgcttgttctctgctttgaatgcatgcagacatgaacgggcaggacggcagtctggctgtgtgctggtgcacccaatgtgtgcgatgcatgcaatgaatggctgtcggcgggcgcagcttgcttgatccatgaaggacataaacgagctgaacctgcccaagacgtgtgatatcagcttctcagatccagacgacctcctcaacttcaagctggtcatctgtcctgatgagggcttctacaagagtgggaagtttgtgttcagttttaaggtgggccagggttacccgcatgatccccccaaggtgaagtgtgagacaatggtctatcaccccaacattgacctcgagggcaacgtctgcctcaacatcctcagagaggactggaagccagtccttacgataaactccataatttatggcctgcagtatctcttcttggagcccaaccccgaggacccactgaacaaggaggccgcagaggtcctgcagaacaaccggcggctgtttgagcagaacgtgcagcgctccatgcggggtggctacatcggctccacctactttgagcgctgcctgaaatagggttggcgcatacccacccccgccacggccacaagccctggcatcccctgcaaatatttattgggggccatgggtaggggtttggggggcggccggtgggggaatcccctgccttggccttgcctccccttcctgccacgtgcccctagttatttttttttttttaacaccatgtgattaaggtcggcgctgcctcccccgacccactcagcgatgggaaatgaattggcttgtctagcccccctgctgggtgcttgttcagcccccactctgggctgtggagtgggtgggcaacgggcctgggtagctgggcccaggcaacccacccctccacctctggaggtcccaccaggctattaaaggggaatgttactgca

SEQ ID NO: 6656 - DNA, 1161 bp, Homo sapiens
agcgggggagagccaaagcgggcaggcggcggaaatatccgaagcggcggggcgcccgaggccgttgccgacctccgcgctaaagccgctgctgccgcggaagacgatcctccagtacccgcccgccgtcaccgcagctgccgtgtcctcctcccacccctagccgcaccccctcgcggagggatcagctgagcggccaaacggcacggtcgggggagccccgagtccgcagctgcagcggggcctgagaccagagttggcgagggcaaggaaggagcggccccgggcagtgggggcggggccgggcgggcccgagaacagccgaatttggccgagcgctgccgagcgagtccgaggcgctgggccaggccggagccggactacgggagccgaggcgggccgcgcggtgggcgcggagaggagcggagcggcgcggcaggccgggcgggtggcggcagcagcggaggaggccgcagctgcgggtccgaggagcggaggcgacgcgggcggcggcggggggccgggtggccggggtcccgggccccgcggcggcggcagcggcggcggcggcggcaggatgatcaagctgttctcgctgaagcagcagaagaaggaggaggagtcggcgggcggcaccaagggcagcagcaagaaggcgtcggcggcgcagctgcggatccagaaggacataaacgagctgaacctgcccaagacgtgtgatatcagcttctcagatccagacgacctcctcaacttcaagctggtcatctgtcctgatgaggtgagggtgcatatggctgaattcccaggagcaaaccaagggtgtccccactgagaggagggagacatgttctgcccatcgggccccacaggatggaaccctaaaattttcttctcccccttttcctcccagggcttctacaagagtgggaagtttgtgttcagttttaaggtgggccagggttacccgcatgatccccccaaggtgaagtgtgagacaatggtctatcaccccaacattgacctcgagggcaacgtctgcctcaacatcctcaggtgaggacactggccctctaatgccctcctcagcgctgcctgccaggcctccctcatggtcttgtgggcactacatcagactctgtcccttcccacccctttgtt

SEQ ID NO: 6657 - DNA, 2058 bp, Homo sapiens
gagatttttacaaaaagaaatactataggccataaggttgggggaagaccccaattaatggaaatggcctaagggaccaatgcctaattaaatccgttaaccagtgattttgtccaccataattacatgacttatagcctaaaagagcaatatttaatccagtaagatttagagatgggtgtacttggaatccctttgaaagcagcgtgtttagttttcaagcaaatgctaatgttccttaatccctaatagtatattagacttcgttgtgttgaatatatcaaatgaacgaactatgaaccagagctttaaaatagtgatttgtaagactttgttacaatggtacttaaaaaattgctttgtataatttacacactgtaaaattcacccattgtacatgtacaattaattgtttttagtaaacttaagagttgtgcagtccaattttagaacatgtccatcagcccccaaaatttactcctgctgctctgcggttaatttgctcctgcctccagccccacgcagccacactgatctgctttctgtacagatttaccctttctagaaatttcacagaggtagaatcatgcagttagtcttttatatctgggcatctttcacttaggcatgtttttgaggttcatccatgttgcagcttatacctgcgtgtagttcctttagttgctgacttagtgttcactgtttgggatataccacattttgtttatcccattcaccagttgataggacattgggctgggcctacaattaggtttttttaaattgcggataataatgctatgaacattcataaatgtctttgtgtggacatgttttcatctcagattcctagttgtggaattgtcaggttgtgtggtaaatttatacctaacgtttttaaaaaaactgctgaactttttccaaagtggctgtacttctagaactattcctgccacagtgcatgcggactgccgtgtctgcacatccttgccaatacttgtcttttttattgcagccatcctggcgggtatttactttatgtgtgtgagttatacctaggcatcccaactcgtgtatcgattggatgtgcagtttgagtgagtttcaagtggcctcagcgattgctgtaaaattagttactctagtagacatgtactctcttggaggtagtattttctgtagtcagtgagggtaataataatacttccagtgggggttccagtccctcagtgatctctggtgagaagaaatgtgtcagcgaagagtggtgctgatggctggtgctttggctctgttattgtttgtaccaaggttgatacagctactcgactagcctatgactgactggtggtggtaattaaactttgtacagattactgtgtgcagatagttactgtcttaatattaagtttcccagagattttacttttgagatagctgagaattaacgactcttggaatttataaaaatttagttgataccatttagttgctgccagctgcctgtgttcttatacataggagacatcggagtgagtgctttttaaaaaattaatggcgtatgtcaggtatatgtaaaaggacaattgcataatgaactcatgttaacatgatcaatccatggccaatcttgatttatctaaatgccattcatctttgaacccctatttattttgaagcaaatcccagatagcaaatcatttcatttgtaaatatttcaatatgtatgtctaaaagataaggactgttaaataaaaccacaattctgttgttagacttaactgttaacagtttgttagtgttaataactacccagcagtgttcaagttgtgcctttttttttttttttccaattcaagtcaggattcaaataagattcctacattgcatacatctcaaatgtcctacccagtggatccccacactctccactctttggcttcaaattcatttttttgaaaaaacaatgattgctttagcactttaaatttctatgcaatttcaaatgtaaggtgaaattttgatgtacttaataaaaaaattctaacgaaaaaaaaa

SEQ ID NO: 6658 - DNA, 860 bp, Homo sapiens
tagacccattgtgtgtttcttctcactagcagcaatcaacaagccctttctgccgttaataagaaggagaatagctgaaggagagagatattttattaatttcctgtttccttcagaatcttggcaattgaagtttagaaggtttggtctacaacacagtgatcgaaaatgcatgtaaatgcccatccttcccttcattcacgtgtgaagttgttcattttatattgtgcccagcaaagaaactttcacccagttcaggtttccccaaaactcctgtggtggttttaaaggtggtttaaataaataaggatgtgctggtccccctactctgtgtgtgctgaataaatggcttgtaaagaagtttttccaagctgtaacccatgctgttattatagttgctgcaaaatgttcttcctgatattgattttatttgttaactgaaggtctccatatgtttgtttatattgctaatttatgagaaaatgtaataattgcaatgaatgtgaattatacagacaggcaaacattttgtaatcataattcacatatacacaaaagcctggctgaaatctttagactatttgtaccctctctacccacactgtttgtgatttatcatctgtctctttagtgtcagttaaattatgaactaacttgaaaataaaagttgtttgactgaaagtgattgttgaatgaacaacaaagttgaaagccatggcttgatcttgtaaatatataaatgtaaatgatattaaatctgtgattccttttccctccaaaggcttttgtgtacatggcgctgcatttggctattttctttggaaataaataatgtgatgtttctcttcctcttttgaatc

SEQ ID NO: 6659 - DNA, 691 bp, Homo sapiens
gaaaaacttccccgagtttcccaatttacattacaaatggagcggtggtgtaatgaagccgatataaagtgggcagttgaaaggagactaaagaagggcactcaagtgagaaatgaagaaatgtgccgagtgcagtctgtgggctgcccttggtccagctgcaggaactggctctggccagaggtagagtgagtgagcacctccctctgcaaagaccacccacttttggagcctaggctggcacaccaaagattacctcattgattaatacagggcttgaaaatttctgaggtggcaaaatcacttctaaatctcttttttgagtccttcctagagcatgactgaggccacacttcctgtgccttatgacctgaagttgtaaaggataacctatggatggaccagttcttttggttctgaggactagtgtatttcaaatgttggaatgtattcctaggtgaggaggctattaactagattaaattggttttagttatatgcttcttactttgtgtcatattttagactccaaaaactgtcttcctaccaaaaaaacccaagtattccatctgtgagtggaaagagaccaactagatgtgtctttaaccagcgaagtggtttgctcaggttgcagtgcgtggaggtgctaaagaatagcatgggccgggcgcagtggctcctgtaatccttg

SEQ ID NO: 6660 - DNA, 329 bp, Homo sapiens
  misc_feature (109)..(109): n is a, c, g, or t
gaccccagcactccgacctttggctgcgtgaacctcagcccgtcccacccaccccctgctgtctgccagcttgccacaaacttcccatctgtggatctccaggcccatnaataccagcctgtctgcgagttagacgccagtcctgctaacccaagacacacctccccaacctcagtcttcccatctgaacgatgggtcctgaggcacagctctgagcacagaggtcccttctgccacctaccatgcaccatgttccttgccaggcctccccaacccctggcctcaatttccctttctataaaatggaagatgtccagagaaaaaaaaaa

SEQ ID NO: 6661 - DNA, 1267 bp, Homo sapiens
  misc_feature (84)..(84): n is a, c, g, or t
cggagtgacagccccacgggccacgcagcaagcagaagatccccgggagtcaccctcaaccctctggggccacgtgggcccatnaataccagcctgtctgcgagttagacgccagtcctggtggcccgggaagcccagatccgcatcagcggagcccctgcgtcgcgtggctgtgactgggggcacgcatggcaacgagatgtcgggcgtctacctggcccggcactggctgcatgcccccgcagagctgcagagagccagcttctccgctgtgcctgtgctggccaacccggcagccacatccggctgccgccgctacgtggaccatgacctcaaccgcaccttcaccagcagcttcctcaattccaggcccaccccggacgacccatatgaggtgacaagagcccgagagctgaaccagctgctggggcccaaggcctcgggccaggcctttgactttgtccttgacctgcacaacaccacggccaacatgggcacctgcttaatcgcgaagtcctcccacgaagtctttgccatgcacctgtgccgccatctgcagctgcagtaccccgagctgtcctgccaggtcttcctgtaccagcggtctggggaggagagctacaacctggactctgtggccaaaaatggactgggtctggagctgggcccccagccacagggtgtgctgcgggctgacattttctcaaggatgaggaccctggtggccacagttctggacttcatcgaactcttcaaccagggtacggcctttcctgcctttgagatggaagcctatagacccgtgggcgtcgtggacttcccccgcaccgaggccgggcacctggcaggcactgtgcatcctcagctgcaggaccgagacttccagccactgcagcctggtgctcccatcttccagatgttcagtggggaggacctgctctatgagggagagtccacggtgtaccccgtgttcattaacgaggctgcctactatgagaagggcgttgcctttgtccagactgagaagttcacattcaccgtgcctgccatgcccgcgctgacccctgccccgagcccagcttcctaacccaagacacacctccccaacctcagtcttcccatctgaacgatgggtcctgaggcacagctctgagcacagaggtcccttctgccacctaccatgcaccatgttccttgccaggcctccccaacccctggcctcaatttccctttctataaaatggaagatgtccagagaaaaaaaaaa

SEQ ID NO: 6662 - DNA, 1311 bp, Homo sapiens
  misc_feature (84)..(84): n is a, c, g, or t
cggagtgacagccccacgggccacgcagcaagcagaagatccccgggagtcaccctcaaccctctggggccacgtgggcccatnaataccagcctgtctgcgagttagacgccagtcctggtggcccgggaagcccagatccgcatcagcggttctgcaccccacaccagcatgtgctcactgcctgtgccccgggagcccctgcgtcgcgtggctgtgactgggggcacgcatggcaacgagatgtcgggcgtctacctggcccggcactggctgcatgcccccgcagagctgcagagagccagcttctccgctgtgcctgtgctggccaacccggcagccacatccggctgccgccgctacgtggaccatgacctcaaccgcaccttcaccagcagcttcctcaattccaggcccaccccggacgacccatatgaggtgacaagagcccgagagctgaaccagctgctggggcccaaggcctcgggccaggcctttgactttgtccttgacctgcacaacaccacggccaacatgggcacctgcttaatcgcgaagtcctcccacgaagtctttgccatgcacctgtgccgccatctgcagctgcagtaccccgagctgtcctgccaggtcttcctgtaccagcggtctggggaggagagctacaacctggactctgtggccaaaaatggactgggtctggagctgggcccccagccacagggtgtgctgcgggctgacattttctcaaggatgaggaccctggtggccacagttctggacttcatcgaactcttcaaccagggtacggcctttcctgcctttgagatggaagcctatagacccgtgggcgtcgtggacttcccccgcaccgaggccgggcacctggcaggcactgtgcatcctcagctgcaggaccgagacttccagccactgcagcctggtgctcccatcttccagatgttcagtggggaggacctgctctatgagggagagtccacggtgtaccccgtgttcattaacgaggctgcctactatgagaagggcgttgcctttgtccagactgagaagttcacattcaccgtgcctgccatgcccgcgctgacccctgccccgagcccagcttcctaacccaagacacacctccccaacctcagtcttcccatctgaacgatgggtcctgaggcacagctctgagcacagaggtcccttctgccacctaccatgcaccatgttccttgccaggcctccccaacccctggcctcaatttccctttctataaaatggaagatgtccagagaaaaaaaaaa

SEQ ID NO: 6663 - DNA, 820 bp, Homo sapiens
  misc_feature (84)..(84): n is a, c, g, or t
cggagtgacagccccacgggccacgcagcaagcagaagatccccgggagtcaccctcaaccctctggggccacgtgggcccatnaataccagcctgtctgcgagttagacgccagtcctggtggcccgggaagcccagatccgcatcagcggttctgcaccccacaccagcatgtgctcactgcctgtgccccgggagcccctgcgtcgcgtggctgtgactgggggcacgcatggcaacgagatgtcgggcgtctacctggcccggcactggctgcatgcccccgcagagctgcagagagccagcttctccgctgtgcctgtgctggccaacccggcagccacatccggctgccgccgctacgtggaacttcccccgcaccgaggccgggcacctggcaggcactgtgcatcctcagctgcaggaccgagacttccagccactgcagcctggtgctcccatcttccagatgttcagtggggaggacctgctctatgagggagagtccacggtgtaccccgtgttcattaacgaggctgcctactatgagaagggcgttgcctttgtccagactgagaagttcacattcaccgtgcctgccatgcccgcgctgacccctgccccgagcccagcttcctaacccaagacacacctccccaacctcagtcttcccatctgaacgatgggtcctgaggcacagctctgagcacagaggtcccttctgccacctaccatgcaccatgttccttgccaggcctccccaacccctggcctcaatttccctttctataaaatggaagatgtccagagaaaaaaaaaa

SEQ ID NO: 6664 - DNA, 425 bp, Homo sapiens
gctcttcctgcatggaaagcttggtttcactcttcagaggtggtggcaacatccccagaaaaccggtaggcgtgggcacagtggctggaggccgagggctcctcgccatagcagaagcacggccgtggcttccagcctgtaaccccatctgaagttgtctggggatttttttgccgcacattgtttttgcattttgtgggttgtcttgtttcgtcgggtcttttgcttgtttctgcctcactttcacatttggcagccagctcctaccctcagccaacagcctgctcagctccaggtcgacatgaggcgctggtgtgggaccaggcacaggcctgactctgacagacccaaaaaaaaaacaccacaccaggcagcctggccagagagggctccgagcaaaccagcatctccaggcctagcaggtt

SEQ ID NO: 6665 - DNA, 865 bp, Homo sapiens
gaagtgactgaagctcagagaggtcagatactgtgtccaatgacaagcatcagtaagtgtgaaaatgaaggttcaaggccaagtcttctgggccccaggtcctttcccttctcatagctcttgttctttcccatggattagctcagcaagtagcttcaggggcttgttttcaggatctatgagagaggaaggcatgaaaacacaaaggtggaaccaaggaagaccagagggagagaagaggctacctagatgtctcacaatagtgtgcattttgattaaatgacatacttgggggaaatgttcctgagtaggtgaaagctgatattttgttctattgggaaaaaaagtgagcttgaagaaaacataatttgcttctttttttctctcatatcagagggaagagagaagacatttatagtttctaaaataccctcagtagtataattctgtcatacttaatatgtaaatgactagatcaaggaggaagaggggcgtgactgcttttagtacaaggcagaggtcacactagtctctcctggaaaactgacctgggctccagttgtactcatggtggaaaatctcagggggccactacagtcagcagtgttaacacttttagcctcttttaattttttaaaaacaaaacacccaggaatcaattaaccaaagatgtgcaatatatgtgcaaggaaaactatcaaacactgatgaaagaacttgaagaggacataaaaaaatgaaagggtattccatgcttatggtttggaagaatcagtattgttaaaatggcaatactacccaaagcaatttacagattcaatgcaatcctctcaaaatatcaatgacattcttcacagaaatagaa

SEQ ID NO: 6666 - DNA, 1225 bp, Homo sapiens
tcttattttcttcagtgtgtatatttctttactatcattcatattgatgcccaaattgtcctaaatcaggccaatgggagctccttcaagctgatcctgtgtccttttgatatgacttaatcatccattgagtgatttctttgctgttgagcacaatcagatattccaggctcatttcaacgctggagccaggcacttctatttcttttagtggagaatagcatttggaaatcaagatctgcgtgctgggtatgttcattgctactggggtgtcattgcttctaggccttttcaactgacagggtcagtaatggagtaaaactcattgtaatcgtgtaacttatgtgggttaagaaattgaactttgctagtaccccagaagctcctttatgtcccctcctgattttaacgcttaatcaccttcatcctcagttttatggtaatcacttgtctttgcagttttagtctgtaaccatgcatccctaaataaatgtttagattgcctattttaaaaatttaatataattggttcaatgtgtgcatttcatgtatgacttcttttatgtctgtgatgttcatcagagttgtttcatttgtagttattttaatttctgtgtagtattatgtttcatgaatatattacaactttaggattcattctaatggtgatagacatttgtgttgttcatagtttttggctattaaaattgcttttataaatattctatttttatgaacctgtaagatgcaatttcaggaatattctaatcgtgtgaatattatattgctttttggtgtatattatgggctgaattgtgtcatcttcttcaaacaaggtatacagaaatcttaacccccagtaccttagaatgtgacctcatttgaaaacagggtaattgcagatgttatgggttaagatgaggccatactggagtagagtgggcctcttatctgatatgactggtgtctttataaaaggaaagctgtgtgaagagacaaagggagaatgccatgtgaagatggaggatcggagtgatgcgtctacaagccaaggaatgccaaagatttccggccagtcaccagaagctaagaggcaaagaaggattcccctacaggtttcagagaaagcatagcccatatccctgctgacactttgattttggattttcagcctccagaattttgagacaataaatttattgtttaagtcccccaaaaaaaaaaa

SEQ ID NO: 6667 - DNA, 722 bp, Homo sapiens
tcttattttcttcagtgtgtatatttctttactatcattcatattgatgcccaaattgtcctaaatcaggccaatgggagctccttcaagctgatcctgtgtccttttgatatgacttaatcatccattgagtgatttctttgctgttgagcacaatcagatattccaggctcatttcaacgctggagccaggcacttctatttcttttagtggagaatagcatttggaaatcaagatctgcgtgctgggtatgttcattgctactggggtgtcattgcttctaggccttttcaactgacagggtcagtaatggagtaaaactcattgtaatcgtgtaacttatgtgggttaagaaattgaactttgctagtaccccagaagctcctttatgtcccctcctgattttaacgcttaatcaccttcatcctcagttttatggtaatcacttgtctttgcagttttagtctgtaaccatgcatccctaaataaatgtttagattgcctattttaaaaatttaatataattggttcaatgtgtgcatttcatgtatgacttcttttatgtctgtgatgttcatcagagttgtttcatttgtagttattttaatttctgtgtagtattatgtttcatgaatatattacaactttaggattcattctaatggtgatagacatttgtgttgttcatagtttttggctattaaaattgcttttataaata

SEQ ID NO: 6668 - DNA, 441 bp, Homo sapiens
ttcctttatgtcatagtgtgtatcaatatttcattccttctatggcagtattccatggtagagacacactgcattttgtttatctgttcatcagttggtggatatttgggttgtttccatgtattccatgtattggtcattatgaataatgctgctatgaagattgttgtacaagtttttgtgtggacatttatttttctgggatatatgcctaggagtgaaattgttgcattataggatgactgtacatttagccttttgagaaactgccagactgttttctaaagtggctacaccagttgagtgcaatggctcacacctgtaatcccagctactcaggaggctcagctaggaggatggcttgagcccatgaattcaagaccagcctgggcaagatagtgaaaccctgtcttgatttttaaaaaatccaattaaaatgac

SEQ ID NO: 6669 - DNA, 780 bp, Homo sapiens
atgcccgtaaatactcaaattggaaagaaacctgtaattgcccagtggatatttcaaatacacttaactttgctatttcaagccacagacaccaaatggacacaaaggtcattcaaactgttagcgccatggacaaagatgatcccaaaaacggacattatttcttatacagtctccttccagaaatggtcaacaatccgaatttcaccatcaagaaaaatgaagggatgccgtaacaaataatcccaaactggaaagtgtaaaacaacagatgcttattctcttagagtttctggaggctggaaatctgaaatcaaggtgtgggcagggccatgctctcctcaaaaattctagaggagaatccattctctgcttaagtttcatagatcacttgatgactcctgggttttttaaagtgaatagcacagcccactctctgtccattttcactccaaaatgacaatcatgcagatatttacagaactctactgctagatggttacagtgcagaaagagcctgccaagtgatcttctgtattaaaatgttctaattcattttgtgtataattgtaaattgttgggtaaacattcagtttggtgttagtctaagaacttccacaggaatccaccatgaagttgattttttttttccaaagccaaagtggaccttgctccaatattttatggctagatataccacattctaaatatttaatatttggtaatgagtcaacactccaaaaaatggaaattattgacatcaggtggcatgacagaaaa

SEQ ID NO: 6670 - DNA, 337 bp, Homo sapiens
atgcccgtaaatactcaaattggaaagaaacctgtaattgcccagtggatatttcaaatacacttaactttgctatttcaagccacagacaccaaatggacacaaaggtcattcaaactgttagcgccatggacaaagatgatcccaaaaacggacattatttcttatacagtctccttccagaaatggtcaacaatccgaatttcaccatcaagaaaaatgaagatcagaaatccatgagttttgcttcatagaccactacttacttggcacctgaataggaaatttgaggtctccagaaaactactcttcctcagcctgaacactgtaggtaaaa

SEQ ID NO: 6671 - DNA, 3823 bp, Homo sapiens
agccatttgtgaacctggaggcttgacattcgccagcgcagggccccacaagagaaatttcaatgaaaagaaaagccaatggattgtggtcttagaaaagctgcttagatgatgtctgtttcccgtgctatagacacgtggcagagctgtaagtaaatgctcggcactgcatgatgaattggatggctgcagaccggagacaaaaaaaataattgtctcattttcgtggtgatttgcttaactggtgggaccatgccagaacggctagcggaaatgctcttggatctctggactccattaataatattatggattactcttcccccttgcatttacatggctccgatgaatcagtctcaagttttaatgagtggatcccctttggaactaaacagtctgggtgaagaacagcgaattttgaaccgctccaaaagaggctgggtttggaatcaaatgtttgtcctggaagagttttctggacctgaaccgattcttgttggccggctacacacagacctggatcctgggagcaaaaaaatcaagtatatcctatcaggtgatggagctgggaccatatttcaaataaatgatgtaactggagatatccatgctataaaaagacttgaccgggaggaaaaggctgagtataccctaacagctcaagcagtggactgggagacaagcaaacctctggagcctccttctgaatttattattaaagttcaagacatcaatgacaatgcaccagagtttcttaatggaccctatcatgctactgtgccagaaatgtccattttgggtacatctgtcactaacgtcactgcgaccgacgctgatgacccagtttatggaaacagtgcaaagttggtttatagtatattggaagggcagccttatttttccattgagcctgaaacagctattataaaaactgcccttcccaacatggacagagaagccaaggaggagtacctggttgttatccaagccaaagatatgggtggacactctggtggcctgtctgggaccacgacacttacagtgactcttactgatgttaatgacaatcctccaaaatttgcacagagcctgtatcacttctcagtaccggaagatgtggttcttggcactgcaataggaagggtgaaggccaatgatcaggatattggtgaaaatgcacagtcatcatatgatatcatcgatggagatggaacagcactttttgaaatcacttctgatgcccaggcccaggatggcattataaggctaagaaaacctctggactttgagaccaaaaaatcctatacgctaaaggtagaggcagccaatgtccatattgacccacgcttcagtggcagggggccctttaaagacacggcgacagtcaaaatcgtggttgaagatgctgatgagcctccggtcttctcttcaccgacttacctacttgaagttcatgaaaatgctgctctaaactccgtgattgggcaagtgactgctcgtgaccctgatatcacttccagtcctataaggttttccatcgaccggcacactgacctggagaggcagttcaacattaatgcagacgatgggaagataacgctggcaacaccacttgacagagaattaagtgtatggcacaacataacaatcattgctactgaaattaggaaccacagtcagatatcacgagtacctgttgctattaaagtgctggatgtcaatgacaacgcccctgaattcgcatccgaatatgaggcatttttatgtgaaaatggaaaacccggccaagtcattcaaactgttagcgccatggacaaagatgatcccaaaaacggacattatttcttatacagtctccttccagaaatggtcaacaatccgaatttcaccatcaagaaaaatgaagataattccctcagtattttggcaaagcataatggattcaaccgccagaagcaagaagtctatcttttaccaatcataatcagtgatagtggaaatcctccactgagcagcactagcaccttgacaatcagggtctgtggctgcagcaatgacggtgtcgtccagtcttgcaatgtcgaagcttatgtccttccaattggactcagtatgggcgccttaattgccatattagcatgcatcattttgctgttagtcatcgtggtgctgtttgtaactctacggcggcatcaaaaaaatgaaccattaattatcaaagatgatgaagacgttcgagaaaacatcattcgctacgatgatgaaggaggaggggaggaggacacagaggcttttgacattgcaactttacaaaatccagatggaattaatggatttttaccccgtaaggatattaaaccagatttgcagtttatgccaaggcaagggcttgctccagttccaaatggtgttgatgtcgatgaatttataaatgtaaggctgcatgaggcagataatgatcccacggccccgccatatgactccattcagatatatggctatgaaggccgagggtcagtggctggctccctcagctccttggagtccaccacatcagactcagaccagaattttgactacctcagtgactggggtccccgctttaagagactgggcgaactctactctgttggtgaaagtgacaaagaaacttgacagtggattataaataaatcactggaactgagcattctgtaatattctagggtcactccccttagatacaaccaatgtggctatttgttttagaggcaagtttagcaccagtcatctataaactcaaccacattttaatgttgaaccaaaaaaagataataaaataaaaaagtatatgttaggaggttataaatcttgtggagtgtgaattaagtatgtggagtgtctagaagtccttggatatttgatatttacctgaccaccacagacaaagattgggatcctgggctaatccttagataaatggtttaaatagaggaaaaaatcataattaaaaggtgctttcttaggaaaaaaaaatacggacctgcaagggaatctgctgctggatatgtgtcttctggcaagggatttttatggaatgcaaatgggttttttccccctttcaccaatagggatcccgccacaaatgataaagcaatacttggtctgctgtacattataactttttggagttttgagaggcctcctagattatacagtacggtgaccacacattgtacataattgttggccccactcactagagactgaatagcatctttaaatattgtgtcgagccttaaaatattcacatgttcgtaatccattccagggtggggcttgccaattcagtggtgggaggagagaaatcccattcaaacatgcttgttttctagaagcaggattcctcgttccctcctcttcatcttcttccacaaggacacaaagataaactgtatcacacagtggactacataagagacagatggttttattgctagcgcgtgaatttatttgtttaatcctcgaaataaatattttattgatgtccattaatgcttttatttattaaggtcggtaatctatagattaaggggatatatgggaaaaaactaaattatatccattaataatcctttagattgttttatataaatatatatacaatgaatgtttaatacatgtacattttgatgagatgagtatggcaggcaatattatcgaaaggagagctaatagtctctttagagtagaaagtgttattgtaactggagatggcaggaacagcatcttcccagacaaatcctgtattgtttcctactttgtgaaatatatttttataaat

SEQ ID NO: 6672 - DNA, 2374 bp, Homo sapiens
agccatttgtgaacctggaggcttgacattcgccagcgcagggccccacaagagaaatttcaatgaaaagaaaagccaatggattgtggtcttagaaaagctgcttagatgatgtctgtttcccgtgctatagacacgtggcagagctgtaagtaaatgctcggcactgcatgatgaattggatggctgcagaccggagacaaaaaaaataattgtctcattttcgtggtgatttgcttaactggtgggaccatgccagaacggctagcggaaatgctcttggatctctggactccattaataatattatggattactcttcccccttgcatttacatggctccgatgaatcagtctcaagttttaatgagtggatcccctttggaactaaacagtctgggtgaagaacagcgaattttgaaccgctccaaaagaggctgggtttggaatcaaatgtttgtcctggaagagttttctggacctgaaccgattcttgttggccggctacacacagacctggatcctgggagcaaaaaaatcaagtatatcctatcaggtgatggagctgggaccatatttcaaataaatgatgtaactggagatatccatgctataaaaagacttgaccgggaggaaaaggctgagtataccctaacagctcaagcagtggactgggagacaagcaaacctctggagcctccttctgaatttattattaaagttcaagacatcaatgacaatgcaccagagtttcttaatggaccctatcatgctactgtgccagaaatgtccattttgggtacatctgtcactaacgtcactgcgaccgacgctgatgacccagtttatggaaacagtgcaaagttggtttatagtatattggaagggcagccttatttttccattgagcctgaaacagctattataaaaactgcccttcccaacatggacagagaagccaaggaggagtacctggttgttatccaagccaaagatatgggtggacactctggtggcctgtctgggaccacgacacttacagtgactcttactgatgttaatgacaatcctccaaaatttgcacagagcctgtatcacttctcagtaccggaagatgtggttcttggcactgcaataggaagggtgaaggccaatgatcaggatattggtgaaaatgcacagtcatcatatgatatcatcgatggagatggaacagcactttttgaaatcacttctgatgcccaggcccaggatggcattataaggctaagaaaacctctggactttgagaccaaaaaatcctatacgctaaaggtagaggcagccaatgtccatattgacccacgcttcagtggcagggggccctttaaagacacggcgacagtcaaaatcgtggttgaagatgctgatgagcctccggtcttctcttcaccgacttacctacttgaagttcatgaaaatgctgctctaaactccgtgattgggcaagtgactgctcgtgaccctgatatcacttccagtcctataaggttttccatcgaccggcacactgacctggagaggcagttcaacattaatgcagacgatgggaagataacgctggcaacaccacttgacagagaattaagtgtatggcacaacataacaatcattgctactgaaattaggaaccacagtcagatatcacgagtacctgttgctattaaagtgctggatgtcaatgacaacgcccctgaattcgcatccgaatatgaggcatttttatgtgaaaatggaaaacccggccaagtaaatatctccatgttgttaatgctgaatatgtttgtatacaactgtctcatatttgactaacctgcattatattgtgcatttgcatcatttatgatctgcaaagtctcaggcaagaaacacatccaaatgggaacagagagggaattttttttctccatcagatgttatttctctctccctacttatgaccaaattggctcctaaagtggaacaaccctgctgtgcccacaaaccccagagcccaaatcactgtcttaaaatatccttgggatatggatgatagcaggagatgtccttagagtgacgggggctgaatttttactttcaaatgacaagaagcaaggtaaaacctcgtggagaggagacatttgtttcacagcaaacatatgaataccaaataatagtgaaacccaagaaggccagtggtttatagaaagttgtaggaagtgaatattgaaatctgtaaatatgtaaatatatttagataaacataagatgaacaacacgttttacatgtgtgtattagtagaacattttttgtgcctcatattgcatagatgggtcaatgaaaacagaaaaaaaa

SEQ ID NO: 6673 - DNA, 2135 bp, Homo sapiens
gccaaagtatcagaccacaaaaagaatgtcactaagcttttaccgatggcaggagcctctgaaatcatcagaaatgctgacgtcaagttttatgtttcaggtcattcaaactgttagcgccatggacaaagatgatcccaaaaacggacattatttcttatacagtctccttccagaaatggtcaacaatccgaatttcaccatcaagaaaaatgaagataattccctcagtattttggcaaagcataatggattcaaccgccagaagcaagaagtctatcttttaccaatcataatcagtgatagtggaaatcctccactgagcagcactagcaccttgacaatcagggtctgtggctgcagcaatgacggtgtcgtccagtcttgcaatgtcgaagcttatgtccttccaattggactcagtatgggcgccttaattgccatattagcatgcatcattttgctgttagtcatcgtggtgctgtttgtaactctacggcggcatcaaaaaaatgaaccattaattatcaaagatgatgaagacgttcgagaaaacatcattcgctacgatgatgaaggaggaggggaggaggacacagaggcttttgacattgcaactttacaaaatccagatggaattaatggatttttaccccgtaaggatattaaaccagatttgcagtttatgccaaggcaagggcttgctccagttccaaatggtgttgatgtcgatgaatttataaatgtaaggctgcatgaggcagataatgatcccacggccccgccatatgactccattcagatatatggctatgaaggccgagggtcagtggctggctccctcagctccttggagtccaccacatcagactcagaccagaattttgactacctcagtgactggggtccccgctttaagagactgggcgaactctactctgttggtgaaagtgacaaagaaacttgacagtggattataaataaatcactggaactgagcattctgtaatattctagggtcactccccttagatacaaccaatgtggctatttgttttagaggcaagtttagcaccagtcatctataaactcaaccacattttaatgttgaaccaaaaaaagataataaaataaaaaagtatatgttaggaggttataaatcttgtggagtgtgaattaagtatgtggagtgtctagaagtccttggatatttgatatttacctgaccaccacagacaaagattgggatcctgggctaatccttagataaatggtttaaatagaggaaaaaatcataattaaaaggtgctttcttaggaaaaaaaaatacggacctgcaagggaatctgctgctggatatgtgtcttctggcaagggatttttatggaatgcaaatgggttttttccccctttcaccaatagggatcccgccacaaatgataaagcaatacttggtctgctgtacattataactttttggagttttgagaggcctcctagattatacagtacggtgaccacacattgtacataattgttggccccactcactagagactgaatagcatctttaaatattgtgtcgagccttaaaatattcacatgttcgtaatccattccagggtggggcttgccaattcagtggtgggaggagagaaatcccattcaaacatgcttgttttctagaagcaggattcctcgttccctcctcttcatcttcttccacaaggacacaaagataaactgtatcacacagtggactacataagagacagatggttttattgctagcgcgtgaatttatttgtttaatcctcgaaataaatattttattgatgtccattaatgcttttatttattaaggtcggtaatctatagattaaggggatatatgggaaaaaactaaattatatccattaataatcctttagattgttttatataaatatatatacaatgaatgtttaatacatgtacattttgatgagatgagtatggcaggcaatattatcgaaaggagagctaatagtctctttagagtagaaagtgttattgtaactggagatggcaggaacagcatcttcccagacaaatcctgtattgtttcctactttgtgaaatatatttttataaat

SEQ ID NO: 6674 - DNA, 1395 bp, Homo sapiens
agccatttgtgaacctggaggcttgacattcgccagcgcagggccccacaagagaaatttcaatgaaaagaaaagccaatggattgtggtcttagaaaagctgcttagatgatgtctgtttcccgtgctatagacacgtggcagagctgtaagtaaatgctcggcactgcatgatgaattggatggctgcagaccggagacaaaaaaaataattgtctcattttcgtggtgatttgcttaactggtgggaccatgccagaacggctagcggaaatgctcttggatctctggactccattaataatattatggattactcttcccccttgcatttacatggctccgatgaatcagtctcaagttttaatgagtggatcccctttggaactaaacagtctgggtgaagaacagcgaattttgaaccgctccaaaagaggctgggtttggaatcaaatgtttgtcctggaagagttttctggacctgaaccgattcttgttggccggctacacacagacctggatcctgggagcaaaaaaatcaagtatatcctatcaggtgatggagctgggaccatatttcaaataaatgatgtaactggagatatccatgctataaaaagacttgaccgggaggaaaaggctgagtataccctaacagctcaagcagtggactgggagacaagcaaacctctggagcctccttctgaatttattattaaagttcaagacatcaatgacaatgcaccagagtttcttaatggaccctatcatgctactgtgccagaaatgtccattttgggtacatctgtcactaacgtcactgcgaccgacgctgatgacccagtttatggaaacagtgcaaagttggtttatagtatattggaagggcagccttatttttccattgagcctgaaacagctattataaaaactgcccttcccaacatggacagagaagccaaggaggagtacctggttgttatccaagccaaagatatgggtggacactctggtggcctgtctgggaccacgacacttacagtgactcttactgatgttaatgacaatcctccaaaatttgcacagagtaagttaatttcctgcactggatgagaatcttggtatgatgtttccatttgaatttatattataatttttagtgataattaaaaacctgacagcaactattgagtggcttattatgtgccaggtatggcatgattttggtactaaacttattcccattttacagattacaaaacagttgataccatttccaaatatcaagcgtatagtaagtaagaattagaaccagtatgtctgactgcaagttgtgcactcctttctcttttgcctgctatttctctttatgaagataacacaggcccaagatga

SEQ ID NO: 6675 - DNA, 848 bp, Homo sapiens
agccatttgtgaacctggaggcttgacattcgccagcgcagggccccacaagagaaatttcaatgaaaagaaaagccaatggattgtggtcttagaaaagctgcttagatgatgtctgtttcccgtgctatagacacgtggcagagctgtaagtaaatgctcggcactgcatgatgaattggatggctgcagaccggagacaaaaaaaataattgtctcattttcgtggtgatttgcttaactggtgggaccatgccagaacggctagcggaaatgctcttggatctctggactccattaataatattatggattactcttcccccttgcatttacatggctccgatgaatcagtctcaagttttaatgagtggatcccctttggaactaaacagtctgggtgaagaacagcgaattttgaaccgctccaaaagaggctgggtttggaatcaaatgtttgtcctggaagagttttctggacctgaaccgattcttgttggccggctacacacagacctggatcctgggagcaaaaaaatcaagtatatcctatcaggtgatggagctgggaccatatttcaaataaatgatgtaactggagatatccatgctataaaaagacttgaccgggaggaaaaggctgagtataccctaacagctcaagcagtggactgggagacaagcaaacctctggagcctccttctgaatttattattaaagttcaagacatcaatgacaatgcaccagagtttcttaatggaccctatcatgctactgtgccagaaatgtccattttgggtatgtatgcttccaatttcacagatctattaaaagtcatctttagaat

SEQ ID NO: 6676 - DNA, 826 bp, Homo sapiens
caaaaaaaagaaaggaaaaacagggccaggtagccattgtggagagagcacacttaggaatcctgggatgttagtgttaaaagaaagctcctggagccagtgattctcaggtttgtcccagaacccttttttctaagccccatataaaaggtagattaaaaaaacaaagtagcatgagtgaaattgagagagggacaggtaatgccttccagcccctaacttctaacaatctggaagcacaacgtgaaaatcacgtagcccaaccctatcattttcatattatgaaactgagtccaggtaagtgaatctgtccaaggtcacccagcaaggtatcagtagccctgagggtaaggactctgataaggctcgggagggtcctggaaagcctgaggcggcaggaagagtgtgcagagttgagcgtgtctggaaggctgatccactgctgggcccacatcaaagcccccatggggagcagacccgactgcacatggctcttttgctggaagaagagcatggctgcgcagaggactaaaatttcatctgggaaggcttcttttgactgtcagtagcaggatgtcaccagatgagggtgctatgggaccacagctgtctttgttcccattgcaactcaaccctgcgggaggccgcctgcatccctgagagccttctggagcctacagaggagacattggccagccaaaaggaaaggagtggccagggtacgacctggagtagggaagggaaaaagttcccggaaagaagagaattggatgagaggtctcggtggaaataaaggttttctggcattggtcaaggaaactcgcgt

SEQ ID NO: 6677 - DNA, 374 bp, Homo sapiens
cctggcccaacggtggactccgttaatgtggactgaataagaaatgaatgggcaaggaggtcatcccaggcacctgatgtacaaggagcccttctggaagccactcaaaaacaatagaaatgttttttaagtcatacactctgggttttttttttttaaagcatccttgttgagatataatttatataccatacagtttttgcaatagttgtacatattagtatatttaagcaattcactgtttttttaaatatattcataggattgtgcaacatcagtctaattttaaatgcacaagcccattctaaggaaatctggctttcttgttttaatgattttgtctacaatgctagtgaaacaaaggtataagtagg

SEQ ID NO: 6678 - DNA, 578 bp, Homo sapiens
ggtactaagtgcaatgtcttagcattctgcaaaatggagatctgttgtccagcggcttatctcctttttagtaacccttctttctgaacccagggcccttttcagccttccctcatattttcttgagatcaaactttacttctttcttatttactaagaatttgcctgtttgaataagaacaaaacgctaaggtgggtagcctaagctgattttctgctggttacacgtgtctctcacaccacatttcctcaaagctaatctgaattctgtaggctaaaaatattcatgtagcaaatctgagaattgaaaactgcagataaccggccgggtatggtgactcatgcctgtaatcctcccaaagtgctggaattacaggcgtgagccaccgcgcccggcctagattgatattcttaagcaataaaagtttactggttgtcctatttgccatattattgaaacttggaaaggataatttgaaacaaggtttgaagttaactgaaatatggagattgaatttatactcaattcttgtgaaaagtcttgcttaataagtatgattaaactttgcttcttaaaa

SEQ ID NO: 6679 - DNA, 4023 bp, Homo sapiens
agacccacaccgcaggtctacgaccctcaggctcttcagctgcaatggcggtaatgatgcgcacgtcataagattcttcaaggtatttaatgaaataaaggatgtgtaaaggagaagggattttacatgagttagctatacctttctcttctttcttcttcaacgtactcagtcctgggtacgcacagagggcactaatggcgtggggccagaagagcttttaattttggaattctgaagaactgagaactcgtgagtctgtcagcagctctgaagtggaatatcaataaagttttgttaattttttttaaagcaccgactaaactacaaatcccttctctctcctccaggtgggtgggtcacgtggcttgtcaggaatccggaagtctggcccgctcgcccaatcacgcccggaagcctatctagtggcgccaagctggccaatcctggggacgcttgctcttcgccaaaccgggtcccgcctccgcgcgccgcgctgacgggtcgttagcggatacggcggccgcaggggcggagtcaagggcctttgcccgccttggcggccggctctacgttccctgttctcgcctgcagctccgccatggctcctaaaggcagctccaaacagcagtctgaggaggacctgctcctgcaggatttcagccgcaatctctcggccaagtcctccgcgctcttcttcggaaacgcgttcatcgtgtctgccatccccatctggttatactggcgaatatggcatatggatcttattcagtctgctgttttgtatagtgtgatgaccctagtaagcacatatttggtagcctttgcatacaagaatgtgaaatttgttctcaagcacaaagtagcacagaagagggaggatgctgtttccaaagaagtgactcgaaaactttctgaagctgataatagaaagatgtctcggaaggagaaagatgaaagaatcttgtggaagaagaatgaagttgctgattatgaagctacaacattttccatcttctataacaacactctgttcctggtcgtggtcattgttgcttccttcttcatattgaagaacttcaaccccacagtgaactacatattgtccataagtgcttcatcaggactcatcgccctcctgtctactggctccaaatagaccatgtcagcttcaccccctggctttgtgtctatgggtggcctgtggtatatggaaaagtagcagggtggtcagggtgggagacacaagatgtttttatagtctagagcctttaaaaaacccagcagaatgtaattcagtatttgtttattggctgttttttgacagattgttgaaattaaatgaattgaaagggaaactcagagtactaggacgtttattaaaaggaaaaaaatgtcttgcaatgtgctgtaatcacaagaggagaaaataacttgtttccttgatctgtcagaggtcacagtaacctgggccgagctgttattatttattatataatagtagtaggaagttaataactggttctctgtgttccaagcacaatattacaacttcttttgaaccgtaaatatcagaatgaatcctcttcccaggggattgaacagaagcttaatgtttacaagtgtttgaatttgtgatctgaaataacacaaaattaaaaacatgatttctctaattttccaactagaggaagagaaacttgtggaaaagttctttttttttcttttttttttcttaaagaagggcagccaaggtagtaacctaaaaatagtgcccaggcatatgagagttgtcctacgaggttaaagaacacactgttccactgtatggctttggccctgagtggccagggaggtcaacttgaccctgccatgttggtttgacttactaagacacaggaatcattgttttccttgaccagggtctcacaccctggaggaatgttaagtaagagaaagaacctctttcctgaatattgacatgtaaaagaccaaagtaatttttctgaacttctgcaattctgagaactctccaaggaatttacagtgattttagtgcttgtcagcatttttccatgaggactttcatacatttgactctttagttcacaggttcccattgattgtgagcaagatatttatctctttagcccttggggatccagctgagagcaatctcttgcatttttttacccgtgtatgtacagatatcatttcttgtgtatgccatgacttgaaaaagtttgggaagctctttagcaatatcagctaaaaggatatgaaatcacaggtgatagcagttgtcattcagtaatttcctacaagcagcaccccaaaggaaatatagtcctaatctttactatccacttctaaatttaatgtgaatttcatacatgttattagttgttttctttataattttataaaaattattcatcgggagtttaacttccacttccatgctatcggatgtgttgggctccatgcaagaacttggaagaaaaacaggcaggaatgcatttgcataatgacccagatcatcattttctgcaactgagaattatatttcatcattgcttctagaagtctgcaattctttacttttctttggtgcattattatctaggtgccatcactggataatgtggagtgactagagaagtcatatatcactgtaaggtacagttagggtaacactttagaggtttattatttttaaaaaacttttcttgaactcctggccaacatggtgaaaccccgtctctactaaaaataccaaaattagccaggcgtgatggtgggtgcctgtaatctcagctacttgggaggctgaagcaggagaactgcctgaacccaggaggcagaggttgcagtgagtcgagatcgtgctactactgcctgggtggcaagggtgagactccatctcaaaaaagaaacaaaaaaacccaaaaagttttctttactgttggttaaaaaaaaaagccagaccatagtttgactggtggcatggaatttgtgtatcaaataaatgcatttgcttatttgacaaaccatcagtgtccactatttgttaccagagttgggccactatcttttaaaattgctggtgaaaacttgccactagatggcagtgcctgtatagatggggaaaaaattgccaccattcttggtataatacagtgtagcttagatgaggtggtgaaataggggtatcagccgaatattcctaatatagtttctcttgaattaataaactgaagatttgtaggaaaatgagtgagcaaaatttgtttactgttgtgaatttttcctacagcactgtttttaatcttggtgttttccaactttctgtactaatagatacatttctgtgcataagattataaagcatatactcacagttcagtagttttcgttaaggatttactgtgtgagtactttactgtgaggaattgcagaaccttttcccctctactcttgtctaaaagttctgtgtggcacacagagatgcgacctactcaatctgacttagtaaaaccatgctgtagaatttttgtcttaaaaagaccacatacccagcacccatgaaataaaagattcatctgtaattgggattcaaagtgattaaattcctttgttcatactcataaatagcactaaagtgttataacattttcatttacctatttttagttccttcattttaacttaataaaaatcttggattgatattcttttttttttttttttttttttgagacagcgtctcgctctgtcacccaggctggagtacagtggctctatcttggctcactgcgagctccgcctcccaggttcacgccattctcctgtagtctcagctacttgggaggctgaagcaggagaactgcctgaacccaggaggcagaggttgcggtgagtcgagatcgtgctactactgcctgggtggcaagggtgagactccatctcaaaaaagaaacaaaaaaacccaaaaagttttctttactgttggttaaaaaaaaa

SEQ ID NO: 6680 - DNA, 4081 bp, Homo sapiens
agacccacaccgcaggtctacgaccctcaggctcttcagctgcaatggcggtaatgatgcgcacgtcataagattcttcaaggtatttaatgaaataaaggatgtgtaaaggagaagggattttacatgagttagctatacctttctcttctttcttcttcaacgtactcagtcctgggtacgcacagagggcactaatggcgtggggccagaagagcttttaattttggaattctgaagaactgagaactcgtgagtctgtcagcagctctgaagtggaatatcaataaagttttgttaattttttttaaagcaccgactaaactacaaatcccttctctctcctccaggtgggtgggtcacgtggcttgtcaggaatccggaagtctggcccgctcgcccaatcacgcccggaagcctatctagtggcgccaagctggccaatcctggggacgcttgctcttcgccaaaccgggtcccgcctccgcgcgccgcgctgacgggtcgttagcggatacggcggccgcaggggcggagtcaagggcctttgcccgccttggcggccggctctacgttccctgttctcgcctgcagctccgccatggctcctaaaggcagctccaaacagcagtctgaggaggacctgctcctgcaggatttcagccgcaatctctcggccaagtcctccgcgctcttcttcggaaacgcgttcatcgtgtctgccatccccatctggttatactggcgaatatggcatatggatcttattcagtctgctgttttgtatagtgtgatgaccctagtaagcacatatttggtagcctttgcatacaagaatgtgaaatttgttctcaagcacaaagtagcacagaagagggaggatgctgtttccaaagaagtgactcgaaaactttctgaagctgataatagaaagatgtctcggaaggagaaagatgaaagaatcttgtggaagaagaatgaagttgctgattatgaagctacaacattttccatcttctataacaacactctgttcctggtcgtggtcattgttgcttccttcttcatattgaagaacttcaaccccacagtgaactacatattgtccataagtgcttcatcaggactcatcgccctcctgtctactggctccaaatagaccatgtcagcttcaccccctggctttgtgtctatgggtggcctgtggtatatggaaaagtagcagggtggtcagggtgggagacacaagatgtttttatagtctagagcctttaaaaaacccagcagaatgtaattcagtatttgtttattggctgttttttgacagattgttgaaattaaatgaattgaaagggaaactcagagtactaggacgtttattaaaaggaaaaaaatgtcttgcaatgtgctgtaatcacaagaggagaaaataacttgtttccttgatctgtcagaggtcacagtaacctgggccgagctgttattatttattatataatagtagtaggaagttaataactggttctctgtgttccaagcacaatattacaacttcttttgaaccgtaaatatcagaatgaatcctcttcccaggggattgaacagaagcttaatgtttacaagtgtttgaatttgtgatctgaaataacacaaaattaaaaacatgatttctctaattttccaactagaggaagagaaacttgtggaaaagttctttttttttcttttttttttcttaaagaagggcagccaaggtagtaacctaaaaatagtgcccaggcatatgagagttgtcctacgaggttaaagaacacactgttccactgtatggctttggccctgagtggccagggaggtcaacttgaccctgccatgttggtttgacttactaagacacaggaatcattgttttccttgaccagggtctcacaccctggaggaatgttaagtaagagaaagaacctctttcctgaatattgacatgtaaaagaccaaagtaatttttctgaacttctgcaattctgagaactctccaaggaatttacagtgattttagtgcttgtcagcatttttccatgaggactttcatacatttgactctttagttcacaggttcccattgattgtgagcaagatatttatctctttagcccttggggatccagctgagagcaatctcttgcatttttttacccgtgtatgtacagatatcatttcttgtgtatgccatgacttgaaaaagtttgggaagctctttagcaatatcagctaaaaggatatgaaatcacaggtgatagcagttgtcattcagtaatttcctacaagcagcaccccaaaggaaatatagtcctaatctttactatccacttctaaatttaatgtgaatttcatacatgttattagttgttttctttataattttataaaaattattcatcgggagtttaacttccacttccatgctatcggatgtgttgggctccatgcaagaacttggaagaaaaacaggcaggaatgcatttgcataatgacccagatcatcattttctgcaactgagaattatatttcatcattgcttctagaagtctgcaattctttacttttctttggtgcattattatctaggtgccatcactggataatgtggagtgactagagaagtcatatatcactgtaaggtacagttagggtaacactttagaggtttattatttttaaaaaacttttcttgaactcctggccaacatggtgaaaccccgtctctactaaaaataccaaaattagccaggcgtgatggtgggtgcctgtaatctcagctacttgggaggctgaagcaggagaactgcctgaacccaggaggcagaggttgcagtgagtcgagatcgtgctactactgcctgggtggcaagggtgagactccatctcaaaaaagaaacaaaaaaacccaaaaagttttctttactgttggttaaaaaaaaaagccagaccatagtttgactggtggcatggaatttgtgtatcaaataaatgcatttgcttatttgacaaaccatcagtgtccactatttgttaccagagttgggccactatcttttaaaattgctggtgaaaacttgccactagatggcagtgcctgtatagatggggaaaaaattgccaccattcttggtataatacagtgtagcttagatgaggtggtgaaataggggtatcagccgaatattcctaatatagtttctcttgaattaataaactgaagatttgtaggaaaatgagtgagcaaaatttgtttactgttgtgaatttttcctacagcactgtttttaatcttggtgttttccaactttctgtactaatagatacatttctgtgcataagattataaagcatatactcacagttcagtagttttcgttaaggatttactgtgtgagtactttactgtgaggaattgcagaaccttttcccctctactcttgtctaaaagttctgtgtggcacacagagatgcgacctactcaatctgacttagtaaaaccatgctgtagaatttttgtcttaaaaagaccacatacccagcacccatgaaataaaagattcatctgtaattgggattcaaagtgattaaattcctttgttcatactcataaatagcactaaagtgttataacattttcatttacctatttttagttccttcattttaacttaataaaaatcttggattgatattcttttttttttttttttttttttgagacagcgtctcgctctgtcacccaggctggagtacagtggctctatcttggctcactgcgagctccgcctcccaggttcacgccattctcctgcctcagcctgccgagtggctgggactgcaggcgccccaccgcgcccggcctagattgatattcttaagcaataaaagtttactggttgtcctatttgccatattattgaaacttggaaaggataatttgaaacaaggtttgaagttaactgaaatatggagattgaatttatactcaattcttgtgaaaagtcttgcttaataagtatgattaaactttgcttcttaaaa

SEQ ID NO: 6681 - DNA, 3706 bp, Homo sapiens
agacatatgtcatagtacgaggccgggtggtgactttgcccgccttggcggccggctctacgttccctgttctcgcctgcagctccgccatggctcctaaaggcagctccaaacagcagtctgaggaggacctgctcctgcaggatttcagccgcaatctctcggccaagtcctccgcgctcttcttcggaaacgcgttcatcgtgtctgccatccccatctggttatactggcgaatatggcatatggatcttattcagtctgctgttttgtatagtgtgatgaccctagtaagcacatatttggtagcctttgcatacaagaatgtgaaatttgttctcaagcacaaagtagcacagaagagggaggatgctgtttccaaagaagtgactcgaaaactttctgaagctgataatagaaagatgtctcggaaggagaaagatgaaagaatcttgtggaagaagaatgaagttgctgattatgaagctacaacattttccatcttctataacaacactctgttcctggtcgtggtcattgttgcttccttcttcatattgaagaacttcaaccccacagtgaactacatattgtccataagtgcttcatcaggactcatcgccctcctgtctactggctccaaatagaccatgtcagcttcaccccctggctttgtgtctatgggtggcctgtggtatatggaaaagtagcagggtggtcagggtgggagacacaagatgtttttatagtctagagcctttaaaaaacccagcagaatgtaattcagtatttgtttattggctgttttttgacagattgttgaaattaaatgaattgaaagggaaactcagagtactaggacgtttattaaaaggaaaaaaatgtcttgcaatgtgctgtaatcacaagaggagaaaataacttgtttccttgatctgtcagaggtcacagtaacctgggccgagctgttattatttattatataatagtagtaggaagttaataactggttctctgtgttccaagcacaatattacaacttcttttgaaccgtaaatatcagaatgaatcctcttcccaggggattgaacagaagcttaatgtttacaagtgtttgaatttgtgatctgaaataacacaaaattaaaaacatgatttctctaattttccaactagaggaagagaaacttgtggaaaagttctttttttttcttttttttttcttaaagaagggcagccaaggtagtaacctaaaaatagtgcccaggcatatgagagttgtcctacgaggttaaagaacacactgttccactgtatggctttggccctgagtggccagggaggtcaacttgaccctgccatgttggtttgacttactaagacacaggaatcattgttttccttgaccagggtctcacaccctggaggaatgttaagtaagagaaagaacctctttcctgaatattgacatgtaaaagaccaaagtaatttttctgaacttctgcaattctgagaactctccaaggaatttacagtgattttagtgcttgtcagcatttttccatgaggactttcatacatttgactctttagttcacaggttcccattgattgtgagcaagatatttatctctttagcccttggggatccagctgagagcaatctcttgcatttttttacccgtgtatgtacagatatcatttcttgtgtatgccatgacttgaaaaagtttgggaagctctttagcaatatcagctaaaaggatatgaaatcacaggtgatagcagttgtcattcagtaatttcctacaagcagcaccccaaaggaaatatagtcctaatctttactatccacttctaaatttaatgtgaatttcatacatgttattagttgttttctttataattttataaaaattattcatcgggagtttaacttccacttccatgctatcggatgtgttgggctccatgcaagaacttggaagaaaaacaggcaggaatgcatttgcataatgacccagatcatcattttctgcaactgagaattatatttcatcattgcttctagaagtctgcaattctttacttttctttggtgcattattatctaggtgccatcactggataatgtggagtgactagagaagtcatatatcactgtaaggtacagttagggtaacactttagaggtttattatttttaaaaaacttttcttgaactcctggccaacatggtgaaaccccgtctctactaaaaataccaaaattagccaggcgtgatggtgggtgcctgtaatctcagctacttgggaggctgaagcaggagaactgcctgaacccaggaggcagaggttgcagtgagtcgagatcgtgctactactgcctgggtggcaagggtgagactccatctcaaaaaagaaacaaaaaaacccaaaaagttttctttactgttggttaaaaaaaaaagccagaccatagtttgactggtggcatggaatttgtgtatcaaataaatgcatttgcttatttgacaaaccatcagtgtccactatttgttaccagagttgggccactatcttttaaaattgctggtgaaaacttgccactagatggcagtgcctgtatagatggggaaaaaattgccaccattcttggtataatacagtgtagcttagatgaggtggtgaaataggggtatcagccgaatattcctaatatagtttctcttgaattaataaactgaagatttgtaggaaaatgagtgagcaaaatttgtttactgttgtgaatttttcctacagcactgtttttaatcttggtgttttccaactttctgtactaatagatacatttctgtgcataagattataaagcatatactcacagttcagtagttttcgttaaggatttactgtgtgagtactttactgtgaggaattgcagaaccttttcccctctactcttgtctaaaagttctgtgtggcacacagagatgcgacctactcaatctgacttagtaaaaccatgctgtagaatttttgtcttaaaaagaccacatacccagcacccatgaaataaaagattcatctgtaattgggattcaaagtgattaaattcctttgttcatactcataaatagcactaaagtgttataacattttcatttacctatttttagttccttcattttaacttaataaaaatcttggattgatattcttttttttttttttttttttttgagacagcgtctcgctctgtcacccaggctggagtacagtggctctatcttggctcactgcgagctccgcctcccaggttcacgccattctcctgcctcagcctgccgagtggctgggactgcaggcgcccgccaccacacccggctaatttttttgtatttttagtagagacggggtttcaccctgttggccaggatggtctcgatctcctgacctcgtgatccacctgcctcggcctcccaaagtgctggaattacaggcgtgagccaccgcgcccggcctagattgatattcttaagcaataaaagtttactggttgtcctatttgccatattattgaaacttggaaaggataatttgaaacaaggtttgaagttaactgaaatatggagattgaatttatactcaattcttgtgaaaagtcttgcttaataagtatgattaaactttgcttcttaaaa

SEQ ID NO: 6682 - DNA, 3536 bp, Homo sapiens
agacccacaccgcaggtctacgaccctcaggctcttcagctgcaatggcggtaatgatgcgcacgtcataagattcttcaaggtatttaatgaaataaaggatgtgtaaaggagaagggattttacatgagttagctatacctttctcttctttcttcttcaacgtactcagtcctgggtacgcacagagggcactaatggcgtggggccagaagagcttttaattttggaattctgaagaactgagaactcgtgagtctgtcagcagctctgaagtggaatatcaataaagttttgttaattttttttaaagcaccgactaaactacaaatcccttctctctcctccaggtgggtgggtcacgtggcttgtcaggaatccggaagtctggcccgctcgcccaatcacgcccggaagcctatctagtggcgccaagctggccaatcctggggacgcttgctcttcgccaaaccgggtcccgcctccgcgcgccgcgctgacgggtcgttagcggatacggcggccgcaggggcggagtcaagggcctttgcccgccttggcggccggctctacgttccctgttctcgcctgcagctccgccatggctcctaaaggcagctccaaacagcagtctgaggaggacctgctcctgcaggatttcagccgcaatctctcggccaagtcctccgcgctcttcttcggaaacgcgttcatcgtgtctgccatccccatctggttatactggcgaatatggcatatggatcttattcagtctgctgttttgtatagtgtgatgaccctagtaagcacatatttggtagcctttgcatacaagaatgtgaaatttgttctcaagcacaaagtagcacagaagagggaggatgctgtttccaaagaagtgactcgaaaactttctgaagctgataatagaaagatgtctcggaaggagaaagatgaaagaatcttgtggaagaagaatgaagttgctgattatgaagctacaacattttccatcttctataacaacactctgttcctggtcgtggtcattgttgcttccttcttcatattgaagaacttcaaccccacagtgaactacatattgtccataagtgcttcatcaggactcatcgccctcctgtctactggctccaaatagaccatgtcagcttcaccccctggctttgtgtctatgggtggcctgtggtatatggaaaagtagcagggtggtcagggtgggagacacaagatgtttttatagtctagagcctttaaaaaacccagcagaatgtaattcagtatttgtttattggctgttttttgacagattgttgaaattaaatgaattgaaagggaaactcagagtactaggacgtttattaaaaggaaaaaaatgtcttgcaatgtgctgtaatcacaagaggagaaaataacttgtttccttgatctgtcagaggtcacagtaacctgggccgagctgttattatttattatataatagtagtaggaagttaataactggttctctgtgttccaagcacaatattacaacttcttttgaaccgtaaatatcagaatgaatcctcttcccaggggattgaacagaagcttaatgtttacaagtgtttgaatttgtgatctgaaataacacaaaattaaaaacatgatttctctaattttccaactagaggaagagaaacttgtggaaaagttctttttttttcttttttttttcttaaagaagggcagccaaggtagtaacctaaaaatagtgcccaggcatatgagagttgtcctacgaggttaaagaacacactgttccactgtatggctttggccctgagtggccagggaggtcaacttgaccctgccatgttggtttgacttactaagacacaggaatcattgttttccttgaccagggtctcacaccctggaggaatgttaagtaagagaaagaacctctttcctgaatattgacatgtaaaagaccaaagtaatttttctgaacttctgcaattctgagaactctccaaggaatttacagtgattttagtgcttgtcagcatttttccatgaggactttcatacatttgactctttagttcacaggttcccattgattgtgagcaagatatttatctctttagcccttggggatccagctgagagcaatctcttgcatttttttacccgtgtatgtacagatatcatttcttgtgtatgccatgacttgaaaaagtttgggaagctctttagcaatatcagctaaaaggatatgaaatcacaggtgatagcagttgtcattcagtaatttcctacaagcagcaccccaaaggaaatatagtcctaatctttactatccacttctaaatttaatgtgaatttcatacatgttattagttgttttctttataattttataaaaattattcatcgggagtttaacttccacttccatgctatcggatgtgttgggctccatgcaagaacttggaagaaaaacaggcaggaatgcatttgcataatgacccagatcatcattttctgcaactgagaattatatttcatcattgcttctagaagtctgcaattctttacttttctttggtgcattattatctaggtgccatcactggataatgtggagtgactagagaagtcatatatcactgtaaggtacagttagggtaacactttagaggtttattatttttaaaaaacttttcttgaactcctggccaacatggtgaaaccccgtctctactaaaaataccaaaattagccaggcgtgatggtgggtgcctgtaatctcagctacttgggaggctgaagcaggagaactgcctgaacccaggaggcagaggttgcagtgagtcgagatcgtgctactactgcctgggtggcaagggtgagactccatctcaaaaaagaaacaaaaaaacccaaaaagttttctttactgttggttaaaaaaaaaagccagaccatagtttgactggtggcatggaatttgtgtatcaaataaatgcatttgcttatttgacaaaccatcagtgtccactatttgttaccagagttgggccactatcttttaaaattgctggtgaaaacttgccactagatggcagtgcctgtatagatggggaaaaaattgccaccattcttggtataatacagtgtagcttagatgaggtggtgaaataggggtatcagccgaatattcctaatatagtttctcttgaattaataaactgaagatttgtaggaaaatgagtgagcaaaatttgtttactgttgtgaatttttcctacagcactgtttttaatcttggtgttttccaactttctgtactaatagatacatttctgtgcataagattataaagcatatactcacagttcagtagttttcgttaaggatttactgtgtgagtactttactgtgaggaattgcagaaccttttcccctctactcttgtctaaaagttctgtgtggcacacagagatgcgaccacgttggccgaacatcggggg

SEQ ID NO: 6683 - DNA, 4166 bp, Homo sapiens
agacccacaccgcaggtctacgaccctcaggctcttcagctgcaatggcggtaatgatgcgcacgtcataagattcttcaaggtatttaatgaaataaaggatgtgtaaaggagaagggattttacatgagttagctatacctttctcttctttcttcttcaacgtactcagtcctgggtacgcacagagggcactaatggcgtggggccagaagagcttttaattttggaattctgaagaactgagaactcgtgagtctgtcagcagctctgaagtggaatatcaataaagttttgttaattttttttaaagcaccgactaaactacaaatcccttctctctcctccaggtgggtgggtcacgtggcttgtcaggaatccggaagtctggcccgctcgcccaatcacgcccggaagcctatctagtggcgccaagctggccaatcctggggacgcttgctcttcgccaaaccgggtcccgcctccgcgcgccgcgctgacgggtcgttagcggatacggcggccgcaggggcggagtcaagggcctttgcccgccttggcggccggctctacgttccctgttctcgcctgcagctccgccatggctcctaaaggcagctccaaacagcagtctgaggaggacctgctcctgcaggatttcagccgcaatctctcggccaagtcctccgcgctcttcttcggaaacgcgttcatcgtgtctgccatccccatctggttatactggcgaatatggcatatggatcttattcagtctgctgttttgtatagtgtgatgaccctagtaagcacatatttggtagcctttgcatacaagaatgtgaaatttgttctcaagcacaaagtagcacagaagagggaggatgctgtttccaaagaagtgactcgaaaactttctgaagctgataatagaaagatgtctcggaaggagaaagatgaaagaatcttgtggaagaagaatgaagttgctgattatgaagctacaacattttccatcttctataacaacactctgttcctggtcgtggtcattgttgcttccttcttcatattgaagaacttcaaccccacagtgaactacatattgtccataagtgcttcatcaggactcatcgccctcctgtctactggctccaaatagaccatgtcagcttcaccccctggctttgtgtctatgggtggcctgtggtatatggaaaagtagcagggtggtcagggtgggagacacaagatgtttttatagtctagagcctttaaaaaacccagcagaatgtaattcagtatttgtttattggctgttttttgacagattgttgaaattaaatgaattgaaagggaaactcagagtactaggacgtttattaaaaggaaaaaaatgtcttgcaatgtgctgtaatcacaagaggagaaaataacttgtttccttgatctgtcagaggtcacagtaacctgggccgagctgttattatttattatataatagtagtaggaagttaataactggttctctgtgttccaagcacaatattacaacttcttttgaaccgtaaatatcagaatgaatcctcttcccaggggattgaacagaagcttaatgtttacaagtgtttgaatttgtgatctgaaataacacaaaattaaaaacatgatttctctaattttccaactagaggaagagaaacttgtggaaaagttctttttttttcttttttttttcttaaagaagggcagccaaggtagtaacctaaaaatagtgcccaggcatatgagagttgtcctacgaggttaaagaacacactgttccactgtatggctttggccctgagtggccagggaggtcaacttgaccctgccatgttggtttgacttactaagacacaggaatcattgttttccttgaccagggtctcacaccctggaggaatgttaagtaagagaaagaacctctttcctgaatattgacatgtaaaagaccaaagtaatttttctgaacttctgcaattctgagaactctccaaggaatttacagtgattttagtgcttgtcagcatttttccatgaggactttcatacatttgactctttagttcacaggttcccattgattgtgagcaagatatttatctctttagcccttggggatccagctgagagcaatctcttgcatttttttacccgtgtatgtacagatatcatttcttgtgtatgccatgacttgaagtgatagcagttgtcattcagtaatttcctacaagcagcaccccaaaggaaatatagtcctaatctttactatccacttctaaatttaatgtgaatttcatacatgttattagttgttttctttataattttataaaaattattcatcgggagtttaacttccacttccatgctatcggatgtgttgggctccatgcaagaacttggaagaaaaacaggcaggaatgcatttgcataatgacccagatcatcattttctgcaactgagaattatatttcatcattgcttctagaagtctgcaattctttacttttctttggtgcattattatctaggtgccatcactggataatgtggagtgactagagaagtcatatatcactgtaaggtacagttagggtaacactttagaggtttattatttttaaaaaacttttcttgaactcctggccaacatggtgaaaccccgtctctactaaaaataccaaaattagccaggcgtgatggtgggtgcctgtaatctcagctacttgggaggctgaagcaggagaactgcctgaacccaggaggcagaggttgcagtgagtcgagatcgtgctactactgcctgggtggcaagggtgagactccatctcaaaaaagaaacaaaaaaacccaaaaagttttctttactgttggttaaaaaaaaaagccagaccatagtttgactggtggcatggaatttgtgtatcaaataaatgcatttgcttatttgacaaaccatcagtgtccactatttgttaccagagttgggccactatcttttaaaattgctggtgaaaacttgccactagatggcagtgcctgtatagatggggaaaaaattgccaccattcttggtataatacagtgtagcttagatgaggtggtgaaataggggtatcagccgaatattcctaatatagtttctcttgaattaataaactgaagatttgtaggaaaatgagtgagcaaaatttgtttactgttgtgaatttttcctacagcactgtttttaatcttggtgttttccaactttctgtactaatagatacatttctgtgcataagattataaagcatatactcacagttcagtagttttcgttaaggatttactgtgtgagtactttactgtgaggaattgcagaaccttttcccctctactcttgtctaaaagttctgtgtggcacacagagatgcgacctactcaatctgacttagtaaaaccatgctgtagaatttttgtcttaaaaagaccacatacccagcacccatgaaataaaagattcatctgtaattgggattcaaagtgattaaattcctttgttcatactcataaatagcactaaagtgttataacattttcatttacctatttttagttccttcattttaacttaataaaaatcttggattgatattcttttttttttttttttttttttgagacagcgtctcgctctgtcacccaggctggagtacagtggctctatcttggctcactgcgagctccgcctcccaggttcacgccattctcctgcctcagcctgccgagtggctgggactgcaggcgcccgccaccacacccggctaatttttttgtatttttagtagagacggggtttcaccctgttggccaggatggtctcgatctcctgacctcgtgatccacctgcctcggcctcccaaagtgctggaattacaggcgtgagccaccgcgcccggcctagattgatattcttaagcaataaaagtttactggttgtcctatttgccatattattgaaacttggaaaggataatttgaaacaaggtttgaagttaactgaaatatggagattgaatttatactcaattcttgtgaaaagtcttgcttaataagtatgattaaactttgcttcttaaaa

SEQ ID NO: 6684 - DNA, 3622 bp, Homo sapiens
  misc_feature (22)..(22): n is a, c, g, or t
tacatcgagctcggacctgatncaccaaacagcagtctgaggaggacctgctcctgcaggatttcagccgcaatctctcggccaagtcctccgcgctcttcttcggaaacgcgttcatcgtgtctgccatccccatctggttatactggcgaatatggcatatggatcttattcagtctgctgttttgtatagtgtgatgaccctagtaagcacatatttggtagcctttgcatacaagaatgtgaaatttgttctcaagcacaaagtagcacagaagagggaggatgctgtttccaaagaagtgactcgaaaactttctgaagctgataatagaaagatgtctcggaaggagaaagatgaaagaatcttgtggaagaagaatgaagttgctgattatgaagctacaacattttccatcttctataacaacactctgttcctggtcgtggtcattgttgcttccttcttcatattgaagaacttcaaccccacagtgaactacatattgtccataagtgcttcatcaggactcatcgccctcctgtctactggctccaaatagaccatgtcagcttcaccccctggctttgtgtctatgggtggcctgtggtatatggaaaagtagcagggtggtcagggtgggagacacaagatgtttttatagtctagagcctttaaaaaacccagcagaatgtaattcagtatttgtttattggctgttttttgacagattgttgaaattaaatgaattgaaagggaaactcagagtactaggacgtttattaaaaggaaaaaaatgtcttgcaatgtgctgtaatcacaagaggagaaaataacttgtttccttgatctgtcagaggtcacagtaacctgggccgagctgttattatttattatataatagtagtaggaagttaataactggttctctgtgttccaagcacaatattacaacttcttttgaaccgtaaatatcagaatgaatcctcttcccaggggattgaacagaagcttaatgtttacaagtgtttgaatttgtgatctgaaataacacaaaattaaaaacatgatttctctaattttccaactagaggaagagaaacttgtggaaaagttctttttttttcttttttttttcttaaagaagggcagccaaggtagtaacctaaaaatagtgcccaggcatatgagagttgtcctacgaggttaaagaacacactgttccactgtatggctttggccctgagtggccagggaggtcaacttgaccctgccatgttggtttgacttactaagacacaggaatcattgttttccttgaccagggtctcacaccctggaggaatgttaagtaagagaaagaacctctttcctgaatattgacatgtaaaagaccaaagtaatttttctgaacttctgcaattctgagaactctccaaggaatttacagtgattttagtgcttgtcagcatttttccatgaggactttcatacatttgactctttagttcacaggttcccattgattgtgagcaagatatttatctctttagcccttggggatccagctgagagcaatctcttgcatttttttacccgtgtatgtacagatatcatttcttgtgtatgccatgacttgaaaaagtttgggaagctctttagcaatatcagctaaaaggatatgaaatcacaggtgatagcagttgtcattcagtaatttcctacaagcagcaccccaaaggaaatatagtcctaatctttactatccacttctaaatttaatgtgaatttcatacatgttattagttgttttctttataattttataaaaattattcatcgggagtttaacttccacttccatgctatcggatgtgttgggctccatgcaagaacttggaagaaaaacaggcaggaatgcatttgcataatgacccagatcatcattttctgcaactgagaattatatttcatcattgcttctagaagtctgcaattctttacttttctttggtgcattattatctaggtgccatcactggataatgtggagtgactagagaagtcatatatcactgtaaggtacagttagggtaacactttagaggtttattatttttaaaaaacttttcttgaactcctggccaacatggtgaaaccccgtctctactaaaaataccaaaattagccaggcgtgatggtgggtgcctgtaatctcagctacttgggaggctgaagcaggagaactgcctgaacccaggaggcagaggttgcagtgagtcgagatcgtgctactactgcctgggtggcaagggtgagactccatctcaaaaaagaaacaaaaaaacccaaaaagttttctttactgttggttaaaaaaaaaagccagaccatagtttgactggtggcatggaatttgtgtatcaaataaatgcatttgcttatttgacaaaccatcagtgtccactatttgttaccagagttgggccactatcttttaaaattgctggtgaaaacttgccactagatggcagtgcctgtatagatggggaaaaaattgccaccattcttggtataatacagtgtagcttagatgaggtggtgaaataggggtatcagccgaatattcctaatatagtttctcttgaattaataaactgaagatttgtaggaaaatgagtgagcaaaatttgtttactgttgtgaatttttcctacagcactgtttttaatcttggtgttttccaactttctgtactaatagatacatttctgtgcataagattataaagcatatactcacagttcagtagttttcgttaaggatttactgtgtgagtactttactgtgaggaattgcagaaccttttcccctctactcttgtctaaaagttctgtgtggcacacagagatgcgacctactcaatctgacttagtaaaaccatgctgtagaatttttgtcttaaaaagaccacatacccagcacccatgaaataaaagattcatctgtaattgggattcaaagtgattaaattcctttgttcatactcataaatagcactaaagtgttataacattttcatttacctatttttagttccttcattttaacttaataaaaatcttggattgatattcttttttttttttttttttttttgagacagcgtctcgctctgtcacccaggctggagtacagtggctctatcttggctcactgcgagctccgcctcccaggttcacgccattctcctgcctcagcctgccgagtggctgggactgcaggcgcccgccaccacacccggctaatttttttgtatttttagtagagacggggtttcaccctgttggccaggatggtctcgatctcctgacctcgtgatccacctgcctcggcctcccaaagtgctggaattacaggcgtgagccaccgcgcccggcctagattgatattcttaagcaataaaagtttactggttgtcctatttgccatattattgaaacttggaaaggataatttgaaacaaggtttgaagttaactgaaatatggagattgaatttatactcaattcttgtgaaaagtcttgcttaataagtatgattaaactttgcttcttaaaa

SEQ ID NO: 6685 - DNA, 3631 bp, Homo sapiens
ttaggctaggtagcgaggctgggtggtgccaacccaaacagcagtctgaggaggacctgctcctgcaggatttcagccgcaatctctcggccaagtcctccgcgctcttcttcggaaacgcgttcatcgtgtctgccatccccatctggttatactggcgaatatggcatatggatcttattcagtctgctgttttgtatagtgtgatgaccctagtaagcacatatttggtagcctttgcatacaagaatgtgaaatttgttctcaagcacaaagtagcacagaagagggaggatgctgtttccaaagaagtgactcgaaaactttctgaagctgataatagaaagatgtctcggaaggagaaagatgaaagaatcttgtggaagaagaatgaagttgctgattatgaagctacaacattttccatcttctataacaacactctgttcctggtcgtggtcattgttgcttccttcttcatattgaagaacttcaaccccacagtgaactacatattgtccataagtgcttcatcaggactcatcgccctcctgtctactggctccaaatagaccatgtcagcttcaccccctggctttgtgtctatgggtggcctgtggtatatggaaaagtagcagggtggtcagggtgggagacacaagatgtttttatagtctagagcctttaaaaaacccagcagaatgtaattcagtatttgtttattggctgttttttgacagattgttgaaattaaatgaattgaaagggaaactcagagtactaggacgtttattaaaaggaaaaaaatgtcttgcaatgtgctgtaatcacaagaggagaaaataacttgtttccttgatctgtcagaggtcacagtaacctgggccgagctgttattatttattatataatagtagtaggaagttaataactggttctctgtgttccaagcacaatattacaacttcttttgaaccgtaaatatcagaatgaatcctcttcccaggggattgaacagaagcttaatgtttacaagtgtttgaatttgtgatctgaaataacacaaaattaaaaacatgatttctctaattttccaactagaggaagagaaacttgtggaaaagttctttttttttcttttttttttcttaaagaagggcagccaaggtagtaacctaaaaatagtgcccaggcatatgagagttgtcctacgaggttaaagaacacactgttccactgtatggctttggccctgagtggccagggaggtcaacttgaccctgccatgttggtttgacttactaagacacaggaatcattgttttccttgaccagggtctcacaccctggaggaatgttaagtaagagaaagaacctctttcctgaatattgacatgtaaaagaccaaagtaatttttctgaacttctgcaattctgagaactctccaaggaatttacagtgattttagtgcttgtcagcatttttccatgaggactttcatacatttgactctttagttcacaggttcccattgattgtgagcaagatatttatctctttagcccttggggatccagctgagagcaatctcttgcatttttttacccgtgtatgtacagatatcatttcttgtgtatgccatgacttgaaaaagtttgggaagctctttagcaatatcagctaaaaggatatgaaatcacaggtgatagcagttgtcattcagtaatttcctacaagcagcaccccaaaggaaatatagtcctaatctttactatccacttctaaatttaatgtgaatttcatacatgttattagttgttttctttataattttataaaaattattcatcgggagtttaacttccacttccatgctatcggatgtgttgggctccatgcaagaacttggaagaaaaacaggcaggaatgcatttgcataatgacccagatcatcattttctgcaactgagaattatatttcatcattgcttctagaagtctgcaattctttacttttctttggtgcattattatctaggtgccatcactggataatgtggagtgactagagaagtcatatatcactgtaaggtacagttagggtaacactttagaggtttattatttttaaaaaacttttcttgaactcctggccaacatggtgaaaccccgtctctactaaaaataccaaaattagccaggcgtgatggtgggtgcctgtaatctcagctacttgggaggctgaagcaggagaactgcctgaacccaggaggcagaggttgcagtgagtcgagatcgtgctactactgcctgggtggcaagggtgagactccatctcaaaaaagaaacaaaaaaacccaaaaagttttctttactgttggttaaaaaaaaaagccagaccatagtttgactggtggcatggaatttgtgtatcaaataaatgcatttgcttatttgacaaaccatcagtgtccactatttgttaccagagttgggccactatcttttaaaattgctggtgaaaacttgccactagatggcagtgcctgtatagatggggaaaaaattgccaccattcttggtataatacagtgtagcttagatgaggtggtgaaataggggtatcagccgaatattcctaatatagtttctcttgaattaataaactgaagatttgtaggaaaatgagtgagcaaaatttgtttactgttgtgaatttttcctacagcactgtttttaatcttggtgttttccaactttctgtactaatagatacatttctgtgcataagattataaagcatatactcacagttcagtagttttcgttaaggatttactgtgtgagtactttactgtgaggaattgcagaaccttttcccctctactcttgtctaaaagttctgtgtggcacacagagatgcgacctactcaatctgacttagtaaaaccatgctgtagaatttttgtcttaaaaagaccacatacccagcacccatgaaataaaagattcatctgtaattgggattcaaagtgattaaattcctttgttcatactcataaatagcactaaagtgttataacattttcatttacctatttttagttccttcattttaacttaataaaaatcttggattgatattcttttttttttttttttttttttgagacagcgtctcgctctgtcacccaggctggagtacagtggctctatcttggctcactgcgagctccgcctcccaggttcacgccattctcctgcctcagcctgccgagtggctgggactgcaggcgcccgccaccacacccggctaatttttttgtatttttagtagagacggggtttcaccctgttggccaggatggtctcgatctcctgacctcgtgatccacctgcctcggcctcccaaagtgctggaattacaggcgtgagccaccgcgcccggcctagattgatattcttaagcaataaaagtttactggttgtcctatttgccatattattgaaacttggaaaggataatttgaaacaaggtttgaagttaactgaaatatggagattgaatttatactcaattcttgtgaaaagtcttgcttaataagtatgattaaactttgcttcttaaaa

SEQ ID NO: 6686 - DNA, 4257 bp, Homo sapiens
agacccacaccgcaggtctacgaccctcaggctcttcagctgcaatggcggtaatgatgcgcacgtcataagattcttcaaggtatttaatgaaataaaggatgtgtaaaggagaagggattttacatgagttagctatacctttctcttctttcttcttcaacgtactcagtcctgggtacgcacagagggcactaatggcgtggggccagaagagcttttaattttggaattctgaagaactgagaactcgtgagtctgtcagcagctctgaagtggaatatcaataaagttttgttaattttttttaaagcaccgactaaactacaaatcccttctctctcctccaggtgggtgggtcacgtggcttgtcaggaatccggaagtctggcccgctcgcccaatcacgcccggaagcctatctagtggcgccaagctggccaatcctggggacgcttgctcttcgccaaaccgggtcccgcctccgcgcgccgcgctgacgggtcgttagcggatacggcggccgcaggggcggagtcaagggcctttgcccgccttggcggccggctctacgttccctgttctcgcctgcagctccgccatggctcctaaaggcagctccaaacagcagtctgaggaggacctgctcctgcaggatttcagccgcaatctctcggccaagtcctccgcgctcttcttcggaaacgcgttcatcgtgtctgccatccccatctggttatactggcgaatatggcatatggatcttattcagtctgctgttttgtatagtgtgatgaccctagtaagcacatatttggtagcctttgcatacaagaatgtgaaatttgttctcaagcacaaagtagcacagaagagggaggatgctgtttccaaagaagtgactcgaaaactttctgaagctgataatagaaagatgtctcggaaggagaaagatgaaaggtttgactcctgtttaaagtatggccatcataaaaggggaatcttgtggaagaagaatgaagttgctgattatgaagctacaacattttccatcttctataacaacactctgttcctggtcgtggtcattgttgcttccttcttcatattgaagaacttcaaccccacagtgaactacatattgtccataagtgcttcatcaggactcatcgccctcctgtctactggctccaaatagaccatgtcagcttcaccccctggctttgtgtctatgggtggcctgtggtatatggaaaagtagcagggtggtcagggtgggagacacaagatgtttttatagtctagagcctttaaaaaacccagcagaatgtaattcagtatttgtttattggctgttttttgacagattgttgaaattaaatgaattgaaagggaaactcagagtactaggacgtttattaaaaggaaaaaaatgtcttgcaatgtgctgtaatcacaagaggagaaaataacttgtttccttgatctgtcagaggtcacagtaacctgggccgagctgttattatttattatataatagtagtaggaagttaataactggttctctgtgttccaagcacaatattacaacttcttttgaaccgtaaatatcagaatgaatcctcttcccaggggattgaacagaagcttaatgtttacaagtgtttgaatttgtgatctgaaataacacaaaattaaaaacatgatttctctaattttccaactagaggaagagaaacttgtggaaaagttctttttttttcttttttttttcttaaagaagggcagccaaggtagtaacctaaaaatagtgcccaggcatatgagagttgtcctacgaggttaaagaacacactgttccactgtatggctttggccctgagtggccagggaggtcaacttgaccctgccatgttggtttgacttactaagacacaggaatcattgttttccttgaccagggtctcacaccctggaggaatgttaagtaagagaaagaacctctttcctgaatattgacatgtaaaagaccaaagtaatttttctgaacttctgcaattctgagaactctccaaggaatttacagtgattttagtgcttgtcagcatttttccatgaggactttcatacatttgactctttagttcacaggttcccattgattgtgagcaagatatttatctctttagcccttggggatccagctgagagcaatctcttgcatttttttacccgtgtatgtacagatatcatttcttgtgtatgccatgacttgaaaaagtttgggaagctctttagcaatatcagctaaaaggatatgaaatcacaggtgatagcagttgtcattcagtaatttcctacaagcagcaccccaaaggaaatatagtcctaatctttactatccacttctaaatttaatgtgaatttcatacatgttattagttgttttctttataattttataaaaattattcatcgggagtttaacttccacttccatgctatcggatgtgttgggctccatgcaagaacttggaagaaaaacaggcaggaatgcatttgcataatgacccagatcatcattttctgcaactgagaattatatttcatcattgcttctagaagtctgcaattctttacttttctttggtgcattattatctaggtgccatcactggataatgtggagtgactagagaagtcatatatcactgtaaggtacagttagggtaacactttagaggtttattatttttaaaaaacttttcttgaactcctggccaacatggtgaaaccccgtctctactaaaaataccaaaattagccaggcgtgatggtgggtgcctgtaatctcagctacttgggaggctgaagcaggagaactgcctgaacccaggaggcagaggttgcagtgagtcgagatcgtgctactactgcctgggtggcaagggtgagactccatctcaaaaaagaaacaaaaaaacccaaaaagttttctttactgttggttaaaaaaaaaagccagaccatagtttgactggtggcatggaatttgtgtatcaaataaatgcatttgcttatttgacaaaccatcagtgtccactatttgttaccagagttgggccactatcttttaaaattgctggtgaaaacttgccactagatggcagtgcctgtatagatggggaaaaaattgccaccattcttggtataatacagtgtagcttagatgaggtggtgaaataggggtatcagccgaatattcctaatatagtttctcttgaattaataaactgaagatttgtaggaaaatgagtgagcaaaatttgtttactgttgtgaatttttcctacagcactgtttttaatcttggtgttttccaactttctgtactaatagatacatttctgtgcataagattataaagcatatactcacagttcagtagttttcgttaaggatttactgtgtgagtactttactgtgaggaattgcagaaccttttcccctctactcttgtctaaaagttctgtgtggcacacagagatgcgacctactcaatctgacttagtaaaaccatgctgtagaatttttgtcttaaaaagaccacatacccagcacccatgaaataaaagattcatctgtaattgggattcaaagtgattaaattcctttgttcatactcataaatagcactaaagtgttataacattttcatttacctatttttagttccttcattttaacttaataaaaatcttggattgatattcttttttttttttttttttttttgagacagcgtctcgctctgtcacccaggctggagtacagtggctctatcttggctcactgcgagctccgcctcccaggttcacgccattctcctgcctcagcctgccgagtggctgggactgcaggcgcccgccaccacacccggctaatttttttgtatttttagtagagacggggtttcaccctgttggccaggatggtctcgatctcctgacctcgtgatccacctgcctcggcctcccaaagtgctggaattacaggcgtgagccaccgcgcccggcctagattgatattcttaagcaataaaagtttactggttgtcctatttgccatattattgaaacttggaaaggataatttgaaacaaggtttgaagttaactgaaatatggagattgaatttatactcaattcttgtgaaaagtcttgcttaataagtatgattaaactttgcttcttaaaa

SEQ ID NO: 6687 - DNA, 3377 bp, Homo sapiens
tgtgatcatgtgttctaggtttccttcctaaagtgttttttttaaattggaacacatttcctgtgaatgttttccattttttttggtcttctgtcttgcaaattgtgtttgcagacaatggggctgcacatcattatgattacaccaagtgtcaggaaggaagcagtacattccaaagagatgggctctttattttctcaaaaaaccaatttggagttactcatttttccataacattaaatttcttacaggaactacatattgtccataagtgcttcatcaggactcatcgccctcctgtctactggctccaaatagaccatgtcagcttcaccccctggctttgtgtctatgggtggcctgtggtatatggaaaagtagcagggtggtcagggtgggagacacaagatgtttttatagtctagagcctttaaaaaacccagcagaatgtaattcagtatttgtttattggctgttttttgacagattgttgaaattaaatgaattgaaagggaaactcagagtactaggacgtttattaaaaggaaaaaaatgtcttgcaatgtgctgtaatcacaagaggagaaaataacttgtttccttgatctgtcagaggtcacagtaacctgggccgagctgttattatttattatataatagtagtaggaagttaataactggttctctgtgttccaagcacaatattacaacttcttttgaaccgtaaatatcagaatgaatcctcttcccaggggattgaacagaagcttaatgtttacaagtgtttgaatttgtgatctgaaataacacaaaattaaaaacatgatttctctaattttccaactagaggaagagaaacttgtggaaaagttctttttttttcttttttttttcttaaagaagggcagccaaggtagtaacctaaaaatagtgcccaggcatatgagagttgtcctacgaggttaaagaacacactgttccactgtatggctttggccctgagtggccagggaggtcaacttgaccctgccatgttggtttgacttactaagacacaggaatcattgttttccttgaccagggtctcacaccctggaggaatgttaagtaagagaaagaacctctttcctgaatattgacatgtaaaagaccaaagtaatttttctgaacttctgcaattctgagaactctccaaggaatttacagtgattttagtgcttgtcagcatttttccatgaggactttcatacatttgactctttagttcacaggttcccattgattgtgagcaagatatttatctctttagcccttggggatccagctgagagcaatctcttgcatttttttacccgtgtatgtacagatatcatttcttgtgtatgccatgacttgaaaaagtttgggaagctctttagcaatatcagctaaaaggatatgaaatcacaggtgatagcagttgtcattcagtaatttcctacaagcagcaccccaaaggaaatatagtcctaatctttactatccacttctaaatttaatgtgaatttcatacatgttattagttgttttctttataattttataaaaattattcatcgggagtttaacttccacttccatgctatcggatgtgttgggctccatgcaagaacttggaagaaaaacaggcaggaatgcatttgcataatgacccagatcatcattttctgcaactgagaattatatttcatcattgcttctagaagtctgcaattctttacttttctttggtgcattattatctaggtgccatcactggataatgtggagtgactagagaagtcatatatcactgtaaggtacagttagggtaacactttagaggtttattatttttaaaaaacttttcttgaactcctggccaacatggtgaaaccccgtctctactaaaaataccaaaattagccaggcgtgatggtgggtgcctgtaatctcagctacttgggaggctgaagcaggagaactgcctgaacccaggaggcagaggttgcagtgagtcgagatcgtgctactactgcctgggtggcaagggtgagactccatctcaaaaaagaaacaaaaaaacccaaaaagttttctttactgttggttaaaaaaaaaagccagaccatagtttgactggtggcatggaatttgtgtatcaaataaatgcatttgcttatttgacaaaccatcagtgtccactatttgttaccagagttgggccactatcttttaaaattgctggtgaaaacttgccactagatggcagtgcctgtatagatggggaaaaaattgccaccattcttggtataatacagtgtagcttagatgaggtggtgaaataggggtatcagccgaatattcctaatatagtttctcttgaattaataaactgaagatttgtaggaaaatgagtgagcaaaatttgtttactgttgtgaatttttcctacagcactgtttttaatcttggtgttttccaactttctgtactaatagatacatttctgtgcataagattataaagcatatactcacagttcagtagttttcgttaaggatttactgtgtgagtactttactgtgaggaattgcagaaccttttcccctctactcttgtctaaaagttctgtgtggcacacagagatgcgacctactcaatctgacttagtaaaaccatgctgtagaatttttgtcttaaaaagaccacatacccagcacccatgaaataaaagattcatctgtaattgggattcaaagtgattaaattcctttgttcatactcataaatagcactaaagtgttataacattttcatttacctatttttagttccttcattttaacttaataaaaatcttggattgatattcttttttttttttttttttttttgagacagcgtctcgctctgtcacccaggctggagtacagtggctctatcttggctcactgcgagctccgcctcccaggttcacgccattctcctgcctcagcctgccgagtggctgggactgcaggcgcccgccaccacacccggctaatttttttgtatttttagtagagacggggtttcaccctgttggccaggatggtctcgatctcctgacctcgtgatccacctgcctcggcctcccaaagtgctggaattacaggcgtgagccaccgcgcccggcctagattgatattcttaagcaataaaagtttactggttgtcctatttgccatattattgaaacttggaaaggataatttgaaacaaggtttgaagttaactgaaatatggagattgaatttatactcaattcttgtgaaaagtcttgcttaataagtatgattaaactttgcttcttaaaa

SEQ ID NO: 6688 - DNA, 3406 bp, Homo sapiens
  misc_feature (84)..(84): n is a, c, g, or t
  misc_feature (96)..(96): n is a, c, g, or t
  misc_feature (344)..(344): n is a, c, g, or t
ccaggtagacctaacatcgggagtttaacttccacttccatgctatcggatgtgttgggctccatgcaagaacttggaagaaanacaggcaggaangcatttgcataatgacccagatcatcattttctgcaactgagaattatatttcatcattgcttctagaagtctgcaattctttacttttctttggtgcattattatctaggtgccatcactggataatgtggagtgactagagaagtcatatatcactgtaaggtacagttagggtaacactttagaggtttattatttttaaaaaacttttcttgaactcctggccggcatggtgaagccccgtctntactaaaaatacgcttcaccccctggctttgtgtctatgggtggcctgtggtatatggaaaagtagcagggtggtcagggtgggagacacaagatgtttttatagtctagagcctttaaaaaacccagcagaatgtaattcagtatttgtttattggctgttttttgacagattgttgaaattaaatgaattgaaagggaaactcagagtactaggacgtttattaaaaggaaaaaaatgtcttgcaatgtgctgtaatcacaagaggagaaaataacttgtttccttgatctgtcagaggtcacagtaacctgggccgagctgttattatttattatataatagtagtaggaagttaataactggttctctgtgttccaagcacaatattacaacttcttttgaaccgtaaatatcagaatgaatcctcttcccaggggattgaacagaagcttaatgtttacaagtgtttgaatttgtgatctgaaataacacaaaattaaaaacatgatttctctaattttccaactagaggaagagaaacttgtggaaaagttctttttttttcttttttttttcttaaagaagggcagccaaggtagtaacctaaaaatagtgcccaggcatatgagagttgtcctacgaggttaaagaacacactgttccactgtatggctttggccctgagtggccagggaggtcaacttgaccctgccatgttggtttgacttactaagacacaggaatcattgttttccttgaccagggtctcacaccctggaggaatgttaagtaagagaaagaacctctttcctgaatattgacatgtaaaagaccaaagtaatttttctgaacttctgcaattctgagaactctccaaggaatttacagtgattttagtgcttgtcagcatttttccatgaggactttcatacatttgactctttagttcacaggttcccattgattgtgagcaagatatttatctctttagcccttggggatccagctgagagcaatctcttgcatttttttacccgtgtatgtacagatatcatttcttgtgtatgccatgacttgaaaaagtttgggaagctctttagcaatatcagctaaaaggatatgaaatcacaggtgatagcagttgtcattcagtaatttcctacaagcagcaccccaaaggaaatatagtcctaatctttactatccacttctaaatttaatgtgaatttcatacatgttattagttgttttctttataattttataaaaattattcatcgggagtttaacttccacttccatgctatcggatgtgttgggctccatgcaagaacttggaagaaaaacaggcaggaatgcatttgcataatgacccagatcatcattttctgcaactgagaattatatttcatcattgcttctagaagtctgcaattctttacttttctttggtgcattattatctaggtgccatcactggataatgtggagtgactagagaagtcatatatcactgtaaggtacagttagggtaacactttagaggtttattatttttaaaaaacttttcttgaactcctggccaacatggtgaaaccccgtctctactaaaaataccaaaattagccaggcgtgatggtgggtgcctgtaatctcagctacttgggaggctgaagcaggagaactgcctgaacccaggaggcagaggttgcagtgagtcgagatcgtgctactactgcctgggtggcaagggtgagactccatctcaaaaaagaaacaaaaaaacccaaaaagttttctttactgttggttaaaaaaaaaagccagaccatagtttgactggtggcatggaatttgtgtatcaaataaatgcatttgcttatttgacaaaccatcagtgtccactatttgttaccagagttgggccactatcttttaaaattgctggtgaaaacttgccactagatggcagtgcctgtatagatggggaaaaaattgccaccattcttggtataatacagtgtagcttagatgaggtggtgaaataggggtatcagccgaatattcctaatatagtttctcttgaattaataaactgaagatttgtaggaaaatgagtgagcaaaatttgtttactgttgtgaatttttcctacagcactgtttttaatcttggtgttttccaactttctgtactaatagatacatttctgtgcataagattataaagcatatactcacagttcagtagttttcgttaaggatttactgtgtgagtactttactgtgaggaattgcagaaccttttcccctctactcttgtctaaaagttctgtgtggcacacagagatgcgacctactcaatctgacttagtaaaaccatgctgtagaatttttgtcttaaaaagaccacatacccagcacccatgaaataaaagattcatctgtaattgggattcaaagtgattaaattcctttgttcatactcataaatagcactaaagtgttataacattttcatttacctatttttagttccttcattttaacttaataaaaatcttggattgatattcttttttttttttttttttttttgagacagcgtctcgctctgtcacccaggctggagtacagtggctctatcttggctcactgcgagctccgcctcccaggttcacgccattctcctgcctcagcctgccgagtggctgggactgcaggcgcccgccaccacacccggctaatttttttgtatttttagtagagacggggtttcaccctgttggccaggatggtctcgatctcctgacctcgtgatccacctgcctcggcctcccaaagtgctggaattacaggcgtgagccaccgcgcccggcctagattgatattcttaagcaataaaagtttactggttgtcctatttgccatattattgaaacttggaaaggataatttgaaacaaggtttgaagttaactgaaatatggagattgaatttatactcaattcttgtgaaaagtcttgcttaataagtatgattaaactttgcttcttaaaa

SEQ ID NO: 6689 - DNA, 3105 bp, Homo sapiens
gcggccgcctactactactactgctcgaattcaagcttctaacgatgtacggggagcttcaccccctggctttgtgtctatgggtggcctgtggtatatggaaaagtagcagggtggtcagggtgggagacacaagatgtttttatagtctagagcctttaaaaaacccagcagaatgtaattcagtatttgtttattggctgttttttgacagattgttgaaattaaatgaattgaaagggaaactcagagtactaggacgtttattaaaaggaaaaaaatgtcttgcaatgtgctgtaatcacaagaggagaaaataacttgtttccttgatctgtcagaggtcacagtaacctgggccgagctgttattatttattatataatagtagtaggaagttaataactggttctctgtgttccaagcacaatattacaacttcttttgaaccgtaaatatcagaatgaatcctcttcccaggggattgaacagaagcttaatgtttacaagtgtttgaatttgtgatctgaaataacacaaaattaaaaacatgatttctctaattttccaactagaggaagagaaacttgtggaaaagttctttttttttcttttttttttcttaaagaagggcagccaaggtagtaacctaaaaatagtgcccaggcatatgagagttgtcctacgaggttaaagaacacactgttccactgtatggctttggccctgagtggccagggaggtcaacttgaccctgccatgttggtttgacttactaagacacaggaatcattgttttccttgaccagggtctcacaccctggaggaatgttaagtaagagaaagaacctctttcctgaatattgacatgtaaaagaccaaagtaatttttctgaacttctgcaattctgagaactctccaaggaatttacagtgattttagtgcttgtcagcatttttccatgaggactttcatacatttgactctttagttcacaggttcccattgattgtgagcaagatatttatctctttagcccttggggatccagctgagagcaatctcttgcatttttttacccgtgtatgtacagatatcatttcttgtgtatgccatgacttgaaaaagtttgggaagctctttagcaatatcagctaaaaggatatgaaatcacaggtgatagcagttgtcattcagtaatttcctacaagcagcaccccaaaggaaatatagtcctaatctttactatccacttctaaatttaatgtgaatttcatacatgttattagttgttttctttataattttataaaaattattcatcgggagtttaacttccacttccatgctatcggatgtgttgggctccatgcaagaacttggaagaaaaacaggcaggaatgcatttgcataatgacccagatcatcattttctgcaactgagaattatatttcatcattgcttctagaagtctgcaattctttacttttctttggtgcattattatctaggtgccatcactggataatgtggagtgactagagaagtcatatatcactgtaaggtacagttagggtaacactttagaggtttattatttttaaaaaacttttcttgaactcctggccaacatggtgaaaccccgtctctactaaaaataccaaaattagccaggcgtgatggtgggtgcctgtaatctcagctacttgggaggctgaagcaggagaactgcctgaacccaggaggcagaggttgcagtgagtcgagatcgtgctactactgcctgggtggcaagggtgagactccatctcaaaaaagaaacaaaaaaacccaaaaagttttctttactgttggttaaaaaaaaaagccagaccatagtttgactggtggcatggaatttgtgtatcaaataaatgcatttgcttatttgacaaaccatcagtgtccactatttgttaccagagttgggccactatcttttaaaattgctggtgaaaacttgccactagatggcagtgcctgtatagatggggaaaaaattgccaccattcttggtataatacagtgtagcttagatgaggtggtgaaataggggtatcagccgaatattcctaatatagtttctcttgaattaataaactgaagatttgtaggaaaatgagtgagcaaaatttgtttactgttgtgaatttttcctacagcactgtttttaatcttggtgttttccaactttctgtactaatagatacatttctgtgcataagattataaagcatatactcacagttcagtagttttcgttaaggatttactgtgtgagtactttactgtgaggaattgcagaaccttttcccctctactcttgtctaaaagttctgtgtggcacacagagatgcgacctactcaatctgacttagtaaaaccatgctgtagaatttttgtcttaaaaagaccacatacccagcacccatgaaataaaagattcatctgtaattgggattcaaagtgattaaattcctttgttcatactcataaatagcactaaagtgttataacattttcatttacctatttttagttccttcattttaacttaataaaaatcttggattgatattcttttttttttttttttttttttgagacagcgtctcgctctgtcacccaggctggagtacagtggctctatcttggctcactgcgagctccgcctcccaggttcacgccattctcctgcctcagcctgccgagtggctgggactgcaggcgcccgccaccacacccggctaatttttttgtatttttagtagagacggggtttcaccctgttggccaggatggtctcgatctcctgacctcgtgatccacctgcctcggcctcccaaagtgctggaattacaggcgtgagccaccgcgcccggcctagattgatattcttaagcaataaaagtttactggttgtcctatttgccatattattgaaacttggaaaggataatttgaaacaaggtttgaagttaactgaaatatggagattgaatttatactcaattcttgtgaaaagtcttgcttaataagtatgattaaactttgcttcttaaaa

SEQ ID NO: 6690 - DNA, 1389 bp, Homo sapiens
agacccacaccgcaggtctacgaccctcaggctcttcagctgcaatggcggtaatgatgcgcacgtcataagattcttcaaggtatttaatgaaataaaggatgtgtaaaggagaagggattttacatgagttagctatacctttctcttctttcttcttcaacgtactcagtcctgggtacgcacagagggcactaatggcgtggggccagaagagcttttaattttggaattctgaagaactgagaactcgtgagtctgtcagcagctctgaagtggaatatcaataaagttttgttaattttttttaaagcaccgactaaactacaaatcccttctctctcctccaggtgggtgggtcacgtggcttgtcaggaatccggaagtctggcccgctcgcccaatcacgcccggaagcctatctagtggcgccaagctggccaatcctggggacgcttgctcttcgccaaaccgggtcccgcctccgcgcgccgcgctgacgggtcgttagcggatacggcggccgcaggggcggagtcaagggcctttgcccgccttggcggccggctctacgttccctgttctcgcctgcagctccgccatggctcctaaaggcagctccaaacagcagtctgaggaggacctgctcctgcaggatttcagccgcaatctctcggccaagtcctccgcgctcttcttcggaaacgcgttcatcgtgtctgccatccccatctggttatactggcgaatatggcatatggatcttattcagtctgctgttttgtatagtgtgatgaccctagtaagcacatatttggtagcctttgcatacaagaatgtgaaatttgttctcaagcacaaagtagcacagaagagggaggatgctgtttccaaagaagtgactcgaaaactttctgaagctgataatagaaagatgtctcggaaggagaaagatgaaagaatcttgtggaagaagaatgaagttgctgattatgaagctacaacattttccatcttctataacaacactctgttcctggtcgtggtcattgttgcttccttcttcatattgaagaacttcaaccccacagtgaactacatattgtccataagtgcttcatcaggactcatcgccctcctgtctactggctccaaatagaccatgtcagcttcaccccctggctttgtgtctatgggtggcctgtggtatatggaaaagtagcagggtggtcagggtgggagacacaagatgtttttatagtctagagcctttaaaaaacccagcagaatgtaattcagtatttgtttattggctgttttttgacagattgttgaaattaaatgaattgggatgcgggccgttccctttagagggggggtattcaagac

SEQ ID NO: 6691 - DNA, 2349 bp, Homo sapiens
tgaccctgcattgattaagcacacaaaaatcatggtcatcctgtaaagcgattggtctcacaccctggaggaatgttaagtaagagaaagaacctctttcctgaatattgacatgtaaaagaccaaagtaatttttctgaacttctgcaattctgagaactctccaaggaatttacagtgattttagtgcttgtcagcatttttccatgaggactttcatacatttgactctttagttcacaggttcccattgattgtgagcaagatatttatctctttagcccttggggatccagctgagagcaatctcttgcatttttttacccgtgtatgtacagatatcatttcttgtgtatgccatgacttgaaaaagtttgggaagctctttagcaatatcagctaaaaggatatgaaatcacaggtgatagcagttgtcattcagtaatttcctacaagcagcaccccaaaggaaatatagtcctaatctttactatccacttctaaatttaatgtgaatttcatacatgttattagttgttttctttataattttataaaaattattcatcgggagtttaacttccacttccatgctatcggatgtgttgggctccatgcaagaacttggaagaaaaacaggcaggaatgcatttgcataatgacccagatcatcattttctgcaactgagaattatatttcatcattgcttctagaagtctgcaattctttacttttctttggtgcattattatctaggtgccatcactggataatgtggagtgactagagaagtcatatatcactgtaaggtacagttagggtaacactttagaggtttattatttttaaaaaacttttcttgaactcctggccaacatggtgaaaccccgtctctactaaaaataccaaaattagccaggcgtgatggtgggtgcctgtaatctcagctacttgggaggctgaagcaggagaactgcctgaacccaggaggcagaggttgcagtgagtcgagatcgtgctactactgcctgggtggcaagggtgagactccatctcaaaaaagaaacaaaaaaacccaaaaagttttctttactgttggttaaaaaaaaaagccagaccatagtttgactggtggcatggaatttgtgtatcaaataaatgcatttgcttatttgacaaaccatcagtgtccactatttgttaccagagttgggccactatcttttaaaattgctggtgaaaacttgccactagatggcagtgcctgtatagatggggaaaaaattgccaccattcttggtataatacagtgtagcttagatgaggtggtgaaataggggtatcagccgaatattcctaatatagtttctcttgaattaataaactgaagatttgtaggaaaatgagtgagcaaaatttgtttactgttgtgaatttttcctacagcactgtttttaatcttggtgttttccaactttctgtactaatagatacatttctgtgcataagattataaagcatatactcacagttcagtagttttcgttaaggatttactgtgtgagtactttactgtgaggaattgcagaaccttttcccctctactcttgtctaaaagttctgtgtggcacacagagatgcgacctactcaatctgacttagtaaaaccatgctgtagaatttttgtcttaaaaagaccacatacccagcacccatgaaataaaagattcatctgtaattgggattcaaagtgattaaattcctttgttcatactcataaatagcactaaagtgttataacattttcatttacctatttttagttccttcattttaacttaataaaaatcttggattgatattcttttttttttttttttttttttgagacagcgtctcgctctgtcacccaggctggagtacagtggctctatcttggctcactgcgagctccgcctcccaggttcacgccattctcctgcctcagcctgccgagtggctgggactgcaggcgcccgccaccacacccggctaatttttttgtatttttagtagagacggggtttcaccctgttggccaggatggtctcgatctcctgacctcgtgatccacctgcctcggcctcccaaagtgctggaattacaggcgtgagccaccgcgcccggcctagattgatattcttaagcaataaaagtttactggttgtcctatttgccatattattgaaacttggaaaggataatttgaaacaaggtttgaagttaactgaaatatggagattgaatttatactcaattcttgtgaaaagtcttgcttaataagtatgattaaactttgcttcttaaaa

SEQ ID NO: 6692 - DNA, 2095 bp, Homo sapiens
acccctcgcgaacgtgttatccatagaggagacaagttagacctgagagcaatctcttgcatttttttacccgtgtatgtacagatatcatttcttgtgtatgccatgacttgaaaaagtttgggaagctctttagcaatatcagctaaaaggatatgaaatcacaggtgatagcagttgtcattcagtaatttcctacaagcagcaccccaaaggaaatatagtcctaatctttactatccacttctaaatttaatgtgaatttcatacatgttattagttgttttctttataattttataaaaattattcatcgggagtttaacttccacttccatgctatcggatgtgttgggctccatgcaagaacttggaagaaaaacaggcaggaatgcatttgcataatgacccagatcatcattttctgcaactgagaattatatttcatcattgcttctagaagtctgcaattctttacttttctttggtgcattattatctaggtgccatcactggataatgtggagtgactagagaagtcatatatcactgtaaggtacagttagggtaacactttagaggtttattatttttaaaaaacttttcttgaactcctggccaacatggtgaaaccccgtctctactaaaaataccaaaattagccaggcgtgatggtgggtgcctgtaatctcagctacttgggaggctgaagcaggagaactgcctgaacccaggaggcagaggttgcagtgagtcgagatcgtgctactactgcctgggtggcaagggtgagactccatctcaaaaaagaaacaaaaaaacccaaaaagttttctttactgttggttaaaaaaaaaagccagaccatagtttgactggtggcatggaatttgtgtatcaaataaatgcatttgcttatttgacaaaccatcagtgtccactatttgttaccagagttgggccactatcttttaaaattgctggtgaaaacttgccactagatggcagtgcctgtatagatggggaaaaaattgccaccattcttggtataatacagtgtagcttagatgaggtggtgaaataggggtatcagccgaatattcctaatatagtttctcttgaattaataaactgaagatttgtaggaaaatgagtgagcaaaatttgtttactgttgtgaatttttcctacagcactgtttttaatcttggtgttttccaactttctgtactaatagatacatttctgtgcataagattataaagcatatactcacagttcagtagttttcgttaaggatttactgtgtgagtactttactgtgaggaattgcagaaccttttcccctctactcttgtctaaaagttctgtgtggcacacagagatgcgacctactcaatctgacttagtaaaaccatgctgtagaatttttgtcttaaaaagaccacatacccagcacccatgaaataaaagattcatctgtaattgggattcaaagtgattaaattcctttgttcatactcataaatagcactaaagtgttataacattttcatttacctatttttagttccttcattttaacttaataaaaatcttggattgatattcttttttttttttttttttttttgagacagcgtctcgctctgtcacccaggctggagtacagtggctctatcttggctcactgcgagctccgcctcccaggttcacgccattctcctgcctcagcctgccgagtggctgggactgcaggcgcccgccaccacacccggctaatttttttgtatttttagtagagacggggtttcaccctgttggccaggatggtctcgatctcctgacctcgtgatccacctgcctcggcctcccaaagtgctggaattacaggcgtgagccaccgcgcccggcctagattgatattcttaagcaataaaagtttactggttgtcctatttgccatattattgaaacttggaaaggataatttgaaacaaggtttgaagttaactgaaatatggagattgaatttatactcaattcttgtgaaaagtcttgcttaataagtatgattaaactttgcttcttaaaa

SEQ ID NO: 6693 - DNA, 1676 bp, Homo sapiens
tgagccggctaccctggtagactaaccatcattgcttctagaagtctgcaattctttacttttctttggtgcattattatctaggtgccatcactggataatgtggagtgactagagaagtcatatatcactgtaaggtacagttagggtaacactttagaggtttattatttttaaaaaacttttcttgaactcctggccaacatggtgaaaccccgtctctactaaaaataccaaaattagccaggcgtgatggtgggtgcctgtaatctcagctacttgggaggctgaagcaggagaactgcctgaacccaggaggcagaggttgcagtgagtcgagatcgtgctactactgcctgggtggcaagggtgagactccatctcaaaaaagaaacaaaaaaacccaaaaagttttctttactgttggttaaaaaaaaaagccagaccatagtttgactggtggcatggaatttgtgtatcaaataaatgcatttgcttatttgacaaaccatcagtgtccactatttgttaccagagttgggccactatcttttaaaattgctggtgaaaacttgccactagatggcagtgcctgtatagatggggaaaaaattgccaccattcttggtataatacagtgtagcttagatgaggtggtgaaataggggtatcagccgaatattcctaatatagtttctcttgaattaataaactgaagatttgtaggaaaatgagtgagcaaaatttgtttactgttgtgaatttttcctacagcactgtttttaatcttggtgttttccaactttctgtactaatagatacatttctgtgcataagattataaagcatatactcacagttcagtagttttcgttaaggatttactgtgtgagtactttactgtgaggaattgcagaaccttttcccctctactcttgtctaaaagttctgtgtggcacacagagatgcgacctactcaatctgacttagtaaaaccatgctgtagaatttttgtcttaaaaagaccacatacccagcacccatgaaataaaagattcatctgtaattgggattcaaagtgattaaattcctttgttcatactcataaatagcactaaagtgttataacattttcatttacctatttttagttccttcattttaacttaataaaaatcttggattgatattcttttttttttttttttttttttgagacagcgtctcgctctgtcacccaggctggagtacagtggctctatcttggctcactgcgagctccgcctcccaggttcacgccattctcctgcctcagcctgccgagtggctgggactgcaggcgcccgccaccacacccggctaatttttttgtatttttagtagagacggggtttcaccctgttggccaggatggtctcgatctcctgacctcgtgatccacctgcctcggcctcccaaagtgctggaattacaggcgtgagccaccgcgcccggcctagattgatattcttaagcaataaaagtttactggttgtcctatttgccatattattgaaacttggaaaggataatttgaaacaaggtttgaagttaactgaaatatggagattgaatttatactcaattcttgtgaaaagtcttgcttaataagtatgattaaactttgcttcttaaaa

SEQ ID NO: 6694 - DNA, 1595 bp, Homo sapiens
atctatgtgacataaaactggaaagcggctgggcgcgtggctcatgcctgtaatcccagcactttgggaggccaaggtgggcggatcgcctgaggtcaggagttcgagaccatcctggccaacatggtgaaaccccgtctctactaaaaataccaaaattagccaggcgtgatggtgggtgcctgtaatctcagctacttgggaggctgaagcaggagaactgcctgaacccaggaggcagaggttgcagtgagtcgagatcgtgctactactgcctgggtggcaagggtgagactccatctcaaaaaagaaacaaaaaaacccaaaaagttttctttactgttggttaaaaaaaaaagccagaccatagtttgactggtggcatggaatttgtgtatcaaataaatgcatttgcttatttgacaaaccatcagtgtccactatttgttaccagagttgggccactatcttttaaaattgctggtgaaaacttgccactagatggcagtgcctgtatagatggggaaaaaattgccaccattcttggtataatacagtgtagcttagatgaggtggtgaaataggggtatcagccgaatattcctaatatagtttctcttgaattaataaactgaagatttgtaggaaaatgagtgagcaaaatttgtttactgttgtgaatttttcctacagcactgtttttaatcttggtgttttccaactttctgtactaatagatacatttctgtgcataagattataaagcatatactcacagttcagtagttttcgttaaggatttactgtgtgagtactttactgtgaggaattgcagaaccttttcccctctactcttgtctaaaagttctgtgtggcacacagagatgcgacctactcaatctgacttagtaaaaccatgctgtagaatttttgtcttaaaaagaccacatacccagcacccatgaaataaaagattcatctgtaattgggattcaaagtgattaaattcctttgttcatactcataaatagcactaaagtgttataacattttcatttacctatttttagttccttcattttaacttaataaaaatcttggattgatattcttttttttttttttttttttttgagacagcgtctcgctctgtcacccaggctggagtacagtggctctatcttggctcactgcgagctccgcctcccaggttcacgccattctcctgcctcagcctgccgagtggctgggactgcaggcgcccgccaccacacccggctaatttttttgtatttttagtagagacggggtttcaccctgttggccaggatggtctcgatctcctgacctcgtgatccacctgcctcggcctcccaaagtgctggaattacaggcgtgagccaccgcgcccggcctagattgatattcttaagcaataaaagtttactggttgtcctatttgccatattattgaaacttggaaaggataatttgaaacaaggtttgaagttaactgaaatatggagattgaatttatactcaattcttgtgaaaagtcttgcttaataagtatgattaaactttgcttcttaaaa

SEQ ID NO: 6695 - DNA, 1647 bp, Homo sapiens
agacccacaccgcaggtctacgaccctcaggctcttcagctgcaatggcggtaatgatgcgcacgtcataagattcttcaaggtatttaatgaaataaaggatgtgtaaaggagaagggattttacatgagttagctatacctttctcttctttcttcttcaacgtactcagtcctgggtacgcacagagggcactaatggcgtggggccagaagagcttttaattttggaattctgaagaactgagaactcgtgagtctgtcagcagctctgaagtggaatatcaataaagttttgttaattttttttaaagcaccgactaaactacaaatcccttctctctcctccaggtgggtgggtcacgtggcttgtcaggaatccggaagtctggcccgctcgcccaatcacgcccggaagcctatctagtggcgccaagctggccaatcctggggacgcttgctcttcgccaaaccgggtcccgcctccgcgcgccgcgctgacgggtcgttagcggatacggcggccgcaggggcggagtcaagggcctttgcccgccttggcggccggctctacgttccctgttctcgcctgcagctccgccatggctcctaaaggcagctccaaacagcagtctgaggaggacctgctcctgcaggatttcagccgcaatctctcggccaagtcctccgcgctcttcttcggaaacgcgttcatcgtgtctgccatccccatctggttatactggcgaatatggcatatggatcttattcagtctgctgttttgtatagtgtgatgaccctagtaagcacatatttggtagcctttgcatacaagaatgtgaaatttgttctcaagcacaaagtagcacagaagagggaggatgctgtttccaaagaagtgactcgaaaactttctgaagctgataatagaaagatgtctcggaaggagaaagatgaaagaatcttgtggaagaagaatgaagttgctgattatgaagctacaacattttccatcttctataacaacactctgttcctggtcgtggtcattgttgcttccttcttcatattgaagaacttcaaccccacagtgtatccttttcaaggttgattatcttttttagaagtcaagaaacagtagttcattttggttttgacttgtctggatattttagtggaaagaaaaactgctctgggagtcagtccattaaatagtgctgactttagataactttctggacatttaaaataacagctattggtttaagattcttttaagtttatgaattatgactgtatgataaagtattacaaagtagtctatgggaatctgtgtccttgcctccttaaaaaaaagctccaaagagccaaagcaaacctgtcatttttgatagcttctgaaataataagcccctgtacctgttatttttgggctctgggggttgggtggatggccaatgcagttaaataggttcattccagtgtatcttaatagtgtttcaagctgctgttaagttgagcttttgggcaagaatcagtcttctcttattaatttattaaagatgttatccaggaatgtgcagccaagattttaacaattggtgattatgatgtaataaaatatcagataccctccaacgtgtacct

SEQ ID NO: 6696 - DNA, 306 bp, Homo sapiens
gcctgcagctccgccatggctcctaaaggcagctccaaacagcagtctgaggaggacctgctcctgcaggatttcagccgcaatctctcggccaagtcctccgcgctcttcttcggaaacgcgttcatcgtgtctgccatccccatctgtgagtgctgggagcgaggcgggttaggcaggccgccggctagtcgggctgggcggggacgtggcaggacccggcgagcagggaaggcgtgggtgccggccgggggtcggcaatctctccagctcccctgagctcggggaggcacggagcctcttctt

SEQ ID NO: 6697 - DNA, 4218 bp, Homo sapiens
agacccacaccgcaggtctacgaccctcaggctcttcagctgcaatggcggtaatgatgcgcacgtcataagattcttcaaggtatttaatgaaataaaggatgtgtaaaggagaagggattttacatgagttagctatacctttctcttctttcttcttcaacgtactcagtcctgggtacgcacagagggcactaatggcgtggggccagaagagcttttaattttggaattctgaagaactgagaactcgtgagtctgtcagcagctctgaagtggaatatcaataaagttttgttaattttttttaaagcaccgactaaactacaaatcccttctctctcctccaggtgggtgggtcacgtggcttgtcaggaatccggaagtctggcccgctcgcccaatcacgcccggaagcctatctagtggcgccaagctggccaatcctggggacgcttgctcttcgccaaaccgggtcccgcctccgcgcgccgcgctgacgggtcgttagcggatacggcggccgcaggggcggagtcaagggcctttgcccgccttggcggccggctctacgttccctgttctcgcctgcagctccgccatggctcctaaaggcagctccaaacagcagtctgaggaggacctgctcctgcaggatttcagccgcaatctctcggccaagtcctccgcgctcttcttcggaaacgcgttcatcgtgtctgccatccccatctggttatactggcgaatatggcatatggatcttattcagtctgctgttttgtatagtgtgatgaccctagtaagcacatatttggtagcctttgcatacaagaatgtgaaatttgttctcaagcacaaagtagcacagaagagggaggatgctgtttccaaagaagtgactcgaaaactttctgaagctgataatagaaagatgtctcggaaggagaaagatgaaagaatcttgtggaagaagaatgaagttgctgattatgaagctacaacattttccatcttctataacaacactctgttcctggtcgtggtcattgttgcttccttcttcatattgaagaacttcaaccccacagtgaactacatattgtccataagtgcttcatcaggactcatcgccctcctgtctactggctccaaatagaccatgtcagcttcaccccctggctttgtgtctatgggtggcctgtggtatatggaaaagtagcagggtggtcagggtgggagacacaagatgtttttatagtctagagcctttaaaaaacccagcagaatgtaattcagtatttgtttattggctgttttttgacagattgttgaaattaaatgaattgaaagggaaactcagagtactaggacgtttattaaaaggaaaaaaatgtcttgcaatgtgctgtaatcacaagaggagaaaataacttgtttccttgatctgtcagaggtcacagtaacctgggccgagctgttattatttattatataatagtagtaggaagttaataactggttctctgtgttccaagcacaatattacaacttcttttgaaccgtaaatatcagaatgaatcctcttcccaggggattgaacagaagcttaatgtttacaagtgtttgaatttgtgatctgaaataacacaaaattaaaaacatgatttctctaattttccaactagaggaagagaaacttgtggaaaagttctttttttttcttttttttttcttaaagaagggcagccaaggtagtaacctaaaaatagtgcccaggcatatgagagttgtcctacgaggttaaagaacacactgttccactgtatggctttggccctgagtggccagggaggtcaacttgaccctgccatgttggtttgacttactaagacacaggaatcattgttttccttgaccagggtctcacaccctggaggaatgttaagtaagagaaagaacctctttcctgaatattgacatgtaaaagaccaaagtaatttttctgaacttctgcaattctgagaactctccaaggaatttacagtgattttagtgcttgtcagcatttttccatgaggactttcatacatttgactctttagttcacaggttcccattgattgtgagcaagatatttatctctttagcccttggggatccagctgagagcaatctcttgcatttttttacccgtgtatgtacagatatcatttcttgtgtatgccatgacttgaaaaagtttgggaagctctttagcaatatcagctaaaaggatatgaaatcacaggtgatagcagttgtcattcagtaatttcctacaagcagcaccccaaaggaaatatagtcctaatctttactatccacttctaaatttaatgtgaatttcatacatgttattagttgttttctttataattttataaaaattattcatcgggagtttaacttccacttccatgctatcggatgtgttgggctccatgcaagaacttggaagaaaaacaggcaggaatgcatttgcataatgacccagatcatcattttctgcaactgagaattatatttcatcattgcttctagaagtctgcaattctttacttttctttggtgcattattatctaggtgccatcactggataatgtggagtgactagagaagtcatatatcactgtaaggtacagttagggtaacactttagaggtttattatttttaaaaaacttttcttgaactcctggccaacatggtgaaaccccgtctctactaaaaataccaaaattagccaggcgtgatggtgggtgcctgtaatctcagctacttgggaggctgaagcaggagaactgcctgaacccaggaggcagaggttgcagtgagtcgagatcgtgctactactgcctgggtggcaagggtgagactccatctcaaaaaagaaacaaaaaaacccaaaaagttttctttactgttggttaaaaaaaaaagccagaccatagtttgactggtggcatggaatttgtgtatcaaataaatgcatttgcttatttgacaaaccatcagtgtccactatttgttaccagagttgggccactatcttttaaaattgctggtgaaaacttgccactagatggcagtgcctgtatagatggggaaaaaattgccaccattcttggtataatacagtgtagcttagatgaggtggtgaaataggggtatcagccgaatattcctaatatagtttctcttgaattaataaactgaagatttgtaggaaaatgagtgagcaaaatttgtttactgttgtgaatttttcctacagcactgtttttaatcttggtgttttccaactttctgtactaatagatacatttctgtgcataagattataaagcatatactcacagttcagtagttttcgttaaggatttactgtgtgagtactttactgtgaggaattgcagaaccttttcccctctactcttgtctaaaagttctgtgtggcacacagagatgcgacctactcaatctgacttagtaaaaccatgctgtagaatttttgtcttaaaaagaccacatacccagcacccatgaaataaaagattcatctgtaattgggattcaaagtgattaaattcctttgttcatactcataaatagcactaaagtgttataacattttcatttacctatttttagttccttcattttaacttaataaaaatcttggattgatattcttttttttttttttttttttttgagacagcgtctcgctctgtcacccaggctggagtacagtggctctatcttggctcactgcgagctccgcctcccaggttcacgccattctcctgcctcagcctgccgagtggctgggactgcaggcgcccgccaccacacccggctaatttttttgtatttttagtagagacggggtttcaccctgttggccaggatggtctcgatctcctgacctcgtgatccacctgcctcggcctcccaaagtgctggaattacaggcgtgagccaccgcgcccggcctagattgatattcttaagcaataaaagtttactggttgtcctatttgccatattattgaaacttggaaaggataatttgaaacaaggtttgaagttaactgaaatatggagattgaatttatactcaattcttgtgaaaagtcttgcttaataagtatgattaaactttgcttcttaaaa

SEQ ID NO: 6698 - DNA, 4192 bp, Homo sapiens
agacccacaccgcaggtctacgaccctcaggctcttcagctgcaatggcggtaatgatgcgcacgtcataagattcttcaaggtatttaatgaaataaaggatgtgtaaaggagaagggattttacatgagttagctatacctttctcttctttcttcttcaacgtactcagtcctgggtacgcacagagggcactaatggcgtggggccagaagagcttttaattttggaattctgaagaactgagaactcgtgagtctgtcagcagctctgaagtggaatatcaataaagttttgttaattttttttaaagcaccgactaaactacaaatcccttctctctcctccaggtgggtgggtcacgtggcttgtcaggaatccggaagtctggcccgctcgcccaatcacgcccggaagcctatctagtggcgccaagctggccaatcctggggacgcttgctcttcgccaaaccgggtcccgcctccgcgcgccgcgctgacgggtcgttagcggatacggcggccgcaggggcggagtcaagggcctttgcccgccttggcggccggctctacgttccctgttctcgcctgcagctccgccatggctcctaaaggcagctccaaacagcagtctgaggaggacctgctcctgcaggatttcagccgcaatctctcggccaagtcctccgcgctcttcttcggaaacgcgttcatcgtgtctgccatccccatctggttatactggcgaatatggcatatggatcttattcagtctgctgttttgtatagtgtgatgaccctagtaagcacatatttggtagcctttgcatacaagaatgtgaaatttgttctcaagcacaaagtagcacagaagagggaggatgctgtttccaaagaagtgactcgaaaactttctgaagctgataatagaaagatgtctcggaaggagaaagatgaaagaatcttgtggaagaagaatgaagttgctgattatgaagctacaacattttccatcttctataacaacactctgttcctggtcgtggtcattgttgcttccttcttcatattgaagaacttcaaccccacagtgaactacatattgtccataagtgcttcatcaggactcatcgccctcctgtctactggctccaaatagaccatgtcagcttcaccccctggctttgtgtctatgggtggcctgtggtatatggaaaagtagcagggtggtcagggtgggagacacaagatgtttttatagtctagagcctttaaaaaacccagcagaatgtaattcagtatttgtttattggctgttttttgacagattgttgaaattaaatgaattgaaagggaaactcagagtactaggacgtttattaaaaggaaaaaaatgtcttgcaatgtgctgtaatcacaagaggagaaaataacttgtttccttgatctgtcagaggtcacagtaacctgggccgagctgttattatttattatataatagtagtaggaagttaataactggttctctgtgttccaagcacaatattacaacttcttttgaaccgtaaatatcagaatgaatcctcttcccaggggattgaacagaagcttaatgtttacaagtgtttgaatttgtgatctgaaataacacaaaattaaaaacatgatttctctaattttccaactagaggaagagaaacttgtggaaaagttctttttttttcttttttttttcttaaagaagggcagccaaggtagtaacctaaaaatagtgcccaggcatatgagagttgtcctacgaggttaaagaacacactgttccactgtatggctttggccctgagtggccagggaggtcaacttgaccctgccatgttggtttgacttactaagacacaggaatcattgttttccttgaccagggtctcacaccctggaggaatgttaagtaagagaaagaacctctttcctgaatattgacatgtaaaagaccaaagtaatttttctgaacttctgcaattctgagaactctccaaggaatttacagtgattttagtgcttgtcagcatttttccatgaggactttcatacatttgactctttagttcacaggttcccattgattgtgagcaagatatttatctctttagcccttggggatccagctgagagcaatctcttgcatttttttacccgtgtatgtacagatatcatttcttgtgtatgccatgacttgaaaaagtttgggaagctctttagcaatatcagctaaaaggatatgaaatcacaggtgatagcagttgtcattcagtaatttcctacaagcagcaccccaaaggaaatatagtcctaatctttactatccacttctaaatttaatgtgaatttcatacatgttattagttgttttctttataattttataaaaattattcatcgggagtttaacttccacttccatgctatcggatgtgttgggctccatgcaagaacttggaagaaaaacaggcaggaatgcatttgcataatgacccagatcatcattttctgcaactgagaattatatttcatcattgcttctagaagtctgcaattctttacttttctttggtgcattattatctaggtgccatcactggataatgtggagtgactagagaagtcatatatcactgtaaggtacagttagggtaacactttagaggtttattatttttaaaaaacttttcttgaactcctggccaacatggtgaaaccccgtctctactaaaaataccaaaattagccaggcgtgatggtgggtgcctgtaatctcagctacttgggaggctgaagcaggagaactgcctgaacccaggaggcagaggttgcagtgagtcgagatcgtgctactactgcctgggtggcaagggtgagactccatctcaaaaaagaaacaaaaaaacccaaaaagttttctttactgttggttaaaaaaaaaagccagaccatagtttgactggtggcatggaatttgtgtatcaaataaatgcatttgcttatttgacaaaccatcagtgtccactatttgttaccagagttgggccactatcttttaaaattgctggtgaaaacttgccactagatggcagtgcctgtatagatggggaaaaaattgccaccattcttggtataatacagtgtagcttagatgaggtggtgaaataggggtatcagccgaatattcctaatatagtttctcttgaattaataaactgaagatttgtaggaaaatgagtgagcaaaatttgtttactgttgtgaatttttcctacagcactgtttttaatcttggtgttttccaactttctgtactaatagatacatttctgtgcataagattataaagcatatactcacagttcagtagttttcgttaaggatttactgtgtgagtactttactgtgaggaattgcagaaccttttcccctctactcttgtctaaaagttctgtgtggcacacagagatgcgacctactcaatctgacttagtaaaaccatgctgtagaatttttgtcttaaaaagaccacatacccagcacccatgaaataaaagattcatctgtaattgggattcaaagtgattaaattcctttgttcatactcataaatagcactaaagtgttataacattttcatttacctatttttagttccttcattttaacttaataaaaatcttggattgatattcttttttttttttttttttttttgagacagcgtctcgctctgtcacccaggctggagtacagtggctctatcttggctcactgcgagctccgcctcccaggttcacgccattctcctgcctcagcctgccgagtggctgggactgcaggcgccgtatttttagtagagacggggtttcaccctgttggccaggatggtctcgatctcctgacctcgtgatccacctgcctcggcctcccaaagtgctggaattacaggcgtgagccaccgcgcccggcctagattgatattcttaagcaataaaagtttactggttgtcctatttgccatattattgaaacttggaaaggataatttgaaacaaggtttgaagttaactgaaatatggagattgaatttatactcaattcttgtgaaaagtcttgcttaataagtatgattaaactttgcttcttaaaa

SEQ ID NO: 6699 - DNA, 4248 bp, Homo sapiens
agacccacaccgcaggtctacgaccctcaggctcttcagctgcaatggcggtaatgatgcgcacgtcataagattcttcaaggtatttaatgaaataaaggatgtgtaaaggagaagggattttacatgagttagctatacctttctcttctttcttcttcaacgtactcagtcctgggtacgcacagagggcactaatggcgtggggccagaagagcttttaattttggaattctgaagaactgagaactcgtgagtctgtcagcagctctgaagtggaatatcaataaagttttgttaattttttttaaagcaccgactaaactacaaatcccttctctctcctccaggtgggtgggtcacgtggcttgtcaggaatccggaagtctggcccgctcgcccaatcacgcccggaagcctatctagtggcgccaagctggccaatcctggggacgcttgctcttcgccaaaccgggtcccgcctccgcgcgccgcgctgacgggtcgttagcggatacggcggccgcaggggcggagtcaagggcctttgcccgccttggcggccggctctacgttccctgttctcgcctgcagctccgccatggctcctaaaggcagctccaaacagcagtctgaggaggacctgctcctgcaggatttcagccgcaatctctcggccaagtcctccgcgctcttcttcggaaacgcgttcatcgtgtctgccatccccatctggttatactggcgaatatggcatatggatcttattcagtctgctgttttgtatagtgtgatgaccctagtaagcacatatttggtagcctttgcatacaagaatgtgaaatttgttctcaagcacaaagtagcacagaagagggaggatgctgtttccaaagaagtgactcgaaaactttctgaagctgataatagaaagatgtctcggaaggagaaagatgaaagaatcttgtggaagaagaatgaagttgctgattatgaagctacaacattttccatcttctataacaacactctgttcctggtcgtggtcattgttgcttccttcttcatattgaagaacttcaaccccacagtgaactacatattgtccataagtgcttcatcaggactcatcgccctcctgtctactggctccaaatagaccatgtcagcttcaccccctggctttgtgtctatgggtggcctgtggtatatggaaaagtagcagggtggtcagggtgggagacacaagatgtttttatagtctagagcctttaaaaaacccagcagaatgtaattcagtatttgtttattggctgttttttgacagattgttgaaattaaatgaattgaaagggaaactcagagtactaggacgtttattaaaaggaaaaaaatgtcttgcaatgtgctgtaatcacaagaggagaaaataacttgtttccttgatctgtcagaggtcacagtaacctgggccgagctgttattatttattatataatagtagtaggaagttaataactggttctctgtgttccaagcacaatattacaacttcttttgaaccgtaaatatcagaatgaatcctcttcccaggggattgaacagaagcttaatgtttacaagtgtttgaatttgtgatctgaaataacacaaaattaaaaacatgatttctctaattttccaactagaggaagagaaacttgtggaaaagttctttttttttcttttttttttcttaaagaagggcagccaaggtagtaacctaaaaatagtgcccaggcatatgagagttgtcctacgaggttaaagaacacactgttccactgtatggctttggccctgagtggccagggaggtcaacttgaccctgccatgttggtttgacttactaagacacaggaatcattgttttccttgaccagggtctcacaccctggaggaatgttaagtaagagaaagaacctctttcctgaatattgacatgtaaaagaccaaagtaatttttctgaacttctgcaattctgagaactctccaaggaatttacagtgattttagtgcttgtcagcatttttccatgaggactttcatacatttgactctttagttcacaggttcccattgattgtgagcaagatatttatctctttagcccttggggatccagctgagagcaatctcttgcatttttttacccgtgtatgtacagatatcatttcttgtgtatgccatgacttgaaaaagtttgggaagctctttagcaatatcagctaaaaggatatgaaatcacaggtgatagcagttgtcattcagtaatttcctacaagcagcaccccaaaggaaatatagtcctaatctttactatccacttctaaatttaatgtgaatttcatacatgttattagttgttttctttataattttataaaaattattcatcgggagtttaacttccacttccatgctatcggatgtgttgggctccatgcaagaacttggaagaaaaacaggcaggaatgcatttgcataatgacccagatcatcattttctgcaactgagaattatatttcatcattgcttctagaagtctgcaattctttacttttctttggtgcattattatctaggtgccatcactggataatgtggagtgactagagaagtcatatatcactgtaaggtacagttagggtaacactttagaggtttattatttttaaaaaacttttcttgaactcctggccaacatggtgaaaccccgtctctactaaaaataccaaaattagccaggcgtgatggtgggtgcctgtaatctcagctacttgggaggctgaagcaggagaactgcctgaacccaggaggcagaggttgcagtgagtcgagatcgtgctactactgcctgggtggcaagggtgagactccatctcaaaaaagaaacaaaaaaacccaaaaagttttctttactgttggttaaaaaaaaaagccagaccatagtttgactggtggcatggaatttgtgtatcaaataaatgcatttgcttatttgacaaaccatcagtgtccactatttgttaccagagttgggccactatcttttaaaattgctggtgaaaacttgccactagatggcagtgcctgtatagatggggaaaaaattgccaccattcttggtataatacagtgtagcttagatgaggtggtgaaataggggtatcagccgaatattcctaatatagtttctcttgaattaataaactgaagatttgtaggaaaatgagtgagcaaaatttgtttactgttgtgaatttttcctacagcactgtttttaatcttggtgttttccaactttctgtactaatagatacatttctgtgcataagattataaagcatatactcacagttcagtagttttcgttaaggatttactgtgtgagtactttactgtgaggaattgcagaaccttttcccctctactcttgtctaaaagttctgtgtggcacacagagatgcgacctactcaatctgacttagtaaaaccatgctgtagaatttttgtcttaaaaagaccacatacccagcacccatgaaataaaagattcatctgtaattgggattcaaagtgattaaattcctttgttcatactcataaatagcactaaagtgttataacattttcatttacctatttttagttccttcattttaacttaataaaaatcttggattgatattcttttttttttttttttttttttgagacagcgtctcgctctgtcacccaggctggagtacagtggctctatcttggctcactgcgagctccgcctcccaggttcacgccattctcctgcctcagcctgccgagtggctgggactgcaggcgcccgccaccacacccggctaatttttttgtatttttagtagagacggggtttcaccctgttggccaggatggtctcgatctcctgacctcgtgatccacctgcctcggcctcccaaagtgctggaattacaggcgtgagccaccgcgcccggcctagattgatattcttaagcaataaaagtttactggttgtcctatttgccatattattgaaacttggaaaggataatttgaaacaaggtttgaagttaactgaaatatggagattgaatttatactcaattcttgtgaaaagtcttgcttaataagtatgattaaactttgcttcttaaaaaaaaaaaacacaagggttcccgccctcaat

SEQ ID NO: 6700 - DNA, 3567 bp, Homo sapiens
agacccacaccgcaggtctacgaccctcaggctcttcagctgcaatggcggtaatgatgcgcacgtcataagattcttcaaggtatttaatgaaataaaggatgtgtaaaggagaagggattttacatgagttagctatacctttctcttctttcttcttcaacgtactcagtcctgggtacgcacagagggcactaatggcgtggggccagaagagcttttaattttggaattctgaagaactgagaactcgtgagtctgtcagcagctctgaagtggaatatcaataaagttttgttaattttttttaaagcaccgactaaactacaaatcccttctctctcctccaggtgggtgggtcacgtggcttgtcaggaatccggaagtctggcccgctcgcccaatcacgcccggaagcctatctagtggcgccaagctggccaatcctggggacgcttgctcttcgccaaaccgggtcccgcctccgcgcgccgcgctgacgggtcgttagcggatacggcggccgcaggggcggagtcaagggcctttgcccgccttggcggccggctctacgttccctgttctcgcctgcagctccgccatggctcctaaaggcagctccaaacagcagtctgaggaggacctgctcctgcaggatttcagccgcaatctctcggccaagtcctccgcgctcttcttcggaaacgcgttcatcgtgtctgccatccccatctggttatactggcgaatatggcatatggatcttattcagtctgctgttttgtatagtgtgatgaccctagtaagcacatatttggtagcctttgcatacaagaatgtgaaatttgttctcaagcacaaagtagcacagaagagggaggatgctgtttccaaagaagtgactcgaaaactttctgaagctgataatagaaagatgtctcggaaggagaaagatgaaagaatcttgtggaagaagaatgaagttgctgattatgaagctacaacattttccatcttctataacaacactctgttcctggtcgtggtcattgttgcttccttcttcatattgaagaacttcaaccccacagtgaactacatattgtccataagtgcttcatcaggactcatcgccctcctgtctactggctccaaatagaccatgtcagcttcaccccctggctttgtgtctatgggtggcctgtggtatatggaaaagtagcagggtggtcagggtgggagacacaagatgtttttatagtctagagcctttaaaaaacccagcagaatgtaattcagtatttgtttattggctgttttttgacagattgttgaaattaaatgaattgaaagggaaactcagagtactaggacgtttattaaaaggaaaaaaatgtcttgcaatgtgctgtaatcacaagaggagaaaataacttgtttccttgatctgtcagaggtcacagtaacctgggccgagctgttattatttattatataatagtagtaggaagttaataactggttctctgtgttccaagcacaatattacaacttcttttgaaccgtaaatatcagaatgaatcctcttcccaggggattgaacagaagcttaatgtttacaagtgtttgaatttgtgatctgaaataacacaaaattaaaaacatgatttctctaattttccaactagaggaagagaaacttgtggaaaagttctttttttttcttttttttttcttaaagaagggcagccaaggtagtaacctaaaaatagtgcccaggcatatgagagttgtcctacgaggttaaagaacacactgttccactgtatggctttggccctgagtggccagggaggtcaacttgaccctgccatgttggtttgacttactaagacacaggaatcattgttttccttgaccagggtctcacaccctggaggaatgttaagtaagagaaagaacctctttcctgaatattgacatgtaaaagaccaaagtaatttttctgaacttctgcaattctgagaactctccaaggaatttacagtgattttagtgcttgtcagcatttttccatgaggactttcatacatttgactctttagttcacaggttcccattgattgtgagcaagatatttatctctttagcccttggggatccagctgagagcaatctcttgcatttttttacccgtgtatgtacagatatcatttcttgtgtatgccatgacttgaaaaagtttgggaagctctttagcaatatcagctaaaaggatatgaaatcacaggtgatagcagttgtcattcagtaatttcctacaagcagcaccccaaaggaaatatagtcctaatctttactatccacttctaaatttaatgtgaatttcatacatgttattagttgttttctttataattttataaaaattattcatcgggagtttaacttccacttccatgctatcggatgtgttgggctccatgcaagaacttggaagaaaaacaggcaggaatgcatttgcataatgacccagatcatcattttctgcaactgagaattatatttcatcattgcttctagaagtctgcaattctttacttttctttggtgcattattatctaggtgccatcactggataatgtggagtgactagagaagtcatatatcactgtaaggtacagttagggtaacactttagaggtttattatttttaaaaaacttttcttgaactcctggccaacatggtgaaaccccgtctctactaaaaataccaaaattagccaggcgtgatggtgggtgcctgtaatctcagctacttgggaggctgaagcaggagaactgcctgaacccaggaggcagaggttgcagtgagtcgagatcgtgctactactgcctgggtggcaagggtgagactccatctcaaaaaagaaacaaaaaaacccaaaaagttttctttactgttggttaaaaaaaaaagccagaccatagtttgactggtggcatggaatttgtgtatcaaataaatgcatttgcttatttgacaaaccatcagtgtccactatttgttaccagagttgggccactatcttttaaaattgctggtgaaaacttgccactagatggcagtgcctgtatagatggggaaaaaattgccaccattcttggtataatacagtgtagcttagatgaggtggtgaaataggggtatcagccgaatattcctaatatagtttctcttgaattaataaactgaagatttgtaggaaaatgagtgagcaaaatttgtttactgttgtgaatttttcctacagcactgtttttaatcttggtgttttccaactttctgtactaatagatacatttctgtgcataagattataaagcatatactcacagttcagtagttttcgttaaggatttactgtgtgagtactttactgtgaggaattgcagaaccttttcccctctactcttgtctaaaagttctgtgtggcacacagagatgcgacctactcaatctgacttagtaaaccacgacgacgataccgcaggtcacggacgg

SEQ ID NO: 6701 - DNA, 3302 bp, Homo sapiens
agacccacaccgcaggtctacgaccctcaggctcttcagctgcaatggcggtaatgatgcgcacgtcataagattcttcaaggtatttaatgaaataaaggatgtgtaaaggagaagggattttacatgagttagctatacctttctcttctttcttcttcaacgtactcagtcctgggtacgcacagagggcactaatggcgtggggccagaagagcttttaattttggaattctgaagaactgagaactcgtgagtctgtcagcagctctgaagtggaatatcaataaagttttgttaattttttttaaagcaccgactaaactacaaatcccttctctctcctccaggtgggtgggtcacgtggcttgtcaggaatccggaagtctggcccgctcgcccaatcacgcccggaagcctatctagtggcgccaagctggccaatcctggggacgcttgctcttcgccaaaccgggtcccgcctccgcgcgccgcgctgacgggtcgttagcggatacggcggccgcaggggcggagtcaagggcctttgcccgccttggcggccggctctacgttccctgttctcgcctgcagctccgccatggctcctaaaggcagctccaaacagcagtctgaggaggacctgctcctgcaggatttcagccgcaatctctcggccaagtcctccgcgctcttcttcggaaacgcgttcatcgtgtctgccatccccatctggttatactggcgaatatggcatatggatcttattcagtctgctgttttgtatagtgtgatgaccctagtaagcacatatttggtagcctttgcatacaagaatgtgaaatttgttctcaagcacaaagtagcacagaagagggaggatgctgtttccaaagaagtgactcgaaaactttctgaagctgataatagaaagatgtctcggaaggagaaagatgaaagaatcttgtggaagaagaatgaagttgctgattatgaagctacaacattttccatcttctataacaacactctgttcctggtcgtggtcattgttgcttccttcttcatattgaagaacttcaaccccacagtgaactacatattgtccataagtgcttcatcaggactcatcgccctcctgtctactggctccaaatagaccatgtcagcttcaccccctggctttgtgtctatgggtggcctgtggtatatggaaaagtagcagggtggtcagggtgggagacacaagatgtttttatagtctagagcctttaaaaaacccagcagaatgtaattcagtatttgtttattggctgttttttgacagattgttgaaattaaatgaattgaaagggaaactcagagtactaggacgtttattaaaaggaaaaaaatgtcttgcaatgtgctgtaatcacaagaggagaaaataacttgtttccttgatctgtcagaggtcacagtaacctgggccgagctgttattatttattatataatagtagtaggaagttaataactggttctctgtgttccaagcacaatattacaacttcttttgaaccgtaaatatcagaatgaatcctcttcccaggggattgaacagaagcttaatgtttacaagtgtttgaatttgtgatctgaaataacacaaaattaaaaacatgatttctctaattttccaactagaggaagagaaacttgtggaaaagttctttttttttcttttttttttcttaaagaagggcagccaaggtagtaacctaaaaatagtgcccaggcatatgagagttgtcctacgaggttaaagaacacactgttccactgtatggctttggccctgagtggccagggaggtcaacttgaccctgccatgttggtttgacttactaagacacaggaatcattgttttccttgaccagggtctcacaccctggaggaatgttaagtaagagaaagaacctctttcctgaatattgacatgtaaaagaccaaagtaatttttctgaacttctgcaattctgagaactctccaaggaatttacagtgattttagtgcttgtcagcatttttccatgaggactttcatacatttgactctttagttcacaggttcccattgattgtgagcaagatatttatctctttagcccttggggatccagctgagagcaatctcttgcatttttttacccgtgtatgtacagatatcatttcttgtgtatgccatgacttgaaaaagtttgggaagctctttagcaatatcagctaaaaggatatgaaatcacaggtgatagcagttgtcattcagtaatttcctacaagcagcaccccaaaggaaatatagtcctaatctttactatccacttctaaatttaatgtgaatttcatacatgttattagttgttttctttataattttataaaaattattcatcgggagtttaacttccacttccatgctatcggatgtgttgggctccatgcaagaacttggaagaaaaacaggcaggaatgcatttgcataatgacccagatcatcattttctgcaactgagaattatatttcatcattgcttctagaagtctgcaattctttacttttctttggtgcattattatctaggtgccatcactggataatgtggagtgactagagaagtcatatatcactgtaaggtacagttagggtaacactttagaggtttattatttttaaaaaacttttcttgaactcctggccaacatggtgaaaccccgtctctactaaaaataccaaaattagccaggcgtgatggtgggtgcctgtaatctcagctacttgggaggctgaagcaggagaactgcctgaacccaggaggcagaggttgcagtgagtcgagatcgtgctactactgcctgggtggcaagggtgagactccatctcaaaaaagaaacaaaaaaacccaaaaagttttctttactgttggttaaaaaaaaaagccagaccatagtttgactggtggcatggaatttgtgtatcaaataaatgcatttgcttatttgacaaaccatcagtgtccactatttgttaccagagttgggccactatcttttaaaattgctggtgaaaacttgccactagatggcagtgcctgtatagatggggaaaaaattgccaccattcttggtataatacagtgtagcttagatgaggtggtgaaataggggtatcagccgaatattcctaatatagtttgcaggtctcgagaatttttcattattattattttttcttctctactctgaaagtgggtccgagt

SEQ ID NO: 6702 - DNA, 3625 bp, Homo sapiens
  misc_feature (5)..(5): n is a, c, g, or t
  misc_feature (7)..(7): n is a, c, g, or t
  misc_feature (11)..(11): n is a, c, g, or t
  misc_feature (18)..(18): n is a, c, g, or t
tagangngcanattgggnacgaggggtccaaacagcagtctgaggaggacctgctcctgcaggatttcagccgcaatctctcggccaagtcctccgcgctcttcttcggaaacgcgttcatcgtgtctgccatccccatctggttatactggcgaatatggcatatggatcttattcagtctgctgttttgtatagtgtgatgaccctagtaagcacatatttggtagcctttgcatacaagaatgtgaaatttgttctcaagcacaaagtagcacagaagagggaggatgctgtttccaaagaagtgactcgaaaactttctgaagctgataatagaaagatgtctcggaaggagaaagatgaaagaatcttgtggaagaagaatgaagttgctgattatgaagctacaacattttccatcttctataacaacactctgttcctggtcgtggtcattgttgcttccttcttcatattgaagaacttcaaccccacagtgaactacatattgtccataagtgcttcatcaggactcatcgccctcctgtctactggctccaaatagaccatgtcagcttcaccccctggctttgtgtctatgggtggcctgtggtatatggaaaagtagcagggtggtcagggtgggagacacaagatgtttttatagtctagagcctttaaaaaacccagcagaatgtaattcagtatttgtttattggctgttttttgacagattgttgaaattaaatgaattgaaagggaaactcagagtactaggacgtttattaaaaggaaaaaaatgtcttgcaatgtgctgtaatcacaagaggagaaaataacttgtttccttgatctgtcagaggtcacagtaacctgggccgagctgttattatttattatataatagtagtaggaagttaataactggttctctgtgttccaagcacaatattacaacttcttttgaaccgtaaatatcagaatgaatcctcttcccaggggattgaacagaagcttaatgtttacaagtgtttgaatttgtgatctgaaataacacaaaattaaaaacatgatttctctaattttccaactagaggaagagaaacttgtggaaaagttctttttttttcttttttttttcttaaagaagggcagccaaggtagtaacctaaaaatagtgcccaggcatatgagagttgtcctacgaggttaaagaacacactgttccactgtatggctttggccctgagtggccagggaggtcaacttgaccctgccatgttggtttgacttactaagacacaggaatcattgttttccttgaccagggtctcacaccctggaggaatgttaagtaagagaaagaacctctttcctgaatattgacatgtaaaagaccaaagtaatttttctgaacttctgcaattctgagaactctccaaggaatttacagtgattttagtgcttgtcagcatttttccatgaggactttcatacatttgactctttagttcacaggttcccattgattgtgagcaagatatttatctctttagcccttggggatccagctgagagcaatctcttgcatttttttacccgtgtatgtacagatatcatttcttgtgtatgccatgacttgaaaaagtttgggaagctctttagcaatatcagctaaaaggatatgaaatcacaggtgatagcagttgtcattcagtaatttcctacaagcagcaccccaaaggaaatatagtcctaatctttactatccacttctaaatttaatgtgaatttcatacatgttattagttgttttctttataattttataaaaattattcatcgggagtttaacttccacttccatgctatcggatgtgttgggctccatgcaagaacttggaagaaaaacaggcaggaatgcatttgcataatgacccagatcatcattttctgcaactgagaattatatttcatcattgcttctagaagtctgcaattctttacttttctttggtgcattattatctaggtgccatcactggataatgtggagtgactagagaagtcatatatcactgtaaggtacagttagggtaacactttagaggtttattatttttaaaaaacttttcttgaactcctggccaacatggtgaaaccccgtctctactaaaaataccaaaattagccaggcgtgatggtgggtgcctgtaatctcagctacttgggaggctgaagcaggagaactgcctgaacccaggaggcagaggttgcagtgagtcgagatcgtgctactactgcctgggtggcaagggtgagactccatctcaaaaaagaaacaaaaaaacccaaaaagttttctttactgttggttaaaaaaaaaagccagaccatagtttgactggtggcatggaatttgtgtatcaaataaatgcatttgcttatttgacaaaccatcagtgtccactatttgttaccagagttgggccactatcttttaaaattgctggtgaaaacttgccactagatggcagtgcctgtatagatggggaaaaaattgccaccattcttggtataatacagtgtagcttagatgaggtggtgaaataggggtatcagccgaatattcctaatatagtttctcttgaattaataaactgaagatttgtaggaaaatgagtgagcaaaatttgtttactgttgtgaatttttcctacagcactgtttttaatcttggtgttttccaactttctgtactaatagatacatttctgtgcataagattataaagcatatactcacagttcagtagttttcgttaaggatttactgtgtgagtactttactgtgaggaattgcagaaccttttcccctctactcttgtctaaaagttctgtgtggcacacagagatgcgacctactcaatctgacttagtaaaaccatgctgtagaatttttgtcttaaaaagaccacatacccagcacccatgaaataaaagattcatctgtaattgggattcaaagtgattaaattcctttgttcatactcataaatagcactaaagtgttataacattttcatttacctatttttagttccttcattttaacttaataaaaatcttggattgatattcttttttttttttttttttttttgagacagcgtctcgctctgtcacccaggctggagtacagtggctctatcttggctcactgcgagctccgcctcccaggttcacgccattctcctgcctcagcctgccgagtggctgggactgcaggcgcccgccaccacacccggctaatttttttgtatttttagtagagacggggtttcaccctgttggccaggatggtctcgatctcctgacctcgtgatccacctgcctcggcctcccaaagtgctggaattacaggcgtgagccaccgcgcccggcctagattgatattcttaagcaataaaagtttactggttgtcctatttgccatattattgaaacttggaaaggataatttgaaacaaggtttgaagttaactgaaatatggagattgaatttatactcaattcttgtgaaaagtcttgcttaataagtatgattaaactttgcttcttaaaa

SEQ ID NO: 6703 - DNA, 3753 bp, Homo sapiens
actcaacagcacaccacccagccgtcctccccaggtgaaaacagctactattgccactgaaaggaatgggaaaccagagaaccataccatgaacattaatgcttccatttatgatgagattcagcaggaaatgaagcgtgctaaagtgtctcaagcactgtttgccaaggttgcagcaaccaaaagccaggatttcagccgcaatctctcggccaagtcctccgcgctcttcttcggaaacgcgttcatcgtgtctgccatccccatctggttatactggcgaatatggcatatggatcttattcagtctgctgttttgtatagtgtgatgaccctagtaagcacatatttggtagcctttgcatacaagaatgtgaaatttgttctcaagcacaaagtagcacagaagagggaggatgctgtttccaaagaagtgactcgaaaactttctgaagctgataatagaaagatgtctcggaaggagaaagatgaaagaatcttgtggaagaagaatgaagttgctgattatgaagctacaacattttccatcttctataacaacactctgttcctggtcgtggtcattgttgcttccttcttcatattgaagaacttcaaccccacagtgaactacatattgtccataagtgcttcatcaggactcatcgccctcctgtctactggctccaaatagaccatgtcagcttcaccccctggctttgtgtctatgggtggcctgtggtatatggaaaagtagcagggtggtcagggtgggagacacaagatgtttttatagtctagagcctttaaaaaacccagcagaatgtaattcagtatttgtttattggctgttttttgacagattgttgaaattaaatgaattgaaagggaaactcagagtactaggacgtttattaaaaggaaaaaaatgtcttgcaatgtgctgtaatcacaagaggagaaaataacttgtttccttgatctgtcagaggtcacagtaacctgggccgagctgttattatttattatataatagtagtaggaagttaataactggttctctgtgttccaagcacaatattacaacttcttttgaaccgtaaatatcagaatgaatcctcttcccaggggattgaacagaagcttaatgtttacaagtgtttgaatttgtgatctgaaataacacaaaattaaaaacatgatttctctaattttccaactagaggaagagaaacttgtggaaaagttctttttttttcttttttttttcttaaagaagggcagccaaggtagtaacctaaaaatagtgcccaggcatatgagagttgtcctacgaggttaaagaacacactgttccactgtatggctttggccctgagtggccagggaggtcaacttgaccctgccatgttggtttgacttactaagacacaggaatcattgttttccttgaccagggtctcacaccctggaggaatgttaagtaagagaaagaacctctttcctgaatattgacatgtaaaagaccaaagtaatttttctgaacttctgcaattctgagaactctccaaggaatttacagtgattttagtgcttgtcagcatttttccatgaggactttcatacatttgactctttagttcacaggttcccattgattgtgagcaagatatttatctctttagcccttggggatccagctgagagcaatctcttgcatttttttacccgtgtatgtacagatatcatttcttgtgtatgccatgacttgaaaaagtttgggaagctctttagcaatatcagctaaaaggatatgaaatcacaggtgatagcagttgtcattcagtaatttcctacaagcagcaccccaaaggaaatatagtcctaatctttactatccacttctaaatttaatgtgaatttcatacatgttattagttgttttctttataattttataaaaattattcatcgggagtttaacttccacttccatgctatcggatgtgttgggctccatgcaagaacttggaagaaaaacaggcaggaatgcatttgcataatgacccagatcatcattttctgcaactgagaattatatttcatcattgcttctagaagtctgcaattctttacttttctttggtgcattattatctaggtgccatcactggataatgtggagtgactagagaagtcatatatcactgtaaggtacagttagggtaacactttagaggtttattatttttaaaaaacttttcttgaactcctggccaacatggtgaaaccccgtctctactaaaaataccaaaattagccaggcgtgatggtgggtgcctgtaatctcagctacttgggaggctgaagcaggagaactgcctgaacccaggaggcagaggttgcagtgagtcgagatcgtgctactactgcctgggtggcaagggtgagactccatctcaaaaaagaaacaaaaaaacccaaaaagttttctttactgttggttaaaaaaaaaagccagaccatagtttgactggtggcatggaatttgtgtatcaaataaatgcatttgcttatttgacaaaccatcagtgtccactatttgttaccagagttgggccactatcttttaaaattgctggtgaaaacttgccactagatggcagtgcctgtatagatggggaaaaaattgccaccattcttggtataatacagtgtagcttagatgaggtggtgaaataggggtatcagccgaatattcctaatatagtttctcttgaattaataaactgaagatttgtaggaaaatgagtgagcaaaatttgtttactgttgtgaatttttcctacagcactgtttttaatcttggtgttttccaactttctgtactaatagatacatttctgtgcataagattataaagcatatactcacagttcagtagttttcgttaaggatttactgtgtgagtactttactgtgaggaattgcagaaccttttcccctctactcttgtctaaaagttctgtgtggcacacagagatgcgacctactcaatctgacttagtaaaaccatgctgtagaatttttgtcttaaaaagaccacatacccagcacccatgaaataaaagattcatctgtaattgggattcaaagtgattaaattcctttgttcatactcataaatagcactaaagtgttataacattttcatttacctatttttagttccttcattttaacttaataaaaatcttggattgatattcttttttttttttttttttttttgagacagcgtctcgctctgtcacccaggctggagtacagtggctctatcttggctcactgcgagctccgcctcccaggttcacgccattctcctgcctcagcctgccgagtggctgggactgcaggcgcccgccaccacacccggctaatttttttgtatttttagtagagacggggtttcaccctgttggccaggatggtctcgatctcctgacctcgtgatccacctgcctcggcctcccaaagtgctggaattacaggcgtgagccaccgcgcccggcctagattgatattcttaagcaataaaagtttactggttgtcctatttgccatattattgaaacttggaaaggataatttgaaacaaggtttgaagttaactgaaatatggagattgaatttatactcaattcttgtgaaaagtcttgcttaataagtatgattaaactttgcttcttaaaa

SEQ ID NO: 6704 - DNA, 1210 bp, Homo sapiens
agacccacaccgcaggtctacgaccctcaggctcttcagctgcaatggcggtaatgatgcgcacgtcataagattcttcaaggtatttaatgaaataaaggatgtgtaaaggagaagggattttacatgagttagctatacctttctcttctttcttcttcaacgtactcagtcctgggtacgcacagagggcactaatggcgtggggccagaagagcttttaattttggaattctgaagaactgagaactcgtgagtctgtcagcagctctgaagtggaatatcaataaagttttgttaattttttttaaagcaccgactaaactacaaatcccttctctctcctccaggtgggtgggtcacgtggcttgtcaggaatccggaagtctggcccgctcgcccaatcacgcccggaagcctatctagtggcgccaagctggccaatcctggggacgcttgctcttcgccaaaccgggtcccgcctccgcgcgccgcgctgacgggtcgttagcggatacggcggccgcaggggcggagtcaagggcctttgcccgccttggcggccggctctacgttccctgttctcgcctgcagctccgccatggctcctaaaggcagctccaaacagcagtctgaggaggacctgctcctgcaggatttcagccgcaatctctcggccaagtcctccgcgctcttcttcggaaacgcgttcatcgtgtctgccatccccatctggttatactggcgaatatggcatatggatcttattcagtctgctgttttgtatagtgtgatgaccctagtaagcacatatttggtagcctttgcatacaagaatgtgaaatttgttctcaagcacaaagtagcacagaagagggaggatgctgtttccaaagaagtgactcgaaaactttctgaagctgataatagaaagatgtctcggaaggagaaagatgaaaggacctcgtgatccacctgcctcggcctcccaaagtgctggaattacaggcgtgagccaccgcgcccggcctagattgatattcttaagcaataaaagtttactggttgtcctatttgccatattattgaaacttggaaaggataatttgaaacaaggtttgaagttaactgaaatatggagattgaatttatactcaattcttgtgaaaagtcttgcttaataagtatgattaaactttgcttcttaaaa

SEQ ID NO: 6705 - DNA, 422 bp, Homo sapiens
catgagccactgcgcccagacttcctaaactatttgaaatggagttgcacacccacagacaccttcggcaagtcccaagaaaaaggacttttctcttccagcaccacagtgctattgtcacactttaattatcttccagcctctaattattagagtttaatcttccctccatattcaaatgtcaaggtaaaagattagaaagatttttgtcatctaaggagcttggagtttatccattagggcttggggaggattgttttttatggaggcatctgagaggattagaaagaaacccagagtaaggccaggcacagtggctcacgcctgtaatcctagcactttgagaggccaaggtgggcggattgcttgcgtccaggagtgcaggaccagtctgggcaacacagcaaaactccatctctaca

SEQ ID NO: 6706 - DNA, 156 bp, Homo sapiens
agccccatggccttgagcaaacattggcagtagtcagggagtaattacagcagaccttgggcaagactcataaatgtgctggcttcaggtgtaacccaatgtagtcatagttctggatgccacagaggtgcttacgccactccaaacctagattta

SEQ ID NO: 6707 - DNA, 250 bp, Homo sapiens
tgggtggagagaaacataaatgtcgactacatgcaagtccagtcatataccttcccttgaacttaattatgatatagattattttgctcacatgttttttgttgacattctgcttattatcaccctgctctcctattacattcctttttgctgaaataatgaaaatcataatcaataaaaactgagggaactcagaggccagtgctcgtgcaggtcctggtgtgctgagtgccagtcccctggacccact

SEQ ID NO: 6708 - DNA, 260 bp, Homo sapiens
aaataggatgtgtaaagtgtaatattgcaccaagttgtttaccaaagtgttacttaacagagcaaaaatttggaaacaatctgtttaaacaataagaaaaatggtcaatgcgccagttgctctggctcaggcatttaatcctagcactttgggaagacaaggcgggtagactgctcgagcccagaagatggaggctgcagtgagctctgattgcttctttatactccagcctgggtgacagagtgagaccctgtctcttt

SEQ ID NO: 6709 - DNA, 425 bp, Homo sapiens
acattaatgacacctgggttagaatatctaggctctgctatttttgagctgagtggcttgaggcaagttgcttaacctttctgggccctggcttcctcatctgagcagtgatgaaccctagcctgtctacaaggtcaaatgaaacagtcaatgtgaaaattccgcccaggccacacagagctgcacagatgctggtgacctggcttactggcatgagatcacttccaagccctgaattacaggagagaaggagcctcttttctgaaggaccaggaaccagatttgttcaaacagccattctccaccccaagatggagcaactgcctcagcagccactataaaactaggaagctcctccagagacaccggtgcccttctctgtcctgcccaggataaaggcaagaaccctcctggcaatcgggaat

SEQ ID NO: 6710 - DNA, 450 bp, Homo sapiens
tctgtgtattttttagttcctcatccatgagcatacaggaccctgggctttattgattggctcacaatctggttctattggtttcaaactccaagtgacatttaaacaatggcaatatcgttgcaataagtagtttgcttttcatgattaccctcttccattacaagtaatgtatgtatgtgagttcaagcctactgagtgggcctttgtcctattcaaggagcatgattagacagcagtctatgccacccaacaccatcatgaaccagctacatgggcaatatttactctaggcatggcctcgaggacaggaggcacttcccactgtaaacatgtgaacgagcgagtagcctgcccatatctccatagccaaaccatcctcatatgagtccaataaaagacttcacttctctttccacattagatgctggaagaatagtaatgtcatgg

SEQ ID NO: 6711 - DNA, 670 bp, Homo sapiens
agcatctcccatgccaaagcattgtgttgcaatatcagtagcaacactcttagatatacaaccagtcactggacgaggcacttgtcatttaagcctcacagaagtcaggaattggatattaagcaaagatgtttgtttttcatagttcctaaaaagtgccaatcattatgaaagttcaatggatggcgcacggggacaggcatcagatgactgctcccagcactgcatcgtgaggttgtgtgccttcagaaaaccacatgttatctgcggctcagttttgtaatgccacatttaacaaggatgttgactggaaaacaatattcagaagagaccaaccagggaggataatgacgtcaaactatgtcacttaaaaaaaaaaaggtcactgggcgtggtggctcacgtctgtaatcccagcactttgggaggccaaggcaggtggatggcttgagctcaggaattcaataccagcctgggcaatatagcaaaaccccatctctacaaaaaattttaaaattagcaaggtgtagtggtgcaaacctgtgatcccagctacttgggaggctgaggtgggaggatcacttgagcctaggaggcaaaggctgcagtgaagaaccatgatcatgccactgcacttcagcctgggtgacagagcgagaccctgtgttta

SEQ ID NO: 6712 - DNA, 546 bp, Homo sapiens
aagggacaaggacgtgcacgccacagccacagccccagaccagggtgtaggccgtggggctccagctcccttctgggcatcactgctgtgtgtccttgggagagtgtctccgcctctctggcacctcccttcactctggaaacctgtccatcaggccaggggactggggtggcgtgcggcctacctcctcccaccttccgagcccaaccccaaaactggataagcagtcagcttgcactctgaacccagaactgaaacgaggattaagcttcgctttgtgcgtgccacaaaccagacaccacatccaacctccggctctagggccaggaactccaatcaccaagcatttttggaaaaccaaatcaaagctagatggcttttctaacatgttatattgtattaaagattgaaaatgacattgagaagtaaaaataaattggaaataactggaaaaatctaaatgtccagtaacattgggggattcattaaaaattctgacccaatggaacgtcgacgagccaccacaatgacctttttaaagaatgt

SEQ ID NO: 6713 - DNA, 522 bp, Homo sapiens
cagtagtgagtcctggcagggtggggcagacataggcagcaggtacatcacaaaggagttcggctttccttctaagtgctatgggatgccaatgggtgagtttaagtgggggagtggcacttcagtttaaagagaccactctggctggtctctccatggactgccaggggcaaacacagaggcagagatggattaggaggtgatatggaagtccagtgagagatgtcagaggttcggactgggatggtagcaggagaggagaggaaagtagatgaattcaggtaaatttggagatatgacaataggtcatagtgataggctggatgtgggatatgagggaaaaagagcaatcaagggtgatgcctaaggttcggggctctagcagccagatatataacagtgttatttactgagatgggggtaccaagaggtgaggaagaaaggaagaaagtaaggctgggattaagagttatgatttggatacattaaatttgagatgcctctcagattcaagtctggaag

SEQ ID NO: 6714 - DNA, 312 bp, Homo sapiens
gcttcacatttgcatgtttcagtgctagagcatgggaatagactttggcatccactgtaagatgtttttcagctacgagagcatcgagtccctgcagcaggtcattcttgggtaacgaaatgacttccacaaattctccatcccctggctttggcttgggccttacattttctgcgtcatctccgttaatgattactgtcacgatgtgtgtggtacagtttgacaaacctgggtccatatagaccactggagaacattcagcagcgtcccctttgtagccagtttcttcctcaagctcccaaagagcagctg

SEQ ID NO: 6715 - DNA, 1144 bp, Homo sapiens
tactgggattataggtgtgagccactgtacccggcctctctgcttatctttggtgtcttataatttctgctttttaaatattggctcgcccatccactttgttttttctccatctctctttttttttttttttgagacggagtctcgctctgttacccaggctagagtgcagtggtaagatctcagctcactgcaacctctgcctcctgggttcaagtgattctcctgcctcaacctcgaatacctgggattacaggcaccagccaccatgcctggctaatttttgtatttttagtagagatggggtttcaccaaattggccagcctggtctcgaactcctgacatcaggtcatcctcccgcctcggcctcccaaagtgctgagattacaagcatgagccattgcgcccagccctccatctcatatttttagcctatttataggttctgcttacttatggcttcatcttcctcataagttttgcttgcttatgaccctcttgacctcacctctgcattgtgttggcttgctgtgtatcctttcagcttcagtttcctttgcgaactgtgattacttttaatagctcgattccaattcctgagaagacaaatttactaggcctgttgtatcccagtttagttaagatatttatatacccacagcaacagtttgtggatcttcacttttgttttctgccattaatatgatgattaccctgttttgctgcttttactttgcttgtttcttatagcttagcttataaagtatccattaacaactgactgttggacttctctctctttgtttcaaggactgcaattgcaaatgcctgtaggatccagatgccataaatgtataagatggttctggtgttttcttcttttcttgaaacactgtcttgtgtgtgtgaggggggtgatcttttgttcagtcatttttgatagagacattagaagagcgatttctttaaaatataaacaagggtgcaaatggggatggtaaagggcaactgacgctactaggaggatagtagggagtgtttgacattgtgtgtaattgggacatacatatttcctccaaaagggaagactttagtacttctgctgattgttgcctagtggaaatgtctgcctaagattaccag

SEQ ID NO: 6716 - DNA, 1074 bp, Homo sapiens
aagtaaaaaaagaagctgtgtcttaaagatgcatcttcctttaaagtaatgaataacaaaggtaggccataaggagcttcttatctactttaagctctggctggcttttccaggaagtttgaggagataaatcatgactcattttctgcagggtcagtggggaaactggagaggtggctgtccctgttcctgccggtgcctgaagctttcagtgttgttccatcacactctggctccatacctttcctcctgtcctccctccctgttggctggagtctaatgtgacacttcttccaaaacacagaaccgcctacattgtgtaaactgattattgcgcccagccctccatctcatatttttagcctatttataggttctgcttacttatggcttcatcttcctcataagttttgcttgcttatgaccctcttgacctcacctctgcattgtgttggcttgctgtgtatcctttcagcttcagtttcctttgcgaactgtgattacttttaatagctcgattccaattcctgagaagacaaatttactaggcctgttgtatcccagtttagttaagatatttatatacccacagcaacagtttgtggatcttcacttttgttttctgccattaatatgatgattaccctgttttgctgcttttactttgcttgtttcttatagcttagcttataaagtatccattaacaactgactgttggacttctctctctttgtttcaaggactgcaattgcaaatgcctgtaggatccagatgccataaatgtataagatggttctggtgttttcttcttttcttgaaacactgtcttgtgtgtgtgaggggggtgatcttttgttcagtcatttttgatagagacattagaagagcgatttctttaaaatataaacaagggtgcaaatggggatggtaaagggcaactgacgctactaggaggatagtagggagtgtttgacattgtgtgtaattgggacatacatatttcctccaaaagggaagactttagtacttctgctgattgttgcctagtggaaatgtctgcctaagattaccag

SEQ ID NO: 6717 - DNA, 464 bp, Homo sapiens
tactgggattataggtgtgagccactgtacccggcctctctgcttatctttggtgtcttataatttctgctttttaaatattggctcgcccatccactttgttttttctccatctctctttttttttttttttgagacggagtctcgctctgttacccaggctagagtgcagtggtaagatctcagctcactgcaacctctgcctcctgggttcaagtgattctcctgcctcaacctcgaatacctgggattacaggcaccagccaccatgcctggctaatttttgtatttttagtagagatggggtttcaccaaattggccagcctggtctcgaactcctgacatcaggtcatcctcccgcctcggcctcccaaagtgctgagattacaagcatgagcctggccaggaaagggggtttcctcttcctttaggcatggtacagttctgtctctaccttgccctc

SEQ ID NO: 6718 - DNA, 198 bp, Homo sapiens
tgatctcctaatatttcctcaaatattttaatatttaatattttaaaacatctacagattgcaaaagcaataataatattaaaatgttgtaccttacagagaagcagtcacagaattgtaaattctaaaaataaatcatagacaatgccacccccccagcaaccactcacgtaccctccagtgcaaacctttatttac

SEQ ID NO: 6719 - DNA, 540 bp, Homo sapiens
cctctctgagcatatatattttttaattttatgcagcttctatatattctacacctactgcccgccagcatatcgctggatgctggtggtatgatggcaagatgggaacaggtagggtctgtgcactcctgtagcttccaggctaatcttaggttgctcatctgtgaaatgggtgtgagaacctcatcctgcagttgttatgtgttgtgtgagaattaactgggataatgtgtttgaggtcctggcagcgattagaggctcataattggtcgatgtagctgtaggatttgctttttctgctgagcttagttgatgacaccttctaatttgctaccttaaatttacagcagctatttttttttttcatagatcttttctgcattcacattttaactcacagatattgttcaggtcctggaagtgtgagctttctctctttcttcttgaatgtcttgtatataggtccttaagcaactcattcatttcagagatattctttttattccaggcttttgagatacaacagtgaccaagacagac

SEQ ID NO: 6720 - DNA, 403 bp, Homo sapiens
gcgtcgacagaaattatagagaattccttacatttaatcctacaagtactggcttcatgaaaacctcttataaggagatcagcaggtaaggattcctgagtgctagatgttgtgttaatagaagtttataaagtttcacatagtttatagggagactgaaagcagggattaaggaccttctatctcctctactagactcaggtagtggatggaaaggaaatacaaacatttttaatttaacataattagggttttttttgtttgtttgtttctttttttgagacggagtctcactctgtcaccgaggctggaggttgcagtgagccgggatcgcacctttgcactccagcctgggcaataagagcgaaactccgtctcaaaaaaacaaacaaacaaacaaaca

SEQ ID NO: 6721 - DNA, 379 bp, Homo sapiens
tttttttaaagtagagtcgggatttcgccatgttggccaggctggtctcaaactcctgacctcaggtgatccaccggtctcagcctcccaaagtgctgggattacaggcgtgagccactgcgcccggcctgtgcctggcttattttgtttagcctaatgtccttcaggtttatgcatgttgtagcacgtgtcagaattttcttctcttttaaggctaaatgatactcagttgtatgtgcagattacattttgtttatcccttcatcagtggacacttgggttgcttccaccttttggctatggcaaatgatgctatgaacatagatacacaaatatcaaacagatgggtgtacggatattaaagagtccttgctttcag

SEQ ID NO: 6722 - DNA, 435 bp, Homo sapiens
acaaagtggctgtattcacacccacagaaacaaatagtttcttattaacttttaatgacttgctgtcttctaatgaattcacaaagaactgctgggaattacactcagatacactaaagaaaggtgatagattattaaatttgggattgcttcaaccttttacctttagtggtttcagacactacccaaatcaccagggaaagagaattaagagaactaaagctaaataagacactccagggaagaagcttaacttaatgagacaagttgtttcaaccttccccaatggtaagcaggaggctcctgagccttttacaatactacacaattgttgctgcagtgatattaactcctaaaatatctgaactcctgtttcctctactccaaaatgtaagtttctttttaattcagaaatttttaataaagtgttttaca

SEQ ID NO: 6723 - DNA, 449 bp, Homo sapiens
acccattttccttctgaaattaactcctctgaaataatatagtgtttccattctgagacaattcagttggttcttggctctcccttttcaaactagtctttacagccctcaggagagaagttcacctccaaagtgtaggggtgacaaagggaagaggacaaaagaactactggaggcagcagtgtcagcatacgccggtgtcacgactcaagacatcggcacctcccgaggtgatgaaaggatgtgccatggctcatcttttcaagtcaactagtatttatcaagctgctctgtggaaggtgctggggacaggatggtacctgtccttaaaaccagaatgatcagactcagtggaaagagagttacaagagttacttgaacaactgtctctgattataaaataagatggagtgataaatacactagaatagagttatagataagctatt

SEQ ID NO: 6724 - DNA, 423 bp, Homo sapiens
ctgtgaaagaagggagccccctccatctcgcattttctcagggttcccaggggcctctgagcagcttctgaagctccacagctccgactgacaccccctggaaattgcttaatgctttcagcctgaggaaactcaaatcagccagtcagtcaatcctgaactactctggaagagcagagtagagtctcacagtctcaaaacctggatggtctaaaatatgagtaacttttatgttgagcatcccctgccccagaccttctgagacaagaatcggccgctgcagcttaattctcaaccttcctcctccagggccaggatgaaagagagcaggaggtggtgggggtggtaaaagaaaacctcctcctctgaactggcttagggcagccccgctgcaggcgacaactgttcttccaagacctactt

SEQ ID NO: 6725 - DNA, 373 bp, Homo sapiens
ctcaccccgcgagcactgtctgttcagcttgcagggggcaagacttaaacacagtaggtgccaacagtcagggatgaggcccagcaggagaaagacttaaacacagtaggtgccaacagtcagggatgagaagcatgacagccgggtgtgaacacaggcacagggagacaaggaagggaggggcaagggtctggccccaaaaatgcacgcagcagctccctgtttctcaagcacagagcgagtcctagagcctcaatctcccaaaatgcctctctcagctctggaaccagccctggggccgcaggagtggccttgtctccaccttcccacaggatattcccctgccgcgctctgagtgactgttatgagataa

SEQ ID NO: 6726 - DNA, 521 bp, Homo sapiens
tacctgataggtgtgacagaaattttaagttacttcaaatcagtcccactgatactgactaaatcaaaagcagagtcaaagccaggtgtggtggcgtgtgcttgtggtcccagctccttgggaggctgaggctggaggatcacttaaggccaggagtttgaggctgtagggtgctatgattgtgcctgtgcgtagccattgcaccccagcctgggcaacatatcttaataaaaaacaagagtcatactaggcacagtggctcacacttgtaatctcaacactttgggaggctgaggcaggaggatcactttagtccaggagttcaagaccagcctgggcaacatactgagactctcactgcaaaaaatataaattagctgggcatggtgacacacacctgtagtcccagctgcttgggaatctgaggtgggagaattgcttgagcccaggaggtcagtgcttcagtgagctgttactgtgctaccgcactccagcctgggcgatagaggaagactctctca

SEQ ID NO: 6727 - DNA, 603 bp, Homo sapiens
gatgatctcaggtggaacagtttcatcccaaaaccatccctccacctgaccctcacccgagtctgtggaaaaattgtcttccacaaaaccagtccctggtgccaaaaaggttggggaaggctgggctacaggaccagttgagtcatgagtcatgagtctgggtggggttggtctgaaaaaaatctctcagaaaaccagtcttaggttctataatagtgatgttatctataggagcagttggagaagtcacaaatcttgtgatctctagccacatgactcccaagcagtaagaaattgtagaactatacctacattttagcagaattctctcccctcccataatcctaaccttgtggcctttccttagttttacaaaggtagtttagttttgggaagggctattatcatccttgctttaaggttaaactgtaaactaaattcctcccaaagttagcttggcctatgcccaggaatgaccaaagacaaacagcttgaggttggaggcaagatagagttaacgatgtcagatttctcttttgcaaaggtggtttcagttgtgccactgaaacacagactgggtgatatagtgagaccatgtatgtt

SEQ ID NO: 6728 - DNA, 2702 bp, Homo sapiens
cataaaagcgccggccctccgcttccccgcgagacgaaacttcccgtcccggcggctctggcacccaggtccggcctgcgccttcccgccaggcctggacactggttcaacacctgtgacttcatgtgtgcgcgccggccacacctgcagtcacacctgtagccccctctgccaagagatccataccgaggcagcgtcggtggctacaagccctcagtccacacctgtggacacctgtgacacctggccacacgacctgtggccgcggcctggcgtctgctgcgacaggagcccttacctcccctgttataacacctgaccgccacctaactgcccctgcagaaggagcaatggccttggctcctgagagggcagccccacgcgtgctgttcggagagtggctccttggagagatcagcagcggctgctatgaggggctgcagtggctggacgaggcccgcacctgtttccgcgtgccctggaagcacttcgcgcgcaaggacctgagcgaggccgacgcgcgcatcttcaaggcctgggctgtggcccgcggcaggtggccgcctagcagcaggggaggtggcccgccccccgaggctgagactgcggagcgcgccggctggaaaaccaacttccgctgcgcactgcgcagcacgcgtcgcttcgtgatgctgcgagataactcgggggacccggccgacccgcacaaggtgtacgcgctcagccgggagctgtgctggcgagaaggcccaggcacggaccagactgaggcagaggcccccgcagctgtcccaccaccacagggtgggcccccagggccattcctggcacacacacatgctggactccaagccccaggccccctccctgccccagctggtgacaagggggacctcctgctccaggcagtgcaacagagctgcctggcagaccatctgctgacagcgtcatggggggcagatccagtcccaaccaaggctcctggagagggacaagaagggcttcccctgactggggcctgtgctggaggcccagggctccctgctggggagctgtacgggtgggcagtagagacgacccccagccccgggccccagcccgcggcactaacgacaggcgaggccgcggccccagagtccccgcaccaggcagagccgtacctgtcaccctccccaagcgcctgcaccgcggtgcaagagcccagcccaggggcgctggacgtgaccatcatgtacaagggccgcacggtgctgcagaaggtggtgggacacccgagctgcacgttcctatacggccccccagacccagctgtccgggccacagacccccagcaggtagcattccccagccctgccgagctcccggaccagaagcagctgcgctacacggaggaactgctgcggcacgtggcccctgggttgcacctggagcttcgggggccacagctgtgggcccggcgcatgggcaagtgcaaggtgtactgggaggtgggcggacccccaggctccgccagcccctccaccccagcctgcctgctgcctcggaactgtgacacccccatcttcgacttcagagtcttcttccaagagctggtggaattccgggcacggcagcgccgtggctccccacgctataccatctacctgggcttcgggcaggacctgtcagctgggaggcccaaggagaagagcctggtcctggtgaagctggaaccctggctgtgccgagtgcacctagagggcacgcagcgtgagggtgtgtcttccctggatagcagcagcctcagcctctgcctgtccagcgccaacagcctctatgacgacatcgagtgcttccttatggagctggagcagcccgcctagaacccagtctaatgagaactccagaaagctggagcagcccacctagagctggccgcggccgcccagtctaataaaaagaactccagaacaaaaaaaagaggacaacaactgacaacacaacacacaccacacgactcctcaccgagcgacaacagagcacatccgccgcgctctcatttatgggcggacggccgcgcaaaacggcgactgcaaagcggggcccgactgtgcaaacaatgttttgtccgcaccacccattctgttctgtacacgagagggtgcgaacatatctgccggggggcgctcccccacataagagggggcggtccggcaataatcaatctggaagaaacagccaccgaggatagaaaccacttttattatatagatcgggtagggcgacagcaatgagagacaagccgacgcagagcaaagcagccggaggtagcacactaccgcgtactatacactactaaagcagtaggatagacctgacgtatcacggcactacacctgcaaacacaacacatccacattcgctcacactcctctcatcatccatcctacccgacaccacacgaagacaacataagaacatctattgacccactcgcacatccatcacgctacttcacacaacaagaatcatttgcacatgatcgaataatataagttgatcatcccgactttcgatatcaagcagattgactcacaatccattcgataatatctacatagagacctgcgcaactcgtcaacccacagagaaagacaccagctactctctaagccagcacaacgcaccactgaagaaccgacagatccatcgacagtcatata

SEQ ID NO: 6729 - DNA, 2615 bp, Homo sapiens
cataaaagcgccggccctccgcttccccgcgagacgaaacttcccgtcccggcggctctggcacccaggtccggcctgcgccttcccgccaggcctggacactggttcaacacctgtgacttcatgtgtgcgcgccggccacacctgcagtcacacctgtagccccctctgccaagagatccataccgaggcagcgtcggtggctacaagccctcagtccacacctgtggacacctgtgacacctggccacacgacctgtggccgcggcctggcgtctgctgcgacaggagcccttacctcccctgttataacacctgaccgccacctaactgcccctgcagaaggagcaatggccttggctcctgagagggcagccccacgcgtgctgttcggagagtggctccttggagagatcagcagcggctgctatgaggggctgcagtggctggacgaggcccgcacctgtttccgcgtgccctggaagcacttcgcgcgcaaggacctgagcgaggccgacgcgcgcatcttcaaggcctgggctgtggcccgcggcaggtggccgcctagcagcaggggaggtggcccgccccccgaggctgagactgcggagcgcgccggctggaaaaccaacttccgctgcgcactgcgcagcacgcgtcgcttcgtgatgctgcgagataactcgggggacccggccgacccgcacaaggtgtacgcgctcagccgggagctgtgctggcgagaaggcccaggcacggaccagactgaggcagaggcccccgcagctgtcccaccaccacagggtgggcccccagggccattcctggcacacacacatgctggactccaagccccaggccccctccctgccccagctggtgacaagggggacctcctgctccaggcagtgcaacagagctgcctggcagaccatctgctgacagcgtcatggggggcagatccagtcccaaccaaggctcctggagagggacaagaagggcttcccctgactggggcctgtgctggaggcgaggccgcggccccagagtccccgcaccaggcagagccgtacctgtcaccctccccaagcgcctgcaccgcggtgcaagagcccagcccaggggcgctggacgtgaccatcatgtacaagggccgcacggtgctgcagaaggtggtgggacacccgagctgcacgttcctatacggccccccagacccagctgtccgggccacagacccccagcaggtagcattccccagccctgccgagctcccggaccagaagcagctgcgctacacggaggaactgctgcggcacgtggcccctgggttgcacctggagcttcgggggccacagctgtgggcccggcgcatgggcaagtgcaaggtgtactgggaggtgggcggacccccaggctccgccagcccctccaccccagcctgcctgctgcctcggaactgtgacacccccatcttcgacttcagagtcttcttccaagagctggtggaattccgggcacggcagcgccgtggctccccacgctataccatctacctgggcttcgggcaggacctgtcagctgggaggcccaaggagaagagcctggtcctggtgaagctggaaccctggctgtgccgagtgcacctagagggcacgcagcgtgagggtgtgtcttccctggatagcagcagcctcagcctctgcctgtccagcgccaacagcctctatgacgacatcgagtgcttccttatggagctggagcagcccgcctagaacccagtctaatgagaactccagaaagctggagcagcccacctagagctggccgcggccgcccagtctaataaaaagaactccagaacaaaaaaaagaggacaacaactgacaacacaacacacaccacacgactcctcaccgagcgacaacagagcacatccgccgcgctctcatttatgggcggacggccgcgcaaaacggcgactgcaaagcggggcccgactgtgcaaacaatgttttgtccgcaccacccattctgttctgtacacgagagggtgcgaacatatctgccggggggcgctcccccacataagagggggcggtccggcaataatcaatctggaagaaacagccaccgaggatagaaaccacttttattatatagatcgggtagggcgacagcaatgagagacaagccgacgcagagcaaagcagccggaggtagcacactaccgcgtactatacactactaaagcagtaggatagacctgacgtatcacggcactacacctgcaaacacaacacatccacattcgctcacactcctctcatcatccatcctacccgacaccacacgaagacaacataagaacatctattgacccactcgcacatccatcacgctacttcacacaacaagaatcatttgcacatgatcgaataatataagttgatcatcccgactttcgatatcaagcagattgactcacaatccattcgataatatctacatagagacctgcgcaactcgtcaacccacagagaaagacaccagctactctctaagccagcacaacgcaccactgaagaaccgacagatccatcgacagtcatata

SEQ ID NO: 6730 - DNA, 2787 bp, Homo sapiens
cataaaagcgccggccctccgcttccccgcgagacgaaacttcccgtcccggcggctctggcacccaggtccggcctgcgccttcccgccaggcctggacactggttcaacacctgtgacttcatgtgtgcgcgccggccacacctgcagtcacacctgtagccccctctgccaagagatccataccgaggcagcgtcggtggctacaagccctcagtccacacctgtggacacctgtgacacctggccacacgacctgtggccgcggcctggcgtctgctgcgacaggagcccttacctcccctgttataacacctgaccgccacctaactgcccctgcagaaggagcaatggccttggctcctgagagggcagccccacgcgtgctgttcggagagtggctccttggagagatcagcagcggctgctatgaggggctgcagtggctggacgaggcccgcacctgtttccgcgtgccctggaagcacttcgcgcgcaaggacctgagcgaggccgacgcgcgcatcttcaaggcctgggctgtggcccgcggcaggtggccgcctagcagcaggggaggtggcccgccccccgaggctgagactgcggagcgcgccggctggaaaaccaacttccgctgcgcactgcgcagcacgcgtcgcttcgtgatgctgcgagataactcgggggacccggccgacccgcacaaggtgtacgcgctcagccgggagctgtgctggcgagaaggcccaggcacggaccagactgaggcagaggcccccgcagctgtcccaccaccacagggtgggcccccagggccattcctggcacacacacatgctggactccaagccccaggccccctccctgccccagctggtgacaagggggacctcctgctccaggcagtgcaacagagctgcctggcagaccatctgctgacagcgtcatggggggcagatccagtcccaaccaaggctcctggagagggacaagaagggcttcccctgactggggcctgtgctggaggcccagggctccctgctggggagctgtacgggtgggcagtagagacgacccccagccccgggccccagcccgcggcactaacgacaggtgagaggggtaggggttgggaggcctggggcacagggagaggctagggatgaggtgccagcacaggattcccttccggatgcaggcgaggccgcggccccagagtccccgcaccaggcagagccgtacctgtcaccctccccaagcgcctgcaccgcggtgcaagagcccagcccaggggcgctggacgtgaccatcatgtacaagggccgcacggtgctgcagaaggtggtgggacacccgagctgcacgttcctatacggccccccagacccagctgtccgggccacagacccccagcaggtagcattccccagccctgccgagctcccggaccagaagcagctgcgctacacggaggaactgctgcggcacgtggcccctgggttgcacctggagcttcgggggccacagctgtgggcccggcgcatgggcaagtgcaaggtgtactgggaggtgggcggacccccaggctccgccagcccctccaccccagcctgcctgctgcctcggaactgtgacacccccatcttcgacttcagagtcttcttccaagagctggtggaattccgggcacggcagcgccgtggctccccacgctataccatctacctgggcttcgggcaggacctgtcagctgggaggcccaaggagaagagcctggtcctggtgaagctggaaccctggctgtgccgagtgcacctagagggcacgcagcgtgagggtgtgtcttccctggatagcagcagcctcagcctctgcctgtccagcgccaacagcctctatgacgacatcgagtgcttccttatggagctggagcagcccgcctagaacccagtctaatgagaactccagaaagctggagcagcccacctagagctggccgcggccgcccagtctaataaaaagaactccagaacaaaaaaaagaggacaacaactgacaacacaacacacaccacacgactcctcaccgagcgacaacagagcacatccgccgcgctctcatttatgggcggacggccgcgcaaaacggcgactgcaaagcggggcccgactgtgcaaacaatgttttgtccgcaccacccattctgttctgtacacgagagggtgcgaacatatctgccggggggcgctcccccacataagagggggcggtccggcaataatcaatctggaagaaacagccaccgaggatagaaaccacttttattatatagatcgggtagggcgacagcaatgagagacaagccgacgcagagcaaagcagccggaggtagcacactaccgcgtactatacactactaaagcagtaggatagacctgacgtatcacggcactacacctgcaaacacaacacatccacattcgctcacactcctctcatcatccatcctacccgacaccacacgaagacaacataagaacatctattgacccactcgcacatccatcacgctacttcacacaacaagaatcatttgcacatgatcgaataatataagttgatcatcccgactttcgatatcaagcagattgactcacaatccattcgataatatctacatagagacctgcgcaactcgtcaacccacagagaaagacaccagctactctctaagccagcacaacgcaccactgaagaaccgacagatccatcgacagtcatata

SEQ ID NO: 6731 - DNA, 2787 bp, Homo sapiens
cataaaagcgccggccctccgcttccccgcgagacgaaacttcccgtcccggcggctctggcacccaggtccggcctgcgccttcccgccaggcctggacactggttcaacacctgtgacttcatgtgtgcgcgccggccacacctgcagtcacacctgtagccccctctgccaagagatccataccgaggcagcgtcggtggctacaagccctcagtccacacctgtggacacctgtgacacctggccacacgacctgtggccgcggcctggcgtctgctgcgacaggagcccttacctcccctgttataacacctgaccgccacctaactgcccctgcagaaggagcaatggccttggctcctgagaggtaagagcccggcccaccctctccagatgccagtccccgagcgccctgcagccggccctgactctccgcggccgggcacccgcagggcagccccacgcgtgctgttcggagagtggctccttggagagatcagcagcggctgctatgaggggctgcagtggctggacgaggcccgcacctgtttccgcgtgccctggaagcacttcgcgcgcaaggacctgagcgaggccgacgcgcgcatcttcaaggcctgggctgtggcccgcggcaggtggccgcctagcagcaggggaggtggcccgccccccgaggctgagactgcggagcgcgccggctggaaaaccaacttccgctgcgcactgcgcagcacgcgtcgcttcgtgatgctgcgagataactcgggggacccggccgacccgcacaaggtgtacgcgctcagccgggagctgtgctggcgagaaggcccaggcacggaccagactgaggcagaggcccccgcagctgtcccaccaccacagggtgggcccccagggccattcctggcacacacacatgctggactccaagccccaggccccctccctgccccagctggtgacaagggggacctcctgctccaggcagtgcaacagagctgcctggcagaccatctgctgacagcgtcatggggggcagatccagtcccaaccaaggctcctggagagggacaagaagggcttcccctgactggggcctgtgctggaggcccagggctccctgctggggagctgtacgggtgggcagtagagacgacccccagccccgggccccagcccgcggcactaacgacaggcgaggccgcggccccagagtccccgcaccaggcagagccgtacctgtcaccctccccaagcgcctgcaccgcggtgcaagagcccagcccaggggcgctggacgtgaccatcatgtacaagggccgcacggtgctgcagaaggtggtgggacacccgagctgcacgttcctatacggccccccagacccagctgtccgggccacagacccccagcaggtagcattccccagccctgccgagctcccggaccagaagcagctgcgctacacggaggaactgctgcggcacgtggcccctgggttgcacctggagcttcgggggccacagctgtgggcccggcgcatgggcaagtgcaaggtgtactgggaggtgggcggacccccaggctccgccagcccctccaccccagcctgcctgctgcctcggaactgtgacacccccatcttcgacttcagagtcttcttccaagagctggtggaattccgggcacggcagcgccgtggctccccacgctataccatctacctgggcttcgggcaggacctgtcagctgggaggcccaaggagaagagcctggtcctggtgaagctggaaccctggctgtgccgagtgcacctagagggcacgcagcgtgagggtgtgtcttccctggatagcagcagcctcagcctctgcctgtccagcgccaacagcctctatgacgacatcgagtgcttccttatggagctggagcagcccgcctagaacccagtctaatgagaactccagaaagctggagcagcccacctagagctggccgcggccgcccagtctaataaaaagaactccagaacaaaaaaaagaggacaacaactgacaacacaacacacaccacacgactcctcaccgagcgacaacagagcacatccgccgcgctctcatttatgggcggacggccgcgcaaaacggcgactgcaaagcggggcccgactgtgcaaacaatgttttgtccgcaccacccattctgttctgtacacgagagggtgcgaacatatctgccggggggcgctcccccacataagagggggcggtccggcaataatcaatctggaagaaacagccaccgaggatagaaaccacttttattatatagatcgggtagggcgacagcaatgagagacaagccgacgcagagcaaagcagccggaggtagcacactaccgcgtactatacactactaaagcagtaggatagacctgacgtatcacggcactacacctgcaaacacaacacatccacattcgctcacactcctctcatcatccatcctacccgacaccacacgaagacaacataagaacatctattgacccactcgcacatccatcacgctacttcacacaacaagaatcatttgcacatgatcgaataatataagttgatcatcccgactttcgatatcaagcagattgactcacaatccattcgataatatctacatagagacctgcgcaactcgtcaacccacagagaaagacaccagctactctctaagccagcacaacgcaccactgaagaaccgacagatccatcgacagtcatata

SEQ ID NO: 6732 - DNA, 2923 bp, Homo sapiens
cataaaagcgccggccctccgcttccccgcgagacgaaacttcccgtcccggcggctctggcacccaggtccggcctgcgccttcccgccaggcctggacactggttcaacacctgtgacttcatgtgtgcgcgccggccacacctgcagtcacacctgtagccccctctgccaagagatccataccgaggcagcgtcggtggctacaagccctcagtccacacctgtggacacctgtgacacctggccacacgacctgtggccgcggcctggcgtctgctgcgacaggagcccttacctcccctgttataacacctgaccgccacctaactgcccctgcagaaggagcaatggccttggctcctgagagggcagccccacgcgtgctgttcggagagtggctccttggagagatcagcagcggctgctatgaggggctgcagtggctggacgaggcccgcacctgtttccgcgtgccctggaagcacttcgcgcgcaaggacctgagcgaggccgacgcgcgcatcttcaaggcctgggctgtggcccgcggcaggtggccgcctagcagcaggggaggtggcccgccccccgaggctgagactgcggagcgcgccggctggaaaaccaacttccgctgcgcactgcgcagcacgcgtcgcttcgtgatgctgcgagataactcgggggacccggccgacccgcacaaggtgtacgcgctcagccgggagctgtgctggcgagaaggcccaggcacggaccagactgaggcagaggcccccgcagctgtcccaccaccacagggtgggcccccagggccattcctggcacacacacatgctggactccaagccccaggccccctccctgccccagctggtgacaagggggacctcctgctccaggcagtgcaacagagctgcctggcagaccatctgctgacagcgtcatggggggcagatccagtcccaaccaaggctcctggagagggacaagaagggcttcccctgactggggcctgtgctggaggtgtgggcgtgcccggggagggggggagcgcgggaggggccagtgcacctggacggacactttagaagggggctggggattggggagctggagaattaggaggggaccaccgttcccactgtcctcccctcctcaggcccagggctccctgctggggagctgtacgggtgggcagtagagacgacccccagccccgggccccagcccgcggcactaacgacaggtgagaggggtaggggttgggaggcctggggcacagggagaggctagggatgaggtgccagcacaggattcccttccggatgcaggcgaggccgcggccccagagtccccgcaccaggcagagccgtacctgtcaccctccccaagcgcctgcaccgcggtgcaagagcccagcccaggggcgctggacgtgaccatcatgtacaagggccgcacggtgctgcagaaggtggtgggacacccgagctgcacgttcctatacggccccccagacccagctgtccgggccacagacccccagcaggtagcattccccagccctgccgagctcccggaccagaagcagctgcgctacacggaggaactgctgcggcacgtggcccctgggttgcacctggagcttcgggggccacagctgtgggcccggcgcatgggcaagtgcaaggtgtactgggaggtgggcggacccccaggctccgccagcccctccaccccagcctgcctgctgcctcggaactgtgacacccccatcttcgacttcagagtcttcttccaagagctggtggaattccgggcacggcagcgccgtggctccccacgctataccatctacctgggcttcgggcaggacctgtcagctgggaggcccaaggagaagagcctggtcctggtgaagctggaaccctggctgtgccgagtgcacctagagggcacgcagcgtgagggtgtgtcttccctggatagcagcagcctcagcctctgcctgtccagcgccaacagcctctatgacgacatcgagtgcttccttatggagctggagcagcccgcctagaacccagtctaatgagaactccagaaagctggagcagcccacctagagctggccgcggccgcccagtctaataaaaagaactccagaacaaaaaaaagaggacaacaactgacaacacaacacacaccacacgactcctcaccgagcgacaacagagcacatccgccgcgctctcatttatgggcggacggccgcgcaaaacggcgactgcaaagcggggcccgactgtgcaaacaatgttttgtccgcaccacccattctgttctgtacacgagagggtgcgaacatatctgccggggggcgctcccccacataagagggggcggtccggcaataatcaatctggaagaaacagccaccgaggatagaaaccacttttattatatagatcgggtagggcgacagcaatgagagacaagccgacgcagagcaaagcagccggaggtagcacactaccgcgtactatacactactaaagcagtaggatagacctgacgtatcacggcactacacctgcaaacacaacacatccacattcgctcacactcctctcatcatccatcctacccgacaccacacgaagacaacataagaacatctattgacccactcgcacatccatcacgctacttcacacaacaagaatcatttgcacatgatcgaataatataagttgatcatcccgactttcgatatcaagcagattgactcacaatccattcgataatatctacatagagacctgcgcaactcgtcaacccacagagaaagacaccagctactctctaagccagcacaacgcaccactgaagaaccgacagatccatcgacagtcatata

SEQ ID NO: 6733 - DNA, 2755 bp, Homo sapiens
acccgcccctgacgtcgcctttcccgtctccgcagggtccggcctgcgccttcccgccaggcctggacactggttcaacacctgtgacttcatgtgtgcgcgccggccacacctgcagtcacacctgtagccccctctgccaagagatccataccgaggcagcgtcggtggctacaagccctcagtccacacctgtggacacctgtgacacctggccacacgacctgtggccgcggcctggcgtctgctgcgacaggagcccttacctcccctgttataacacctgaccgccacctaactgcccctgcagaaggagcaatggccttggctcctgagaggtaagagcccggcccaccctctccagatgccagtccccgagcgccctgcagccggccctgactctccgcggccgggcacccgcagggcagccccacgcgtgctgttcggagagtggctccttggagagatcagcagcggctgctatgaggggctgcagtggctggacgaggcccgcacctgtttccgcgtgccctggaagcacttcgcgcgcaaggacctgagcgaggccgacgcgcgcatcttcaaggcctgggctgtggcccgcggcaggtggccgcctagcagcaggggaggtggcccgccccccgaggctgagactgcggagcgcgccggctggaaaaccaacttccgctgcgcactgcgcagcacgcgtcgcttcgtgatgctgcgagataactcgggggacccggccgacccgcacaaggtgtacgcgctcagccgggagctgtgctggcgagaaggcccaggcacggaccagactgaggcagaggcccccgcagctgtcccaccaccacagggtgggcccccagggccattcctggcacacacacatgctggactccaagccccaggccccctccctgccccagctggtgacaagggggacctcctgctccaggcagtgcaacagagctgcctggcagaccatctgctgacagcgtcatggggggcagatccagtcccaaccaaggctcctggagagggacaagaagggcttcccctgactggggcctgtgctggaggcccagggctccctgctggggagctgtacgggtgggcagtagagacgacccccagccccgggccccagcccgcggcactaacgacaggcgaggccgcggccccagagtccccgcaccaggcagagccgtacctgtcaccctccccaagcgcctgcaccgcggtgcaagagcccagcccaggggcgctggacgtgaccatcatgtacaagggccgcacggtgctgcagaaggtggtgggacacccgagctgcacgttcctatacggccccccagacccagctgtccgggccacagacccccagcaggtagcattccccagccctgccgagctcccggaccagaagcagctgcgctacacggaggaactgctgcggcacgtggcccctgggttgcacctggagcttcgggggccacagctgtgggcccggcgcatgggcaagtgcaaggtgtactgggaggtgggcggacccccaggctccgccagcccctccaccccagcctgcctgctgcctcggaactgtgacacccccatcttcgacttcagagtcttcttccaagagctggtggaattccgggcacggcagcgccgtggctccccacgctataccatctacctgggcttcgggcaggacctgtcagctgggaggcccaaggagaagagcctggtcctggtgaagctggaaccctggctgtgccgagtgcacctagagggcacgcagcgtgagggtgtgtcttccctggatagcagcagcctcagcctctgcctgtccagcgccaacagcctctatgacgacatcgagtgcttccttatggagctggagcagcccgcctagaacccagtctaatgagaactccagaaagctggagcagcccacctagagctggccgcggccgcccagtctaataaaaagaactccagaacaaaaaaaagaggacaacaactgacaacacaacacacaccacacgactcctcaccgagcgacaacagagcacatccgccgcgctctcatttatgggcggacggccgcgcaaaacggcgactgcaaagcggggcccgactgtgcaaacaatgttttgtccgcaccacccattctgttctgtacacgagagggtgcgaacatatctgccggggggcgctcccccacataagagggggcggtccggcaataatcaatctggaagaaacagccaccgaggatagaaaccacttttattatatagatcgggtagggcgacagcaatgagagacaagccgacgcagagcaaagcagccggaggtagcacactaccgcgtactatacactactaaagcagtaggatagacctgacgtatcacggcactacacctgcaaacacaacacatccacattcgctcacactcctctcatcatccatcctacccgacaccacacgaagacaacataagaacatctattgacccactcgcacatccatcacgctacttcacacaacaagaatcatttgcacatgatcgaataatataagttgatcatcccgactttcgatatcaagcagattgactcacaatccattcgataatatctacatagagacctgcgcaactcgtcaacccacagagaaagacaccagctactctctaagccagcacaacgcaccactgaagaaccgacagatccatcgacagtcatata

SEQ ID NO: 6734 - DNA, 2589 bp, Homo sapiens
  misc_feature (27)..(27): n is a, c, g, or t
tggctggtactggcccgaagttcgtantgattggcacccagggtccggcctgcgccttcccgccaggcctggacactggttcaacacctgtgacttcatgtgtgcgcgccggccacacctgcagtcacacctgtagccccctctgccaagagatccataccgaggcagcgtcggtggctacaagccctcagtccacacctgtggacacctgtgacacctggccacacgacctgtggccgcggcctggcgtctgctgcgacaggagcccttacctcccctgttataacacctgaccgccacctaactgcccctgcagaaggagcaatggccttggctcctgagagggcagccccacgcgtgctgttcggagagtggctccttggagagatcagcagcggctgctatgaggggctgcagtggctggacgaggcccgcacctgtttccgcgtgccctggaagcacttcgcgcgcaaggacctgagcgaggccgacgcgcgcatcttcaaggcctgggctgtggcccgcggcaggtggccgcctagcagcaggggaggtggcccgccccccgaggctgagactgcggagcgcgccggctggaaaaccaacttccgctgcgcactgcgcagcacgcgtcgcttcgtgatgctgcgagataactcgggggacccggccgacccgcacaaggtgtacgcgctcagccgggagctgtgctggcgagaaggcccaggcacggaccagactgaggcagaggcccccgcagctgtcccaccaccacagggtgggcccccagggccattcctggcacacacacatgctggactccaagccccaggccccctccctgccccagctggtgacaagggggacctcctgctccaggcagtgcaacagagctgcctggcagaccatctgctgacagcgtcatggggggcagatccagtcccaaccaaggctcctggagagggacaagaagggcttcccctgactggggcctgtgctggaggcgaggccgcggccccagagtccccgcaccaggcagagccgtacctgtcaccctccccaagcgcctgcaccgcggtgcaagagcccagcccaggggcgctggacgtgaccatcatgtacaagggccgcacggtgctgcagaaggtggtgggacacccgagctgcacgttcctatacggccccccagacccagctgtccgggccacagacccccagcaggtagcattccccagccctgccgagctcccggaccagaagcagctgcgctacacggaggaactgctgcggcacgtggcccctgggttgcacctggagcttcgggggccacagctgtgggcccggcgcatgggcaagtgcaaggtgtactgggaggtgggcggacccccaggctccgccagcccctccaccccagcctgcctgctgcctcggaactgtgacacccccatcttcgacttcagagtcttcttccaagagctggtggaattccgggcacggcagcgccgtggctccccacgctataccatctacctgggcttcgggcaggacctgtcagctgggaggcccaaggagaagagcctggtcctggtgaagctggaaccctggctgtgccgagtgcacctagagggcacgcagcgtgagggtgtgtcttccctggatagcagcagcctcagcctctgcctgtccagcgccaacagcctctatgacgacatcgagtgcttccttatggagctggagcagcccgcctagaacccagtctaatgagaactccagaaagctggagcagcccacctagagctggccgcggccgcccagtctaataaaaagaactccagaacaaaaaaaagaggacaacaactgacaacacaacacacaccacacgactcctcaccgagcgacaacagagcacatccgccgcgctctcatttatgggcggacggccgcgcaaaacggcgactgcaaagcggggcccgactgtgcaaacaatgttttgtccgcaccacccattctgttctgtacacgagagggtgcgaacatatctgccggggggcgctcccccacataagagggggcggtccggcaataatcaatctggaagaaacagccaccgaggatagaaaccacttttattatatagatcgggtagggcgacagcaatgagagacaagccgacgcagagcaaagcagccggaggtagcacactaccgcgtactatacactactaaagcagtaggatagacctgacgtatcacggcactacacctgcaaacacaacacatccacattcgctcacactcctctcatcatccatcctacccgacaccacacgaagacaacataagaacatctattgacccactcgcacatccatcacgctacttcacacaacaagaatcatttgcacatgatcgaataatataagttgatcatcccgactttcgatatcaagcagattgactcacaatccattcgataatatctacatagagacctgcgcaactcgtcaacccacagagaaagacaccagctactctctaagccagcacaacgcaccactgaagaaccgacagatccatcgacagtcatata

SEQ ID NO: 6735 - DNA, 2450 bp, Homo sapiens
  misc_feature (27)..(27): n is a, c, g, or t
tggctggtactggcccgaagttcgtantgattggcacccagggtccggcctgcgccttcccgccaggcctggacactggttcaacacctgtgacttcatgtgtgcgcgccggccacacctgcagtcacacctgtagccccctctgccaagagatccataccgaggcagcgtcggtggctacaagccctcagtccacacctgtggacacctgtgacacctggccacacgacctgtggccgcggcctggcgtctgctgcgacaggagcccttacctcccctgttataacacctgaccgccacctaactgcccctgcagaaggagcaatggccttggctcctgagagggcagccccacgcgtgctgttcggagagtggctccttggagagatcagcagcggctgctatgaggggctgcagtggctggacgaggcccgcacctgtttccgcgtgccctggaagcacttcgcgcgcaaggacctgagcgaggccgacgcgcgcatcttcaaggcctgggctgtggcccgcggcaggtggccgcctagcagcaggggaggtggcccgccccccgaggctgagactgcggagcgcgccggctggaaaaccaacttccgctgcgcactgcgcagcacgcgtcgcttcgtgatgctgcgagataactcgggggacccggccgacccgcacaaggtgtacgcgctcagccgggagctgtgctggcgagaaggcccaggcacggaccagactgaggcagaggcccccgcagctgtcccaccaccacaggcccagggctccctgctggggagctgtacgggtgggcagtagagacgacccccagccccgggccccagcccgcggcactaacgacaggcgaggccgcggccccagagtccccgcaccaggcagagccgtacctgtcaccctccccaagcgcctgcaccgcggtgcaagagcccagcccaggggcgctggacgtgaccatcatgtacaagggccgcacggtgctgcagaaggtggtgggacacccgagctgcacgttcctatacggccccccagacccagctgtccgggccacagacccccagcaggtagcattccccagccctgccgagctcccggaccagaagcagctgcgctacacggaggaactgctgcggcacgtggcccctgggttgcacctggagcttcgggggccacagctgtgggcccggcgcatgggcaagtgcaaggtgtactgggaggtgggcggacccccaggctccgccagcccctccaccccagcctgcctgctgcctcggaactgtgacacccccatcttcgacttcagagtcttcttccaagagctggtggaattccgggcacggcagcgccgtggctccccacgctataccatctacctgggcttcgggcaggacctgtcagctgggaggcccaaggagaagagcctggtcctggtgaagctggaaccctggctgtgccgagtgcacctagagggcacgcagcgtgagggtgtgtcttccctggatagcagcagcctcagcctctgcctgtccagcgccaacagcctctatgacgacatcgagtgcttccttatggagctggagcagcccgcctagaacccagtctaatgagaactccagaaagctggagcagcccacctagagctggccgcggccgcccagtctaataaaaagaactccagaacaaaaaaaagaggacaacaactgacaacacaacacacaccacacgactcctcaccgagcgacaacagagcacatccgccgcgctctcatttatgggcggacggccgcgcaaaacggcgactgcaaagcggggcccgactgtgcaaacaatgttttgtccgcaccacccattctgttctgtacacgagagggtgcgaacatatctgccggggggcgctcccccacataagagggggcggtccggcaataatcaatctggaagaaacagccaccgaggatagaaaccacttttattatatagatcgggtagggcgacagcaatgagagacaagccgacgcagagcaaagcagccggaggtagcacactaccgcgtactatacactactaaagcagtaggatagacctgacgtatcacggcactacacctgcaaacacaacacatccacattcgctcacactcctctcatcatccatcctacccgacaccacacgaagacaacataagaacatctattgacccactcgcacatccatcacgctacttcacacaacaagaatcatttgcacatgatcgaataatataagttgatcatcccgactttcgatatcaagcagattgactcacaatccattcgataatatctacatagagacctgcgcaactcgtcaacccacagagaaagacaccagctactctctaagccagcacaacgcaccactgaagaaccgacagatccatcgacagtcatata

SEQ ID NO: 6736 - DNA, 2502 bp, Homo sapiens
  misc_feature (27)..(27): n is a, c, g, or t
tggctggtactggcccgaagttcgtantgattggcacccagggtccggcctgcgccttcccgccaggcctggacactggttcaacacctgtgacttcatgtgtgcgcgccggccacagtccctggttcaacacctgtgacttcatgtgtgcgcgccggccacacctgcacctgcagtcacacctgtagccccctctgccaagagatccataccgaggcagcgtcggtggctacaagccctcagtccacacctgtggacacctgtgacacctggccacacgacctgtggccgcggcctggcgtctgctgcgacaggagcccttacctcccctgttataacacctgaccgccacctaactgcccctgcagaaggagcaatggccttggctcctgagagggcagccccacgcgtgctgttcggagagtggctccttggagagatcagcagcggctgctatgaggggctgcagtggctggacgaggcccgcacctgtttccgcgtgccctggaagcacttcgcgcgcaaggacctgagcgaggccgacgcgcgcatcttcaaggcctgggctgtggcccgcggcaggtggccgcctagcagcaggggaggtggcccgccccccgaggctgagactgcggagcgcgccggctggaaaaccaacttccgctgcgcactgcgcagcacgcgtcgcttcgtgatgctgcgagataactcgggggacccggccgacccgcacaaggtgtacgcgctcagccgggagctgtgctggcgagaaggcccaggcacggaccagactgaggcagaggcccccgcagctgtcccaccaccacaggcccagggctccctgctggggagctgtacgggtgggcagtagagacgacccccagccccgggccccagcccgcggcactaacgacaggcgaggccgcggccccagagtccccgcaccaggcagagccgtacctgtcaccctccccaagcgcctgcaccgcggtgcaagagcccagcccaggggcgctggacgtgaccatcatgtacaagggccgcacggtgctgcagaaggtggtgggacacccgagctgcacgttcctatacggccccccagacccagctgtccgggccacagacccccagcaggtagcattccccagccctgccgagctcccggaccagaagcagctgcgctacacggaggaactgctgcggcacgtggcccctgggttgcacctggagcttcgggggccacagctgtgggcccggcgcatgggcaagtgcaaggtgtactgggaggtgggcggacccccaggctccgccagcccctccaccccagcctgcctgctgcctcggaactgtgacacccccatcttcgacttcagagtcttcttccaagagctggtggaattccgggcacggcagcgccgtggctccccacgctataccatctacctgggcttcgggcaggacctgtcagctgggaggcccaaggagaagagcctggtcctggtgaagctggaaccctggctgtgccgagtgcacctagagggcacgcagcgtgagggtgtgtcttccctggatagcagcagcctcagcctctgcctgtccagcgccaacagcctctatgacgacatcgagtgcttccttatggagctggagcagcccgcctagaacccagtctaatgagaactccagaaagctggagcagcccacctagagctggccgcggccgcccagtctaataaaaagaactccagaacaaaaaaaagaggacaacaactgacaacacaacacacaccacacgactcctcaccgagcgacaacagagcacatccgccgcgctctcatttatgggcggacggccgcgcaaaacggcgactgcaaagcggggcccgactgtgcaaacaatgttttgtccgcaccacccattctgttctgtacacgagagggtgcgaacatatctgccggggggcgctcccccacataagagggggcggtccggcaataatcaatctggaagaaacagccaccgaggatagaaaccacttttattatatagatcgggtagggcgacagcaatgagagacaagccgacgcagagcaaagcagccggaggtagcacactaccgcgtactatacactactaaagcagtaggatagacctgacgtatcacggcactacacctgcaaacacaacacatccacattcgctcacactcctctcatcatccatcctacccgacaccacacgaagacaacataagaacatctattgacccactcgcacatccatcacgctacttcacacaacaagaatcatttgcacatgatcgaataatataagttgatcatcccgactttcgatatcaagcagattgactcacaatccattcgataatatctacatagagacctgcgcaactcgtcaacccacagagaaagacaccagctactctctaagccagcacaacgcaccactgaagaaccgacagatccatcgacagtcatata

SEQ ID NO: 6737 - DNA, 2744 bp, Homo sapiens
gctggtacggccggatttgggattggcacccaggtccggcctgcgccttcccgccaggcctggacactggttcaacacctgtgacttcatgtgtgcgcgccggccacacctgcagtcacacctgtagccccctctgccaagagatccataccgaggcagcgtcggtggctacaagccctcagtccacacctgtggacacctgtgacacctggccacacgacctgtggccgcggcctggcgtctgctgcgacaggagcccttacctcccctgttataacacctgaccgccacctaactgcccctgcagaaggagcaatggccttggctcctgagagggcagccccacgcgtgctgttcggagagtggctccttggagagatcagcagcggctgctatgaggggctgcagtggctggacgaggcccgcacctgtttccgcgtgccctggaagcacttcgcgcgcaaggacctgagcgaggccgacgcgcgcatcttcaaggcctgggctgtggcccgcggcaggtggccgcctagcagcaggggaggtggcccgccccccgaggctgagactgcggagcgcgccggctggaaaaccaacttccgctgcgcactgcgcagcacgcgtcgcttcgtgatgctgcgagataactcgggggacccggccgacccgcacaaggtgtacgcgctcagccgggagctgtgctggcgagaaggcccaggcacggaccagactgaggcagaggcccccgcagctgtcccaccaccacagggtacccttctctctgcctgcctctcctcctgccaggccgcggagctgcttacgttcaccctgacttttccctgcagggtgggcccccagggccattcctggcacacacacatgctggactccaagccccaggccccctccctgccccagctggtgacaagggggacctcctgctccaggcagtgcaacagagctgcctggcagaccatctgctgacagcgtcatggggggcagatccagtcccaaccaaggctcctggagagggacaagaagggcttcccctgactggggcctgtgctggaggcccagggctccctgctggggagctgtacgggtgggcagtagagacgacccccagccccgggccccagcccgcggcactaacgacaggcgaggccgcggccccagagtccccgcaccaggcagagccgtacctgtcaccctccccaagcgcctgcaccgcggtgcaagagcccagcccaggggcgctggacgtgaccatcatgtacaagggccgcacggtgctgcagaaggtggtgggacacccgagctgcacgttcctatacggccccccagacccagctgtccgggccacagacccccagcaggtagcattccccagccctgccgagctcccggaccagaagcagctgcgctacacggaggaactgctgcggcacgtggcccctgggttgcacctggagcttcgggggccacagctgtgggcccggcgcatgggcaagtgcaaggtgtactgggaggtgggcggacccccaggctccgccagcccctccaccccagcctgcctgctgcctcggaactgtgacacccccatcttcgacttcagagtcttcttccaagagctggtggaattccgggcacggcagcgccgtggctccccacgctataccatctacctgggcttcgggcaggacctgtcagctgggaggcccaaggagaagagcctggtcctggtgaagctggaaccctggctgtgccgagtgcacctagagggcacgcagcgtgagggtgtgtcttccctggatagcagcagcctcagcctctgcctgtccagcgccaacagcctctatgacgacatcgagtgcttccttatggagctggagcagcccgcctagaacccagtctaatgagaactccagaaagctggagcagcccacctagagctggccgcggccgcccagtctaataaaaagaactccagaacaaaaaaaagaggacaacaactgacaacacaacacacaccacacgactcctcaccgagcgacaacagagcacatccgccgcgctctcatttatgggcggacggccgcgcaaaacggcgactgcaaagcggggcccgactgtgcaaacaatgttttgtccgcaccacccattctgttctgtacacgagagggtgcgaacatatctgccggggggcgctcccccacataagagggggcggtccggcaataatcaatctggaagaaacagccaccgaggatagaaaccacttttattatatagatcgggtagggcgacagcaatgagagacaagccgacgcagagcaaagcagccggaggtagcacactaccgcgtactatacactactaaagcagtaggatagacctgacgtatcacggcactacacctgcaaacacaacacatccacattcgctcacactcctctcatcatccatcctacccgacaccacacgaagacaacataagaacatctattgacccactcgcacatccatcacgctacttcacacaacaagaatcatttgcacatgatcgaataatataagttgatcatcccgactttcgatatcaagcagattgactcacaatccattcgataatatctacatagagacctgcgcaactcgtcaacccacagagaaagacaccagctactctctaagccagcacaacgcaccactgaagaaccgacagatccatcgacagtcatata

SEQ ID NO: 6738 - DNA, 2921 bp, Homo sapiens
acccgcccctgacgtcgcctttcccgtctccgcagggtccggcctgcgccttcccgccaggcctggacactggttcaacacctgtgacttcatgtgtgcgcgccggccacacctgcagtcacacctgtagccccctctgccaagagatccataccgaggcagcgtcggtggctacaagccctcagtccacacctgtggacacctgtgacacctggccacacgacctgtggccgcggcctggcgtctgctgcgacaggagcccttacctcccctgttataacacctgaccgccacctaactgcccctgcagaaggagcaatggccttggctcctgagaggtaagagcccggcccaccctctccagatgccagtccccgagcgccctgcagccggccctgactctccgcggccgggcacccgcagggcagccccacgcgtgctgttcggagagtggctccttggagagatcagcagcggctgctatgaggggctgcagtggctggacgaggcccgcacctgtttccgcgtgccctggaagcacttcgcgcgcaaggacctgagcgaggccgacgcgcgcatcttcaaggtggggaccccagccccgccccgccccgggtgggagagcccgcctaggaccccgcgggcccggcacacgtgttctgtccccctcttcaggcctgggctgtggcccgcggcaggtggccgcctagcagcaggggaggtggcccgccccccgaggctgagactgcggagcgcgccggctggaaaaccaacttccgctgcgcactgcgcagcacgcgtcgcttcgtgatgctgcgagataactcgggggacccggccgacccgcacaaggtgtacgcgctcagccgggagctgtgctggcgagaaggcccaggcacggaccagactgaggcagaggcccccgcagctgtcccaccaccacagggtacccttctctctgcctgcctctcctcctgccaggccgcggagctgcttacgttcaccctgacttttccctgcagggtgggcccccagggccattcctggcacacacacatgctggactccaagccccaggccccctccctgccccagctggtgacaagggggacctcctgctccaggcagtgcaacagagctgcctggcagaccatctgctgacagcgtcatggggggcagatccagtcccaaccaaggctcctggagagggacaagaagggcttcccctgactggggcctgtgctggaggcccagggctccctgctggggagctgtacgggtgggcagtagagacgacccccagccccgggccccagcccgcggcactaacgacaggcgaggccgcggccccagagtccccgcaccaggcagagccgtacctgtcaccctccccaagcgcctgcaccgcggtgcaagagcccagcccaggggcgctggacgtgaccatcatgtacaagggccgcacggtgctgcagaaggtggtgggacacccgagctgcacgttcctatacggccccccagacccagctgtccgggccacagacccccagcaggtagcattccccagccctgccgagctcccggaccagaagcagctgcgctacacggaggaactgctgcggcacgtggcccctgggttgcacctggagcttcgggggccacagctgtgggcccggcgcatgggcaagtgcaaggtgtactgggaggtgggcggacccccaggctccgccagcccctccaccccagcctgcctgctgcctcggaactgtgacacccccatcttcgacttcagagtcttcttccaagagctggtggaattccgggcacggcagcgccgtggctccccacgctataccatctacctgggcttcgggcaggacctgtcagctgggaggcccaaggagaagagcctggtcctggtgaagctggaaccctggctgtgccgagtgcacctagagggcacgcagcgtgagggtgtgtcttccctggatagcagcagcctcagcctctgcctgtccagcgccaacagcctctatgacgacatcgagtgcttccttatggagctggagcagcccgcctagaacccagtctaatgagaactccagaaagctggagcagcccacctagagctggccgcggccgcccagtctaataaaaagaactccagaacaaaaaaaagaggacaacaactgacaacacaacacacaccacacgactcctcaccgagcgacaacagagcacatccgccgcgctctcatttatgggcggacggccgcgcaaaacggcgactgcaaagcggggcccgactgtgcaaacaatgttttgtccgcaccacccattctgttctgtacacgagagggtgcgaacatatctgccggggggcgctcccccacataagagggggcggtccggcaataatcaatctggaagaaacagccaccgaggatagaaaccacttttattatatagatcgggtagggcgacagcaatgagagacaagccgacgcagagcaaagcagccggaggtagcacactaccgcgtactatacactactaaagcagtaggatagacctgacgtatcacggcactacacctgcaaacacaacacatccacattcgctcacactcctctcatcatccatcctacccgacaccacacgaagacaacataagaacatctattgacccactcgcacatccatcacgctacttcacacaacaagaatcatttgcacatgatcgaataatataagttgatcatcccgactttcgatatcaagcagattgactcacaatccattcgataatatctacatagagacctgcgcaactcgtcaacccacagagaaagacaccagctactctctaagccagcacaacgcaccactgaagaaccgacagatccatcgacagtcatata

SEQ ID NO: 6739 - DNA, 2868 bp, Homo sapiens
cataaaagcgccggccctccgcttccccgcgagacgaaacttcccgtcccggcggctctggcacccaggtccggcctgcgccttcccgccaggcctggacactggttcaacacctgtgacttcatgtgtgcgcgccggccacacctgcagtcacacctgtagccccctctgccaagagatccataccgaggcagcgtcggtggctacaagccctcagtccacacctgtggacacctgtgacacctggccacacgacctgtggccgcggcctggcgtctgctgcgacaggagcccttacctcccctgttataacacctgaccgccacctaactgcccctgcagaaggagcaatggccttggctcctgagagggcagccccacgcgtgctgttcggagagtggctccttggagagatcagcagcggctgctatgaggggctgcagtggctggacgaggcccgcacctgtttccgcgtgccctggaagcacttcgcgcgcaaggacctgagcgaggccgacgcgcgcatcttcaaggtggggaccccagccccgccccgccccgggtgggagagcccgcctaggaccccgcgggcccggcacacgtgttctgtccccctcttcaggcctgggctgtggcccgcggcaggtggccgcctagcagcaggggaggtggcccgccccccgaggctgagactgcggagcgcgccggctggaaaaccaacttccgctgcgcactgcgcagcacgcgtcgcttcgtgatgctgcgagataactcgggggacccggccgacccgcacaaggtgtacgcgctcagccgggagctgtgctggcgagaaggcccaggcacggaccagactgaggcagaggcccccgcagctgtcccaccaccacagggtacccttctctctgcctgcctctcctcctgccaggccgcggagctgcttacgttcaccctgacttttccctgcagggtgggcccccagggccattcctggcacacacacatgctggactccaagccccaggccccctccctgccccagctggtgacaagggggacctcctgctccaggcagtgcaacagagctgcctggcagaccatctgctgacagcgtcatggggggcagatccagtcccaaccaaggctcctggagagggacaagaagggcttcccctgactggggcctgtgctggaggcccagggctccctgctggggagctgtacgggtgggcagtagagacgacccccagccccgggccccagcccgcggcactaacgacaggcgaggccgcggccccagagtccccgcaccaggcagagccgtacctgtcaccctccccaagcgcctgcaccgcggtgcaagagcccagcccaggggcgctggacgtgaccatcatgtacaagggccgcacggtgctgcagaaggtggtgggacacccgagctgcacgttcctatacggccccccagacccagctgtccgggccacagacccccagcaggtagcattccccagccctgccgagctcccggaccagaagcagctgcgctacacggaggaactgctgcggcacgtggcccctgggttgcacctggagcttcgggggccacagctgtgggcccggcgcatgggcaagtgcaaggtgtactgggaggtgggcggacccccaggctccgccagcccctccaccccagcctgcctgctgcctcggaactgtgacacccccatcttcgacttcagagtcttcttccaagagctggtggaattccgggcacggcagcgccgtggctccccacgctataccatctacctgggcttcgggcaggacctgtcagctgggaggcccaaggagaagagcctggtcctggtgaagctggaaccctggctgtgccgagtgcacctagagggcacgcagcgtgagggtgtgtcttccctggatagcagcagcctcagcctctgcctgtccagcgccaacagcctctatgacgacatcgagtgcttccttatggagctggagcagcccgcctagaacccagtctaatgagaactccagaaagctggagcagcccacctagagctggccgcggccgcccagtctaataaaaagaactccagaacaaaaaaaagaggacaacaactgacaacacaacacacaccacacgactcctcaccgagcgacaacagagcacatccgccgcgctctcatttatgggcggacggccgcgcaaaacggcgactgcaaagcggggcccgactgtgcaaacaatgttttgtccgcaccacccattctgttctgtacacgagagggtgcgaacatatctgccggggggcgctcccccacataagagggggcggtccggcaataatcaatctggaagaaacagccaccgaggatagaaaccacttttattatatagatcgggtagggcgacagcaatgagagacaagccgacgcagagcaaagcagccggaggtagcacactaccgcgtactatacactactaaagcagtaggatagacctgacgtatcacggcactacacctgcaaacacaacacatccacattcgctcacactcctctcatcatccatcctacccgacaccacacgaagacaacataagaacatctattgacccactcgcacatccatcacgctacttcacacaacaagaatcatttgcacatgatcgaataatataagttgatcatcccgactttcgatatcaagcagattgactcacaatccattcgataatatctacatagagacctgcgcaactcgtcaacccacagagaaagacaccagctactctctaagccagcacaacgcaccactgaagaaccgacagatccatcgacagtcatata

SEQ ID NO: 6740 - DNA, 2434 bp, Homo sapiens
gctggtactggccggaagtctctttggcagccccacgcgtgctgttcggagagtggctccttggagagatcagcagcggctgctatgaggggctgcagtggctggacgaggcccgcacctgtttccgcgtgccctggaagcacttcgcgcgcaaggacctgagcgaggccgacgcgcgcatcttcaaggcctgggctgtggcccgcggcaggtggccgcctagcagcaggggaggtggcccgccccccgaggctgagactgcggagcgcgccggctggaaaaccaacttccgctgcgcactgcgcagcacgcgtcgcttcgtgatgctgcgagataactcgggggacccggccgacccgcacaaggtgtacgcgctcagccgggagctgtgctggcgagaaggcccaggcacggaccagactgaggcagaggcccccgcagctgtcccaccaccacagggtacccttctctctgcctgcctctcctcctgccaggccgcggagctgcttacgttcaccctgacttttccctgcagggtgggcccccagggccattcctggcacacacacatgctggactccaagccccaggccccctccctgccccagctggtgacaagggggacctcctgctccaggcagtgcaacagagctgcctggcagaccatctgctgacagcgtcatggggggcagatccagtcccaaccaaggctcctggagagggacaagaagggcttcccctgactggggcctgtgctggaggcccagggctccctgctggggagctgtacgggtgggcagtagagacgacccccagccccgggccccagcccgcggcactaacgacaggcgaggccgcggccccagagtccccgcaccaggcagagccgtacctgtcaccctccccaagcgcctgcaccgcggtgcaagagcccagcccaggggcgctggacgtgaccatcatgtacaagggccgcacggtgctgcagaaggtggtgggacacccgagctgcacgttcctatacggccccccagacccagctgtccgggccacagacccccagcaggtagcattccccagccctgccgagctcccggaccagaagcagctgcgctacacggaggaactgctgcggcacgtggcccctgggttgcacctggagcttcgggggccacagctgtgggcccggcgcatgggcaagtgcaaggtgtactgggaggtgggcggacccccaggctccgccagcccctccaccccagcctgcctgctgcctcggaactgtgacacccccatcttcgacttcagagtcttcttccaagagctggtggaattccgggcacggcagcgccgtggctccccacgctataccatctacctgggcttcgggcaggacctgtcagctgggaggcccaaggagaagagcctggtcctggtgaagctggaaccctggctgtgccgagtgcacctagagggcacgcagcgtgagggtgtgtcttccctggatagcagcagcctcagcctctgcctgtccagcgccaacagcctctatgacgacatcgagtgcttccttatggagctggagcagcccgcctagaacccagtctaatgagaactccagaaagctggagcagcccacctagagctggccgcggccgcccagtctaataaaaagaactccagaacaaaaaaaagaggacaacaactgacaacacaacacacaccacacgactcctcaccgagcgacaacagagcacatccgccgcgctctcatttatgggcggacggccgcgcaaaacggcgactgcaaagcggggcccgactgtgcaaacaatgttttgtccgcaccacccattctgttctgtacacgagagggtgcgaacatatctgccggggggcgctcccccacataagagggggcggtccggcaataatcaatctggaagaaacagccaccgaggatagaaaccacttttattatatagatcgggtagggcgacagcaatgagagacaagccgacgcagagcaaagcagccggaggtagcacactaccgcgtactatacactactaaagcagtaggatagacctgacgtatcacggcactacacctgcaaacacaacacatccacattcgctcacactcctctcatcatccatcctacccgacaccacacgaagacaacataagaacatctattgacccactcgcacatccatcacgctacttcacacaacaagaatcatttgcacatgatcgaataatataagttgatcatcccgactttcgatatcaagcagattgactcacaatccattcgataatatctacatagagacctgcgcaactcgtcaacccacagagaaagacaccagctactctctaagccagcacaacgcaccactgaagaaccgacagatccatcgacagtcatata

SEQ ID NO: 6741 - DNA, 2644 bp, Homo sapiens
cataaaagcgccggccctccgcttccccgcgagacgaaacttcccgtcccggcggctctggcacccaggtccggcctgcgccttcccgccaggcctggacactggttcaacacctgtgacttcatgtgtgcgcgccggccacacctgcagtcacacctgtagccccctctgccaagagatccataccgaggcagcgtcggtggctacaagccctcagtccacacctgtggacacctgtgacacctggccacacgacctgtggccgcggcctggcgtctgctgcgacaggagcccttacctcccctgttataacacctgaccgccacctaactgcccctgcagaaggagcaatggccttggctcctgagagggcagccccacgcgtgctgttcggagagtggctccttggagagatcagcagcggctgctatgaggggctgcagtggctggacgaggcccgcacctgtttccgcgtgccctggaagcacttcgcgcgcaaggacctgagcgaggccgacgcgcgcatcttcaaggcctgggctgtggcccgcggcaggtggccgcctagcagcaggggaggtggcccgccccccgaggctgagactgcggagcgcgccggctggaaaaccaacttccgctgcgcactgcgcagcacgcgtcgcttcgtgatgctgcgagataactcgggggacccggccgacccgcacaaggtgtacgcgctcagccgggagctgtgctggcgagaaggcccaggcacggaccagactgaggcagaggcccccgcagctgtcccaccaccacagggtgggcccccagggccattcctggcacacacacatgctggactccaagccccaggccccctccctgccccagctggtgacaagggggacctcctgctccaggcagtgcaacagagctgcctggcagaccatctgctgacagcgtcatggggggcagatccagtcccaaccaaggctcctggagagggacaagaagggcttcccctgactggggcctgtgctggaggcccagggctccctgctggggagctgtacgggtgggcagtagagacgacccccagccccgggccccagcccgcggcactaacgacaggcgaggccgcggccccagagtccccgcaccaggcagagccgtacctgtcaccctccccaagcgcctgcaccgcggtgcaagagcccagcccaggggcgctggacgtgaccatcatgtacaagggccgcacggtgctgcagaaggtggtgggacacccgagctgcacgttcctatacggccccccagacccagctgtccgggccacagacccccagcaggtagcattccccagccctgccgagctcccggaccagaagcagctgcgctacacggaggaactgctgcggcacgtggcccctgggttgcacctggagtgggcggacccccaggctccgccagcccctccaccccagcctgcctgctgcctcggaactgtgacacccccatcttcgacttcagagtcttcttccaagagctggtggaattccgggcacggcagcgccgtggctccccacgctataccatctacctgggcttcgggcaggacctgtcagctgggaggcccaaggagaagagcctggtcctggtgaagctggaaccctggctgtgccgagtgcacctagagggcacgcagcgtgagggtgtgtcttccctggatagcagcagcctcagcctctgcctgtccagcgccaacagcctctatgacgacatcgagtgcttccttatggagctggagcagcccgcctagaacccagtctaatgagaactccagaaagctggagcagcccacctagagctggccgcggccgcccagtctaataaaaagaactccagaacaaaaaaaagaggacaacaactgacaacacaacacacaccacacgactcctcaccgagcgacaacagagcacatccgccgcgctctcatttatgggcggacggccgcgcaaaacggcgactgcaaagcggggcccgactgtgcaaacaatgttttgtccgcaccacccattctgttctgtacacgagagggtgcgaacatatctgccggggggcgctcccccacataagagggggcggtccggcaataatcaatctggaagaaacagccaccgaggatagaaaccacttttattatatagatcgggtagggcgacagcaatgagagacaagccgacgcagagcaaagcagccggaggtagcacactaccgcgtactatacactactaaagcagtaggatagacctgacgtatcacggcactacacctgcaaacacaacacatccacattcgctcacactcctctcatcatccatcctacccgacaccacacgaagacaacataagaacatctattgacccactcgcacatccatcacgctacttcacacaacaagaatcatttgcacatgatcgaataatataagttgatcatcccgactttcgatatcaagcagattgactcacaatccattcgataatatctacatagagacctgcgcaactcgtcaacccacagagaaagacaccagctactctctaagccagcacaacgcaccactgaagaaccgacagatccatcgacagtcatata

SEQ ID NO: 6742 - DNA, 2870 bp, Homo sapiens
cataaaagcgccggccctccgcttccccgcgagacgaaacttcccgtcccggcggctctggcacccaggtccggcctgcgccttcccgccaggcctggacactggttcaacacctgtgacttcatgtgtgcgcgccggccacacctgcagtcacacctgtagccccctctgccaagagatccataccgaggcagcgtcggtggctacaagccctcagtccacacctgtggacacctgtgacacctggccacacgacctgtggccgcggcctggcgtctgctgcgacaggagcccttacctcccctgttataacacctgaccgccacctaactgcccctgcagaaggagcaatggccttggctcctgagagggcagccccacgcgtgctgttcggagagtggctccttggagagatcagcagcggctgctatgaggggctgcagtggctggacgaggcccgcacctgtttccgcgtgccctggaagcacttcgcgcgcaaggacctgagcgaggccgacgcgcgcatcttcaaggcctgggctgtggcccgcggcaggtggccgcctagcagcaggggaggtggcccgccccccgaggctgagactgcggagcgcgccggctggaaaaccaacttccgctgcgcactgcgcagcacgcgtcgcttcgtgatgctgcgagataactcgggggacccggccgacccgcacaaggtgtacgcgctcagccgggagctgtgctggcgagaaggcccaggcacggaccagactgaggcagaggcccccgcagctgtcccaccaccacagggtgggcccccagggccattcctggcacacacacatgctggactccaagccccaggccccctccctgccccagctggtgacaagggggacctcctgctccaggcagtgcaacagagctgcctggcagaccatctgctgacagcgtcatggggggcagatccagtcccaaccaaggctcctggagagggacaagaagggcttcccctgactggggcctgtgctggaggcccagggctccctgctggggagctgtacgggtgggcagtagagacgacccccagccccgggccccagcccgcggcactaacgacaggtgagaggggtaggggttgggaggcctggggcacagggagaggctagggatgaggtgccagcacaggattcccttccggatgcaggcgaggccgcggccccagagtccccgcaccaggcagagccgtacctgtcaccctccccaagcgcctgcaccgcggtgcaagagcccagcccaggggcgctggacgtgaccatcatgtacaagggccgcacggtgctgcagaaggtggtgggacacccgagctgcacgttcctatacggccccccagacccagctgtccgggccacagacccccagcaggtagcattccccagccctgccgagctcccggaccagaagcagctgcgctacacggaggaactgctgcggcacgtggcccctgggttgcacctggagcttcgggggccacagctgtgggcccggcgcatgggcaagtgcaaggtgtactgggaggtgggcggacccccaggctccgccagcccctccaccccagcctgcctgctgcctcggaactgtgacacccccatcttcgacttcagagtcttcttccaaggtcagtgaggcccttgcctggggggctgtctccaggggtccttgggagcacctgcctgccaggtactcagcagagtccccttcagctggtggaattccgggcacggcagcgccgtggctccccacgctataccatctacctgggcttcgggcaggacctgtcagctgggaggcccaaggagaagagcctggtcctggtgaagctggaaccctggctgtgccgagtgcacctagagggcacgcagcgtgagggtgtgtcttccctggatagcagcagcctcagcctctgcctgtccagcgccaacagcctctatgacgacatcgagtgcttccttatggagctggagcagcccgcctagaacccagtctaatgagaactccagaaagctggagcagcccacctagagctggccgcggccgcccagtctaataaaaagaactccagaacaaaaaaaagaggacaacaactgacaacacaacacacaccacacgactcctcaccgagcgacaacagagcacatccgccgcgctctcatttatgggcggacggccgcgcaaaacggcgactgcaaagcggggcccgactgtgcaaacaatgttttgtccgcaccacccattctgttctgtacacgagagggtgcgaacatatctgccggggggcgctcccccacataagagggggcggtccggcaataatcaatctggaagaaacagccaccgaggatagaaaccacttttattatatagatcgggtagggcgacagcaatgagagacaagccgacgcagagcaaagcagccggaggtagcacactaccgcgtactatacactactaaagcagtaggatagacctgacgtatcacggcactacacctgcaaacacaacacatccacattcgctcacactcctctcatcatccatcctacccgacaccacacgaagacaacataagaacatctattgacccactcgcacatccatcacgctacttcacacaacaagaatcatttgcacatgatcgaataatataagttgatcatcccgactttcgatatcaagcagattgactcacaatccattcgataatatctacatagagacctgcgcaactcgtcaacccacagagaaagacaccagctactctctaagccagcacaacgcaccactgaagaaccgacagatccatcgacagtcatata

SEQ ID NO: 6743 - DNA, 2664 bp, Homo sapiens
cataaaagcgccggccctccgcttccccgcgagacgaaacttcccgtcccggcggctctggcacccaggtccggcctgcgccttcccgccaggcctggacactggttcaacacctgtgacttcatgtgtgcgcgccggccacacctgcagtcacacctgtagccccctctgccaagagatccataccgaggcagcgtcggtggctacaagccctcagtccacacctgtggacacctgtgacacctggccacacgacctgtggccgcggcctggcgtctgctgcgacaggagcccttacctcccctgttataacacctgaccgccacctaactgcccctgcagaaggagcaatggccttggctcctgagagggcagccccacgcgtgctgttcggagagtggctccttggagagatcagcagcggctgctatgaggggctgcagtggctggacgaggcccgcacctgtttccgcgtgccctggaagcacttcgcgcgcaaggacctgagcgaggccgacgcgcgcatcttcaaggcctgggctgtggcccgcggcaggtggccgcctagcagcaggggaggtggcccgccccccgaggctgagactgcggagcgcgccggctggaaaaccaacttccgctgcgcactgcgcagcacgcgtcgcttcgtgatgctgcgagataactcgggggacccggccgacccgcacaaggtgtacgcgctcagccgggagctgtgctggcgagaaggcccaggcacggaccagactgaggcagaggcccccgcagctgtcccaccaccacagggtgggcccccagggccattcctggcacacacacatgctggactccaagccccaggccccctccctgccccagctggtgacaagggggacctcctgctccaggcagtgcaacagagctgcctggcagaccatctgctgacagcgtcatggggggcagatccagtcccaaccaaggctcctggagagggacaagaagggcttcccctgactggggcctgtgctggaggcccagggctccctgctggggagctgtacgggtgggcagtagagacgacccccagccccgggccccagcccgcggcactaacgacaggtgagaggggtaggggttgggaggcctggggcacagggagaggctagggatgaggtgccagcacaggattcccttccggatgcaggcgaggccgcggccccagagtccccgcaccaggcagagccgtacctgtcaccctccccaagcgcctgcaccgcggtgcaagagcccagcccaggggcgctggacgtgaccatcatgtacaagggccgcacggtgctgcagaaggtggtgggacacccgagctgcacgttcctatacggccccccagacccagctgtccgggccacagacccccagcaggtagcattccccagccctgccgagctcccggaccagaagcagctgcgctacacggaggaactgctgcggcacgtggcccctgggttgcacctggagcttcgggggccacagctgtgggcccggcgcatggagctggtggaattccgggcacggcagcgccgtggctccccacgctataccatctacctgggcttcgggcaggacctgtcagctgggaggcccaaggagaagagcctggtcctggtgaagctggaaccctggctgtgccgagtgcacctagagggcacgcagcgtgagggtgtgtcttccctggatagcagcagcctcagcctctgcctgtccagcgccaacagcctctatgacgacatcgagtgcttccttatggagctggagcagcccgcctagaacccagtctaatgagaactccagaaagctggagcagcccacctagagctggccgcggccgcccagtctaataaaaagaactccagaacaaaaaaaagaggacaacaactgacaacacaacacacaccacacgactcctcaccgagcgacaacagagcacatccgccgcgctctcatttatgggcggacggccgcgcaaaacggcgactgcaaagcggggcccgactgtgcaaacaatgttttgtccgcaccacccattctgttctgtacacgagagggtgcgaacatatctgccggggggcgctcccccacataagagggggcggtccggcaataatcaatctggaagaaacagccaccgaggatagaaaccacttttattatatagatcgggtagggcgacagcaatgagagacaagccgacgcagagcaaagcagccggaggtagcacactaccgcgtactatacactactaaagcagtaggatagacctgacgtatcacggcactacacctgcaaacacaacacatccacattcgctcacactcctctcatcatccatcctacccgacaccacacgaagacaacataagaacatctattgacccactcgcacatccatcacgctacttcacacaacaagaatcatttgcacatgatcgaataatataagttgatcatcccgactttcgatatcaagcagattgactcacaatccattcgataatatctacatagagacctgcgcaactcgtcaacccacagagaaagacaccagctactctctaagccagcacaacgcaccactgaagaaccgacagatccatcgacagtcatata

SEQ ID NO: 6744 - DNA, 2735 bp, Homo sapiens
cataaaagcgccggccctccgcttccccgcgagacgaaacttcccgtcccggcggctctggcacccaggtccggcctgcgccttcccgccaggcctggacactggttcaacacctgtgacttcatgtgtgcgcgccggccacacctgcagtcacacctgtagccccctctgccaagagatccataccgaggcagcgtcggtggctacaagccctcagtccacacctgtggacacctgtgacacctggccacacgacctgtggccgcggcctggcgtctgctgcgacaggagcccttacctcccctgttataacacctgaccgccacctaactgcccctgcagaaggagcaatggccttggctcctgagagggcagccccacgcgtgctgttcggagagtggctccttggagagatcagcagcggctgctatgaggggctgcagtggctggacgaggcccgcacctgtttccgcgtgccctggaagcacttcgcgcgcaaggacctgagcgaggccgacgcgcgcatcttcaaggcctgggctgtggcccgcggcaggtggccgcctagcagcaggggaggtggcccgccccccgaggctgagactgcggagcgcgccggctggaaaaccaacttccgctgcgcactgcgcagcacgcgtcgcttcgtgatgctgcgagataactcgggggacccggccgacccgcacaaggtgtacgcgctcagccgggagctgtgctggcgagaaggcccaggcacggaccagactgaggcagaggcccccgcagctgtcccaccaccacagggtgggcccccagggccattcctggcacacacacatgctggactccaagccccaggccccctccctgccccagctggtgacaagggggacctcctgctccaggcagtgcaacagagctgcctggcagaccatctgctgacagcgtcatggggggcagatccagtcccaaccaaggctcctggagagggacaagaagggcttcccctgactggggcctgtgctggaggcccagggctccctgctggggagctgtacgggtgggcagtagagacgacccccagccccgggccccagcccgcggcactaacgacaggtgagaggggtaggggttgggaggcctggggcacagggagaggctagggatgaggtgccagcacaggattcccttccggatgcaggcgaggccgcggccccagagtccccgcaccaggcagagccgtacctgtcaccctccccaagcgcctgcaccgcggtgcaagagcccagcccaggggcgctggacgtgaccatcatgtacaagggccgcacggtgctgcagaaggtggtgggacacccgagctgcacgttcctatacggccccccagacccagctgtccgggccacagacccccagcaggtagcattccccagccctgccgagctcccggaccagaagcagctgcgctacacggaggaactgctgcggcacgtggcccctgggttgcacctggagcttcgggggccacagctgtgggcccggcgcatgggcaagtgcaaggtgtactgggaggtgggcggacccccaggctccgccagcccctccaccccagcctgcctgagctggtggaattccgggcacggcagcgccgtggctccccacgctataccatctacctgggcttcgggcaggacctgtcagctgggaggcccaaggagaagagcctggtcctggtgaagctggaaccctggctgtgccgagtgcacctagagggcacgcagcgtgagggtgtgtcttccctggatagcagcagcctcagcctctgcctgtccagcgccaacagcctctatgacgacatcgagtgcttccttatggagctggagcagcccgcctagaacccagtctaatgagaactccagaaagctggagcagcccacctagagctggccgcggccgcccagtctaataaaaagaactccagaacaaaaaaaagaggacaacaactgacaacacaacacacaccacacgactcctcaccgagcgacaacagagcacatccgccgcgctctcatttatgggcggacggccgcgcaaaacggcgactgcaaagcggggcccgactgtgcaaacaatgttttgtccgcaccacccattctgttctgtacacgagagggtgcgaacatatctgccggggggcgctcccccacataagagggggcggtccggcaataatcaatctggaagaaacagccaccgaggatagaaaccacttttattatatagatcgggtagggcgacagcaatgagagacaagccgacgcagagcaaagcagccggaggtagcacactaccgcgtactatacactactaaagcagtaggatagacctgacgtatcacggcactacacctgcaaacacaacacatccacattcgctcacactcctctcatcatccatcctacccgacaccacacgaagacaacataagaacatctattgacccactcgcacatccatcacgctacttcacacaacaagaatcatttgcacatgatcgaataatataagttgatcatcccgactttcgatatcaagcagattgactcacaatccattcgataatatctacatagagacctgcgcaactcgtcaacccacagagaaagacaccagctactctctaagccagcacaacgcaccactgaagaaccgacagatccatcgacagtcatata

SEQ ID NO: 6745 - DNA, 2210 bp, Homo sapiens
cataaaagcgccggccctccgcttccccgcgagacgaaacttcccgtcccggcggctctggcacccaggtccggcctgcgccttcccgccaggcctggacactggttcaacacctgtgacttcatgtgtgcgcgccggccacacctgcagtcacacctgtagccccctctgccaagagatccataccgaggcagcgtcggtggctacaagccctcagtccacacctgtggacacctgtgacacctggccacacgacctgtggccgcggcctggcgtctgctgcgacaggagcccttacctcccctgttataacacctgaccgccacctaactgcccctgcagaaggagcaatggccttggctcctgagagggcagccccacgcgtgctgttcggagagtggctccttggagagatcagcagcggctgctatgaggggctgcagtggctggacgaggcccgcacctgtttccgcgtgccctggaagcacttcgcgcgcaaggacctgagcgaggccgacgcgcgcatcttcaaggcctgggctgtggcccgcggcaggtggccgcctagcagcaggggaggtggcccgccccccgaggctgagactgcggagcgcgccggctggaaaaccaacttccgctgcgcactgcgcagcacgcgtcgcttcgtgatgctgcgagataactcgggggacccggccgacccgcacaaggtgtacgcgctcagccgggagctgtgctggcgagaaggcccaggcacggaccagactgaggcagaggcccccgcagctgtcccaccaccacagggtgggcccccagggccattcctggcacacacacatgctggactccaagccccaggccccctccctgccccagctggtgacaagggggacctcctgctccaggcagtgcaacagagctgcctggcagaccatctgctgacagcgtcatggggggcagatccagtcccaaccaaggctcctggagagggacaagaagggcttcccctgactggggcctgtgctggaggcccagggctccctgctggggagctgtacgggtgggcagtagagacgacccccagccccgggccccagcccgcggcactaacgacagggcagcgccgtggctccccacgctataccatctacctgggcttcgggcaggacctgtcagctgggaggcccaaggagaagagcctggtcctggtgaagctggaaccctggctgtgccgagtgcacctagagggcacgcagcgtgagggtgtgtcttccctggatagcagcagcctcagcctctgcctgtccagcgccaacagcctctatgacgacatcgagtgcttccttatggagctggagcagcccgcctagaacccagtctaatgagaactccagaaagctggagcagcccacctagagctggccgcggccgcccagtctaataaaaagaactccagaacaaaaaaaagaggacaacaactgacaacacaacacacaccacacgactcctcaccgagcgacaacagagcacatccgccgcgctctcatttatgggcggacggccgcgcaaaacggcgactgcaaagcggggcccgactgtgcaaacaatgttttgtccgcaccacccattctgttctgtacacgagagggtgcgaacatatctgccggggggcgctcccccacataagagggggcggtccggcaataatcaatctggaagaaacagccaccgaggatagaaaccacttttattatatagatcgggtagggcgacagcaatgagagacaagccgacgcagagcaaagcagccggaggtagcacactaccgcgtactatacactactaaagcagtaggatagacctgacgtatcacggcactacacctgcaaacacaacacatccacattcgctcacactcctctcatcatccatcctacccgacaccacacgaagacaacataagaacatctattgacccactcgcacatccatcacgctacttcacacaacaagaatcatttgcacatgatcgaataatataagttgatcatcccgactttcgatatcaagcagattgactcacaatccattcgataatatctacatagagacctgcgcaactcgtcaacccacagagaaagacaccagctactctctaagccagcacaacgcaccactgaagaaccgacagatccatcgacagtcatata

SEQ ID NO: 6746 - DNA, 2191 bp, Homo sapiens
cataaaagcgccggccctccgcttccccgcgagacgaaacttcccgtcccggcggctctggcacccaggtccggcctgcgccttcccgccaggcctggacactggttcaacacctgtgacttcatgtgtgcgcgccggccacacctgcagtcacacctgtagccccctctgccaagagatccataccgaggcagcgtcggtggctacaagccctcagtccacacctgtggacacctgtgacacctggccacacgacctgtggccgcggcctggcgtctgctgcgacaggagcccttacctcccctgttataacacctgaccgccacctaactgcccctgcagaaggagcaatggccttggctcctgagagggcagccccacgcgtgctgttcggagagtggctccttggagagatcagcagcggctgctatgaggggctgcagtggctggacgaggcccgcacctgtttccgcgtgccctggaagcacttcgcgcgcaaggacctgagcgaggccgacgcgcgcatcttcaaggcctgggctgtggcccgcggcaggtggccgcctagcagcaggggaggtggcccgccccccgaggctgagactgcggagcgcgccggctggaaaaccaacttccgctgcgcactgcgcagcacgcgtcgcttcgtgatgctgcgagataactcgggggacccggccgacccgcacaaggtgtacgcgctcagccgggagctgtgctggcgagaaggcccaggcacggaccagactgaggcagaggcccccgcagctgtcccaccaccacagggtgggcccccagggccattcctggcacacacacatgctggactccaagccccaggccccctccctgccccagctggtgacaagggggacctcctgctccaggcagtgcaacagagctgcctggcagaccatctgctgacagcgtcatggggggcagatccagtcccaaccaaggctcctggagagggacaagaagggcttcccctgactggggcctgtgctggaggcccagggctccctgctggggagctgtacgggtgggcagtagagacgacccccagccccgggccccagcccgcggcactaacgacaggcgaggccgcggccccagagtccccgcaccaggcaggtcagctgggaggcccaaggagaagagcctggtcctggtgaagctggaaccctggctgtgccgagtgcacctagagggcacgcagcgtgagggtgtgtcttccctggatagcagcagcctcagcctctgcctgtccagcgccaacagcctctatgacgacatcgagtgcttccttatggagctggagcagcccgcctagaacccagtctaatgagaactccagaaagctggagcagcccacctagagctggccgcggccgcccagtctaataaaaagaactccagaacaaaaaaaagaggacaacaactgacaacacaacacacaccacacgactcctcaccgagcgacaacagagcacatccgccgcgctctcatttatgggcggacggccgcgcaaaacggcgactgcaaagcggggcccgactgtgcaaacaatgttttgtccgcaccacccattctgttctgtacacgagagggtgcgaacatatctgccggggggcgctcccccacataagagggggcggtccggcaataatcaatctggaagaaacagccaccgaggatagaaaccacttttattatatagatcgggtagggcgacagcaatgagagacaagccgacgcagagcaaagcagccggaggtagcacactaccgcgtactatacactactaaagcagtaggatagacctgacgtatcacggcactacacctgcaaacacaacacatccacattcgctcacactcctctcatcatccatcctacccgacaccacacgaagacaacataagaacatctattgacccactcgcacatccatcacgctacttcacacaacaagaatcatttgcacatgatcgaataatataagttgatcatcccgactttcgatatcaagcagattgactcacaatccattcgataatatctacatagagacctgcgcaactcgtcaacccacagagaaagacaccagctactctctaagccagcacaacgcaccactgaagaaccgacagatccatcgacagtcatata

SEQ ID NO: 6747 - DNA, 2094 bp, Homo sapiens
cataaaagcgccggccctccgcttccccgcgagacgaaacttcccgtcccggcggctctggcacccaggtccggcctgcgccttcccgccaggcctggacactggttcaacacctgtgacttcatgtgtgcgcgccggccacacctgcagtcacacctgtagccccctctgccaagagatccataccgaggcagcgtcggtggctacaagccctcagtccacacctgtggacacctgtgacacctggccacacgacctgtggccgcggcctggcgtctgctgcgacaggagcccttacctcccctgttataacacctgaccgccacctaactgcccctgcagaaggagcaatggccttggctcctgagagggcagccccacgcgtgctgttcggagagtggctccttggagagatcagcagcggctgctatgaggggctgcagtggctggacgaggcccgcacctgtttccgcgtgccctggaagcacttcgcgcgcaaggacctgagcgaggccgacgcgcgcatcttcaaggcctgggctgtggcccgcggcaggtggccgcctagcagcaggggaggtggcccgccccccgaggctgagactgcggagcgcgccggctggaaaaccaacttccgctgcgcactgcgcagcacgcgtcgcttcgtgatgctgcgagataactcgggggacccggccgacccgcacaaggtgtacgcgctcagccgggagctgtgctggcgagaaggcccaggcacggaccagactgaggcagaggcccccgcagctgtcccaccaccacagggtgggcccccagggccattcctggcacacacacatgctggactccaagccccaggccccctccctgccccagctggtgacaagggggacctcctgctccaggcagtgcaacagagctgcctggcagaccatctgctgacagcgtcatggggggcagatccagtcccaaccaaggctcctggagagggacaagaagggcttcccctgactggggcctgtgctggaggcccagggctccctgctggggagctgtacgggtgggcagtagagacgacccccagccccgggccccagcccgcggcactaacgacagcgagtgcacctagagggcacgcagcgtgagggtgtgtcttccctggatagcagcagcctcagcctctgcctgtccagcgccaacagcctctatgacgacatcgagtgcttccttatggagctggagcagcccgcctagaacccagtctaatgagaactccagaaagctggagcagcccacctagagctggccgcggccgcccagtctaataaaaagaactccagaacaaaaaaaagaggacaacaactgacaacacaacacacaccacacgactcctcaccgagcgacaacagagcacatccgccgcgctctcatttatgggcggacggccgcgcaaaacggcgactgcaaagcggggcccgactgtgcaaacaatgttttgtccgcaccacccattctgttctgtacacgagagggtgcgaacatatctgccggggggcgctcccccacataagagggggcggtccggcaataatcaatctggaagaaacagccaccgaggatagaaaccacttttattatatagatcgggtagggcgacagcaatgagagacaagccgacgcagagcaaagcagccggaggtagcacactaccgcgtactatacactactaaagcagtaggatagacctgacgtatcacggcactacacctgcaaacacaacacatccacattcgctcacactcctctcatcatccatcctacccgacaccacacgaagacaacataagaacatctattgacccactcgcacatccatcacgctacttcacacaacaagaatcatttgcacatgatcgaataatataagttgatcatcccgactttcgatatcaagcagattgactcacaatccattcgataatatctacatagagacctgcgcaactcgtcaacccacagagaaagacaccagctactctctaagccagcacaacgcaccactgaagaaccgacagatccatcgacagtcatata

SEQ ID NO: 6748 - DNA, 2097 bp, Homo sapiens
cataaaagcgccggccctccgcttccccgcgagacgaaacttcccgtcccggcggctctggcacccaggtccggcctgcgccttcccgccaggcctggacactggttcaacacctgtgacttcatgtgtgcgcgccggccacacctgcagtcacacctgtagccccctctgccaagagatccataccgaggcagcgtcggtggctacaagccctcagtccacacctgtggacacctgtgacacctggccacacgacctgtggccgcggcctggcgtctgctgcgacaggagcccttacctcccctgttataacacctgaccgccacctaactgcccctgcagaaggagcaatggccttggctcctgagagggcagccccacgcgtgctgttcggagagtggctccttggagagatcagcagcggctgctatgaggggctgcagtggctggacgaggcccgcacctgtttccgcgtgccctggaagcacttcgcgcgcaaggacctgagcgaggccgacgcgcgcatcttcaaggcctgggctgtggcccgcggcaggtggccgcctagcagcaggggaggtggcccgccccccgaggctgagactgcggagcgcgccggctggaaaaccaacttccgctgcgcactgcgcagcacgcgtcgcttcgtgatgctgcgagataactcgggggacccggccgacccgcacaaggtgtacgcgctcagccgggagctgtgctggcgagaaggcccaggcacggaccagactgaggcagaggcccccgcagctgtcccaccaccacagggtacccttctctctgcctgcctctcctcctgccaggccgcggagctgcttacgttcaccctgacttttccctgcagggtgggcccccagggccattcctggcacacacacatgctggactccaagccccaggccccctccctgccccagctggtgacaagggggacctcctgctccaggcagtgcaacagagctgcctggcagaccatctgctgacagcgtcatggggggcagatccagtcccaaccaaggctcgtcagctgggaggcccaaggagaagagcctggtcctggtgaagctggaaccctggctgtgccgagtgcacctagagggcacgcagcgtgagggtgtgtcttccctggatagcagcagcctcagcctctgcctgtccagcgccaacagcctctatgacgacatcgagtgcttccttatggagctggagcagcccgcctagaacccagtctaatgagaactccagaaagctggagcagcccacctagagctggccgcggccgcccagtctaataaaaagaactccagaacaaaaaaaagaggacaacaactgacaacacaacacacaccacacgactcctcaccgagcgacaacagagcacatccgccgcgctctcatttatgggcggacggccgcgcaaaacggcgactgcaaagcggggcccgactgtgcaaacaatgttttgtccgcaccacccattctgttctgtacacgagagggtgcgaacatatctgccggggggcgctcccccacataagagggggcggtccggcaataatcaatctggaagaaacagccaccgaggatagaaaccacttttattatatagatcgggtagggcgacagcaatgagagacaagccgacgcagagcaaagcagccggaggtagcacactaccgcgtactatacactactaaagcagtaggatagacctgacgtatcacggcactacacctgcaaacacaacacatccacattcgctcacactcctctcatcatccatcctacccgacaccacacgaagacaacataagaacatctattgacccactcgcacatccatcacgctacttcacacaacaagaatcatttgcacatgatcgaataatataagttgatcatcccgactttcgatatcaagcagattgactcacaatccattcgataatatctacatagagacctgcgcaactcgtcaacccacagagaaagacaccagctactctctaagccagcacaacgcaccactgaagaaccgacagatccatcgacagtcatata

SEQ ID NO: 6749 - DNA, 1338 bp, Homo sapiens
aattcggcacgaggacgaggcccgcacctgtttccgcgtgccctggaagcacttcgcgcgcaaggacctgagcgaggccgacgcgcgcatcttcaaggcctgggctgtggcccgcggcaggtggccgcctagcagcaggggaggtggcccgccccccgaggctgagactgcggagccacctgcagtcacacctgtagccccctctgccaagagatccataccgaggcagcgtcggtggctacaagccctcagtccacacctgtggacacctgtgacacctggccacacgacctgtggccgcggcctggcgtctgctgcgacaggagcccttacctcccctgttataacacctgaccgccacctaactgcccctgcagaaggagcaatggccttggctcctgagagggcagccccacgcgtgctgttcggagagtggctccttggagagatcagcagcggctgctatgaggggctgcagtgctggagcagcccgcctagaacccagtctaatgagaactccagaaagctggagcagcccacctagagctggccgcggccgcccagtctaataaaaagaactccagaacaaaaaaaagaggacaacaactgacaacacaacacacaccacacgactcctcaccgagcgacaacagagcacatccgccgcgctctcatttatgggcggacggccgcgcaaaacggcgactgcaaagcggggcccgactgtgcaaacaatgttttgtccgcaccacccattctgttctgtacacgagagggtgcgaacatatctgccggggggcgctcccccacataagagggggcggtccggcaataatcaatctggaagaaacagccaccgaggatagaaaccacttttattatatagatcgggtagggcgacagcaatgagagacaagccgacgcagagcaaagcagccggaggtagcacactaccgcgtactatacactactaaagcagtaggatagacctgacgtatcacggcactacacctgcaaacacaacacatccacattcgctcacactcctctcatcatccatcctacccgacaccacacgaagacaacataagaacatctattgacccactcgcacatccatcacgctacttcacacaacaagaatcatttgcacatgatcgaataatataagttgatcatcccgactttcgatatcaagcagattgactcacaatccattcgataatatctacatagagacctgcgcaactcgtcaacccacagagaaagacaccagctactctctaagccagcacaacgcaccactgaagaaccgacagatccatcgacagtcatata

SEQ ID NO: 6750 - DNA, 1180 bp, Homo sapiens
aaggtggagaaaactcagtccatgcctaaattaggatgtcccacttcctccctgcctctttgcctagctgtgagcacccaggctgtgggatttacagccggcgtccgccgctgacgtacgatggggaccctggctgcccagttcccagtttctctggattcccagttcccagtttctctggattcctacctcttgctctctgaagctgttggcaaatagaaaatactgaaattcatttattcaatcaaggccccctggtgtggttttgtgcctgtccagcgccaacagcctctatgacgacatcgagtgcttccttatggagctggagcagcccgcctagaacccagtctaatgagaactccagaaagctggagcagcccacctagagctggccgcggccgcccagtctaataaaaagaactccagaacaaaaaaaagaggacaacaactgacaacacaacacacaccacacgactcctcaccgagcgacaacagagcacatccgccgcgctctcatttatgggcggacggccgcgcaaaacggcgactgcaaagcggggcccgactgtgcaaacaatgttttgtccgcaccacccattctgttctgtacacgagagggtgcgaacatatctgccggggggcgctcccccacataagagggggcggtccggcaataatcaatctggaagaaacagccaccgaggatagaaaccacttttattatatagatcgggtagggcgacagcaatgagagacaagccgacgcagagcaaagcagccggaggtagcacactaccgcgtactatacactactaaagcagtaggatagacctgacgtatcacggcactacacctgcaaacacaacacatccacattcgctcacactcctctcatcatccatcctacccgacaccacacgaagacaacataagaacatctattgacccactcgcacatccatcacgctacttcacacaacaagaatcatttgcacatgatcgaataatataagttgatcatcccgactttcgatatcaagcagattgactcacaatccattcgataatatctacatagagacctgcgcaactcgtcaacccacagagaaagacaccagctactctctaagccagcacaacgcaccactgaagaaccgacagatccatcgacagtcatata

SEQ ID NO: 6751 - DNA, 494 bp, Homo sapiens
agctggtggaattccgggcacggcagcgccgtggctccccacgctataccatctacctgggcttcgggcaggacctgtcagctgggaggcccaaggagaagagcctggtcctggtgaaggtgagaccagagcctcaaggaggggaggccatgtgctcaggcccactgacagacgcctgatgccctcagagcctcggagagggggaggggaggccatacaccgggtcactgacagacgcccgacgccctcagagcctggggagggggaggggaggacacacgccgggtcactgacagacgcccgatccctcctggcagctggaaccctggctgtgccgagtgcacctagagggcacgcagcgtgagggtgtgtcttccctggatagcagcagcctcagcctctgcctgtccagcgccaacagcctctatgacgacatcgagtgcttccttatggagctggagcagcccgcctagaacccagtctaatgagaactc

SEQ ID NO: 6752 - DNA, 572 bp, Homo sapiens
tttaagtgtgttgattctcacatgaaaatcgaagcttgtcgtggcctttaagggtcaggttccagcgtattatggaagccgccacatggtcgttttcttctttcctcctaattctctgattcagatcggaagttgcacccatcaaatgggtcagattgccatcgtctcgtttcaaaattccactcccaaagtcattgagtgcttcaacgtggaatctcgcatcctgtgcatgctgtacgttcccgtcgaggagaagcgcagagagcctggggcacccccggaccccgagaccccggccgtgagagcttctgatgtccccacgatctgtgtagggacggaggagggaaggtagggcatgctcactgcgttacagagaattagcaagctctgcccatggagggcgtggtggggagcctgtcctggaaagagtccttgactttgactcaggagtagcccgtgcaggaattaggggataccaggggaaatttttagggtcattgcactttgaaataactagtgaattgggcccatggaaattattctaggaaactcttaaagagaagtggtatttc

SEQ ID NO: 6753 - DNA, 1890 bp, Homo sapiens
  misc_feature (19)..(19): n is a, c, g, or t
  misc_feature (23)..(23): n is a, c, g, or t
ggcaaggattacccccctngggngtatgggatatcgtcgaccagggcctcgatttgaggagattcagctcagcagcctttccctctggatgccaaagtgactatttagtggacggcccagacgttttctgtattcatgttttgtatgttgcttctagaatggcttattgatgtgtggtggaatattggtgtttgtgcacatatgtgtgtgtgcttataacccttgaaatagggcagtttaatcttacttatcccaagcaaacagaggagtaaaggtacagaaaatgccggcaaagaggtaggaaacacagaggctgagaagcagcaatgtatatcgaataaatgacatcagtgagaaagtagagagaatcaggcaaaggtaatagtcaaagaaataactaagaattctctacaattaaagaaaaacataaattctcagattttagacatagagattcaaagcaagatgaattacacgttgatccatacctaggccgatgcaatggaggccgcggagcaccaggcccagggtgaatctcccgagagcaactggagagaaaacatggctgcctacacaggaaccgctattccactgacccacaggctgggggcgggttctcaaagcgaagaaggacgtggctcttttaacctgagcggccacgtccagcaaagtacagtcctttagaaagggcgatgggccgcaggaggcagagcgggggagcttgctgcccatagaatctaaggaaatagttaatgatgcactcgctgcagggaagagcacactgaaccacggaggaggtgacgggggcccggagggagtggggagcccgggaagtgtcgggcgtgtggagagtcgataccagcaccgctcaagacagcgctgatagtgccgattgagtttcagatgcagccggagccccagccagtgccgactgaagaggagggtgaccgttcatgccgtgtgttctgaagttctgaagtcggcatttttcagggggaggatcttgttaccgatttttttttttttttttgctatggattggtccagtttgcgttttatgggtaactgctaagaaaataggaatagattattttaactttgaaaccagtagtgcaaaacccaatctggtaaatgcaagaaaatataaaataagaaagctttgcaaatcatatgagaaaagactgcaaaataagtacaaacatattggtacgcatagtaaagtgcatcctattgccagtaaaagaaatcctcagattggataaaatagcaaagctagccataaattcttgtgagagatacataagagtacagaagatttgtaagtaaatggatggaaaaagaaatataatgcaaattctaaccaaagtattgtcagtataactataataatacactaaatgttaagccataagcaaggaataattcatgaggaagatatataacagttctaaactcatatgcacctaacagcatagccttaagatatataagcaaaatataacaaggcttaatcagagatatgtaaatacgctgttggggtgagagattttaagaaaactgtctctgctattgacagatcctggacataaaatcagtaaaccggccaggcacggtcgctcacgcctgtcatcccaacactttgggaggccaaggtggatggatcacttgaggtcgggagttcaagaccagcctggccaacatggtgaaaccccatctctactaaaaatacaaaaattagacaggcgtggtggcgggcgcctgtaatcccagctacttgggaggctgaggcaggagaatcacttgaacccaggaagcggaggctgcagtgagtcgagattgtgccactgctctccagcctgggaaatgagtgaaaactctgtgtcaaaaaaa

SEQ ID NO: 6754 - DNA, 5399 bp, Homo sapiens
tccttcttgcaggagctccttcccttaacagagctgagagaggcatctggagctgcagcatggaccagcgagagcccctgcctcccgctcctgcagaaaatgaaatgaaatatgataccaataataatgaagaggaagagggagaacagttcgattttgacagtggagatgaaatcccagaagcggacagacaggccccatccgcccctgagacaggaggtgctggagccagtgaagcccctgcacccacaggaggtgaggatggagctggagcagaaaccaccccagtggcagagcctactaagctggtgctcccgatgaaagtcaacccatattctgtcatcgacatcacgccattccaggaggaccagccgcccacccccgtgcccagcgctgaggaggagaatgtgggtctccatgtgccctgcgggtacttggtgcctgtaccctgcggctatgcggtgccctccaacctgcccctcctgctgcccgcctactccagcccggtcatcatctgcgccacgtccctggacgaagaagcagaaacaccagaagtcacagaagatcgccagcccaattctctgagttccgaggagcctccaaccagtgaagatcaagtcggtcgagaggacagcgcacttgcccgctgggccgcagacccggccaacacagcctggatggagaatccagaggaagcaatttacgatgacgttccaagggaaaactcagactctgaaccagatgaaatgatttatgatgatgttgagaatggggatgaaggtggaaacagctccttggaatacggatggagttcgagtgaatttgaaagttacgaagagcagagtgactcggagtgcaagaatgggattcccaggtccttcctgcgcagcaaccacaaaaagcaactttctcatgacctaacccgtttaaaggagcactatgagaaaaagatgagagatttgatggcaagcacggtgggcgtggtggagattcagcagctcaggcagaagcatgaactgaagatgcagaagctcgtgaaggccgcgaaggacggcaccaaggacgggctggagaggaccagggcagccgtgaagaggggccgctccttcatcaggaccaagtctctcatcgcacaggatcacagatcttctcttgaggaagaacagaatttgttcattgatgttgactgcaagcacccggaagccatcttgaccccgatgcccgagggtttatctcagcagcaggttgtaagaagatatatactgggttcagttgtcgacagtgaaaagaactacgtagatgctcttaagaggattttggagcaatatgagaagccgctgtctgagatggagccaaaggttctgagtgagaggaagctgaagacggtgttctaccgagtcaaagagatcctgcagtgccactcgctatttcagatcgcgctggccagccgcgtttccgagtgggactccgtggaaatgataggcgatgtcttcgtggcttcgttttctaagtccatggtgctggatgcatacagtgaatatgtgaacaatttcagcacagccgtggcagtcctcaagaaaacatgtgccacaaagcccgcttttcttgaatttttaaagcaggaacaggaggccagccccgatcgaaccacgctctacagcctgatgatgaagcccatccagaggttcccacagttcatcctcctgctccaggacatgctgaagaacacctccaaaggccaccccgacaggctgcctcttcagatggccctgacagagctcgaaacactagcagagaagttaaatgaaagaaagagagatgctgatcaacgctgtgaagtgaagcaaatagccaaagccataaacgaaagatacctgaacaagcttctcagcagtggaagccgatacctcattcgatcagatgatatgatagaaacagtttacaacgacagaggagagattgttaaaaccaaagaacgccgagtcttcatgttaaatgatgtgttaatgtgtgccaccgtcagctcacgcccctctcatgacagccgtgtgatgagcagccagaggtacttgctgaagtggagcgttccactgggacatgtggacgccatcgagtatggcagcagcgcaggcacgggcgagcacagcaggcaccttgccgttcacccgccggagagcctggccgtggttgctaacgcgaaaccaaacaaagtttacatggggccaggacaactgtatcaagatttacaaaacttgttgcatgacttaaatgtaattggccaaatcactcagctgataggaaaccttaaaggaaactatcagaacttaaaccagtcagtagcccatgactggacatcaggtttacaaaggcttattttgaagaaagaagatgaaatcagagctgcggactgctgcagaattcagttacagcttcccgggaagcaggacaaatctgggcgaccgacgttctttacagctgtgttcaatacgttcacccctgccatcaaggagtcctgggtcaacagcttacagatggccaagctcgccctagaagaggagaaccacatgggctggttctgtgtggaagacgatgggaatcacattaaaaaggagaagcatcctctcctcgtcggacacatgcccgtgatggtggccaagcagcaggagttcaagatcggaagttgcacccatcaaatgggtcagattgccatcgtctcgtttcaaaattccactcccaaagtcattgagtgcttcaacgtggaatctcgcatcctgtgcatgctgtacgttcccgtcgaggagaagcgcagagagcctggggcacccccggaccccgagaccccggccgtgagagcttctgatgtccccacgatctgtgtagggacggaggagggaagcatttccatttataaaagcagtcaaggctccaagaaagtgagacttcagcactttttcactcctgagaagtccacagtcatgagcctggcttgcacgtctcagagcctgtacgctggcctggtcaacggggcagtcgccagctacgccagagccccagatggatcctgggattcagaacctcaaaaagtgatcaagttaggcgtcctaccagttagaagtctactcatgatggaagacacgttgtgggcggcttccggaggtcaagtcttcatcatcagtgtggagactcatgctgtagagggtcagctggaggcccaccaggaggaaggcatggtgatctcccacatggccgtgtccggcgtcgggatctggattgccttcacctcagggtccacgctccgcctttttcacacggaaactctcaagcacctgcaggacatcaacatcgccacccctgttcacaacatgctgccagggcaccagcggctgtcggtgacgagcctgctcgtctgccacggattgctgatggtcggcaccagcctgggagtcctcgtggccctgccggtcccacgtctgcaagggattcccaaagtgaccggaagaggcatggtctcctaccatgcacacaacagtcctgtcaaattcatcgtcctggccacggctctgcacgagaaagacaaggacaaatccagggacagcctggctcctggccccgagcctcaggacgaagaccagaaggacgcacttccgagtggaggagctggttcatctctgagccagggtgaccctgacgcagccatctggttgggagattcgctgggatcgatgactcagaaaagcgacctgtcctcctcatctgggtccctgagcttgtctcacggctccagctctctagagcacagatcagaggacagcaccatctatgatctcctgaaggatcctgtctcgctgagaagcaaagcacgccgggccaagaaagccaaggccagctcggcgctggtggtctgtggagggcagggccaccgccgggtgcacaggaaggcccggcagccccaccaggaagagctggcgccgaccgtcatggtctggcagatccctctgctgaatatataagcaggacggccgccttctgctgtcagaatttgcaatcaagggtgacttctcagctaatcctacagcctgagtggttaagctgtgtctacactggttgggaataaattaaaaacagtatttgggggagaaacgtgcaatagcgtaatggtggtgtccctgccaattccttccttctcttctgtacagcagaagtaattacaagcacttctcacgaaggcagaagactgatgcaattttcgagtaattgagtgcagttctgggaaaataccacattctttttgactgctgtagtccatatatgaatactaaatgttaaacttcatcagcgtcagacctattgtatcatattagagaatttgcagactaagaatttatgagaaaatatatgtattcggtagtgcaggcatttattaacaattcttaaaagttttacctgattcagattcacgacttttatttatattctatatttttgaatttcagagtaaaatttgttaacaattttaaaagccaggtaacacctaccagtccagttagcatgatttgctttcagaagtgagctgggttttccaaagtggtataatgtgtgtactgtatattttaacaaagtaatatttttgtattgcatttttctattaaaaaattaacagttaatgtttcagtcaatgtattatctgtagcatttcacaaataatgtttgctttgaaccaaaatgctcagtgcctatcaacatttggactcaagcatcaacaccaaattattcctcccttctcgtataaatagagtgactatccacaggagaaaagtgtgtgctttagtattagaggagataggcagagaagtcttgcttagttccttcgtgcagcttcttgcccctgttgacgtggaatgctgtgtctgctttagcacgcacgctccgaatgactcctggtgctaggccatgctggctgctgtcactgagcgggactcaggccaagaggcgtgacctcgggccagcctgtctgttgtgcagacgcctcctctgcagaacgcatcagtttctattctgcagttgcagagccagccccgcgtgagaacgtgcataatgagtgcacaccatcatgtcaaggtgcatacttagtgagcgccatcctgctgaacgtgtatttcagtgtttcacttactggacggataacaagaaaaaaatcctaacacaggcagtcaccagaaataaatgtctcagcactttacagatgactaaaaatgttaattttatgacttagccaaatatgttctaggttgcatatatcccccatgtgaaagtgatttcttcccaagcttctcaaactgttagctgctgtctgacttcatcaataaagtatttttattttaaaatgcaaaaaaaaaaat

SEQ ID NO: 6755 - DNA, 3718 bp, Homo sapiens
catttgccaggctacatttcagcttgatgcttacataactacttgtctgcagcagtactctgaatttatgtgggctttcccgtattcactgaaggccctggctcacagggagatgcttctcagcagtggaagccgatacctcattcgatcagatgatatgatagaaacagtttacaacgacagaggagagattgttaaaaccaaagaacgccgagtcttcatgttaaatgatgtgttaatgtgtgccaccgtcagctcacgcccctctcatgacagccgtgtgatgagcagccagaggtacttgctgaagtggagcgttccactgggacatgtggacgccatcgagtatggcagcagcgcaggcacgggcgagcacagcaggcaccttgccgttcacccgccggagagcctggccgtggttgctaacgcgaaaccaaacaaagtttacatggggccaggacaactgtatcaagatttacaaaacttgttgcatgacttaaatgtaattggccaaatcactcagctgataggaaaccttaaaggaaactatcagaacttaaaccagtcagtagcccatgactggacatcaggtttacaaaggcttattttgaagaaagaagatgaaatcagagctgcggactgctgcagaattcagttacagcttcccgggaagcaggacaaatctgggcgaccgacgttctttacagctgtgttcaatacgttcacccctgccatcaaggagtcctgggtcaacagcttacagatggccaagctcgccctagaagaggagaaccacatgggctggttctgtgtggaagacgatgggaatcacattaaaaaggagaagcatcctctcctcgtcggacacatgcccgtgatggtggccaagcagcaggagttcaagattgaatgtgctgcttataaccctgaaccttacctaaataatgaaagccagccagattcattttccacggcacatggtttcctgtggatcggaagttgcacccatcaaatgggtcagattgccatcgtctcgtttcaaaattccactcccaaagtcattgagtgcttcaacgtggaatctcgcatcctgtgcatgctgtacgttcccgtcgaggagaagcgcagagagcctggggcacccccggaccccgagaccccggccgtgagagcttctgatgtccccacgatctgtgtagggacggaggagggaagcatttccatttataaaagcagtcaaggctccaagaaagtgagacttcagcactttttcactcctgagaagtccacagtcatgagcctggcttgcacgtctcagagcctgtacgctggcctggtcaacggggcagtcgccagctacgccagagccccagatggatcctgggattcagaacctcaaaaagtgatcaagttaggcgtcctaccagttagaagtctactcatgatggaagacacgttgtgggcggcttccggaggtcaagtcttcatcatcagtgtggagactcatgctgtagagggtcagctggaggcccaccaggaggaaggcatggtgatctcccacatggccgtgtccggcgtcgggatctggattgccttcacctcagggtccacgctccgcctttttcacacggaaactctcaagcacctgcaggacatcaacatcgccacccctgttcacaacatgctgccagggcaccagcggctgtcggtgacgagcctgctcgtctgccacggattgctgatggtcggcaccagcctgggagtcctcgtggccctgccggtcccacgtctgcaagggattcccaaagtgaccggaagaggcatggtctcctaccatgcacacaacagtcctgtcaaattcatcgtcctggccacggctctgcacgagaaagacaaggacaaatccagggacagcctggctcctggccccgagcctcaggacgaagaccagaaggacgcacttccgagtggaggagctggttcatctctgagccagggtgaccctgacgcagccatctggttgggagattcgctgggatcgatgactcagaaaagcgacctgtcctcctcatctgggtccctgagcttgtctcacggctccagctctctagagcacagatcagaggacagcaccatctatgatctcctgaaggatcctgtctcgctgagaagcaaagcacgccgggccaagaaagccaaggccagctcggcgctggtggtctgtggagggcagggccaccgccgggtgcacaggaaggcccggcagccccaccaggaagagctggcgccgaccgtcatggtctggcagatccctctgctgaatatataagcaggacggccgccttctgctgtcagaatttgcaatcaagggtgacttctcagctaatcctacagcctgagtggttaagctgtgtctacactggttgggaataaattaaaaacagtatttgggggagaaacgtgcaatagcgtaatggtggtgtccctgccaattccttccttctcttctgtacagcagaagtaattacaagcacttctcacgaaggcagaagactgatgcaattttcgagtaattgagtgcagttctgggaaaataccacattctttttgactgctgtagtccatatatgaatactaaatgttaaacttcatcagcgtcagacctattgtatcatattagagaatttgcagactaagaatttatgagaaaatatatgtattcggtagtgcaggcatttattaacaattcttaaaagttttacctgattcagattcacgacttttatttatattctatatttttgaatttcagagtaaaatttgttaacaattttaaaagccaggtaacacctaccagtccagttagcatgatttgctttcagaagtgagctgggttttccaaagtggtataatgtgtgtactgtatattttaacaaagtaatatttttgtattgcatttttctattaaaaaattaacagttaatgtttcagtcaatgtattatctgtagcatttcacaaataatgtttgctttgaaccaaaatgctcagtgcctatcaacatttggactcaagcatcaacaccaaattattcctcccttctcgtataaatagagtgactatccacaggagaaaagtgtgtgctttagtattagaggagataggcagagaagtcttgcttagttccttcgtgcagcttcttgcccctgttgacgtggaatgctgtgtctgctttagcacgcacgctccgaatgactcctggtgctaggccatgctggctgctgtcactgagcgggactcaggccaagaggcgtgacctcgggccagcctgtctgttgtgcagacgcctcctctgcagaacgcatcagtttctattctgcagttgcagagccagccccgcgtgagaacgtgcataatgagtgcacaccatcatgtcaaggtgcatacttagtgagcgccatcctgctgaacgtgtatttcagtgtttcacttactggacggataacaagaaaaaaatcctaacacaggcagtcaccagaaataaatgtctcagcactttacagatgactaaaaatgttaattttatgacttagccaaatatgttctaggttgcatatatcccccatgtgaaagtgatttcttcccaagcttctcaaactgttagctgctgtctgacttcatcaataaagtatttttattttaaaatgcaaaaaaaaaaat

SEQ ID NO: 6756 - DNA, 2261 bp, Homo sapiens
gctggattatctgcctaggaaccaagtcacaagtcagtgatgcagactcctttgcaattggtcagctggaggcccaccaggaggaaggcatggtgatctcccacatggccgtgtccggcgtcgggatctggattgccttcacctcagggtccacgctccgcctttttcacacggaaactctcaagcacctgcaggacatcaacatcgccacccctgttcacaacatgctgccagggcaccagcggctgtcggtgacgagcctgctcgtctgccacggattgctgatggtcggcaccagcctgggagtcctcgtggccctgccggtcccacgtctgcaagggattcccaaagtgaccggaagaggcatggtctcctaccatgcacacaacagtcctgtcaaattcatcgtcctggccacggctctgcacgagaaagacaaggacaaatccagggacagcctggctcctggccccgagcctcaggacgaagaccagaaggacgcacttccgagtggaggagctggttcatctctgagccagggtgaccctgacgcagccatctggttgggagattcgctgggatcgatgactcagaaaagcgacctgtcctcctcatctgggtccctgagcttgtctcacggctccagctctctagagcacagatcagaggacagcaccatctatgatctcctgaaggatcctgtctcgctgagaagcaaagcacgccgggccaagaaagccaaggccagctcggcgctggtggtctgtggagggcagggccaccgccgggtgcacaggaaggcccggcagccccaccaggaagagctggcgccgaccgtcatggtctggcagatccctctgctgaatatataagcaggacggccgccttctgctgtcagaatttgcaatcaagggtgacttctcagctaatcctacagcctgagtggttaagctgtgtctacactggttgggaataaattaaaaacagtatttgggggagaaacgtgcaatagcgtaatggtggtgtccctgccaattccttccttctcttctgtacagcagaagtaattacaagcacttctcacgaaggcagaagactgatgcaattttcgagtaattgagtgcagttctgggaaaataccacattctttttgactgctgtagtccatatatgaatactaaatgttaaacttcatcagcgtcagacctattgtatcatattagagaatttgcagactaagaatttatgagaaaatatatgtattcggtagtgcaggcatttattaacaattcttaaaagttttacctgattcagattcacgacttttatttatattctatatttttgaatttcagagtaaaatttgttaacaattttaaaagccaggtaacacctaccagtccagttagcatgatttgctttcagaagtgagctgggttttccaaagtggtataatgtgtgtactgtatattttaacaaagtaatatttttgtattgcatttttctattaaaaaattaacagttaatgtttcagtcaatgtattatctgtagcatttcacaaataatgtttgctttgaaccaaaatgctcagtgcctatcaacatttggactcaagcatcaacaccaaattattcctcccttctcgtataaatagagtgactatccacaggagaaaagtgtgtgctttagtattagaggagataggcagagaagtcttgcttagttccttcgtgcagcttcttgcccctgttgacgtggaatgctgtgtctgctttagcacgcacgctccgaatgactcctggtgctaggccatgctggctgctgtcactgagcgggactcaggccaagaggcgtgacctcgggccagcctgtctgttgtgcagacgcctcctctgcagaacgcatcagtttctattctgcagttgcagagccagccccgcgtgagaacgtgcataatgagtgcacaccatcatgtcaaggtgcatacttagtgagcgccatcctgctgaacgtgtatttcagtgtttcacttactggacggataacaagaaaaaaatcctaacacaggcagtcaccagaaataaatgtctcagcactttacagatgactaaaaatgttaattttatgacttagccaaatatgttctaggttgcatatatcccccatgtgaaagtgatttcttcccaagcttctcaaactgttagctgctgtctgacttcatcaataaagtatttttattttaaaatgcaaaaaaaaaaat

SEQ ID NO: 6757 - DNA, 6407 bp, Homo sapiens
ttccccaaattgatggacataaacccatatgcttatctcagcatgtgtttaaaaagcacttgctgagattcagtgaccatccaacattaaaaactgctgatagaaggaaactcacttagctgaattaaggacgtgttcttaaaatctaccgccaacgtaatggggaggagctcacggcgttcgttaatttattcattccgcaaatatgttttgggcagttacataccgaatagtagatggaggtgtgcctgctgtcatggagatagggtgatttcatcctgttgatcaggaaaactcctaggtgcttgcaggtaaatgtgccacaaagaaagtgaggaccaaaggttagttgatgtaaaaacaagtttgaaatgcattttggggtaatttatccggtcgcttcgggcattcctcgcggaaggcgtggtctggtgactcagaagccaacacactgcgggagtccagccgtcggccccctgccgtgtggcgaggcccagtgtgtcccctttgtaaggacagcacaagcaggagttaatggaccggccatccatagcggtggtggggcagggagccagtttccgaaagaaactcacgccgccgcaggagggccctgtgggatgctctgtgcagagctgttgtgcggaccgggagacgggaaagcctggtggctgcaggagggcaccgtgcagaagtatccagtaaaccacccacagcacggcagcagaaaaacgaggaaattatatgtgtgtatgtttataagaactcagaagcaatggtgagcaaaaagcaaaagcaagaggagaaagtcacagtgtgctggcatcaagttgcattgagaggagcccgcggggtagtgcacccgcatttcctcgttgcgttgagaggcgcccgcggggtagtgcacccgcatttcctcgtttgagaggcgcccgcggggtagtgcacccgcatttcctagttgccttgagaggtgccgcggggtagtgcacccgcatttcctagttgccttgagaggtgcccgcggggtagtgcacccgcatttcctagttgccttgagaggtgccgcggggtagtgcacccgcatttcctcgtttcattgagcggtgcccgcggggtagtgcactcgcatttcctagttgccttgagaggtgccgcggggtagtgcacccacatttcttcactcgtttagagttcggggctctcagaacacagggagaatatgggagaattccttactagatgttacagaggccacacagggccacttttttcttttttttttattgtgtcaggtatacgtaaatattcctttcggtcagttcagcacgtaggactgagtggcattaggtacgctcactgtacagccaatgcctccataggccactttttaaatacgcggggctaagggccaacgacaagattgtcatcgaggacaataagtcgatggcgctgcctggtcactggcttggtcagaaaacacatgccagggtgactggatttaacgttcagttttagaaccacaaatctgccagcccaggcattcaagaggaagtgagtaattcactgaattgatggttagcaagacccttcaaagtccttggaagttccgtgtttgctgggggtcacaacagcaattgcgtttctaaaacattgaaaaccacccgtttttcacacatctgaatagcctgagttgtaacagacctaagtaaaggcgtccaaacgtgcctgatcctgtggctgggtcccaggagccttaacaaggcattgagagagctggattgattgattagactcttgccaactgctgtgcggaatacagaaaatgcagctccagctctcaaagggctgaaaatctaattgaggtgaaaaaggtaacatgtgtgaaaaccatgtctgtgtagacttgttttgtatggaccagaaaagttggaagtccagagatggatgcgaggaagtaggggatggagtttccttataacctctggagggacagtccagatacataccggggtgtgtagcgggtggaggttctaagacaggctggaggaacagtgcagacacacaccagggtgtgtagggggtagaggttctaagacagtctggagggagagtgcagacacacaccggggtgtgtaagcagtggaggttctaagacaggctggaggaacagtggagacacacaccagggcgtgtagggggtagaggttctaagacaggctggaggaacagtggagacacacaccacggcgtgtagggggtagaggttctaagacagtctggtgggagagtgcagacacacccggggccgtgtagggggtacaggttctaagacagtctggtgggagagtgcagacacacacggggctgtgtcggggatagaggttctaagacagtctggtgggagagtgcagacacacaccagggcgtgtagggggtggaggttctaagacaggctggaggaacagtggagacacacactggggagcataggggtgcttttctctgagtcccctagtacatggtagaggctgtagaccctccgctcttgggcacgtgggtaggctctcaggatgactcttggctcttgggcatgtgggtgagctctcaggatgatgcccagccccaattttcaggcaattgtgcaaggacttgacccattcatccgctgagctgagttgctgagactgctgggtgcccgggtggtgatcattgtccgtggcatacagaacacactgcagcttctgcaaagtgagctcatttcacgcattttatggctttgccaggctgctgttgacctgccagaacttttaatcagacatttggaggacctgttttgtagtcagtggagaaatattacaaggatagggtaatttgaaatatctaaggattgtaagtgacaagttcatgtctaattttgcatttccagtgaaagcaagtgttggctttgaatgttacttatgtgctgagatgtgtatattcctcagtgcttaattactaaggatttttagggccaagttttgttacagtgaatgattgtggatgcataaagaataaatttaatatttttaaggcatggagattatttgtatctaagaaaccaggtaaaataaagaaacatttatgcttgtgtgactgataaaagagttagagagacactcatattctgggagtttgaagaatgtcattttcattctctaaaagtcttgttagtgtcacagcattgaaaatttaaaaatccgtgtgtattttcttgctagtgctggtacttgaatatctgtatcatccacctatccatccacctacccatatttctataatccaccgtccctcgacatgcctatcatctgtccaccatttctctctgtctaattttcaaaacatcctgtaagtttatataaaggaagatttttcttcttgtgaagttctctaaggctgacaagttacctggcatgactgtggcggatgcccatagccaggtggtcctcggggtacagatggggcaggggcacttgtgagaaacacctgaagtgcttttccccagcctccccggccctgccgggtggtggaggcgctgcacggtgccttccatggagcaagcccggggctccgcagggtcctcagcatgattcagatttccttccacccccagctctagatgatttggtaaaaccacaaacaggcacaaaacagcccacatggaattctaaagttttaatttcattttggaatttatgcactcagatgaaatgatttatgatgatgttgagaatggggatgaaggtggaaacagctccttggaatacggatggagttcgagtgaatttgaaagttacgaagagcagagtgactcggagtgcaagaatgggattcccaggtccttcctgcgcagcaaccacaaaaagcaactttctcatgacctaacccgtttaaaggagcactatgagaaaaagatgagagatttgatggcaagcacggtgggcgtggtggagattcagcagctcaggcagaagcatgaactgaagatgcagaagctcgtgaaggccgcgaaggacggcaccaaggacgggctggagaggaccagggcagccgtgaagaggggccgctccttcatcaggaccaagtctctcatcgcacaggatcacagatcttctcttgaggaagaacagaatttgttcattgatgttgactgcaagcacccggaagccatcttgaccccgatgcccgagggtttatctcagcagcaggttgtaagaagatatatactgggttcagttgtcgacagtgaaaagaactacgtagatgctcttaagaggattttggagcaatatgagaagccgctgtctgagatggagccaaaggttctgagtgagaggaagctgaagacggtgttctaccgagtcaaagagatcctgcagtgccactcgctatttcagatcgcgctggccagccgcgtttccgagtgggactccgtggaaatgataggcgatgtcttcgtggcttcgttttctaagtccatggtgctggatgcatacagtgaatatgtgaacaatttcagcacagccgtggcagtcctcaagaaaacatgtgccacaaagcccgcttttcttgaatttttaaagcaggaacaggaggccagccccgatcgaaccacgctctacagcctgatgatgaagcccatccagaggttcccacagttcatcctcctgctccaggacatgctgaagaacacctccaaaggccaccccgacaggctgcctcttcagatggccctgacagagctcgaaacactagcagagaagttaaatgaaagaaagagagatgctgatcaacgctgtgaagtgaagcaaatagccaaagccataaacgaaagatacctgaacaagcttctcagcagtggaagccgatacctcattcgatcagatgatatgatagaaacagtttacaacgacagaggagagattgttaaaaccaaagaacgccgagtcttcatgttaaatgatgtgttaatgtgtgccaccgtcagctcacgcccctctcatgacagccgtgtgatgagcagccagaggtacttgctgaagtggagcgttccactgggacatgtggacgccatcgagtatggcagcagcgcaggcacgggcgagcacagcaggcaccttgccgttcacccgccggagagcctggccgtggttgctaacgcgaaaccaaacaaagtttacatggggccaggacaactgtatcaagatttacaaaacttgttgcatgacttaaatgtaattggccaaatcactcagctgataggaaaccttaaaggaaactatcagaacttaaaccagtcagtagcccatgactggacatcaggtttacaaaggcttattttgaagaaagaagatgaaatcagagctgcggactgctgcagaattcagttacagcttcccgggaagcaggacaaatctgggcgaccgacgttctttacagctgtgttcaatacgttcacccctgccatcaaggagtcctgggtcaacagcttacagatggccaagctcgccctagaagaggagaaccacatgggctggttctgtgtggaagacgatgggaatcacattaaaaaggagaagcatcctctcctcgtcggacacatgcccgtgatggtggccaagcagcaggagttcaagattgaatgtgctgcttataaccctgaaccttacctaaataatgaaagccagccagattcattttccacggcacatggtttcctgtgggtaagatgtgtttatttggttttggtacaagttcacagagaatcaacgttcatggtcggtgtgatgagagactgagatgtgaattgctcagtagagagttggcggtggcgtatcccagagtgtacttagaaacatgaaaacttctttgaaagggagctgatcacttttggaaaagatttacagttcttaggaatgcaaatatttgtttcttttccttttcatctaaaacatttaccagataaagttgagtccagagacaactaactaataagagaataattttaatatgtttttccattttggtgtcaacattgcatggattttttttcttgttccaagactggctttttccagtggaaacttagcagttaaaattaatttgttccaaatgaaatattgcatctgaaattaggctggaattgcagtagacgttcctggttcttgcaaaccagaggacattcttgaagctgtgtggtcccaggctctcccctctctggtttcctgtgttccctccctgcagcctcagactcgccctccagggctccactgtgcttttccaaactctcatcctttcctcccaggcgtcctgtgcagcacgccactgcctctcacttctcacatccacagctcctgcttggtcagtgttcc

SEQ ID NO: 6758 - DNA, 369 bp, Homo sapiens
cattggaagtaagtcatccatttaagacgttatgtagtctaggagcctcttagctctgttttatatgtgagcgtttgattttattccattttagattgaatgtgctgcttataaccctgaaccttacctaaataatgaaagccagccagattcattttccacggcacatggtttcctgtgggtaagatgtgtttatttggttttggtacaagttcacagagaatcaacgttcatggtcggtgtgatgagagactgagatgtgaattgctcagtagagagttggcggtggcgtatcccagagtgtacttagaaacatgaaaacttctttgaaagggagctgatcacttttggaaaagatttacagttctt

SEQ ID NO: 6759 - DNA, 385 bp, Homo sapiens
cgtttggagtaattcccttcgcccagagttcttaaccggggtggatggaggccttcgggagagtcacaccaatgtggaaattgtatgtaaaaccttaacagcctgtcttaacagcattttcttaggaaagagattcatacattcattagaccctcaaatggatccaggacctcccaaggggttaagagcaactcctttagcttacttttcctttcaaaataacggtatttaatttcagatagtaatagttaaagctgaaaatatttacaggctaggcacagtggctcacacctgtaagcccagcactttgggaggctgaggtgggaagatcgctggaacccaggagttcaagaccagcctgggcatgatagtgagaacccatatc

SEQ ID NO: 6760 - DNA, 306 bp, Homo sapiens
tgttcagccaagtcgtgactcactcagctcatcatcccttcccaagaactgactttatttttccccaggatggcagatgccactgcctcctttccattgtcagctggcgggtgacgcgactgttgttgcactgggagtgtccacgtggtaactgcccacctctcccctgttgcttgtaggacatgctgaagaacacctccaaaggccaccccgacaggctgcctcttcagatggccctgacagagctcgaaacactagcagagaagttaaatgaaagaaagagagatgctgatcaacgctgtgaag

SEQ ID NO: 6761 - DNA, 565 bp, Homo sapiens
cgttgtgagcagggcctaagaggtcctcaaaggggtggctgaaaaaccagaagacagttcaggccttctagggcaaggaccgtattgcggctgtattgcccttgcccgtgttctgtgccgtgcgtaggccaaacatctggaatacttatttacagagttatgagtgaaagcttgaacttgggatgtcctataataatagctgggaaaatatgtgatttcctgtatagtaacatatatatatatattttgacacacacacacacacacacacacactctgcagggcagttggcatcctagtgacttgggctgtgcctggatattctgactttatggtttgttttctttaagtgaagatcaagtcggtcgagaggacagcgcacttgcccgctgggccgcagacccggccaacacagcctggatggagagtaagttccccagctgcccacagccagaatcctcaccacgctccacagacgtcactgcggcggggccgggtccctgagtctcaggtcccatcagatctaaaactctaaaaagatgtttatttactgaaaatagtaaca

SEQ ID NO: 6762 - DNA, 8486 bp, Homo sapiens
ttccccaaattgatggacataaacccatatgcttatctcagcatgtgtttaaaaagcacttgctgagattcagtgaccatccaacattaaaaactgctgatagaaggaaactcacttagctgaattaaggacgtgttcttaaaatctaccgccaacgtaatggggaggagctcacggcgttcgttaatttattcattccgcaaatatgttttgggcagttacataccgaatagtagatggaggtgtgcctgctgtcatggagatagggtgatttcatcctgttgatcaggaaaactcctaggtgcttgcaggtaaatgtgccacaaagaaagtgaggaccaaaggttagttgatgtaaaaacaagtttgaaatgcattttggggtaatttatccggtcgcttcgggcattcctcgcggaaggcgtggtctggtgactcagaagccaacacactgcgggagtccagccgtcggccccctgccgtgtggcgaggcccagtgtgtcccctttgtaaggacagcacaagcaggagttaatggaccggccatccatagcggtggtggggcagggagccagtttccgaaagaaactcacgccgccgcaggagggccctgtgggatgctctgtgcagagctgttgtgcggaccgggagacgggaaagcctggtggctgcaggagggcaccgtgcagaagtatccagtaaaccacccacagcacggcagcagaaaaacgaggaaattatatgtgtgtatgtttataagaactcagaagcaatggtgagcaaaaagcaaaagcaagaggagaaagtcacagtgtgctggcatcaagttgcattgagaggagcccgcggggtagtgcacccgcatttcctcgttgcgttgagaggcgcccgcggggtagtgcacccgcatttcctcgtttgagaggcgcccgcggggtagtgcacccgcatttcctagttgccttgagaggtgccgcggggtagtgcacccgcatttcctagttgccttgagaggtgcccgcggggtagtgcacccgcatttcctagttgccttgagaggtgccgcggggtagtgcacccgcatttcctcgtttcattgagcggtgcccgcggggtagtgcactcgcatttcctagttgccttgagaggtgccgcggggtagtgcacccacatttcttcactcgtttagagttcggggctctcagaacacagggagaatatgggagaattccttactagatgttacagaggccacacagggccacttttttcttttttttttattgtgtcaggtatacgtaaatattcctttcggtcagttcagcacgtaggactgagtggcattaggtacgctcactgtacagccaatgcctccataggccactttttaaatacgcggggctaagggccaacgacaagattgtcatcgaggacaataagtcgatggcgctgcctggtcactggcttggtcagaaaacacatgccagggtgactggatttaacgttcagttttagaaccacaaatctgccagcccaggcattcaagaggaagtgagtaattcactgaattgatggttagcaagacccttcaaagtccttggaagttccgtgtttgctgggggtcacaacagcaattgcgtttctaaaacattgaaaaccacccgtttttcacacatctgaatagcctgagttgtaacagacctaagtaaaggcgtccaaacgtgcctgatcctgtggctgggtcccaggagccttaacaaggcattgagagagctggattgattgattagactcttgccaactgctgtgcggaatacagaaaatgcagctccagctctcaaagggctgaaaatctaattgaggtgaaaaaggtaacatgtgtgaaaaccatgtctgtgtagacttgttttgtatggaccagaaaagttggaagtccagagatggatgcgaggaagtaggggatggagtttccttataacctctggagggacagtccagatacataccggggtgtgtagcgggtggaggttctaagacaggctggaggaacagtgcagacacacaccagggtgtgtagggggtagaggttctaagacagtctggagggagagtgcagacacacaccggggtgtgtaagcagtggaggttctaagacaggctggaggaacagtggagacacacaccagggcgtgtagggggtagaggttctaagacaggctggaggaacagtggagacacacaccacggcgtgtagggggtagaggttctaagacagtctggtgggagagtgcagacacacccggggccgtgtagggggtacaggttctaagacagtctggtgggagagtgcagacacacacggggctgtgtcggggatagaggttctaagacagtctggtgggagagtgcagacacacaccagggcgtgtagggggtggaggttctaagacaggctggaggaacagtggagacacacactggggagcataggggtgcttttctctgagtcccctagtacatggtagaggctgtagaccctccgctcttgggcacgtgggtaggctctcaggatgactcttggctcttgggcatgtgggtgagctctcaggatgatgcccagccccaattttcaggcaattgtgcaaggacttgacccattcatccgctgagctgagttgctgagactgctgggtgcccgggtggtgatcattgtccgtggcatacagaacacactgcagcttctgcaaagtgagctcatttcacgcattttatggctttgccaggctgctgttgacctgccagaacttttaatcagacatttggaggacctgttttgtagtcagtggagaaatattacaaggatagggtaatttgaaatatctaaggattgtaagtgacaagttcatgtctaattttgcatttccagtgaaagcaagtgttggctttgaatgttacttatgtgctgagatgtgtatattcctcagtgcttaattactaaggatttttagggccaagttttgttacagtgaatgattgtggatgcataaagaataaatttaatatttttaaggcatggagattatttgtatctaagaaaccaggtaaaataaagaaacatttatgcttgtgtgactgataaaagagttagagagacactcatattctgggagtttgaagaatgtcattttcattctctaaaagtcttgttagtgtcacagcattgaaaatttaaaaatccgtgtgtattttcttgctagtgctggtacttgaatatctgtatcatccacctatccatccacctacccatatttctataatccaccgtccctcgacatgcctatcatctgtccaccatttctctctgtctaattttcaaaacatcctgtaagtttatataaaggaagatttttcttcttgtgaagttctctaaggctgacaagttacctggcatgactgtggcggatgcccatagccaggtggtcctcggggtacagatggggcaggggcacttgtgagaaacacctgaagtgcttttccccagcctccccggccctgccgggtggtggaggcgctgcacggtgccttccatggagcaagcccggggctccgcagggtcctcagcatgattcagatttccttccacccccagctctagatgatttggtaaaaccacaaacaggcacaaaacagcccacatggaattctaaagttttaatttcattttggaatttatgcactcagatgaaatgatttatgatgatgttgagaatggggatgaaggtggaaacagctccttggaatacggatggagttcgagtgaatttgaaagttacgaagagcagagtgactcggagtgcaagaatgggattcccaggtccttcctgcgcagcaaccacaaaaagcaactttctcatgacctaacccgtttaaaggagcactatgagaaaaagatgagagatttgatggcaagcacggtgggcgtggtggagattcagcagctcaggcagaagcatgaactgaagatgcagaagctcgtgaaggccgcgaaggacggcaccaaggacgggctggagaggaccagggcagccgtgaagaggggccgctccttcatcaggaccaagtctctcatcgcacaggatcacagatcttctcttgaggaagaacagaatttgttcattgatgttgactgcaagcacccggaagccatcttgaccccgatgcccgagggtttatctcagcagcaggttgtaagaagatatatactgggttcagttgtcgacagtgaaaagaactacgtagatgctcttaagaggattttggagcaatatgagaagccgctgtctgagatggagccaaaggttctgagtgagaggaagctgaagacggtgttctaccgagtcaaagagatcctgcagtgccactcgctatttcagatcgcgctggccagccgcgtttccgagtgggactccgtggaaatgataggcgatgtcttcgtggcttcgttttctaagtccatggtgctggatgcatacagtgaatatgtgaacaatttcagcacagccgtggcagtcctcaagaaaacatgtgccacaaagcccgcttttcttgaatttttaaagcaggaacaggaggccagccccgatcgaaccacgctctacagcctgatgatgaagcccatccagaggttcccacagttcatcctcctgctccaggacatgctgaagaacacctccaaaggccaccccgacaggctgcctcttcagatggccctgacagagctcgaaacactagcagagaagttaaatgaaagaaagagagatgctgatcaacgctgtgaagtgaagcaaatagccaaagccataaacgaaagatacctgaacaagcttctcagcagtggaagccgatacctcattcgatcagatgatatgatagaaacagtttacaacgacagaggagagattgttaaaaccaaagaacgccgagtcttcatgttaaatgatgtgttaatgtgtgccaccgtcagctcacgcccctctcatgacagccgtgtgatgagcagccagaggtacttgctgaagtggagcgttccactgggacatgtggacgccatcgagtatggcagcagcgcaggcacgggcgagcacagcaggcaccttgccgttcacccgccggagagcctggccgtggttgctaacgcgaaaccaaacaaagtttacatggggccaggacaactgtatcaagatttacaaaacttgttgcatgacttaaatgtaattggccaaatcactcagctgataggaaaccttaaaggaaactatcagaacttaaaccagtcagtagcccatgactggacatcaggtttacaaaggcttattttgaagaaagaagatgaaatcagagctgcggactgctgcagaattcagttacagcttcccgggaagcaggacaaatctgggcgaccgacgttctttacagctgtgttcaatacgttcacccctgccatcaaggagtcctgggtcaacagcttacagatggccaagctcgccctagaagaggagaaccacatgggctggttctgtgtggaagacgatgggaatcacattaaaaaggagaagcatcctctcctcgtcggacacatgcccgtgatggtggccaagcagcaggagttcaagattgaatgtgctgcttataaccctgaaccttacctaaataatgaaagccagccagattcattttccacggcacatggtttcctgtggatcggaagttgcacccatcaaatgggtcagattgccatcgtctcgtttcaaaattccactcccaaagtcattgagtgcttcaacgtggaatctcgcatcctgtgcatgctgtacgttcccgtcgaggagaagcgcagagagcctggggcacccccggaccccgagaccccggccgtgagagcttctgatgtccccacgatctgtgtagggacggaggagggaagcatttccatttataaaagcagtcaaggctccaagaaagtgagacttcagcactttttcactcctgagaagtccacagtcatgagcctggcttgcacgtctcagagcctgtacgctggcctggtcaacggggcagtcgccagctacgccagagccccagatggatcctgggattcagaacctcaaaaagtgatcaagttaggcgtcctaccagttagaagtctactcatgatggaagacacgttgtgggcggcttccggaggtcaagtcttcatcatcagtgtggagactcatgctgtagagggtcagctggaggcccaccaggaggaaggcatggtgatctcccacatggccgtgtccggcgtcgggatctggattgccttcacctcagggtccacgctccgcctttttcacacggaaactctcaagcacctgcaggacatcaacatcgccacccctgttcacaacatgctgccagggcaccagcggctgtcggtgacgagcctgctcgtctgccacggattgctgatggtcggcaccagcctgggagtcctcgtggccctgccggtcccacgtctgcaagggattcccaaagtgaccggaagaggcatggtctcctaccatgcacacaacagtcctgtcaaattcatcgtcctggccacggctctgcacgagaaagacaaggacaaatccagggacagcctggctcctggccccgagcctcaggacgaagaccagaaggacgcacttccgagtggaggagctggttcatctctgagccagggtgaccctgacgcagccatctggttgggagattcgctgggatcgatgactcagaaaagcgacctgtcctcctcatctgggtccctgagcttgtctcacggctccagctctctagagcacagatcagaggacagcaccatctatgatctcctgaaggatcctgtctcgctgagaagcaaagcacgccgggccaagaaagccaaggccagctcggcgctggtggtctgtggagggcagggccaccgccgggtgcacaggaaggcccggcagccccaccaggaagagctggcgccgaccgtcatggtctggcagatccctctgctgaatatataagcaggacggccgccttctgctgtcagaatttgcaatcaagggtgacttctcagctaatcctacagcctgagtggttaagctgtgtctacactggttgggaataaattaaaaacagtatttgggggagaaacgtgcaatagcgtaatggtggtgtccctgccaattccttccttctcttctgtacagcagaagtaattacaagcacttctcacgaaggcagaagactgatgcaattttcgagtaattgagtgcagttctgggaaaataccacattctttttgactgctgtagtccatatatgaatactaaatgttaaacttcatcagcgtcagacctattgtatcatattagagaatttgcagactaagaatttatgagaaaatatatgtattcggtagtgcaggcatttattaacaattcttaaaagttttacctgattcagattcacgacttttatttatattctatatttttgaatttcagagtaaaatttgttaacaattttaaaagccaggtaacacctaccagtccagttagcatgatttgctttcagaagtgagctgggttttccaaagtggtataatgtgtgtactgtatattttaacaaagtaatatttttgtattgcatttttctattaaaaaattaacagttaatgtttcagtcaatgtattatctgtagcatttcacaaataatgtttgctttgaaccaaaatgctcagtgcctatcaacatttggactcaagcatcaacaccaaattattcctcccttctcgtataaatagagtgactatccacaggagaaaagtgtgtgctttagtattagaggagataggcagagaagtcttgcttagttccttcgtgcagcttcttgcccctgttgacgtggaatgctgtgtctgctttagcacgcacgctccgaatgactcctggtgctaggccatgctggctgctgtcactgagcgggactcaggccaagaggcgtgacctcgggccagcctgtctgttgtgcagacgcctcctctgcagaacgcatcagtttctattctgcagttgcagagccagccccgcgtgagaacgtgcataatgagtgcacaccatcatgtcaaggtgcatacttagtgagcgccatcctgctgaacgtgtatttcagtgtttcacttactggacggataacaagaaaaaaatcctaacacaggcagtcaccagaaataaatgtctcagcactttacagatgactaaaaatgttaattttatgacttagccaaatatgttctaggttgcatatatcccccatgtgaaagtgatttcttcccaagcttctcaaactgttagctgctgtctgacttcatcaataaagtatttttattttaaaatgcaaaaaaaaaaat

SEQ ID NO: 6763 - DNA, 8399 bp, Homo sapiens
ttccccaaattgatggacataaacccatatgcttatctcagcatgtgtttaaaaagcacttgctgagattcagtgaccatccaacattaaaaactgctgatagaaggaaactcacttagctgaattaaggacgtgttcttaaaatctaccgccaacgtaatggggaggagctcacggcgttcgttaatttattcattccgcaaatatgttttgggcagttacataccgaatagtagatggaggtgtgcctgctgtcatggagatagggtgatttcatcctgttgatcaggaaaactcctaggtgcttgcaggtaaatgtgccacaaagaaagtgaggaccaaaggttagttgatgtaaaaacaagtttgaaatgcattttggggtaatttatccggtcgcttcgggcattcctcgcggaaggcgtggtctggtgactcagaagccaacacactgcgggagtccagccgtcggccccctgccgtgtggcgaggcccagtgtgtcccctttgtaaggacagcacaagcaggagttaatggaccggccatccatagcggtggtggggcagggagccagtttccgaaagaaactcacgccgccgcaggagggccctgtgggatgctctgtgcagagctgttgtgcggaccgggagacgggaaagcctggtggctgcaggagggcaccgtgcagaagtatccagtaaaccacccacagcacggcagcagaaaaacgaggaaattatatgtgtgtatgtttataagaactcagaagcaatggtgagcaaaaagcaaaagcaagaggagaaagtcacagtgtgctggcatcaagttgcattgagaggagcccgcggggtagtgcacccgcatttcctcgttgcgttgagaggcgcccgcggggtagtgcacccgcatttcctcgtttgagaggcgcccgcggggtagtgcacccgcatttcctagttgccttgagaggtgccgcggggtagtgcacccgcatttcctagttgccttgagaggtgcccgcggggtagtgcacccgcatttcctagttgccttgagaggtgccgcggggtagtgcacccgcatttcctcgtttcattgagcggtgcccgcggggtagtgcactcgcatttcctagttgccttgagaggtgccgcggggtagtgcacccacatttcttcactcgtttagagttcggggctctcagaacacagggagaatatgggagaattccttactagatgttacagaggccacacagggccacttttttcttttttttttattgtgtcaggtatacgtaaatattcctttcggtcagttcagcacgtaggactgagtggcattaggtacgctcactgtacagccaatgcctccataggccactttttaaatacgcggggctaagggccaacgacaagattgtcatcgaggacaataagtcgatggcgctgcctggtcactggcttggtcagaaaacacatgccagggtgactggatttaacgttcagttttagaaccacaaatctgccagcccaggcattcaagaggaagtgagtaattcactgaattgatggttagcaagacccttcaaagtccttggaagttccgtgtttgctgggggtcacaacagcaattgcgtttctaaaacattgaaaaccacccgtttttcacacatctgaatagcctgagttgtaacagacctaagtaaaggcgtccaaacgtgcctgatcctgtggctgggtcccaggagccttaacaaggcattgagagagctggattgattgattagactcttgccaactgctgtgcggaatacagaaaatgcagctccagctctcaaagggctgaaaatctaattgaggtgaaaaaggtaacatgtgtgaaaaccatgtctgtgtagacttgttttgtatggaccagaaaagttggaagtccagagatggatgcgaggaagtaggggatggagtttccttataacctctggagggacagtccagatacataccggggtgtgtagcgggtggaggttctaagacaggctggaggaacagtgcagacacacaccagggtgtgtagggggtagaggttctaagacagtctggagggagagtgcagacacacaccggggtgtgtaagcagtggaggttctaagacaggctggaggaacagtggagacacacaccagggcgtgtagggggtagaggttctaagacaggctggaggaacagtggagacacacaccacggcgtgtagggggtagaggttctaagacagtctggtgggagagtgcagacacacccggggccgtgtagggggtacaggttctaagacagtctggtgggagagtgcagacacacacggggctgtgtcggggatagaggttctaagacagtctggtgggagagtgcagacacacaccagggcgtgtagggggtggaggttctaagacaggctggaggaacagtggagacacacactggggagcataggggtgcttttctctgagtcccctagtacatggtagaggctgtagaccctccgctcttgggcacgtgggtaggctctcaggatgactcttggctcttgggcatgtgggtgagctctcaggatgatgcccagccccaattttcaggcaattgtgcaaggacttgacccattcatccgctgagctgagttgctgagactgctgggtgcccgggtggtgatcattgtccgtggcatacagaacacactgcagcttctgcaaagtgagctcatttcacgcattttatggctttgccaggctgctgttgacctgccagaacttttaatcagacatttggaggacctgttttgtagtcagtggagaaatattacaaggatagggtaatttgaaatatctaaggattgtaagtgacaagttcatgtctaattttgcatttccagtgaaagcaagtgttggctttgaatgttacttatgtgctgagatgtgtatattcctcagtgcttaattactaaggatttttagggccaagttttgttacagtgaatgattgtggatgcataaagaataaatttaatatttttaaggcatggagattatttgtatctaagaaaccaggtaaaataaagaaacatttatgcttgtgtgactgataaaagagttagagagacactcatattctgggagtttgaagaatgtcattttcattctctaaaagtcttgttagtgtcacagcattgaaaatttaaaaatccgtgtgtattttcttgctagtgctggtacttgaatatctgtatcatccacctatccatccacctacccatatttctataatccaccgtccctcgacatgcctatcatctgtccaccatttctctctgtctaattttcaaaacatcctgtaagtttatataaaggaagatttttcttcttgtgaagttctctaaggctgacaagttacctggcatgactgtggcggatgcccatagccaggtggtcctcggggtacagatggggcaggggcacttgtgagaaacacctgaagtgcttttccccagcctccccggccctgccgggtggtggaggcgctgcacggtgccttccatggagcaagcccggggctccgcagggtcctcagcatgattcagatttccttccacccccagctctagatgatttggtaaaaccacaaacaggcacaaaacagcccacatggaattctaaagttttaatttcattttggaatttatgcactcagatgaaatgatttatgatgatgttgagaatggggatgaaggtggaaacagctccttggaatacggatggagttcgagtgaatttgaaagttacgaagagcagagtgactcggagtgcaagaatgggattcccaggtccttcctgcgcagcaaccacaaaaagcaactttctcatgacctaacccgtttaaaggagcactatgagaaaaagatgagagatttgatggcaagcacggtgggcgtggtggagattcagcagctcaggcagaagcatgaactgaagatgcagaagctcgtgaaggccgcgaaggacggcaccaaggacgggctggagaggaccagggcagccgtgaagaggggccgctccttcatcaggaccaagtctctcatcgcacaggatcacagatcttctcttgaggaagaacagaatttgttcattgatgttgactgcaagcacccggaagccatcttgaccccgatgcccgagggtttatctcagcagcaggttgtaagaagatatatactgggttcagttgtcgacagtgaaaagaactacgtagatgctcttaagaggattttggagcaatatgagaagccgctgtctgagatggagccaaaggttctgagtgagaggaagctgaagacggtgttctaccgagtcaaagagatcctgcagtgccactcgctatttcagatcgcgctggccagccgcgtttccgagtgggactccgtggaaatgataggcgatgtcttcgtggcttcgttttctaagtccatggtgctggatgcatacagtgaatatgtgaacaatttcagcacagccgtggcagtcctcaagaaaacatgtgccacaaagcccgcttttcttgaatttttaaagcaggaacaggaggccagccccgatcgaaccacgctctacagcctgatgatgaagcccatccagaggttcccacagttcatcctcctgctccaggacatgctgaagaacacctccaaaggccaccccgacaggctgcctcttcagatggccctgacagagctcgaaacactagcagagaagttaaatgaaagaaagagagatgctgatcaacgctgtgaagtgaagcaaatagccaaagccataaacgaaagatacctgaacaagcttctcagcagtggaagccgatacctcattcgatcagatgatatgatagaaacagtttacaacgacagaggagagattgttaaaaccaaagaacgccgagtcttcatgttaaatgatgtgttaatgtgtgccaccgtcagctcacgcccctctcatgacagccgtgtgatgagcagccagaggtacttgctgaagtggagcgttccactgggacatgtggacgccatcgagtatggcagcagcgcaggcacgggcgagcacagcaggcaccttgccgttcacccgccggagagcctggccgtggttgctaacgcgaaaccaaacaaagtttacatggggccaggacaactgtatcaagatttacaaaacttgttgcatgacttaaatgtaattggccaaatcactcagctgataggaaaccttaaaggaaactatcagaacttaaaccagtcagtagcccatgactggacatcaggtttacaaaggcttattttgaagaaagaagatgaaatcagagctgcggactgctgcagaattcagttacagcttcccgggaagcaggacaaatctgggcgaccgacgttctttacagctgtgttcaatacgttcacccctgccatcaaggagtcctgggtcaacagcttacagatggccaagctcgccctagaagaggagaaccacatgggctggttctgtgtggaagacgatgggaatcacattaaaaaggagaagcatcctctcctcgtcggacacatgcccgtgatggtggccaagcagcaggagttcaagatcggaagttgcacccatcaaatgggtcagattgccatcgtctcgtttcaaaattccactcccaaagtcattgagtgcttcaacgtggaatctcgcatcctgtgcatgctgtacgttcccgtcgaggagaagcgcagagagcctggggcacccccggaccccgagaccccggccgtgagagcttctgatgtccccacgatctgtgtagggacggaggagggaagcatttccatttataaaagcagtcaaggctccaagaaagtgagacttcagcactttttcactcctgagaagtccacagtcatgagcctggcttgcacgtctcagagcctgtacgctggcctggtcaacggggcagtcgccagctacgccagagccccagatggatcctgggattcagaacctcaaaaagtgatcaagttaggcgtcctaccagttagaagtctactcatgatggaagacacgttgtgggcggcttccggaggtcaagtcttcatcatcagtgtggagactcatgctgtagagggtcagctggaggcccaccaggaggaaggcatggtgatctcccacatggccgtgtccggcgtcgggatctggattgccttcacctcagggtccacgctccgcctttttcacacggaaactctcaagcacctgcaggacatcaacatcgccacccctgttcacaacatgctgccagggcaccagcggctgtcggtgacgagcctgctcgtctgccacggattgctgatggtcggcaccagcctgggagtcctcgtggccctgccggtcccacgtctgcaagggattcccaaagtgaccggaagaggcatggtctcctaccatgcacacaacagtcctgtcaaattcatcgtcctggccacggctctgcacgagaaagacaaggacaaatccagggacagcctggctcctggccccgagcctcaggacgaagaccagaaggacgcacttccgagtggaggagctggttcatctctgagccagggtgaccctgacgcagccatctggttgggagattcgctgggatcgatgactcagaaaagcgacctgtcctcctcatctgggtccctgagcttgtctcacggctccagctctctagagcacagatcagaggacagcaccatctatgatctcctgaaggatcctgtctcgctgagaagcaaagcacgccgggccaagaaagccaaggccagctcggcgctggtggtctgtggagggcagggccaccgccgggtgcacaggaaggcccggcagccccaccaggaagagctggcgccgaccgtcatggtctggcagatccctctgctgaatatataagcaggacggccgccttctgctgtcagaatttgcaatcaagggtgacttctcagctaatcctacagcctgagtggttaagctgtgtctacactggttgggaataaattaaaaacagtatttgggggagaaacgtgcaatagcgtaatggtggtgtccctgccaattccttccttctcttctgtacagcagaagtaattacaagcacttctcacgaaggcagaagactgatgcaattttcgagtaattgagtgcagttctgggaaaataccacattctttttgactgctgtagtccatatatgaatactaaatgttaaacttcatcagcgtcagacctattgtatcatattagagaatttgcagactaagaatttatgagaaaatatatgtattcggtagtgcaggcatttattaacaattcttaaaagttttacctgattcagattcacgacttttatttatattctatatttttgaatttcagagtaaaatttgttaacaattttaaaagccaggtaacacctaccagtccagttagcatgatttgctttcagaagtgagctgggttttccaaagtggtataatgtgtgtactgtatattttaacaaagtaatatttttgtattgcatttttctattaaaaaattaacagttaatgtttcagtcaatgtattatctgtagcatttcacaaataatgtttgctttgaaccaaaatgctcagtgcctatcaacatttggactcaagcatcaacaccaaattattcctcccttctcgtataaatagagtgactatccacaggagaaaagtgtgtgctttagtattagaggagataggcagagaagtcttgcttagttccttcgtgcagcttcttgcccctgttgacgtggaatgctgtgtctgctttagcacgcacgctccgaatgactcctggtgctaggccatgctggctgctgtcactgagcgggactcaggccaagaggcgtgacctcgggccagcctgtctgttgtgcagacgcctcctctgcagaacgcatcagtttctattctgcagttgcagagccagccccgcgtgagaacgtgcataatgagtgcacaccatcatgtcaaggtgcatacttagtgagcgccatcctgctgaacgtgtatttcagtgtttcacttactggacggataacaagaaaaaaatcctaacacaggcagtcaccagaaataaatgtctcagcactttacagatgactaaaaatgttaattttatgacttagccaaatatgttctaggttgcatatatcccccatgtgaaagtgatttcttcccaagcttctcaaactgttagctgctgtctgacttcatcaataaagtatttttattttaaaatgcaaaaaaaaaaat

SEQ ID NO: 6764 - DNA, 5210 bp, Homo sapiens
caggtgtagtaccagcctctcagtttggcagcgttcctcttggctcgcacggtgtttcttcaggaggtgaggatggagctggagcagaaaccaccccagtggcagagcctactaagctggtgctcccgatgaaagtcaacccatattctgtcatcgacatcacgccattccaggaggaccagccgcccacccccgtgcccagcgctgaggaggagaatgtgggtctccatgtgccctgcgggtacttggtgcctgtaccctgcggctatgcggtgccctccaacctgcccctcctgctgcccgcctactccagcccggtcatcatctgcgccacgtccctggacgaagaagcagaaacaccagaagtcacagaagatcgccagcccaattctctgagttccgaggagcctccaaccagtgaagatcaagtcggtcgagaggacagcgcacttgcccgctgggccgcagacccggccaacacagcctggatggagaatccagaggaagcaatttacgatgacgttccaagggaaaactcagactctgaaccagatgaaatgatttatgatgatgttgagaatggggatgaaggtggaaacagctccttggaatacggatggagttcgagtgaatttgaaagttacgaagagcagagtgactcggagtgcaagaatgggattcccaggtccttcctgcgcagcaaccacaaaaagcaactttctcatgacctaacccgtttaaaggagcactatgagaaaaagatgagagatttgatggcaagcacggtgggcgtggtggagattcagcagctcaggcagaagcatgaactgaagatgcagaagctcgtgaaggccgcgaaggacggcaccaaggacgggctggagaggaccagggcagccgtgaagaggggccgctccttcatcaggaccaagtctctcatcgcacaggatcacagatcttctcttgaggaagaacagaatttgttcattgatgttgactgcaagcacccggaagccatcttgaccccgatgcccgagggtttatctcagcagcaggttgtaagaagatatatactgggttcagttgtcgacagtgaaaagaactacgtagatgctcttaagaggattttggagcaatatgagaagccgctgtctgagatggagccaaaggttctgagtgagaggaagctgaagacggtgttctaccgagtcaaagagatcctgcagtgccactcgctatttcagatcgcgctggccagccgcgtttccgagtgggactccgtggaaatgataggcgatgtcttcgtggcttcgttttctaagtccatggtgctggatgcatacagtgaatatgtgaacaatttcagcacagccgtggcagtcctcaagaaaacatgtgccacaaagcccgcttttcttgaatttttaaagcaggaacaggaggccagccccgatcgaaccacgctctacagcctgatgatgaagcccatccagaggttcccacagttcatcctcctgctccaggacatgctgaagaacacctccaaaggccaccccgacaggctgcctcttcagatggccctgacagagctcgaaacactagcagagaagttaaatgaaagaaagagagatgctgatcaacgctgtgaagtgaagcaaatagccaaagccataaacgaaagatacctgaacaagcttctcagcagtggaagccgatacctcattcgatcagatgatatgatagaaacagtttacaacgacagaggagagattgttaaaaccaaagaacgccgagtcttcatgttaaatgatgtgttaatgtgtgccaccgtcagctcacgcccctctcatgacagccgtgtgatgagcagccagaggtacttgctgaagtggagcgttccactgggacatgtggacgccatcgagtatggcagcagcgcaggcacgggcgagcacagcaggcaccttgccgttcacccgccggagagcctggccgtggttgctaacgcgaaaccaaacaaagtttacatggggccaggacaactgtatcaagatttacaaaacttgttgcatgacttaaatgtaattggccaaatcactcagctgataggaaaccttaaaggaaactatcagaacttaaaccagtcagtagcccatgactggacatcaggtttacaaaggcttattttgaagaaagaagatgaaatcagagctgcggactgctgcagaattcagttacagcttcccgggaagcaggacaaatctgggcgaccgacgttctttacagctgtgttcaatacgttcacccctgccatcaaggagtcctgggtcaacagcttacagatggccaagctcgccctagaagaggagaaccacatgggctggttctgtgtggaagacgatgggaatcacattaaaaaggagaagcatcctctcctcgtcggacacatgcccgtgatggtggccaagcagcaggagttcaagatcggaagttgcacccatcaaatgggtcagattgccatcgtctcgtttcaaaattccactcccaaagtcattgagtgcttcaacgtggaatctcgcatcctgtgcatgctgtacgttcccgtcgaggagaagcgcagagagcctggggcacccccggaccccgagaccccggccgtgagagcttctgatgtccccacgatctgtgtagggacggaggagggaagcatttccatttataaaagcagtcaaggctccaagaaagtgagacttcagcactttttcactcctgagaagtccacagtcatgagcctggcttgcacgtctcagagcctgtacgctggcctggtcaacggggcagtcgccagctacgccagagccccagatggatcctgggattcagaacctcaaaaagtgatcaagttaggcgtcctaccagttagaagtctactcatgatggaagacacgttgtgggcggcttccggaggtcaagtcttcatcatcagtgtggagactcatgctgtagagggtcagctggaggcccaccaggaggaaggcatggtgatctcccacatggccgtgtccggcgtcgggatctggattgccttcacctcagggtccacgctccgcctttttcacacggaaactctcaagcacctgcaggacatcaacatcgccacccctgttcacaacatgctgccagggcaccagcggctgtcggtgacgagcctgctcgtctgccacggattgctgatggtcggcaccagcctgggagtcctcgtggccctgccggtcccacgtctgcaagggattcccaaagtgaccggaagaggcatggtctcctaccatgcacacaacagtcctgtcaaattcatcgtcctggccacggctctgcacgagaaagacaaggacaaatccagggacagcctggctcctggccccgagcctcaggacgaagaccagaaggacgcacttccgagtggaggagctggttcatctctgagccagggtgaccctgacgcagccatctggttgggagattcgctgggatcgatgactcagaaaagcgacctgtcctcctcatctgggtccctgagcttgtctcacggctccagctctctagagcacagatcagaggacagcaccatctatgatctcctgaaggatcctgtctcgctgagaagcaaagcacgccgggccaagaaagccaaggccagctcggcgctggtggtctgtggagggcagggccaccgccgggtgcacaggaaggcccggcagccccaccaggaagagctggcgccgaccgtcatggtctggcagatccctctgctgaatatataagcaggacggccgccttctgctgtcagaatttgcaatcaagggtgacttctcagctaatcctacagcctgagtggttaagctgtgtctacactggttgggaataaattaaaaacagtatttgggggagaaacgtgcaatagcgtaatggtggtgtccctgccaattccttccttctcttctgtacagcagaagtaattacaagcacttctcacgaaggcagaagactgatgcaattttcgagtaattgagtgcagttctgggaaaataccacattctttttgactgctgtagtccatatatgaatactaaatgttaaacttcatcagcgtcagacctattgtatcatattagagaatttgcagactaagaatttatgagaaaatatatgtattcggtagtgcaggcatttattaacaattcttaaaagttttacctgattcagattcacgacttttatttatattctatatttttgaatttcagagtaaaatttgttaacaattttaaaagccaggtaacacctaccagtccagttagcatgatttgctttcagaagtgagctgggttttccaaagtggtataatgtgtgtactgtatattttaacaaagtaatatttttgtattgcatttttctattaaaaaattaacagttaatgtttcagtcaatgtattatctgtagcatttcacaaataatgtttgctttgaaccaaaatgctcagtgcctatcaacatttggactcaagcatcaacaccaaattattcctcccttctcgtataaatagagtgactatccacaggagaaaagtgtgtgctttagtattagaggagataggcagagaagtcttgcttagttccttcgtgcagcttcttgcccctgttgacgtggaatgctgtgtctgctttagcacgcacgctccgaatgactcctggtgctaggccatgctggctgctgtcactgagcgggactcaggccaagaggcgtgacctcgggccagcctgtctgttgtgcagacgcctcctctgcagaacgcatcagtttctattctgcagttgcagagccagccccgcgtgagaacgtgcataatgagtgcacaccatcatgtcaaggtgcatacttagtgagcgccatcctgctgaacgtgtatttcagtgtttcacttactggacggataacaagaaaaaaatcctaacacaggcagtcaccagaaataaatgtctcagcactttacagatgactaaaaatgttaattttatgacttagccaaatatgttctaggttgcatatatcccccatgtgaaagtgatttcttcccaagcttctcaaactgttagctgctgtctgacttcatcaataaagtatttttattttaaaatgcaaaaaaaaaaat

SEQ ID NO: 6765 - DNA, 8363 bp, Homo sapiens
ttccccaaattgatggacataaacccatatgcttatctcagcatgtgtttaaaaagcacttgctgagattcagtgaccatccaacattaaaaactgctgatagaaggaaactcacttagctgaattaaggacgtgttcttaaaatctaccgccaacgtaatggggaggagctcacggcgttcgttaatttattcattccgcaaatatgttttgggcagttacataccgaatagtagatggaggtgtgcctgctgtcatggagatagggtgatttcatcctgttgatcaggaaaactcctaggtgcttgcaggtaaatgtgccacaaagaaagtgaggaccaaaggttagttgatgtaaaaacaagtttgaaatgcattttggggtaatttatccggtcgcttcgggcattcctcgcggaaggcgtggtctggtgactcagaagccaacacactgcgggagtccagccgtcggccccctgccgtgtggcgaggcccagtgtgtcccctttgtaaggacagcacaagcaggagttaatggaccggccatccatagcggtggtggggcagggagccagtttccgaaagaaactcacgccgccgcaggagggccctgtgggatgctctgtgcagagctgttgtgcggaccgggagacgggaaagcctggtggctgcaggagggcaccgtgcagaagtatccagtaaaccacccacagcacggcagcagaaaaacgaggaaattatatgtgtgtatgtttataagaactcagaagcaatggtgagcaaaaagcaaaagcaagaggagaaagtcacagtgtgctggcatcaagttgcattgagaggagcccgcggggtagtgcacccgcatttcctcgttgcgttgagaggcgcccgcggggtagtgcacccgcatttcctcgtttgagaggcgcccgcggggtagtgcacccgcatttcctagttgccttgagaggtgccgcggggtagtgcacccgcatttcctagttgccttgagaggtgcccgcggggtagtgcacccgcatttcctagttgccttgagaggtgccgcggggtagtgcacccgcatttcctcgtttcattgagcggtgcccgcggggtagtgcactcgcatttcctagttgccttgagaggtgccgcggggtagtgcacccacatttcttcactcgtttagagttcggggctctcagaacacagggagaatatgggagaattccttactagatgttacagaggccacacagggccacttttttcttttttttttattgtgtcaggtatacgtaaatattcctttcggtcagttcagcacgtaggactgagtggcattaggtacgctcactgtacagccaatgcctccataggccactttttaaatacgcggggctaagggccaacgacaagattgtcatcgaggacaataagtcgatggcgctgcctggtcactggcttggtcagaaaacacatgccagggtgactggatttaacgttcagttttagaaccacaaatctgccagcccaggcattcaagaggaagtgagtaattcactgaattgatggttagcaagacccttcaaagtccttggaagttccgtgtttgctgggggtcacaacagcaattgcgtttctaaaacattgaaaaccacccgtttttcacacatctgaatagcctgagttgtaacagacctaagtaaaggcgtccaaacgtgcctgatcctgtggctgggtcccaggagccttaacaaggcattgagagagctggattgattgattagactcttgccaactgctgtgcggaatacagaaaatgcagctccagctctcaaagggctgaaaatctaattgaggtgaaaaaggtaacatgtgtgaaaaccatgtctgtgtagacttgttttgtatggaccagaaaagttggaagtccagagatggatgcgaggaagtaggggatggagtttccttataacctctggagggacagtccagatacataccggggtgtgtagcgggtggaggttctaagacaggctggaggaacagtgcagacacacaccagggtgtgtagggggtagaggttctaagacagtctggagggagagtgcagacacacaccggggtgtgtaagcagtggaggttctaagacaggctggaggaacagtggagacacacaccagggcgtgtagggggtagaggttctaagacaggctggaggaacagtggagacacacaccacggcgtgtagggggtagaggttctaagacagtctggtgggagagtgcagacacacccggggccgtgtagggggtacaggttctaagacagtctggtgggagagtgcagacacacacggggctgtgtcggggatagaggttctaagacagtctggtgggagagtgcagacacacaccagggcgtgtagggggtggaggttctaagacaggctggaggaacagtggagacacacactggggagcataggggtgcttttctctgagtcccctagtacatggtagaggctgtagaccctccgctcttgggcacgtgggtaggctctcaggatgactcttggctcttgggcatgtgggtgagctctcaggatgatgcccagccccaattttcaggcaattgtgcaaggacttgacccattcatccgctgagctgagttgctgagactgctgggtgcccgggtggtgatcattgtccgtggcatacagaacacactgcagcttctgcaaagtgagctcatttcacgcattttatggctttgccaggctgctgttgacctgccagaacttttaatcagacatttggaggacctgttttgtagtcagtggagaaatattacaaggatagggtaatttgaaatatctaaggattgtaagtgacaagttcatgtctaattttgcatttccagtgaaagcaagtgttggctttgaatgttacttatgtgctgagatgtgtatattcctcagtgcttaattactaaggatttttagggccaagttttgttacagtgaatgattgtggatgcataaagaataaatttaatatttttaaggcatggagattatttgtatctaagaaaccaggtaaaataaagaaacatttatgcttgtgtgactgataaaagagttagagagacactcatattctgggagtttgaagaatgtcattttcattctctaaaagtcttgttagtgtcacagcattgaaaatttaaaaatccgtgtgtattttcttgctagtgctggtacttgaatatctgtatcatccacctatccatccacctacccatatttctataatccaccgtccctcgacatgcctatcatctgtccaccatttctctctgtctaattttcaaaacatcctgtaagtttatataaaggaagatttttcttcttgtgaagttctctaaggctgacaagttacctggcatgactgtggcggatgcccatagccaggtggtcctcggggtacagatggggcaggggcacttgtgagaaacacctgaagtgcttttccccagcctccccggccctgccgggtggtggaggcgctgcacggtgccttccatggagcaagcccggggctccgcagggtcctcagcatgattcagatttccttccacccccagctctagatgatttggtaaaaccacaaacaggcacaaaacagcccacatggaattctaaagttttaatttcattttggaatttatgcactcagatgaaatgatttatgatgatgttgagaatggggatgaaggtggaaacagctccttggaatacggatggagttcgagtgaatttgaaagttacgaagagcagagtgactcggagtgcaagaatgggattcccaggtccttcctgcgcagcaaccacaaaaagcaactttctcatgacctaacccgtttaaaggagcactatgagaaaaagatgagagatttgatggcaagcacggtgggcgtggtggagattcagcagctcaggcagaagcatgaactgaagatgcagaagctcgtgaaggccgcgaaggacggcaccaaggacgggctggagaggaccagggcagccgtgaagaggggccgctccttcatcaggaccaagtctctcatcgcacaggatcacagatcttctcttgaggaagaacagaatttgttcattgatgttgactgcaagcacccggaagccatcttgaccccgatgcccgagggtttatctcagcagcaggttgtaagaagatatatactgggttcagttgtcgacagtgaaaagaactacgtagatgctcttaagaggattttggagcaatatgagaagccgctgtctgagatggagccaaaggttctgagtgagaggaagctgaagacggtgttctaccgagtcaaagagatcctgcagtgccactcgctatttcagatcgcgctggccagccgcgtttccgagtgggactccgtggaaatgataggcgatgtcttcgtggcttcgttttctaagtccatggtgctggatgcatacagtgaatatgtgaacaatttcagcacagccgtggcagtcctcaagaaaacatgtgccacaaagcccgcttttcttgaatttttaaagcaggaacaggaggccagccccgatcgaaccacgctctacagcctgatgatgaagcccatccagaggttcccacagttcatcctcctgctccaggacatgctgaagaacacctccaaaggccaccccgacaggctgcctcttcagatggccctgacagagctcgaaacactagcagagaagttaaatgaaagaaagagagatgctgatcaacgctgtgaagtgaagcaaatagccaaagccataaacgaaagatacctgaacaagcttctcagcagtggaagccgatacctcattcgatcagatgatatgatagaaacagtttacaacgacagaggagagattgttaaaaccaaagaacgccgagtcttcatgttaaatgatgtgttaatgtgtgccaccgtcagctcacgcccctctcatgacagccgtgtgatgagcagccagaggtacttgctgaagtggagcgttccactgggacatgtggacgccatcgagtatggcagcagcgcaggcacgggcgagcacagcaggcaccttgccgttcacccgccggagagcctggccgtggttgctaacgcgaaaccaaacaaagtttacatggggccaggacaactgtatcaagatttacaaaacttgttgcatgacttaaatgtaattggccaaatcactcagctgataggaaaccttaaaggaaactatcagaacttaaaccagtcagtagcccatgactggacatcaggtttacaaaggcttattttgaagaaagaagatgaaatcagagctgcggactgctgcagaattcagttacagcttcccgggaagcaggacaaatctgggcgaccgacgttctttacagctgtgttcaatacgttcacccctgccatcaaggagtcctgggtcaacagcttacagatggccaagctcgccctagaagaggagaaccacatgggctggttctgtgtggaagacgatgggaatcacattaaaaaggagaagcatcctctcctcgtcggacacatgcccgtgatggtggccaagcagcaggagttcaagattgaatgtgctgcttataaccctgaaccttacctaaataatgaaagccagccagattcattttccacggcacatggtttcctgtggatcggaagttgcacccatcaaatgggtcagattgccatcgtctcgtttcaaaattccactcccaaagtcattgagtgcttcaacgtggaatctcgcatcctgtgcatgctgtacgttcccgtcgaggagaagcgcagagagcctggggcacccccggaccccgagaccccggccgtgagagcttctgatgtccccacgatctgtgtagggacggaggagggaagcatttccatttataaaagcagtcaaggctccaagaaagtgagacttcagcactttttcactcctgagaagtccacagtcatgagcctggcttgcacgtctcagagcctgtacgctggcctggtcaacggggcagtcgccagctacgccagagccccagatggatcctgggattcagaacctcaaaaagtgatcaagttaggcgtcctaccagttagaagtctactcatgatggaagacacgttgtgggcggcttccggaggtcaagtcttcatcatcagtgtggagactcatgctgtagagggtcagctggaggcccaccaggaggaaggcatggtgatctcccacatggccgtgtccggcgtcgggatctggattgccttcacctcagggtccacgctccgcctttttcacacggaaactctcaagcacctgcaggacatcaacatcgccacccctgttcacaacatgctgccaggaagaggcatggtctcctaccatgcacacaacagtcctgtcaaattcatcgtcctggccacggctctgcacgagaaagacaaggacaaatccagggacagcctggctcctggccccgagcctcaggacgaagaccagaaggacgcacttccgagtggaggagctggttcatctctgagccagggtgaccctgacgcagccatctggttgggagattcgctgggatcgatgactcagaaaagcgacctgtcctcctcatctgggtccctgagcttgtctcacggctccagctctctagagcacagatcagaggacagcaccatctatgatctcctgaaggatcctgtctcgctgagaagcaaagcacgccgggccaagaaagccaaggccagctcggcgctggtggtctgtggagggcagggccaccgccgggtgcacaggaaggcccggcagccccaccaggaagagctggcgccgaccgtcatggtctggcagatccctctgctgaatatataagcaggacggccgccttctgctgtcagaatttgcaatcaagggtgacttctcagctaatcctacagcctgagtggttaagctgtgtctacactggttgggaataaattaaaaacagtatttgggggagaaacgtgcaatagcgtaatggtggtgtccctgccaattccttccttctcttctgtacagcagaagtaattacaagcacttctcacgaaggcagaagactgatgcaattttcgagtaattgagtgcagttctgggaaaataccacattctttttgactgctgtagtccatatatgaatactaaatgttaaacttcatcagcgtcagacctattgtatcatattagagaatttgcagactaagaatttatgagaaaatatatgtattcggtagtgcaggcatttattaacaattcttaaaagttttacctgattcagattcacgacttttatttatattctatatttttgaatttcagagtaaaatttgttaacaattttaaaagccaggtaacacctaccagtccagttagcatgatttgctttcagaagtgagctgggttttccaaagtggtataatgtgtgtactgtatattttaacaaagtaatatttttgtattgcatttttctattaaaaaattaacagttaatgtttcagtcaatgtattatctgtagcatttcacaaataatgtttgctttgaaccaaaatgctcagtgcctatcaacatttggactcaagcatcaacaccaaattattcctcccttctcgtataaatagagtgactatccacaggagaaaagtgtgtgctttagtattagaggagataggcagagaagtcttgcttagttccttcgtgcagcttcttgcccctgttgacgtggaatgctgtgtctgctttagcacgcacgctccgaatgactcctggtgctaggccatgctggctgctgtcactgagcgggactcaggccaagaggcgtgacctcgggccagcctgtctgttgtgcagacgcctcctctgcagaacgcatcagtttctattctgcagttgcagagccagccccgcgtgagaacgtgcataatgagtgcacaccatcatgtcaaggtgcatacttagtgagcgccatcctgctgaacgtgtatttcagtgtttcacttactggacggataacaagaaaaaaatcctaacacaggcagtcaccagaaataaatgtctcagcactttacagatgactaaaaatgttaattttatgacttagccaaatatgttctaggttgcatatatcccccatgtgaaagtgatttcttcccaagcttctcaaactgttagctgctgtctgacttcatcaataaagtatttttattttaaaatgcaaaaaaaaaaat

SEQ ID NO: 6766 - DNA, 2851 bp, Homo sapiens
tttaagtgtgttgattctcacatgaaaatcgaagcttgtcgtggcctttaagggtcaggttccagcgtattatggaagccgccacatggtcgttttcttctttcctcctaattctctgattcagatcggaagttgcacccatcaaatgggtcagattgccatcgtctcgtttcaaaattccactcccaaagtcattgagtgcttcaacgtggaatctcgcatcctgtgcatgctgtacgttcccgtcgaggagaagcgcagagagcctggggcacccccggaccccgagaccccggccgtgagagcttctgatgtccccacgatctgtgtagggacggaggagggaagcatttccatttataaaagcagtcaaggctccaagaaagtgagacttcagcactttttcactcctgagaagtccacagtcatgagcctggcttgcacgtctcagagcctgtacgctggcctggtcaacggggcagtcgccagctacgccagagccccagatggatcctgggattcagaacctcaaaaagtgatcaagttaggcgtcctaccagttagaagtctactcatgatggaagacacgttgtgggcggcttccggaggtcaagtcttcatcatcagtgtggagactcatgctgtagagggtcagctggaggcccaccaggaggaaggcatggtgatctcccacatggccgtgtccggcgtcgggatctggattgccttcacctcagggtccacgctccgcctttttcacacggaaactctcaagcacctgcaggacatcaacatcgccacccctgttcacaacatgctgccagggcaccagcggctgtcggtgacgagcctgctcgtctgccacggattgctgatggtcggcaccagcctgggagtcctcgtggccctgccggtcccacgtctgcaagggattcccaaagtgaccggaagaggcatggtctcctaccatgcacacaacagtcctgtcaaattcatcgtcctggccacggctctgcacgagaaagacaaggacaaatccagggacagcctggctcctggccccgagcctcaggacgaagaccagaaggacgcacttccgagtggaggagctggttcatctctgagccagggtgaccctgacgcagccatctggttgggagattcgctgggatcgatgactcagaaaagcgacctgtcctcctcatctgggtccctgagcttgtctcacggctccagctctctagagcacagatcagaggacagcaccatctatgatctcctgaaggatcctgtctcgctgagaagcaaagcacgccgggccaagaaagccaaggccagctcggcgctggtggtctgtggagggcagggccaccgccgggtgcacaggaaggcccggcagccccaccaggaagagctggcgccgaccgtcatggtctggcagatccctctgctgaatatataagcaggacggccgccttctgctgtcagaatttgcaatcaagggtgacttctcagctaatcctacagcctgagtggttaagctgtgtctacactggttgggaataaattaaaaacagtatttgggggagaaacgtgcaatagcgtaatggtggtgtccctgccaattccttccttctcttctgtacagcagaagtaattacaagcacttctcacgaaggcagaagactgatgcaattttcgagtaattgagtgcagttctgggaaaataccacattctttttgactgctgtagtccatatatgaatactaaatgttaaacttcatcagcgtcagacctattgtatcatattagagaatttgcagactaagaatttatgagaaaatatatgtattcggtagtgcaggcatttattaacaattcttaaaagttttacctgattcagattcacgacttttatttatattctatatttttgaatttcagagtaaaatttgttaacaattttaaaagccaggtaacacctaccagtccagttagcatgatttgctttcagaagtgagctgggttttccaaagtggtataatgtgtgtactgtatattttaacaaagtaatatttttgtattgcatttttctattaaaaaattaacagttaatgtttcagtcaatgtattatctgtagcatttcacaaataatgtttgctttgaaccaaaatgctcagtgcctatcaacatttggactcaagcatcaacaccaaattattcctcccttctcgtataaatagagtgactatccacaggagaaaagtgtgtgctttagtattagaggagataggcagagaagtcttgcttagttccttcgtgcagcttcttgcccctgttgacgtggaatgctgtgtctgctttagcacgcacgctccgaatgactcctggtgctaggccatgctggctgctgtcactgagcgggactcaggccaagaggcgtgacctcgggccagcctgtctgttgtgcagacgcctcctctgcagaacgcatcagtttctattctgcagttgcagagccagccccgcgtgagaacgtgcataatgagtgcacaccatcatgtcaaggtgcatacttagtgagcgccatcctgctgaacgtgtatttcagtgtttcacttactggacggataacaagaaaaaaatcctaacacaggcagtcaccagaaataaatgtctcagcactttacagatgactaaaaatgttaattttatgacttagccaaatatgttctaggttgcatatatcccccatgtgaaagtgatttcttcccaagcttctcaaactgttagctgctgtctgacttcatcaataaagtatttttattttaaaatgcaaaaaaaaaaat

SEQ ID NO: 6767 - DNA, 2601 bp, Homo sapiens
tccttcttgcaggagctccttcccttaacagagctgagagaggcatctggagctgcagcatggaccagcgagagcccctgcctcccgctcctgcagaaaatgaaatgaaatatgataccaataataatgaagaggaagagggagaacagttcgattttgacagtggagatgaaatcccagaagcggacagacaggccccatccgcccctgagacaggaggtgctggagccagtgaagcccctgcacccacaggaggtgaggatggagctggagcagaaaccaccccagtggcagagcctactaagctggtgctcccgatgaaagtcaacccatattctgtcatcgacatcacgccattccaggaggaccagccgcccacccccgtgcccagcgctgaggaggagaatgtgggtctccatgtgccctgcgggtacttggtgcctgtaccctgcggctatgcggtgccctccaacctgcccctcctgctgcccgcctactccagcccggtcatcatctgcgccacgtccctggacgaagaagcagaaacaccagaagtcacagaagatcgccagcccaattctctgagttccgaggagcctccaaccagtgaagatcaagtcggtcgagaggacagcgcacttgcccgctgggccgcagacccggccaacacagcctggatggagaatccagaggaagcaatttacgatgacgttccaagggaaaactcagactctgaaccaggtttgattttgtctggaattgatttgaggagattcagctcagcagcctttccctctggatgccaaagtgactatttagtggacggcccagacgttttctgtattcatgttttgtatgttgcttctagaatggcttattgatgtgtggtggaatattggtgtttgtgcacatatgtgtgtgtgcttataacccttgaaatagggcagtttaatcttacttatcccaagcaaacagaggagtaaaggtacagaaaatgccggcaaagaggtaggaaacacagaggctgagaagcagcaatgtatatcgaataaatgacatcagtgagaaagtagagagaatcaggcaaaggtaatagtcaaagaaataactaagaattctctacaattaaagaaaaacataaattctcagattttagacatagagattcaaagcaagatgaattacacgttgatccatacctaggccgatgcaatggaggccgcggagcaccaggcccagggtgaatctcccgagagcaactggagagaaaacatggctgcctacacaggaaccgctattccactgacccacaggctgggggcgggttctcaaagcgaagaaggacgtggctcttttaacctgagcggccacgtccagcaaagtacagtcctttagaaagggcgatgggccgcaggaggcagagcgggggagcttgctgcccatagaatctaaggaaatagttaatgatgcactcgctgcagggaagagcacactgaaccacggaggaggtgacgggggcccggagggagtggggagcccgggaagtgtcgggcgtgtggagagtcgataccagcaccgctcaagacagcgctgatagtgccgattgagtttcagatgcagccggagccccagccagtgccgactgaagaggagggtgaccgttcatgccgtgtgttctgaagttctgaagtcggcatttttcagggggaggatcttgttaccgatttttttttttttttttgctatggattggtccagtttgcgttttatgggtaactgctaagaaaataggaatagattattttaactttgaaaccagtagtgcaaaacccaatctggtaaatgcaagaaaatataaaataagaaagctttgcaaatcatatgagaaaagactgcaaaataagtacaaacatattggtacgcatagtaaagtgcatcctattgccagtaaaagaaatcctcagattggataaaatagcaaagctagccataaattcttgtgagagatacataagagtacagaagatttgtaagtaaatggatggaaaaagaaatataatgcaaattctaaccaaagtattgtcagtataactataataatacactaaatgttaagccataagcaaggaataattcatgaggaagatatataacagttctaaactcatatgcacctaacagcatagccttaagatatataagcaaaatataacaaggcttaatcagagatatgtaaatacgctgttggggtgagagattttaagaaaactgtctctgctattgacagatcctggacataaaatcagtaaaccggccaggcacggtcgctcacgcctgtcatcccaacactttgggaggccaaggtggatggatcacttgaggtcgggagttcaagaccagcctggccaacatggtgaaaccccatctctactaaaaatacaaaaattagacaggcgtggtggcgggcgcctgtaatcccagctacttgggaggctgaggcaggagaatcacttgaacccaggaagcggaggctgcagtgagtcgagattgtgccactgctctccagcctgggaaatgagtgaaaactctgtgtcaaaaaaa

SEQ ID NO: 6768 - DNA, 5528 bp, Homo sapiens
ttccccaaattgatggacataaacccatatgcttatctcagcatgtgtttaaaaagcacttgctgagattcagtgaccatccaacattaaaaactgctgatagaaggaaactcacttagctgaattaaggacgtgttcttaaaatctaccgccaacgtaatggggaggagctcacggcgttcgttaatttattcattccgcaaatatgttttgggcagttacataccgaatagtagatggaggtgtgcctgctgtcatggagatagggtgatttcatcctgttgatcaggaaaactcctaggtgcttgcaggtaaatgtgccacaaagaaagtgaggaccaaaggttagttgatgtaaaaacaagtttgaaatgcattttggggtaatttatccggtcgcttcgggcattcctcgcggaaggcgtggtctggtgactcagaagccaacacactgcgggagtccagccgtcggccccctgccgtgtggcgaggcccagtgtgtcccctttgtaaggacagcacaagcaggagttaatggaccggccatccatagcggtggtggggcagggagccagtttccgaaagaaactcacgccgccgcaggagggccctgtgggatgctctgtgcagagctgttgtgcggaccgggagacgggaaagcctggtggctgcaggagggcaccgtgcagaagtatccagtaaaccacccacagcacggcagcagaaaaacgaggaaattatatgtgtgtatgtttataagaactcagaagcaatggtgagcaaaaagcaaaagcaagaggagaaagtcacagtgtgctggcatcaagttgcattgagaggagcccgcggggtagtgcacccgcatttcctcgttgcgttgagaggcgcccgcggggtagtgcacccgcatttcctcgtttgagaggcgcccgcggggtagtgcacccgcatttcctagttgccttgagaggtgccgcggggtagtgcacccgcatttcctagttgccttgagaggtgcccgcggggtagtgcacccgcatttcctagttgccttgagaggtgccgcggggtagtgcacccgcatttcctcgtttcattgagcggtgcccgcggggtagtgcactcgcatttcctagttgccttgagaggtgccgcggggtagtgcacccacatttcttcactcgtttagagttcggggctctcagaacacagggagaatatgggagaattccttactagatgttacagaggccacacagggccacttttttcttttttttttattgtgtcaggtatacgtaaatattcctttcggtcagttcagcacgtaggactgagtggcattaggtacgctcactgtacagccaatgcctccataggccactttttaaatacgcggggctaagggccaacgacaagattgtcatcgaggacaataagtcgatggcgctgcctggtcactggcttggtcagaaaacacatgccagggtgactggatttaacgttcagttttagaaccacaaatctgccagcccaggcattcaagaggaagtgagtaattcactgaattgatggttagcaagacccttcaaagtccttggaagttccgtgtttgctgggggtcacaacagcaattgcgtttctaaaacattgaaaaccacccgtttttcacacatctgaatagcctgagttgtaacagacctaagtaaaggcgtccaaacgtgcctgatcctgtggctgggtcccaggagccttaacaaggcattgagagagctggattgattgattagactcttgccaactgctgtgcggaatacagaaaatgcagctccagctctcaaagggctgaaaatctaattgaggtgaaaaaggtaacatgtgtgaaaaccatgtctgtgtagacttgttttgtatggaccagaaaagttggaagtccagagatggatgcgaggaagtaggggatggagtttccttataacctctggagggacagtccagatacataccggggtgtgtagcgggtggaggttctaagacaggctggaggaacagtgcagacacacaccagggtgtgtagggggtagaggttctaagacagtctggagggagagtgcagacacacaccggggtgtgtaagcagtggaggttctaagacaggctggaggaacagtggagacacacaccagggcgtgtagggggtagaggttctaagacaggctggaggaacagtggagacacacaccacggcgtgtagggggtagaggttctaagacagtctggtgggagagtgcagacacacccggggccgtgtagggggtacaggttctaagacagtctggtgggagagtgcagacacacacggggctgtgtcggggatagaggttctaagacagtctggtgggagagtgcagacacacaccagggcgtgtagggggtggaggttctaagacaggctggaggaacagtggagacacacactggggagcataggggtgcttttctctgagtcccctagtacatggtagaggctgtagaccctccgctcttgggcacgtgggtaggctctcaggatgactcttggctcttgggcatgtgggtgagctctcaggatgatgcccagccccaattttcaggcaattgtgcaaggacttgacccattcatccgctgagctgagttgctgagactgctgggtgcccgggtggtgatcattgtccgtggcatacagaacacactgcagcttctgcaaagtgagctcatttcacgcattttatggctttgccaggctgctgttgacctgccagaacttttaatcagacatttggaggacctgttttgtagtcagtggagaaatattacaaggatagggtaatttgaaatatctaaggattgtaagtgacaagttcatgtctaattttgcatttccagtgaaagcaagtgttggctttgaatgttacttatgtgctgagatgtgtatattcctcagtgcttaattactaaggatttttagggccaagttttgttacagtgaatgattgtggatgcataaagaataaatttaatatttttaaggcatggagattatttgtatctaagaaaccaggtaaaataaagaaacatttatgcttgtgtgactgataaaagagttagagagacactcatattctgggagtttgaagaatgtcattttcattctctaaaagtcttgttagtgtcacagcattgaaaatttaaaaatccgtgtgtattttcttgctagtgctggtacttgaatatctgtatcatccacctatccatccacctacccatatttctataatccaccgtccctcgacatgcctatcatctgtccaccatttctctctgtctaattttcaaaacatcctgtaagtttatataaaggaagatttttcttcttgtgaagttctctaaggctgacaagttacctggcatgactgtggcggatgcccatagccaggtggtcctcggggtacagatggggcaggggcacttgtgagaaacacctgaagtgcttttccccagcctccccggccctgccgggtggtggaggcgctgcacggtgccttccatggagcaagcccggggctccgcagggtcctcagcatgattcagatttccttccacccccagctctagatgatttggtaaaaccacaaacaggcacaaaacagcccacatggaattctaaagttttaatttcattttggaatttatgcactcagatgaaatgatttatgatgatgttgagaatggggatgaaggtggaaacagctccttggaatacggatggagttcgagtgaatttgaaagttacgaagagcagagtgactcggagtgcaagaatgggattcccaggtccttcctgcgcagcaaccacaaaaagcaactttctcatgacctaacccgtttaaaggagcactatgagaaaaagatgagagatttgatggcaagcacggtgggcgtggtggagattcagcagctcaggcagaagcatgaactgaagatgcagaagctcgtgaaggccgcgaaggacggcaccaaggacgggctggagaggaccagggcagccgtgaagaggggccgctccttcatcaggaccaagtctctcatcgcacaggatcacagatcttctcttgaggaagaacagaatttgttcattgatgttgactgcaagcacccggaagccatcttgaccccgatgcccgagggtttatctcagcagcaggttgtaagaagatatatactgggttcagttgtcgacagtgaaaagaactacgtagatgctcttaagaggattttggagcaatatgagaagccgctgtctgagatggagccaaaggttctgagtgagaggaagctgaagacggtgttctaccgagtcaaagagatcctgcagtgccactcgctatttcagatcgcgctggccagccgcgtttccgagtgggactccgtggaaatgataggcgatgtcttcgtggcttcgttttctaagtccatggtgctggatgcatacagtgaatatgtgaacaatttcagcacagccgtggcagtcctcaagaaaacatgtgccacaaagcccgcttttcttgaatttttaaagcaggaacaggaggccagccccgatcgaaccacgctctacagcctgatgatgaagcccatccagaggttcccacagttcatcctcctgctccaggacatgctgaagaacacctccaaaggccaccccgacaggctgcctcttcagatggccctgacagagctcgaaacactagcagagaagttaaatgaaagaaagagagatgctgatcaacgctgtgaagtgaagcaaatagccaaagccataaacgaaagatacctgaacaaggttgagagaggttttcttcaactctattccaaaattatttttgctttgtgctaataagctgtcgttgtccagcaatactaatcttttggatcgtttggagtaattcccttcgcccagagttcttaaccggggtggatggaggccttcgggagagtcacaccaatgtggaaattgtatgtaaaaccttaacagcctgtcttaacagcattttcttaggaaagagattcatacattcattagaccctcaaatggatccaggacctcccaaggggttaagagcaactcctttagcttacttttcctttcaaaataacggtatttaatttcagatagtaatagttaaagctgaaaatatttacaggctaggcacagtggctcacacctgtaagcccagcactttgggaggctgaggtgggaagatcgctggaacccaggagttcaagaccagcctgggcatgatagtgagaacccatatctaaaaaaagaaaaaaaaaatagctgggcacagtggcatgcacctatatagtctgagctacgtgggaggctgaggccagaggattgctcgagcctgggaggtccaggctgtggtgagctgttattgaggtgctgcactctagcctgggtgatggagcaaaaccctgtttc

SEQ ID NO: 6769 - DNA, 477 bp, Homo sapiens
actgagtgaggcaatggcaaaaagaagagctttacttttttaacctttgaggacagccatgactctgcgaataagattgtctctcagaaataccgtaaagtacatagccactaccatgaagtatggaaaaccatgttgaagaaagaaatggttagtacttcagccagccagagaggtcagagtggttctggaaactttggtggtggtcatggaggtggttttggtgggagtaacaactttggtcatcaaggaaaaatttcactggtaatggtagctttggaggcagctgtattggtggatatgggggcagcagggatggctataatggatttagtacttaaatgatggaagcagttttggagatggtgggaactacaacgattttggtaattacaacaaccaatcttcaatcaattttgaacccatgaagagaagaaactttggagacagaaactctggcacctaaaaaaaaaagaa

SEQ ID NO: 6770 - DNA, 472 bp, Homo sapiens
cagggcctgaggctacctcagaaatatctcctgtgtttctggtggtggcgtaaaggggagagccggtgagaaacactgcacctgcacctacggggtgggtacatgtgactttgggcaagtgacttgatgttgtagtttttttcctaattttgtcttgacgtccttctcaggagagagtggctgtaaactctagccctgccctgacggggatcctggggatgtggtcgtgggtgtttcccatgtgcctttcatgggatccttctttgacctcacagacggcctgattcctgagtgtccaacctgtggccaggtgtccctctcgcaggaagcttgtttatcctggcacatgaccttgtggctctcatctgacctgtgtccagtttattcctactgagacagccactctcccggagagccctgaccgggaaagaagttaggatggggtagaggaggcaactcatcagaacccaag

SEQ ID NO: 6771 - DNA, 468 bp, Homo sapiens
gtcaagaaactgctgtgattcttcccctctgcctcttctatggaaaaaagctttaatctctggggagaagggtatctctgttggccccattggtgaacattcagggggtagatgagaagtgggagagaatcttatgcctggaggaggggccctgagcccaaaactgcagtcgggagtggtcaacagaaccgagagtgctgccctcctgagattcaggaacacagtgtttgacttagacttaatcagaacatcagactgtatcccccacccccaaccccctgccaccaagctaagaagctttcagtaacaagtaacccacaaaatactactaggaaaggaacaagattatgcaaagaggcacaacacaaagaatcaaacaggcattgctctagtaaaccatcgcccaccagagagacaaactgttctgcagattcatgaaggctgtaatacactgaggataactatggc

SEQ ID NO: 6772 - DNA, 210 bp, Homo sapiens
tacaggtgtgaaccatcatgcccggcctgtaaataaagttttattggaacaaggtcacacctatttgtttgtagattgtgcatagttgctttcatgctgcaagagcaaagttaagtagttttgcaacagagacattttggcctttgaaacttaggatatttactctctggctcttgacaggaaaagtttagcaacctctgcactaaagag

SEQ ID NO: 6773 - DNA, 329 bp, Homo sapiens
gggtgggtaagggacatttcccttcatttctctgcttgccacccttggggcctccttcagttcacattttactcagtctcccggtggctgtacagccgggggcgggggcatgtgtggacatccacacacagcgctggttgtatcctaaccaggaaactcaaagcagccttgcccaccacagtgcgttgaatggtgaccctctaaagatgtgtcctggggggctgaggagggaggatggcttgagcccaggagattgaggctgaggctgcactgaactgagattgtgccactacactccagcctgggcaacacagcaagactctgtcgca

SEQ ID NO: 6774 - DNA, 381 bp, Homo sapiens
tttttccctgagatggagtcttgctttgctgcctaggccgaactgcagtggcgcgatctcagctcactgcaatctccgcctcccgggttcaagtgattcttctgcctcagcctcccaagtagctgggactacaggtgcctgccaccacacccggctagattttgtattttttaaaagagatggggtttcgccatgttggccaggctagtctcgaactcctaacctcaggtgatccacccacctcagcctcccaaagtgctggaattacaggtgtgagccaatgtgcccagcccagagctgttcttgatactcacaagctcagattgtgagaacctcaaggccaggatcaagaatggggtccctgccataccctcgcagtgc

SEQ ID NO: 6775 - DNA, 323 bp, Homo sapiens
ataaccagggctggttgatgttacatctatttctgatgtaagaaatctaagagacgtagttgttagtttccatgccagttcttacctggtgtgtcacctgaagcaggtgatctttcctctctgtcctctgtccctctttaaaatgggaacgaatgtcggttgacccagggcagaggtcactgaagggctcactgctatccagggatgcacaccctgtttatggcaaagaagtataaaattaataaatgttgatttgctgtatgtgcagagaagtataaaattaataaatgtttatttgctatgtgtgcaatgctaaaactcta

SEQ ID NO: 6776 - DNA, 592 bp, Homo sapiens
atatcaggttatttgaatcaagtaatatttgcctatctatttatacattaatatgtttaaaaagaaatttctccaagaagaagcattcgtcattcactatttgtttgatgagatgatacttacattcttattgggtaatcataaaatagctaattttgtcgtgcttaatgccaagagcagatgcactttctaataaaaacaacatgcaaagcccaaatctaagcattatgtagaagcctattaaaatcttggagtattttttttgtaatttaaaaacgtaattgtggtttgcattgtgcccagttttcaaaaaagtatgtgattggtgccacagcttaaaaaccgaagaagcaaaaattgtcccttatgtttttaagtataatgagtcattttgagagacaatgtcatgcctagaggtttagtgcatacctctggcaccagactgtctggattcaaatcttgactgggcatggtggcttatgcctgttatcctagccctctggaaggatgaggtgggaggattgcttgaggccagcagttcaggaccaacctgccaaacataactagacccccatctcttaaaaaaaaaaaa

SEQ ID NO: 6777 - DNA, 1282 bp, Homo sapiens
cacagcatgagaaatcactgacctagactgatgtcttcatttcacagttgagacatccaagccccagagaggaaagggacttgaccaaagtattgcagcctgttaggtgcagagctgagcctgatatcctggtctcttggcctcccatttcctaccacttctcctgtcctgtaagcagctcttgagatttaggtaccttggcccctgtggaatcaaaatccctagacactgtgcactcttttgaactcatcagagatttttttttagtccctacgttctaccttgctgttgagagtgagctgttgccatgtcccttggcagcttccagcctagctagggatgtacctatgaagtagtaggtaattcaggctgtagagtctgtaataactttccatgcctatgtcataggattctaatttgttcaggcccagcaatacccaggagatgacattaaaaggtgttgattttattgagggtcagtggatgagggagaaaaagttttcaaaaattaaaaaaaatttttttaaaggtgttgactttagaccacaaaaagagtttgagagagcaagcagaacctgtcaagaaagacttcctaggggaggtagaagttgaacaggatcttagatgacttacatcagaagcagcagtcctatcaggaggaataccacaagcaaaggcagatgaggtggcaaagtccacatccaaccccagaaagtcttcttccccacccatgtctgcatggggccccaggaggctgtccccttcactggcccacccagaacccccatccaggaggaagatttctggagcacaccttttagccatgcccacccgcttccgttctttttcagcaaacccctgcggatcctcaacatcctcctgctgctggagggcgctgtcattgtctatcagctgtactccctaatgtcctctgaaaagtggcaccagaccatctcgctggccctcatcctcttcagcaactactatgccttcttcaagctgctccgggaccgcttggtattgggcaaggcctactcatactctgctagcccccagagagacctggaccaccgtttctcctgagccctggggtcacctcagggacagcgtccaggcttcagccaagggctccctggcaaggggctgttgggtagaagtggtggtgggggggacaaaagacaaaaaaatccaccagagctttgtatttttgttacgtactgtttctttgataattgatgtgataaggaaaaaagtcctatttttatactcccaacaaaaaaaa

SEQ ID NO: 6778 - DNA, 1825 bp, Homo sapiens
tgtatgcaaatgtagcggcgcggcgggagcgcgcggctgatacccgggactgggctgcggcggttagtcctctcccggccgccgtcgcctccgacatattgcccgcaggagctgcggcggcgaagcggagagcaccggggggaggagatgggaggacgaagaggtcccaacaggacatcttactgtcgaaatccgctctgtgagccgggatcctcggggggctctagtggaagccacacttccagtgcatcggtgaccagtgttcgttcccgcaccaggagcagttctggaacaggcctctccagccctcctctggccacccaaactgttgtgcctctacagcactgcaagatccccgagctgccagtccaggccagcattctgtttgagttgcagctcttcttctgccagctcatagcactcttcgtccactacatcaacatctacaagacagtgtggtggtatccaccttcccacccaccctcccacacctccctgaacttccatctgatcgacttcaacttgctgatggtgaccaccatcgttctgggccgccgcttcattgggtccatcgtgaaggaggcctctcagagggggaaggtctccctctttcgctccatcctgctgttcctcactcgcttcaccgttctcacggcaacaggctggagtctgtgccgatccctcatccacctcttcaggacctactccttcctgaacctcctgttcctctgctatccgtttgggatgtacattccgttcctgcagctgaattgcgacctccgcaagacaagcctcttcaaccacatggcctccatggggccccgggaggcggtcagtggcctggcaaagagccgggactacctcctgacactgcgggagacgtggaagcagcacacaagacagctgtatggcccggacgccatgcccacccatgcctgctgcctgtcacccagcctcatccgcagtgaggtggagttcctcaagatggacttcaactggcgcatgaaggaagtgctcgtcagctccatgctgagcgcctactatgtggcctttgtgcctgtctggttcgtgaagaacacacattactatgacaagcgctggtcctgtgaactcttcctgctggtgtccatcagcacctccgtgatcctcatgcagcacctgctgcctgccagctactgtgacctgctgcacaaggccgccgcccatctgggctgttggcagaaggtggacccagcgctgtgctccaacgtgctgcagcacccgtggactgaagaatgcatgtggccgcagggcgtgctggtgaagcacagcaagaacgtctacaaagccgtaggccactacaacgtggctatcccctctgacgtctcccacttccgcttccatttctttttcagcaaacccctgcggatcctcaacatcctcctgctgctggagggcgctgtcattgtctatcagctgtactccctaatgtcctctgaaaagtggcaccagaccatctcgctggccctcatcctcttcagcaactactatgccttcttcaagctgctccgggaccgcttggtattgggcaaggcctactcatactctgctagcccccagagagacctggaccaccgtttctcctgagccctggggtcacctcagggacagcgtccaggcttcagccaagggctccctggcaaggggctgttgggtagaagtggtggtgggggggacaaaagacaaaaaaatccaccagagctttgtatttttgttacgtactgtttctttgataattgatgtgataaggaaaaaagtcctatttttatactcccaacaaaaaaaa

SEQ ID NO: 6779 - DNA, 1586 bp, Homo sapiens
tgtatgcaaatgtagcggcgcggcgggagcgcgcggctgatacccgggactgggctgcggcggttagtcctctcccggccgccgtcgcctccgacatattgcccgcaggagctgcggcggcgaagcggagagcaccggggggaggagatgggaggacgaagaggtcccaacaggacatcttactgtcgaaatccgctctgtgagccgggatcctcggggggctctagtggaagccacacttccagtgcatcggtgaccagtgttcgttcccgcaccaggagcagttctggaacaggcctctccagccctcctctggccacccaaactgttgtgcctctacagcactgcaagatccccgagctgccagtccaggccagcattctgtttgagttgcagctcttcttctgccagctcatagcactcttcgtccactacatcaacatctacaagacagtgtggtggtatccaccttcccacccaccctcccacacctccctggtttgggatgtacattccgttcctgcagctgaattgcgacctccgcaagacaagcctcttcaaccacatggcctccatggggccccgggaggcggtcagtggcctggcaaagagccgggactacctcctgacactgcgggagacgtggaagcagcacacaagacagctgtatggcccggacgccatgcccacccatgcctgctgcctgtcacccagcctcatccgcagtgaggtggagttcctcaagatggacttcaactggcgcatgaaggaagtgctcgtcagctccatgctgagcgcctactatgtggcctttgtgcctgtctggttcgtgaagaacacacattactatgacaagcgctggtcctgtgaactcttcctgctggtgtccatcagcacctccgtgatcctcatgcagcacctgctgcctgccagctactgtgacctgctgcacaaggccgccgcccatctgggctgttggcagaaggtggacccagcgctgtgctccaacgtgctgcagcacccgtggactgaagaatgcatgtggccgcagggcgtgctggtgaagcacagcaagaacgtctacaaagccgtaggccactacaacgtggctatcccctctgacgtctcccacttccgcttccatttctttttcagcaaacccctgcggatcctcaacatcctcctgctgctggagggcgctgtcattgtctatcagctgtactccctaatgtcctctgaaaagtggcaccagaccatctcgctggccctcatcctcttcagcaactactatgccttcttcaagctgctccgggaccgcttggtattgggcaaggcctactcatactctgctagcccccagagagacctggaccaccgtttctcctgagccctggggtcacctcagggacagcgtccaggcttcagccaagggctccctggcaaggggctgttgggtagaagtggtggtgggggggacaaaagacaaaaaaatccaccagagctttgtatttttgttacgtactgtttctttgataattgatgtgataaggaaaaaagtcctatttttatactcccaacaaaaaaaa

SEQ ID NO: 6780 - DNA, 1217 bp, Homo sapiens
cacagcatgagaaatcactgacctagactgatgtcttcatttcacagttgagacatccaagccccagagaggaaagggacttgaccaaagtattgcagcctgttaggtgcagagctgagcctgatatcctggtctcttggcctcccatttcctaccacttctcctgtcctgtaagcagctcttgagatttaggtaccttggcccctgtggaatcaaaatccctagacactgtgcactcttttgaactcatcagagatttttttttagtccctacgttctaccttgctgttgagagtgagctgttgccatgtcccttggcagcttccagcctagctagggatgtacctatgaagtagtaggtaattcaggctgtagagtctgtaataactttccatgcctatgtcataggattctaatttgttcaggcccagcaatacccaggagatgacattaaaaggtgttgattttattgagggtcagtggatgagggagaaaaagttttcaaaaattaaaaaaaatttttttaaaggtgttgactttagaccacaaaaagagtttgagagagcaagcagaacctgtcaagaaagacttcctaggggaggtagaagttgaacaggatcttagatgacttacatcagaagcagcagtcctatcaggaggaataccacaagcaaaggcagatgaggtggcaaagtccacatccaaccccagaaagtcttcttccccacccatgtctgcatggggccccaggaggctgtccccttcactggcccacttctttttcagcaaacccctgcggatcctcaacatcctcctgctgctggagggcgctgtcattgtctatcagctgtactccctaatgtcctctgaaaagtggcaccagaccatctcgctggccctcatcctcttcagcaactactatgccttcttcaagctgctccgggaccgcttggtattgggcaaggcctactcatactctgctagcccccagagagacctggaccaccgtttctcctgagccctggggtcacctcagggacagcgtccaggcttcagccaagggctccctggcaaggggctgttgggtagaagtggtggtgggggggacaaaagacaaaaaaatccaccagagctttgtatttttgttacgtactgtttctttgataattgatgtgataaggaaaaaagtcctatttttatactcccaacaaaaaaaa

SEQ ID NO: 6781 - DNA, 1872 bp, Homo sapiens
tgtatgcaaatgtagcggcgcggcgggagcgcgcggctgatacccgggactgggctgcggcggttagtcctctcccggccgccgtcgcctccgacatattgcccgcaggagctgcggcggcgaagcggagagcaccggggggaggagatgggtgagcagagcggctcaggctcggcctggcaacgagcgggcgcacgggaggacgaagaggtcccaacaggacatcttactgtcgaaatccgctctgtgagccgggatcctcggggggctctagtggaagccacacttccagtgcatcggtgaccagtgttcgttcccgcaccaggagcagttctggaacaggcctctccagccctcctctggccacccaaactgttgtgcctctacagcactgcaagatccccgagctgccagtccaggccagcattctgtttgagttgcagctcttcttctgccagctcatagcactcttcgtccactacatcaacatctacaagacagtgtggtggtatccaccttcccacccaccctcccacacctccctgaacttccatctgatcgacttcaacttgctgatggtgaccaccatcgttctgggccgccgcttcattgggtccatcgtgaaggaggcctctcagagggggaaggtctccctctttcgctccatcctgctgttcctcactcgcttcaccgttctcacggcaacaggctggagtctgtgccgatccctcatccacctcttcaggacctactccttcctgaacctcctgttcctctgctatccgtttgggatgtacattccgttcctgcagctgaattgcgacctccgcaagacaagcctcttcaaccacatggcctccatggggccccgggaggcggtcagtggcctggcaaagagccgggactacctcctgacactgcgggagacgtggaagcagcacacaagacagctgtatggcccggacgccatgcccacccatgcctgctgcctgtcacccagcctcatccgcagtgaggtggagttcctcaagatggacttcaactggcgcatgaaggaagtgctcgtcagctccatgctgagcgcctactatgtggcctttgtgcctgtctggttcgtgaagaacacacattactatgacaagcgctggtcctgtgaactcttcctgctggtgtccatcagcacctccgtgatcctcatgcagcacctgctgcctgccagctactgtgacctgctgcacaaggccgccgcccatctgggctgttggcagaaggtggacccagcgctgtgctccaacgtgctgcagcacccgtggactgaagaatgcatgtggccgcagggcgtgctggtgaagcacagcaagaacgtctacaaagccgtaggccactacaacgtggctatcccctctgacgtctcccacttccgcttccatttctttttcagcaaacccctgcggatcctcaacatcctcctgctgctggagggcgctgtcattgtctatcagctgtactccctaatgtcctctgaaaagtggcaccagaccatctcgctggccctcatcctcttcagcaactactatgccttcttcaagctgctccgggaccgcttggtattgggcaaggcctactcatactctgctagcccccagagagacctggaccaccgtttctcctgagccctggggtcacctcagggacagcgtccaggcttcagccaagggctccctggcaaggggctgttgggtagaagtggtggtgggggggacaaaagacaaaaaaatccaccagagctttgtatttttgttacgtactgtttctttgataattgatgtgataaggaaaaaagtcctatttttatactcccaacaaaaaaaa

SEQ ID NO: 6782 - DNA, 1438 bp, Homo sapiens
tgtatgcaaatgtagcggcgcggcgggagcgcgcggctgatacccgggactgggctgcggcggttagtcctctcccggccgccgtcgcctccgacatattgcccgcaggagctgcggcggcgaagcggagagcaccggggggaggagatgggaggacgaagaggtcccaacaggacatcttactgtcgaaatccgctctgtgagccgggatcctcggggggctctagtggaagccacacttccagtgcatcggtgaccagtgttcgttcccgcaccaggagcagttctggaacaggcctctccagccctcctctggccacccaaactgttgtgcctctacagcactgcaagatccccgagctgccagtccaggccagcattctgtttgagttgcagctcttcttctgccagctcatagcactcttcgtccactacatcaacatctacaagacagtgtggtggtatccaccttcccacccaccctcccacacctccctgaacttccatctgatcgacttcaacttgctgatggtgaccaccatcgttctgggccgccgcttcattgggtccatcgtgaaggaggcctctcagagggggaaggtctccctctttcgctccatcctgctgttcctcactcgcttcaccgttctcacggcaacaggctggagtctgtgccgatccctcatccacctcttcaggacctactccttcctgaacctcctgttcctctgctatccgtttgggatgtacattccgttcctgcagctgaattgcgacctccgcaagacaagcctcttcaaccacatggcctccatggggccccgggaggcggtcagtggcctggcaaagagccgggactacctcctgacactgcgggagacgtggaagcagcacacaagacagctgtatggcccggacgccatgcccacccatgcctgctgcctgtcacccagcctcatccgcagtgaggtggagttcctcaagatggacttcaactggcgcatgaaggaagtgctcgtcagctccatgctgagcgcctactatgtggcctttgtgcctgtctggttcgtgaagaacacacattactatgacaagcgctggtcctgtgaactcttcctgctggtgtccatcagcacctccgtgatcctcatgcagcacctgctgcctgccagctactgtgacctgctgcacaaggccgccgcccatctgggctgttggcagaaggtggacccagcgctgtgctccaacgtgctgcagcacccgtggactgaagaatgcatgtggccgcagggcgtgctggtgaagcacagcaagaacgtctacaaagccgtaggccactacaacgtggctatcccctctgacgtctcccacttccgcttccatgtgagtctcctccccggggaaggagggttggggcctgagagggtgggaggatctg

SEQ ID NO: 6783 - DNA, 390 bp, Homo sapiens
aactcactgcatatccctgaacatttaaaatggaaagaagaaaattaatgtttaattattatatgtgaacaaggaatgtgtttttacttaatgtttagtatattgtttatatttaatcacctgtgcaggaaacttaagtttcatcattttataagtaagagtaatatagctcagagaaagtaaatagtttaccctaagtcctacctaagtggtagagctgggatttgaacccaaggttgtttaactcattgcaccctcccaacccctacaggcttgtagtgtataacatacagttgtgttccatgccaaaccatagtgatttattttctgttatcatgatatatatctttgcgtaataataaatggcactcatgacttacacttagtggt

SEQ ID NO: 6784 - DNA, 216 bp, Homo sapiens
aagtcatctcagaaatattagtttataaatatgcagatacaatttctagaatgtcaaaaaataatcctttcacctgagttgtcttaagtaaataacttttaggatttttaattggattatttatgtaatcattataaaggagatctgaggtaaattgcttaagcattttctttagctttttgcaagactaaaaatggagaataaatatttgctcaa

SEQ ID NO: 6785 - DNA, 359 bp, Homo sapiens
taatgaaaaccatctcaagcaatttggaaatgaagtaccacatgtcctatgctgtcccttccataaacttgacaaaacagcctataacaaattgtttactttgagatttagtaggaaaattccatgagatttaaatgagatgactactaataagccatctacatttgattctattccaattaaaaatgggttaggaaagtgctttgaatatcaagtgtgttcatcagggaatcatttacctaagtcttcctaacactgtttagtgaatattaagcctgatgtagtaaatacacgctaaccactaaattgaaggggaaagagggagaacaaagaggcatgtaaagtacacttacttcttc

SEQ ID NO: 6786 - DNA, 395 bp, Homo sapiens
atttttttccacatagttatacacatttgtgctacatgaccaaggtgtgtgttttaacttggaacttagggtaatataagagtcccagatttcttcaatataaaagatcaagtcaaagtctaatacatttaagatccttcataactatgttttaagtgagagttcactcataactagtaaatgtatttgatgctgtctagctttacataaagtagctctccaaaacaaatctggtattactggaaattatttgtcagaaacataaatcaaattctattaatgccatatctgagggcatttctgattttctaagttgtatatctgcaaatacttacgtttcaataaatgccaaatccttataacaatgctatttattctcatatcaggtagagatt

SEQ ID NO: 6787 - DNA, 419 bp, Homo sapiens
gtcgacttttttcttttttcctcagctgtgtggacggcagtctcaggggttaacagcgtaaaatagggttcttcccaggctggtttgagttttttctttctagcttttgatgaggacgtggttttcaggctggtgctggtgtactggaaattctaggggtggtacctgtgctaaaagacttttaggtccgagggaagtgaaagtggaagataaattaagtataggatttttgctgcatattctggggccttaggcgtcatggtgacacctcctgctccattcttgttcagcgccacccaggggaggctgcagccctgccccttcttaatgtcttggccttcttgtggccttcaccacccttgctcactgtggccttcaggatgaggggccttgtgacttacctggccatcttagggcct

SEQ ID NO: 6788 - DNA, 387 bp, Homo sapiens
atcctcagatggctagtggagaaacagttcagagcccagatcatgctggagagcaggagagccttggtgaaagatgaaatggcaaaatgcttaagagttggggatcaggaggcagacacacccacatttgaagcctggctcccccatttgctctctaggtgatagagcaagttactaaccactctgagcttctgttatttctaagagtagaagaaataaaaggaatagtgccccattatttgtaagaaagtgtgaatgacaaggtgcatgtaaagcattccacagtcaatattagcgattgtcactattatttgtgtatacaataaacagcactgcccatggaaggctctaactctagagtccttcccaaccctgtctctatcactt

SEQ ID NO: 6789 - DNA, 445 bp, Homo sapiens
tttttgcttatgtaaaatgctacagtggataacatacatccttgctcccaaagtacaggaagaaaatttatatcattaaacacatgcaaatgaaaacacaggattccatgcttatcatccaaaccacttacctgattcatcaaaactacttgggtagtagaacaaactattatatcttcccagaatattatggaaaggtatcctctattgctgaataattgagtctacttttcattttaccaaagttgaaaccaagaaaccatcatcccttgatcctgaccccagtgctccccaactttggtggacagattctgcaaactgtctaccaaactagtgagataacagatgcaatgcactaatctaacttcattcactcattcattcattcattcattcattcaacaattgtgtatttgctaagcacaaggtaataaggaaagttcta

SEQ ID NO: 6790 - DNA, 473 bp, Homo sapiens
ttttttttttctttttgagacagagtctcgctctgttgccaggctggattagaaactacctcatgaaaattagcatgaccttcctttatgcttctctggtttgtattatattctctattgacaaattttaaaatattataattcattgagagtaccattttgcctccccctactccctactccaaatatgagtttttcctgtttgattaaacagccattgagcatctgtcacagatccagctctgttctaggtactttagaataaagatgaatgcttggttgtttccaggctatgctgtaaattctaaggaagggggttaaggacaggattcttggaggcagtatgatgtgatcccagagacaggagataggaaaaagataagcacatgttctagatgtgtttaaattctcatcaaataggaggcgacgccattctctgatgaggaaggagatatgaaatcagacacccaaag

SEQ ID NO: 6791 - DNA, 513 bp, Homo sapiens
atgtggtgtgggcttaggtccccacagtttacctcagaaatagtcaagatgcagggagctgaatgaggactctcgaggcagctttgccagcctggagcccaggtgagtcactaccacctcagaaacatccttcagaggccaggattcaggccccaggcgggagtcggagcatccaggctgctggtccggttctctccactgacgtcatcacccccgcttagtctggaatggctggcaacctctgcctgaggatgagagctggctggaagtggaaaagcaggaaatgtttccagattggaaactcaaggcacgtttgcgcaatactgcactcggccaagactgtgtggctgacctgcatgcctaatgggatcccaggtctgaaacagggttctgcagaaccattggtctgacctcatacctcccacctagacacaatgatatcttcttggccaagaaaaaatgacctgtatttttcttttcttttttaatgttatccagctgaggtgtgccttt

SEQ ID NO: 6792 - DNA, 371 bp, Homo sapiens
gtatgaacacagttttcctttaaaagaaaattttaaaaagaagtagctttaaaccacctatgtttgattaggaattttagggtcccgttttcctctgtgtgtttgtgtttgtgtatctaagtcactacaaatatatacatatgtattcaagatcaagttatgaatttcatagaattgggaactttgtcggttttcttgttttaatgatgttgagtgaaaacagaaaataggaggacattcttttaaaatagccttgccgaaaacctgaaaaggactctagcattcaataaacagtacatttctccctcattgggggtcaatgaatgtttaatgcatggggcaagattttggtctgatctgcaaaaaaaaaa

SEQ ID NO: 6793 - DNA, 780 bp, Homo sapiens
agagagcggcgtctccagttaggcgctaatgctggatgaattagtcttgaagtggccactagtaggtctccttgtgggagggcttagagccagatggggagcccaggccctgccctcattttaaaatgagcccctggcactcccagagagaggcattagcaggttacagaatgaagctattaaataataggtgtggcattaataataggtgtggcagtgtttcttgagtaatttcagagctactcacaggttgacagatgtaccctaaggtgctttctttaaaatatatacatagagagagaaaacaattttttaaatgaacttttgagttcctgagatccaagaagggttaaaagttaatgttattttgcccatatatactggtcttagggctttatttctgccctaaaaatattctacttaaaaaaaattcccgtcatcccatttatagtataaaggaaataatgtcactggattgtggaattggggctagaaacttgtctttggggcaatattgaagcctatggaagccagaaaatgtctagttggctaaaccaaaggatatatgaaattaatagtttgccgaagacagtttttaaaattaaactgtggtgacacatcagtggatattcagctaagtattttaaacacctgtaagagaagaatgtaacctattttggtgcaaaaaaaatattggaccatctcttacttgttgaaaagcctaagccgattcgtgaaggtcctgttggtgcaggtgacagtcttgccctgaggcctaga

SEQ ID NO: 6794 - DNA, 351 bp, Homo sapiens
cttcctttatggcattctacttttatctgttgtaggctgttagtgtttcatattcgatttggtttggggaaaaatactcagttaaaaaaattttttttaatgattggctttagagggactgttacctctttggcatatctgtcagcggaatggaaagaaatggagtcagactgaaattcatgccagcttaatcactgaaggcagcactgctttgaaaagaagaattttcaacccacatcgtaaaaacaaagcctgattggaaacaatgaagtgtttgaaacttaggggcagcatgtaagtggcttaatgagcaaacaaacggaacatactcattttatatttaaaaagtac

SEQ ID NO: 6795 - DNA, 283 bp, Homo sapiens
acaggccctgctgacttttcccgtcatctcttggccgatgcagctctgcttgtccccacccccatcccccttttgcccaggctggccacgccccacagcagccccacttccagctgcgttccctcaggatcaccaagttgctttccactgagtgggctttcctgtcaccttccatcctgtcaccggaaaccagccatcctctgtttaggtctcccgtgctccctgcagacacctaatgcctgtctccacactggaccgccgcatcccagttaccgaatcacct

SEQ ID NO: 6796 - DNA, 469 bp, Homo sapiens
  misc_feature (16)..(17): n is a, c, g, or t
  misc_feature (20)..(20): n is a, c, g, or t
ctaaattcgcggccgnntcnacctcttctgcgtgtgtctgtgtcttagtcttttctcataaggacaccagccacattggattaagacccacacacatttgttggggtgcagggttgtcttgtgcattgcagaatgttaaacagtacccctggcctctaattaatgaatgcctgccatgggtgccagcgcgcagtggctcacaccagtaatcccagcactttcggaggcagaggcggctggatctcttgaggtcaggaatttgagaccggcctggccagcgtggtgaaacctcgtctctactaaaaatacaaaaattagctgggcgtggtggtgcacgcctctaatcccagctactcaggaggctgaggcatgagcatcgcttgaacctgggaggtggaggttgcggtgagctgagatcgtgccatgccattgcactccagcctgggtgacagagcgaggctccgtctca

SEQ ID NO: 6797 - DNA, 437 bp, Homo sapiens
  misc_feature (24)..(24): n is a, c, g, or t
  misc_feature (53)..(53): n is a, c, g, or t
  misc_feature (57)..(57): n is a, c, g, or t
ctcgggtgatccgcccgcctcggnctcccaaggtgctagaattacaggcgtgnaacngtgcccagcctgtttttgttttttgtgttttgaagcagggtctgcactccaacctgggtgacagggtgaggctctgtctcaaaaaaaagaaagaaggctgggcttggtgactcatgcctgtaatctcagcattttgggaggccaaggcaggcagatcacttgaggccaagagttcgagacctgccaggccaacatagcaaaaccccgtctgtactgaaaatacaaaaaaattatctggccatggtggtgtgtgcctgtaatcccagctactggggaggctgaggcaggagtatcacttgaacccagaagacagaggttgcagtgagtcgagactgggccactgcattccagcctggatgagagagcaagactctgtctca

SEQ ID NO: 6798 - DNA, 812 bp, Homo sapiens
gttggaacctggaatcgtacaatttctccagtttccacggagtcctgggttctagcctccagtgacacatagaaatatccttctgaccacttgctctttaaacactttcctcatgggaacacacagttgcagtttttgttgttgttgttgttgtttttgtgtgagtgtgtgtgtgtttttttttagcatccagtatagtccttgctgtaggtgcttactcagtgtcaactaatggttttcctcttagtcttttctttccttggcacctcctaaaagttgagttttccaggattcctttcttggccctctttttactcagggtacttttcggttgacattcatgcctaggcctcccctaccagctgcgtacaccccataccactgtcttgagccacagttgaaaagtgcttcaaaagtagcaagtatcttctaccttttaaattccatttcgttcaacagctatttattgaacacctactatgtggcaggccctactaggtatggttcagaatatttccccctcttgtgttttctttaccaatgatgacaaaaaaaatcaatataccatcatccacagagaaacttgggagtccttgtcggctcaaggactttctctcatccccctcccacatggaaacagctattctaatgattttacctctgcaatctgtccacttttctaatacagccgctgccttatttcaggcctttcacttgaccggtatttgaactgccaatctcatcacatcattcttgattcaaatatttcagtgtctccccattatcttcagaataaagaccaagctctttat

SEQ ID NO: 6799 - DNA, 423 bp, Homo sapiens
ggaggctcatatattgctgcagtttctgtgggtcaagagtgtggaagtggctaagcagaatgagtccagctcagaatcccatgagtctgctaatcaagctattttctggggttgcaatcatctgaaggcccagctggggctaaagaacgcactttgcagctcgctttttgcctggctcagaagatccatttccagactcacttacactggcaggcctcagttccttgccatgtgaatcactgggatgggctgcctgggacctcctcaggatacagcaattgctaataaaagaggtttaaggggaaccagagaactagacgataaaagaagttggctaacatgaaagccccaccttccaacattgggaatcacattttaacatgagatttggaggggacacacatccaaaccatttcagacccc

SEQ ID NO: 6800 - DNA, 244 bp, Homo sapiens
aatagtagctacctcacatggtactcataaagattaaataaagtaatttaggtacagtgagataaggcttgccttccagcagatattcaatatgtgttggccattattattatttctctaatcattagagaaaagaataacaaataataagaaatatctgcctacagttaaagagacatttcctttagtcacctctggctaaaaaaaaaattaaataaaaaagactaatgaaagcctgaaattc

SEQ ID NO: 6801 - DNA, 280 bp, Homo sapiens
tataaaactcacacatttatatataaactgcattgcatagatttgaatccagaatttctatttaacattatacaatgaaaattttaatataattaatattgtttaaaattaaatttatatagtatcatctcaatgcatgtgccataatttatgtaatcaatttcttactgctgatattttgttgtaaatctcactgcagtgaatatctttatagagaaatctttttgtacatctctatttcattatggcaatttttcagaaataaaattatttaaagtac

SEQ ID NO: 6802 - DNA, 434 bp, Homo sapiens
gattagatagaaataaacgggacataaaaaattgataaagttaactgataatgttaacatgattcataatatcataaacatttgcagatgaattaatcttgcatatagaaaatcctaggagatccactaaaacctgtttaatgaacaacttcagtagagttgcatgataaaatatcaatatgcaaaaacatattgtatttctatacagtagtaatgatcaaacaaataatgacatttttataactgcaagctcatcaaaataatttttaaaactaaggagtaagttttaccaaaaaagtgcaatatttgttcactgaaaactctaaaaattgttgaaaggaattgaagacctaaataaatggaaagacaccccatgtttatggattgtgagacttaatattattaaaatattgataccagctaaattgaaaaaa

SEQ ID NO: 6803 - DNA, 365 bp, Homo sapiens
cattctctgtaattaattttatcagtaaagaagcttgataatctgtcatttttatggttttaaaatagtttttaaaatgaaagttggaaaatcattattcagcagcctggtgcccaaagtgtgaataacatcttttgtctaaagcaaagtgaaatggttctcatgtcttcagcagggaggagggaggatgaggatgaggatgtggatgtgggaagaccaccagaaatctgggttcaggccgggtgaggtggctcacacctataatcctagcactttgggaggctgagataggcagatcacttgaggtcaggagtttgagaccagcctggccaacatgctgaaaccccatctccactaaaaatacc

SEQ ID NO: 6804 - DNA, 349 bp, Homo sapiens
cacacccactcccaatacactctggagcaaagcagtgggtctaatatgctaatactgacctatggttcctaaatctggctttgcttctgagtcatcaaggaaacttgtcaagaatacagacttcaggctcctatgccacagaaggcctgggttgagacctggacatctgtatttttgaagctgtcctaatgattctcatagagctgtgcaaagactgaaatttgagaaactcttcggctgagcacagtggctcacacctgtcatctcagcattttcggaggccaaggtaggaggattatttgaggccaggagttcaagaccagcccaggcaacatagtgacacccccgt

SEQ ID NO: 6805 - DNA, 773 bp, Homo sapiens
ggtaggccctctgggcgccaactgctcctctgtctcatcaggcagtgtcccctgtgttcctgacctcctgaggagctgctggatggcttagccccttgacactggagggctgaccatgagctaggcaccaccaatcaaatgcacataatcaagactttaaattggaaactagtgatacatcaaagcagaagtcactcgcaatgggaacaactccatccagcttgctgatgcatcagtggcagcagattcaagggtggtttccagcatctactgtcagtgtggcatgaggacaagcttcagtatctgcacccagcaggagcagcactggattttcaccaggccagttctccagcacaatttgcatattgttcctggcttcgtagcccctgagcctggcccctggacctttctggaaattctgtgagccagggccagcttcatagctatgcaacctgtgccatcacacaggaccccaggttcagcacggccctgtgcttggtttaatgctctgctgttgccatcttgcaattcttacagttcttttaacaagaggcctcacctttccattttgcttggatcttgaaaattatgtaaccaatcctgctatgagctagctaatatgctttaggtcagggagttcttaacctcttatgctcatgagcccttggtagtctggtgaaacctataaagcttaggaggaatgtttttaaatgaaatgcacaaaatgaaatacataggaaaccaattatattaaaatatagtttaaaatttaa

SEQ ID NO: 6806 - DNA, 575 bp, Homo sapiens
aagaaagcctacagagggcagctttctttgaatcccatgaacgaatatgacaaaaaaaggctctgacctgagcctctggtttatctagttgtcctagagagaaggatacagcaggctcccaagaagaagccacatttggggcagagcagctctgcacctttcacatttttgcccatggtttcctttggaagggaaaagctgaaatgcaaaaggagaagagagctggacgcatcacatagttttaattggtttcgaagggtcaccaagcagaatcctttctgtagcagaatagcttttccttgggagctggtatggtcagagaagaatcccggcccaagagctgaaccaggggccctttggggaaagggcctggggagtcccaaagcggcactgtccctgctcggttgcaggcagtgaccctctccccacacccgactcagtgccagctgtgtcctgagtccaaggtggtacattaggtgcttaatgtttatcccttaacaagacaaacattaacagggtggtcgctcttaaaacatggccttcccattccagtgggaagacagagaaaacaagtt

SEQ ID NO: 6807 - DNA, 436 bp, Homo sapiens
cagaccaccacaataaagccagccatatgaattttttggtttcgcagtgcacgtataagttatgtttacaactatactgtagtctactaagtgtgtaatagcattatgtctaacaatgtacacgtgttaatttaaaaatattttattactaaaaactgttggggcaaccaaagtggctcacaactgtaatcccagcattttgggagaccaaggcttctgccttggaattcaagactagcctgggcaacagagcaagactctatctctacaaaaaatattagctaggcacggtggtgtacacctgcagtcctagctactggggagcctgaggcaggaggattgcttgagcccaggagctcaaggttgcagtgagctacagttgaaccactgtactccagcctcagccacagcgcaagaccctgactccggagggaga

SEQ ID NO: 6808 - DNA, 958 bp, Homo sapiens
gtcctcaagactagaaagcatgaagcaggggaggcgttttgaaagcttaaggacaaaagaccatgggcctggatggctgattccgggatcggcatcgtaatttgttgagaaggaggccgtgctgtgctgccagttattaatgggtttaatcggttgatacacagccctactggcctaaccagtagcccagggcccgagaggatttgcaggtcgtgtcagaatttgattgaagttccttccacttggcataaggagacaccatcagcctgattgagagggtcatggtgagatggagcccgccaaggtggcagcgctgagctgaccacgccacggaccatagagtgggagcctttcctgcccccttaaccgcagctaacatcaaaagcactggtatgggctgtctaactggaacctgagttggtctttgtaattacgattcttttgggtttattttgccagttcattatccacccccctgaaatcaggcctcccaaatttagcaggtgctggggaggaccccagggagtggcttgtgggggctagctggtgaaactaccctttcctttctgttctatgagtgtgatggtgtttgagaaatatggggctatggttcaggcgcacttcacatgtgcaaagatggagaaagcactcacctgcacatttaggctcagaatattgattgaaacattttgaaatatcaaaaataaaatgttatttttaaagtttctctgagatttcgcttaagttttggtagatattcttaaattttagtgacctcagtttgggaattcagtaagccaaatattgtatccttattattagttatatagaactatgccttagactttgttagaaacttctgcttcagcttgactgactcattttccatttctggttgtacaaaatgaactgacactttaatgctgtggccacctttaaataaagtacaatgtgacaa

SEQ ID NO: 6809 - DNA, 272 bp, Homo sapiens
gactgagatgcacaggtgtagggagggctgtgacctccttcgcgtcctttgtgggatgctggtcctctgtggctcctggcccccaccccttcctgcacagaaggcacagcttccttctgagtttcgccgcatgatttgcagagagaggagaaccacatggagagtgtggtcaagcacctctgcacaatatgatgttgaaaattgtctggccaacaaggtggatttgagcttcagcccatcacaaagtctcccagccgaccctatgcagtctc

SEQ ID NO: 6810 - DNA, 317 bp, Homo sapiens
ggcacgaggggattacagttgtgagccactgcgcccggctgcttatttggaaaggaaaatctttccaagatggccctaacacatactcccttgggtctcattgacctgagctggtccatcctcaaaccaattcctggtgaaaaagggacaggcttgctgtggttggcgctggttggctttggccagtcttgcatcatctgccaggactgggtccttagctgcccaaacaaatcaggattctgttggcaagcgaaaaagagagtggccgctggtagacagccaacagtgtctgctacagacggcaaaacacagagaca

SEQ ID NO: 6811 - DNA, 431 bp, Homo sapiens
cctgctgagtctgagctgaccgagagggaaaggagcagcaagaagtggttaagggacaggggagatgtaataatagggtcaacaaatcaggccccttgtggggctgagaattgttgcttcaggatagctagagaaagagctgggaaggtggtgtggtgggacgctggcagttggtgtgttctggtttcgtgggatagtggaagtcactggagtgatgggggagggggattcttggtgattaggagaacagggtacttcctgtggggcttctgagaacaggggcagtttttcatgaccacaggactgcatttcaaggacagggtctgggagtcacggtggctcaggcctgttgtcctggtgcataaggaggcgaggctaggctttcgaggccagcctgggcaacatagaaacctccaatctgtataacaaaa

SEQ ID NO: 6812 - DNA, 605 bp, Homo sapiens
actaccgcagctattcccagataattctacccactataaaattgagaatctcatattaaagggactctgcaagtgagggaaaaatgttttgtcccccattttttaaagcgcttgataagaaacttgttatcaattatggagtacacatgttttctccttttttttttttttaaatcctaccctgtgggagttgcaatacagttgtattggaatgctttcttgtacaaacataagttttacttttcccttctcctggactctccagtcaactgacggttgggttacttctttccaaatagtacctggtagtgccccaaagccagaggtggatgccatcctttcttgagtgtcaactgacacattggcctgggaaaagattctaaactacaactaattaactagaggagagatgtccttcttagacttggaatcaacagctggttactagtaaaagaataacagtagtcattgttaacctgacaatcgtatttccactgcgcccggcctttttcttttcgtttctagtacattttggaaggactttacccctcttcctctttaaagcatccaagtcatgcattttctaccttaattttaccaaaaaa

SEQ ID NO: 6813 - DNA, 952 bp, Homo sapiens
actaccgcagctattcccagataattctacccactataaaattgagaatctcatattaaagggactctgcaagtgagggaaaaatgttttgtcccccattttttaaagcgcttgataagaaacttgttatcaattatggagtacacatgttttctccttttttttttttttaaatcctaccctgtgggagttgcaatacagttgtattggaatgctttcttgtacaaacataagttttacttttcccttctcctggactctccagtcaactgacggttgggttacttctttccaaatagtacctggtagtgccccaaagccagaggtggatgccatcctttcttgagtgtcaactgacacattggcctgggaaaagattctaaactacaactaattaactagaggagagatgtccttcttagacttggaatcaacagctggttactagtaaaagaataacagtagtcattgttaacctgacaatcgtatttccacaaaaacaactctgtgtaaaaaagaggcctggcacagtggctcatgcccgtaatcccagcgctttgggaggccgaggagggcggatcacctgaggtcaggagttcgagaccggcctgaccaacatggtgaaaccccgtctgtgctaggaatacaaaaattagccgggcatggttaatgtccggctaattacaggcgggtgcctgtagtcccagctactcgggggactgaggcaggagagtcgcttggacctgggaggtggaggttgcagtgagccgggatcacgctattgcactccagcctggacgacagagcaagactctgtctcaaaaaagaaaaaaaaaaaacccatgaaaaaatggccgggcatggtggcatgtgcctgtagtctagcggaggctgggatgagaggattgctggagcccagccagggcaacagagtgagaccctttctccaaaa

SEQ ID NO: 6814 - DNA, 253 bp, Homo sapiens
ataaagaatgtggttaatttattggaatatcctaagagctttcctccaaaagcttcaaggtacttgtctgattttttttttttaagacacgactgttttttacaatagcaaattaaaggaaaagtataaggccgggtgtggtgtcttacgtctgtaatcccagcactttgagaggctgaggctggccagttgcttgagctcaggagtttgagactagcctgggcaacatggcaaaaccccatctcagaaggaa

SEQ ID NO: 6815 - DNA, 258 bp, Homo sapiens
taaagtgggtatagaagttggtatgaacaataaggccttaatagagagataattaaccttgatagtatatgaaaaaacaaatgctggattatagagcatctaaaggatatagttagctacatgaatgcacaaacacttttctatttagttttgcttttggaaatatattgatattctacataataaaaaaattaaatctacaaggctgggggaaatgaaaactgaaataaattgtataactagatttaaaaagaaaag

SEQ ID NO: 6816 - DNA, 804 bp, Homo sapiens
tgaggagagataaagacagttgtctcctcactgtcagaccccagatgttacatgcagggagcctgctctctttaaggcagtcttggaaatggagcctggagggaggttgggcagggctgggtcatcctggcataatcccacatctgtgtgcatcatagcatggctggcaagggagtccaggagcagcttcctcgggcctttaatgcagctgatccaggagctccagcctcctgaaaaggggacaagagcctgactggggcacatctctgcccataccccccttcctagagcatgggccagggcttgtggaatagggattaacccagcagacgagaccatgaggagttctgtccatggtgccctcagcactggctggtggcagggttaccttggatgggctttgttcctggtgtcaccctcaccagctggggggctcctggaggacaggctctgtggcctattggtgtcagcatatcaattcaatccagcatatacttttgactcaccttatatttgttgacaacccatacatctatggccaggtgattttcaacaagtgtaccaaggccattcaatggggaaagaatagtctcttcaaaatatggtgccgggacacctggatgtctacatgcaaaagaatgaagttctaccccttcctcacaccatacacaaatattaactcaaaatagatcaaagacctagatataagagcttaaaccatacaactcttagaaaagaacagaggggcaaatctttatgaccttagattcttagatacgacaggcactaaaagcatacacagca

SEQ ID NO: 6817 - DNA, 938 bp, Homo sapiens
gacgtaatgttatttactgaaattcccattttatacctgtgttagtggtgcaaactcatttccatggcaactgaacgtctaggcaggaaaatagttctaagtataaagagatgaggggagagggttggcacctttgtttattgtttattgcaatgtgcaaaatccccagatatttagaggacattttgaggaaaataatcttaaatgtacaaactacgaatgtagtttgtaaatctttatcacttgcggaaagtaggtgagtaactggcagtaaaatcttcccaaacgaggccaggcacagtggctcatgcctgtaattccagctcttttggaagatcaaagtgggaggatcgcttgaggccaggagttccaagaccagcctgggcaacctagggaggctctgtctctataaaagatagaaaaatgagctgggcatggtagtgtgtgcctgtagtcccagctacttgggaggctgaggtgggaggattgcttgagcccaagagtttgaggctgcactgagctagcatcagggcactgggtaacagagtgagactatgtctgtaaaaaaaacaaaaaaacaaaaaaacttcccaaacagaccctagggagggggaataatgctttgaaaaatggaatatgattttagccaatacccgcagcatcttaaaagatccctctgaggacagctgtcagcttctccagatttggttgttttgtgggcttatgaggttgtggtgactggcaagtggcgggagcaagacaagatggacgtttggatcttttttccgtacctttattagaagcagagatgccatttccccattctcttttctccaagtcactgtaaaggcgttgcctcactcccaaagaccagtcatgttttccgtgtctcggtaggtgacttacaatagttgggtctcacggggtgatgaatgaca

SEQ ID NO: 6818 - DNA, 324 bp, Homo sapiens
tttttcaagtatttaataattgaatattttgaaaatgaatgcaatgcttcagaggagtaatattttgggatactgtaaattctcaacattcctacaaaatgaaaccaatacagtcattcttcaaatatatgctgaattttgtggtttgcaagtaaattctctttaaaagttttagctgcatattcctattgatttctttgtggacgacatgaatctgtatcactatatctttttagaaataggtacattgaaaatgaagatgaaatctatgcttactttgtacgtattgagctagtgaaatatttgatatattaaacataattc

SEQ ID NO: 6819 - DNA, 210 bp, Homo sapiens
gttgttgagtgctagctgttgttgagtgctagctgttgttgagtgcttgttgttgagtgctagctgttgttgagtgcttgtcctgcctgggccctgtttttagcctttgatgtacatttctccatttaacttccacaatagccctattaggcagctagtattattatttctgttttacagataaagattggttttagctcagagtagttc

SEQ ID NO: 6820 - DNA, 262 bp, Homo sapiens
gccaatcaacaaacaaaattgtcctttgggatgtaacctaagtttatactataagtcaacagtccccaaccattttggcaccagggactggtttcatggaagacaatttttccatggattgggggcaggaggtggggcattagattctcataaggagcgtacaacctagatcccttgtacgtgcagttcacaatagggtttgtgctcctatgagaatctaatgccgctgctgatctgacaggaggaggagcttaggtggtaa

SEQ ID NO: 6821 - DNA, 454 bp, Homo sapiens
atgatgacagaggtcacaacatagtgtgacaggccacttccaccatccatccttgttctgccctgagtggcaggcactgtcccccttgagagataaacaaattgaggtaatttgtccaaagttgtgtttactgtctgcctcatgagcgttgagtgacctgacaggctgctgtgacagctcaggacagcacctgaccccagggtgctgggtggtcctggactgctctctgtggccgtcgtcatgggggtaccttgactcccaaggaataccatggggtactccttgggagaggagaagagagtgggtgacgggttcttgggcttggggccacacaggccacccccatccacacacggggacagatgggtcatcactgtaagaggcccaggtgcagctaacctgcatgttcggcatcccaggaaggcggtgggtcccctgctgctttcccccaagg

SEQ ID NO: 6822 - DNA, 2605 bp, Homo sapiens
agacagctggcaatgtgtggagacacttttggaggtggagggtggtgaggggtactaccagtatcaatgggtggaggccagggatgaggctaaacacccaaccctcatggattagtttgccagggctgccgtcacaagatactgcagacggggaagcttacacaacagaaatgtgtattctcagaattctggaggctggaagtccaagatcagtagggtttcttcttcggcctctctccttggcttccactcatggtgtccttgcatggtcttttctctgtgtgcacatgactgtgcaggactggtgtcccgatttcttgtagggacagcagtcattggatcagggcccatgcgtatggcctcattttacttcagttacctcttttttagatagagggccctatctctaaatactgtcacattctgagataccggcagttaagacttccaacatatttagtggtaggggttaaggggcacgctttagactacaacactccacagtaaagaattatccagtctaacatgtcagttgtgccaagactgagaaacctgtaatgtaaaggaactcccaagtctacctgaaaagtaaggtctaaagagcatttattgagcactatctgttagcacttagcatatgtttaatattcatacattgaaagaaatgtatgttcatatccatctgacaaagattaaggaacttagagtaagtaatagatccaaaattgaaactgataaacttctggttctaaaattcaccttttagtgaaaatacagtttctcaccaaacttacagtaattcagagttattaactctttctacctcctcactcccctcaaagttataacatctcccatcgacatcagctcagaatggcagtgatgcttatggtttgtgggggtgcaggtgagctgctggatgcactttagatggcctagtatgccaggccgtcctttcatcctctactctcgtctttctttttcgacctcatgttgaggattactggtctagttgaaaaaagaattcatacacataagaccatgtatataatagagggaggtatgcctttaaaaacaaaattatatggtaaagactgatgtgtcaacagggatagacaacatagagaaggctagaactgtttctggaaaaaaacccagaaacaatggatttcaaacttcttagcatccgataaaagaaagtagcaattattcaaatgagaaacacttctgtctgttatgtacatattatgaaagtatgaacataagagggaaaaccacaaccattacattttttaccatttcagtaatttttttttggtttttagtctgtttttagacatccttaagaacaactatctgaggctgtaaacaagtatttacattaacacccatgatactgactttatactccctacctgcattgagaccttaaagggggcatttctccattccttctgtgtatttctgggtatccccaggttcagatattcagaatacagatacaagtccatgcttgcatatgttgctgctccccccgacagacttctaccagcatctgccctcctcaccgctgctctgtcacgtgcactgcggctggccctgctggaaagtcctaccttgcctaggacgccatccccgatatagccccaagatgcaaacctgccaagtgctagggcagccctgccttcctgtccatttcagtctcttggccttgctgtgttccaagtggaaatgggagtgtgctttcctggtttgctagtgtactatcacccggaccacagcgtcctgtgcaaaaatttgcttcctctctcttcccctttcactctttctcttttctcttccccacccccttttttttctctttccccttacctttctttcctttccactcttcctgtccttccttccttcaactattaggactatatgtcaagtaatgtgcaaaacaaagacagttcctgccctgatggagcttgtagatcagaagggaagatgagcattaagtaattatatagattaatgtacaactgtgatgagtgcaacaaaagagaggttcatggcactatcaaacatgcaatggacggattttgtttttgcctataaactcttgccatagaaagcttgaaaatcagtccagggggacagcattaatcaccatgttctttccttatccctgtcttccccaaaattcatgtgttgaaacttaacaagaggtgggaactttaggatgtgattaagtcgtgagggcacagctcttatagatggggtcacggtccttctaaaagggcttgagggagtggttttgtttccttccatcccttccgccacatgaggacacagtcttcgttccctctggaggactcagcaacaacacaccatcttggaagcagagagcagtcctcaccagacacggaatctgccagtgccttgatcttggacttaccagcctccatacctgtgagaaataaatttctattgtctataagttacccagactgtggtattttcttctggcagcacaaatggacacccagaaactgatgcatgcatcttctgactcctttgattccaaaatacaaaatattagaataaagttatggaagtc

SEQ ID NO: 6823 - DNA, 884 bp, Homo sapiens
  misc_feature (23)..(23): n is a, c, g, or t
aaaataagaacgggtttgcccantttatgccctaaacaatgagtagaggtatattaagaacaaagttgactcaagaaatcaaatttgcttttcttttctttctgttcctgttttgttgtcactttgaaatatttttgttttgttttgaggtaggatttatttgcttactttattatcagagaaaggagcagatttatgtgaaatgttaagtatgctgatcataattttattcttgtgttaaggacttggaataaggacagttgcaaagttaactcaatttgttgatgtattgcctgtgttctttttctgaatgctgaagtaaaatattccagttttaaaagtatgccaattttcagtgggaatatattttatatgtttttgaataataatcaagtattttatttttttcctcctcgcaatgatgtctcaaggtagtcagtttttgtattcaacttttggctataccctactggcagccatagtagagagagcttcaggatgtaaatatttggactatatgcagaaaatattccatgacttggatatgctgacgactgtgcaggaagaaaacgagccagtgatttacaatagagcaaggtaaatgaataccttctgctgtgtctagctatatcgcatcttaacactattttattaattaaaagtcaaattttctttgtttccattccaaaatcaacctgccacattttgggagcttttctacatgtctgttttctcatctgtaaagtgaaggaagtaaaacatgtttataaagtacactaagaccctttgatgaaagatagcaataatattaataattcaaacatgaataactaaaccaaaattgcacccaccaatcacatgcctatcatatagtaaaaaaaaaa

SEQ ID NO: 6824 - DNA, 966 bp, Homo sapiens
aaaaggaaaaaaaaaaacaaaaaaaaaaggacatttgggaaattaacatagatacaatgcttttatcaaatctacagaccttactcaaattttgccagttgttccaataatgtcctttatagcaaaagagcagaaaaacttttttttctggtctaggatctaatccatgatctcacattgcatttacttgtcatatctatcagaagtcacttgacatcagtttgtcccattattgctgatggtattttaatcactttttgaggtggtgcctgtcaggttattgtaaagttactatttttactttataattaacaagtatatttggaggagataatttgagatgatgtaaaaatcctctttctcatcaaactttctactagttttagcatctatcagtgattcatgactgaatcagttattacagtgatggttgtcaaatggtgattttctaattccatcatccattctgtatttatcagttggcattctattataagaaggtgcgggccggggcggtggctcacgcctgtaatcccatcactttgggaggctgaggtgggcggatcacatgagaccaagtttgagaccagcctggccaacatggcgaaaccccatctctactgaaaatacaaaaaatcagccgggcatggtggcatacacttgtaatctcggctgctcgggagtctgaggcaggagaatctcttgaacccaggaggcagaggttgcagtgagccaagatcatgccactgcactccagcctgggcgacaaagtgagactccatctcagaaaaaaaagtgctttcccttctctcttatttatttattcataccagtatgcactcatggattcttattttagtcaatgagttataatctgtcactgtcattatttaatatgttgcttttaaaatagtatatgaaataataaaactgtaacagtaaatggttattagattgcttacctaa

SEQ ID NO: 6825 - DNA, 200 bp, Homo sapiens
  misc_feature (36)..(38): n is a, c, g, or t
  misc_feature (56)..(56): n is a, c, g, or t
  misc_feature (65)..(65): n is a, c, g, or t
tgggaaatcttaagtagctatatttattattacttnnnccagcaattttgcaagangcagaagtntgacattgaattgagtgagacgagcgtgtcaatgagttataatctgtcactgtcattatttaatatgttgcttttaaaatagtatatgaaataataaaactgtaacagtaaatggttattagattgcttacctaa

SEQ ID NO: 6826 - DNA, 2195 bp, Homo sapiens
agtgcgtgagtttggtggcggccggctgtgcagagacgccatgtaccggctcctgtcagcagtgactgcccgggctgccgcccccgggggcttggcctcaagctgcggacgacgcggggtccatcagcgcgccgggctgccgcctctcggccacggctgggtcgggggcctcgggctggggctggggctggcgctcggggtgaagctggcaggtgggctgaggggcgcggccccggcgcagtcccccgcggcccccgaccctgaggcgtcgcctctggccgagccgccacaggagcagtccctcgccccgtggtctccgcagaccccggcgccgccctgctccaggtgcttcgccagagccatcgagagcagccgcgacctgctgcacaggatcaaggatgaggtgggcgcaccgggcatagtggttggagtttctgtagatggaaaagaagtctggtcagaaggtttaggttatgctgatgttgagaaccgtgtaccatgtaaaccagagacagttatgcgaattgctagcatcagcaaaagtctcaccatggttgctcttgccaaattgtgggaagcagggaaactggatcttgatattccagtacaacattatgttcccgaattcccagaaaaagaatatgaaggtgaaaaggtttctgtcacaacaagattactgatttcccatttaagtggaattcgtcattatgaaaaggacataaaaaaggtgaaagaagagaaagcttataaagccttgaagatgatgaaagagaatgttgcatttgagcaagaaaaagaaggcaaaagtaatgaaaagaatgattttactaaatttaaaacagagcaggagaatgaagccaaatgccggaattcaaaacctggcaagaaaaagaatgattttgaacaaggcgaattatatttgagagaaaagtttgaaaattcaattgaatccctaagattatttaaaaatgatcctttgttcttcaaacctggtagtcagtttttgtattcaacttttggctataccctactggcagccatagtagagagagcttcaggatgtaaatatttggactatatgcagaaaatattccatgacttggatatgctgacgactgtgcaggaagaaaacgagccagtgatttacaatagagcaaggtaaatgaataccttctgctgtgtctagctatatcgcatcttaacactattttattaattaaaagtcaaattttctttgtttccattccaaaatcaacctgccacattttgggagcttttctacatgtctgttttctcatctgtaaagtgaaggaagtaaaacatgtttataaagtacactaagaccctttgatgaaagatagcaataatattaataattcaaacatgaataactaaaccaaaattgcacccaccatgagcatctgtaatttgctctttaaccattccttttttaggttttaactaatactttgtttacgtgttattagtttttaattgttttcatactgttttgaaataattttatacttatagaaaagttgcaagagtagtacaaaggattcacatatcctctttactcagattcccttaatgttagtttaccgcatttgcattacctttctgtctacatatgtgtttgtttctgaaccatttggaaataagttgtagacgtgatacccctttacctataaatatttacatgtgtattttctaaaaacaaggacattcagggccgggtgcagtggctcacgcctgtaatcccaacactttggaaggccgaggtgggtggatcacctgaggtcaggagttcaagaccagcctggccaatgtggtgaaatcaaccctctctctactaaaaatgcaaaaattagccaggtgtggtggcgggtgcctataatcccagccacgcgggaggctgaggcaggagaatcgcttgaacccaggaggtggagttgcagtaagccaagatcgtgcccctgcacttcaggctgggcgaaagagtgagactccatgtcaaaaaaaaagtgctttcccttctctcttatttatttattcataccagtatgcactcatggattcttattttagtcaatgagttataatctgtcactgtcattatttaatatgttgcttttaaaatagtatatgaaataataaaactgtaacagtaaatggttattagattgcttacctaa

SEQ ID NO: 6827 - DNA, 1940 bp, Homo sapiens
agtgcgtgagtttggtggcggccggctgtgcagagacgccatgtaccggctcctgtcagcagtgactgcccgggctgccgcccccgggggcttggcctcaagctgcggacgacgcggggtccatcagcgcgccgggctgccgcctctcggccacggctgggtcgggggcctcgggctggggctggggctggcgctcggggtgaagctggcaggtgggctgaggggcgcggccccggcgcagtcccccgcggcccccgaccctgaggcgtcgcctctggccgagccgccacaggagcagtccctcgccccgtggtctccgcagaccccggcgccgccctgctccaggtgcttcgccagagccatcgagagcagccgcgacctgctgcacaggatcaaggatgaggtgggcgcaccgggcatagtggttggagtttctgtagatggaaaagaagtctggtcagaaggtttaggttatgctgatgttgagaaccgtgtaccatgtaaaccagagacagttatgcgaattgctagcatcagcaaaagtctcaccatggttgctcttgccaaattgtgggaagcagggaaactggatcttgatattccagtacaacattatgttcccgaattcccagaaaaagaatatgaaggtgaaaaggtttctgtcacaacaagattactgatttcccatttaagtggaattcgtcattatgaaaaggacataaaaaaggtgaaagaagagaaagcttataaagccttgaagatgatgaaagagaatgttgcatttgagcaagaaaaagaaggcaaaagtaatgaaaagaatgattttactaaatttaaaacagagcaggagaatgaagccaaatgccggaattcaaaacctggcaagaaaaagaatgattttgaacaaggcgaattatatttgagagaaaagtttgaaaattcaattgaatccctaagattatttaaaaatgatcctttgttcttcaaacctggtagtcagtttttgtattcaacttttggctataccctactggcagccatagtagagagagcttcaggatgtaaatatttggactatatgcagaaaatattccatgacttggatatgctgacgactgtgcaggaagaaaacgagccagtgatttacaatagagcaagattttatgtttacaataaaaagaaacgtcttgtcaacacaccttacgtggataactcctataaatgggctggtggtggatttctgtctacagtgggtgaccttctgaaatttgggaatgcaatgctttatggttaccaagttgggctgtttaagaactcaaatgaaaatcttttacctggatacctcaaaccagaaacaatggttatgatgtggaccccagtccctaacacagagatgtcttgggataaagagggtaaatatgcaatggcgtggggtgttgtggaaaagaaacaaacgtatggttcgtgtagaaagcaacggcattatgcttcacatactggaggggcagtgggtgccagtagtgtcctgctggtccttcctgaagaactggatacagagactataaataacaaggttcccccaagaggaatcattgtttctatcatatgtaacatgcaatctgttggcctcaatagcaccgctttgaagattgcccttgaatttgataaagacagatcagactgataaccttaacaccataggtgcaaaatgagttgttctgaggtttttttgaaacattaaagttccaaaacatgacatttttaagaataaatttgaaatagagtataattgaatgcagagaattatgtacctctaattgcttaattttgtaatggtcttttattgtagaattggttctttatactcagggaagtaattatattgtttttactttttgaaaaaagtgttaactcttgaaataaaatattctgataaaata

SEQ ID NO: 6828 - DNA, 1586 bp, Homo sapiens
agcggaggctcgtaactgtcggttctttccccttcggtcttaggatgaggtgggcgcaccgggcatagtggttggagtttctgtagatggaaaagaagtctggtcagaaggtttaggttatgctgatgttgagaaccgtgtaccatgtaaaccagagacagttatgcgaattgctagcatcagcaaaagtctcaccatggttgctcttgccaaattgtgggaagcagggaaactggatcttgatattccagtacaacattatgttcccgaattcccagaaaaagaatatgaaggtgaaaaggtttctgtcacaacaagattactgatttcccatttaagtggaattcgtcattatgaaaaggacataaaaaaggtgaaagaagagaaagcttataaagccttgaagatgatgaaagagaatgttgcatttgagcaagaaaaagaaggcaaaagtaatgaaaagaatgattttactaaatttaaaacagagcaggagaatgaagccaaatgccggaattcaaaacctggcaagaaaaagaatgattttgaacaaggcgaattatatttgagagaaaagtttgaaaattcaattgaatccctaagattatttaaaaatgatcctttgttcttcaaacctggtagtcagtttttgtattcaacttttggctataccctactggcagccatagtagagagagcttcaggatgtaaatatttggactatatgcagaaaatattccatgacttggatatgctgacgactgtgcaggaagaaaacgagccagtgatttacaatagagcaagattttatgtttacaataaaaagaaacgtcttgtcaacacaccttacgtggataactcctataaatgggctggtggtggatttctgtctacagtgggtgaccttctgaaatttgggaatgcaatgctttatggttaccaagttgggctgtttaagaactcaaatgaaaatcttttacctggatacctcaaaccagaaacaatggttatgatgtggaccccagtccctaacacagagatgtcttgggataaagagggtaaatatgcaatggcgtggggtgttgtggaaaagaaacaaacgtatggttcgtgtagaaagcaacggcattatgcttcacatactggaggggcagtgggtgccagtagtgtcctgctggtccttcctgaagaactggatacagagactataaataacaaggttcccccaagaggaatcattgtttctatcatatgtaacatgcaatctgttggcctcaatagcaccgctttgaagattgcccttgaatttgataaagacagatcagactgataaccttaacaccataggtgcaaaatgagttgttctgaggtttttttgaaacattaaagttccaaaacatgacatttttaagaataaatttgaaatagagtataattgaatgcagagaattatgtacctctaattgcttaattttgtaatggtcttttattgtagaattggttctttatactcagggaagtaattatattgtttttactttttgaaaaaagtgttaactcttgaaataaaatattctgataaaata

SEQ ID NO: 6829 - DNA, 1379 bp, Homo sapiens
  misc_feature (23)..(23): n is a, c, g, or t
aaaataagaacgggtttgcccantttatgccctaaacaatgagtagaggtatattaagaacaaagttgactcaagaaatcaaatttgcttttcttttctttctgttcctgttttgttgtcactttgaaatatttttgttttgttttgaggtaggatttatttgcttactttattatcagagaaaggagcagatttatgtgaaatgttaagtatgctgatcataattttattcttgtgttaaggacttggaataaggacagttgcaaagttaactcaatttgttgatgtattgcctgtgttctttttctgaatgctgaagtaaaatattccagttttaaaagtatgccaattttcagtgggaatatattttatatgtttttgaataataatcaagtattttatttttttcctcctcgcaatgatgtctcaaggtagtcagtttttgtattcaacttttggctataccctactggcagccatagtagagagagcttcaggatgtaaatatttggactatatgcagaaaatattccatgacttggatatgctgacgactgtgcaggaagaaaacgagccagtgatttacaatagagcaagattttatgtttacaataaaaagaaacgtcttgtcaacacaccttacgtggataactcctataaatgggctggtggtggatttctgtctacagtgggtgaccttctgaaatttgggaatgcaatgctttatggttaccaagttgggctgtttaagaactcaaatgaaaatcttttacctggatacctcaaaccagaaacaatggttatgatgtggaccccagtccctaacacagagatgtcttgggataaagagggtaaatatgcaatggcgtggggtgttgtggaaaagaaacaaacgtatggttcgtgtagaaagcaacggcattatgcttcacatactggaggggcagtgggtgccagtagtgtcctgctggtccttcctgaagaactggatacagagactataaataacaaggttcccccaagaggaatcattgtttctatcatatgtaacatgcaatctgttggcctcaatagcaccgctttgaagattgcccttgaatttgataaagacagatcagactgataaccttaacaccataggtgcaaaatgagttgttctgaggtttttttgaaacattaaagttccaaaacatgacatttttaagaataaatttgaaatagagtataattgaatgcagagaattatgtacctctaattgcttaattttgtaatggtcttttattgtagaattggttctttatactcagggaagtaattatattgtttttactttttgaaaaaagtgttaactcttgaaataaaatattctgataaaata

SEQ ID NO: 6830 - DNA, 868 bp, Homo sapiens
tctctctcatgtatacatttttctatcatcatgtgtgaagccagtgactatgaaatttttcatgatcatttcttatttccttttagattttatgtttacaataaaaagaaacgtcttgtcaacacaccttacgtggataactcctataaatgggctggtggtggatttctgtctacagtgggtgaccttctgaaatttgggaatgcaatgctttatggttaccaagttgggctgtttaagaactcaaatgaaaatcttttacctggatacctcaaaccagaaacaatggttatgatgtggaccccagtccctaacacagagatgtcttgggataaagagggtaaatatgcaatggcgtggggtgttgtggaaaagaaacaaacgtatggttcgtgtagaaagcaacggcattatgcttcacatactggaggggcagtgggtgccagtagtgtcctgctggtccttcctgaagaactggatacagagactataaataacaaggttcccccaagaggaatcattgtttctatcatatgtaacatgcaatctgttggcctcaatagcaccgctttgaagattgcccttgaatttgataaagacagatcagactgataaccttaacaccataggtgcaaaatgagttgttctgaggtttttttgaaacattaaagttccaaaacatgacatttttaagaataaatttgaaatagagtataattgaatgcagagaattatgtacctctaattgcttaattttgtaatggtcttttattgtagaattggttctttatactcagggaagtaattatattgtttttactttttgaaaaaagtgttaactcttgaaataaaatattctgataaaata

SEQ ID NO: 6831 - DNA, 682 bp, Homo sapiens
gcggtcgtttactactactaaattcgcggccgcgtcgacgttgggctgtttaagaactcaaatgaaaatcttttacctggatacctcaaaccagaaacaatggttatgatgtggaccccagtccctaacacagagatgtcttgggataaagagggtaaatatgcaatggcgtggggtgttgtggaaaagaaacaaacgtatggttcgtgtagaaagcaacggcattatgcttcacatactggaggggcagtgggtgccagtagtgtcctgctggtccttcctgaagaactggatacagagactataaataacaaggttcccccaagaggaatcattgtttctatcatatgtaacatgcaatctgttggcctcaatagcaccgctttgaagattgcccttgaatttgataaagacagatcagactgataaccttaacaccataggtgcaaaatgagttgttctgaggtttttttgaaacattaaagttccaaaacatgacatttttaagaataaatttgaaatagagtataattgaatgcagagaattatgtacctctaattgcttaattttgtaatggtcttttattgtagaattggttctttatactcagggaagtaattatattgtttttactttttgaaaaaagtgttaactcttgaaataaaatattctgataaaata

SEQ ID NO: 6832 - DNA, 1634 bp, Homo sapiens
  misc_feature (23)..(23): n is a, c, g, or t
aaaataagaacgggtttgcccantttatgccctaaacaatgagtagaggtatattaagaacaaagttgactcaagaaatcaaatttgcttttcttttctttctgttcctgttttgttgtcactttgaaatatttttgttttgttttgaggtaggatttatttgcttactttattatcagagaaaggagcagatttatgtgaaatgttaagtatgctgatcataattttattcttgtgttaaggacttggaataaggacagttgcaaagttaactcaatttgttgatgtattgcctgtgttctttttctgaatgctgaagtaaaatattccagttttaaaagtatgccaattttcagtgggaatatattttatatgtttttgaataataatcaagtattttatttttttcctcctcgcaatgatgtctcaaggtagtcagtttttgtattcaacttttggctataccctactggcagccatagtagagagagcttcaggatgtaaatatttggactatatgcagaaaatattccatgacttggatatgctgacgactgtgcaggaagaaaacgagccagtgatttacaatagagcaaggtaaatgaataccttctgctgtgtctagctatatcgcatcttaacactattttattaattaaaagtcaaattttctttgtttccattccaaaatcaacctgccacattttgggagcttttctacatgtctgttttctcatctgtaaagtgaaggaagtaaaacatgtttataaagtacactaagaccctttgatgaaagatagcaataatattaataattcaaacatgaataactaaaccaaaattgcacccaccatgagcatctgtaatttgctctttaaccattccttttttaggttttaactaatactttgtttacgtgttattagtttttaattgttttcatactgttttgaaataattttatacttatagaaaagttgcaagagtagtacaaaggattcacatatcctctttactcagattcccttaatgttagtttaccgcatttgcattacctttctgtctacatatgtgtttgtttctgaaccatttggaaataagttgtagacgtgatacccctttacctataaatatttacatgtgtattttctaaaaacaaggacattcagggccgggtgcagtggctcacgcctgtaatcccaacactttggaaggccgaggtgggtggatcacctgaggtcaggagttcaagaccagcctggccaatgtggtgaaatcaaccctctctctactaaaaatgcaaaaattagccaggtgtggtggcgggtgcctataatcccagccacgcgggaggctgaggcaggagaatcgcttgaacccaggaggtggagttgcagtaagccaagatcgtgcccctgcacttcaggctgggcgaaagagtgagactccatgtcaaaaaaaaagtgctttcccttctctcttatttatttattcataccagtatgcactcatggattcttattttagtcaatgagttataatctgtcactgtcattatttaatatgttgcttttaaaatagtatatgaaataataaaactgtaacagtaaatggttattagattgcttacctaa

SEQ ID NO: 6833 - DNA, 1445 bp, Homo sapiens
agtgcgtgagtttggtggcggccggctgtgcagagacgccatgtaccggctcctgtcagcagtgactgcccgggctgccgcccccgggggcttggcctcaagctgcggacgacgcggggtccatcagcgcgccgggctgccgcctctcggccacggctgggtcgggggcctcgggctggggctggggctggcgctcggggtgaagctggcaggtgggctgaggggcgcggccccggcgcagtcccccgcggcccccgaccctgaggcgtcgcctctggccgagccgccacaggagcagtccctcgccccgtggtctccgcagaccccggcgccgccctgctccaggtgcttcgccagagccatcgagagcagccgcgacctgctgcacaggatcaaggatgaggtgggcgcaccgggcatagtggttggagtttctgtagatggaaaagaagtctggtcagaaggtttaggttatgctgatgttgagaaccgtgtaccatgtaaaccagagacagttatgcgaattgctagcatcagcaaaagtctcaccatggttgctcttgccaaattgtgggaagcagggaaactggatcttgatattccagtacaacattatgttcccgaattcccagaaaaagaatatgaaggtgaaaaggtttctgtcacaacaagattactgatttcccatttaagtggaattcgtcattatgaaaaggacataaaaaaggtgaaagaagagaaagcttataaagccttgaagatgatgaaagagaatgttgcatttgagcaagaaaaagaaggcaaaagtaatgaaaagaatgattttactaaatttaaaacagagcaggagaatgaagccaaatgccggaattcaaaacctggcaagaaaaagaatgattttgaacaaggcgaattatatttgagagaaaagtttgaaaattcaattgaatccctaagattatttaaaaatgatcctttgttcttcaaacctggtagtcagtttttgtattcaacttttggctataccctactggcagccatagtagagagagcttcaggatgtaaatatttggactatatgcagaaaatattccatgacttggatatgctgacgactgtgcaggaagaaaacgagccagtgatttacaatagagcaaggtaaatgaataccttctgctgtgtctagctatatcgcatcttaacactattttattaattaaaagtcaaattttctttgtttccattccaaaatcaacctgccacattttgggagcttttctacatgtctgttttctcatctgtaaagtgaaggaagtaaaacatgtttataaagtacactaagaccctttgatgaaagatagcaataatattaataattcaaacatgaataactaaaccaaaattgcacccaccaatcacatgcctatcatatagtaaaaaaaaaa

SEQ ID NO: 6834 - DNA, 1039 bp, Homo sapiens
agtgcgtgagtttggtggcggccggctgtgcagagacgccatgtaccggctcctgtcagcagtgactgcccgggctgccgcccccgggggcttggcctcaagctgcggacgacgcggggtccatcagcgcgccgggctgccgcctctcggccacggctgggtcgggggcctcgggctggggctggggctggcgctcggggtgaagctggcaggtgggctgaggggcgcggccccggcgcagtcccccgcggcccccgaccctgaggcgtcgcctctggccgagccgccacaggagcagtccctcgccccgtggtctccgcagaccccggcgccgccctgctccaggtgcttcgccagagccatcgagagcagccgcgacctgctgcacaggatcaaggatgaggtgggcgcaccgggcatagtggttggagtttctgtagatggaaaagaagtctggtcagaaggtttaggttatgctgatgttgagaaccgtgtaccatgtaaaccagagacagttatgcgaattgctagcatcagcaaaagtctcaccatggttgctcttgccaaattgtgggaagcagggaaactggatcttgatattccagtacaacattatgttcccgaattcccagaaaaagaatatgaaggtgaaaaggtttctgtcacaacaagattactgatttcccatttaagtggaattcgtcattatgaaaaggacataaaaaaggtgaaagaagagaaagcttataaagccttgaagatgatgaaagagaatgttgcatttgagcaagaaaaagaaggcaaaagtaatgaaaagaatgattttactaaatttaaaacagagcaggagaatgaagccaaatgccggaattcaaaacctggcaagaaaaagaatgattttgaacaaggcgaattatatttgagagaaaagtttgaaaattcaattgaatccctaagattatttaaaaatgatcctttgttcttcaaacctggtagtcatttttgtattcactatacccatgagctgactgacagccat

SEQ ID NO: 6835 - DNA, 580 bp, Homo sapiens
aactatttgccccagacaactgtttttcccccttccttctatggattgaccagccagttctgctttagatggtattggatggagccctggaatggctgaaaagtccaaactggcctgacttgctcagccagcaatgcggtgcaggctcctagctggggccttagttctcctgcacctgcggctctccatatggctgcttggacttcctcatagcatggcagatggattacgagaaggagcattcccaaataaaggaccacataagctagatctctggagggctagcctcagaagtcacccagtgtcacatgggccacattttattggttacagggccagccagtttgaaggggaagagaaatatgtcgctgtttatgctgtgtccagtgctagcttgctacctgctctcccagttccagtgctcagggcagcactggcagaacagatgtacttactgagttaaaaacagcaacatccaagacaattgttaacttttaaaactgtctcccatcccagaaggtataactaaaaaactaacaataaaaataatagtaataaataataaaaataaaaataaatg

SEQ ID NO: 6836 - DNA, 597 bp, Homo sapiens
aactatttgccccagacaactgtttttcccccttccttctatggattgaccagccagttctgctttagatggtattggatggagccctggaatggctgaaaagtccaaactggcctgacttgctcagccagcaatgcggtgcaggctcctagctggggccttagttctcctgcacctgcggctctccatatggctgcttggacttcctcatagcatggcagatggattacgagaaggagcattcccaaataaaggaccacataagctagatctctggagggctagcctcagaagtcacccagtgtcacatgggccacattttattggttacagggccagccagtttgaaggggaagagaaatatgtcgctgtttatgctgtgtccagtgctagcttgctacctgctctcccagttccagtgctcagggcagcactggcagaacagatgtacttactgagttaaaaacagcaacatccaagacaattgttaacttttaaaactgtctcccatcccagaaggcagagcttgcagtgagccgagatcgcgccactgcactccagcctgggcgacagagcaagactccgtctcaaaacaaa

SEQ ID NO: 6837 - DNA, 423 bp, Homo sapiens
ttgtgaactgtggagggcagttgtcagatgtagagggtgaagaacactcctattgcagggcaggaatttccagcaaatggcaagcctttgattaccatcatgggagggggctgaggattacagctggaaccaaatgctgatgctactgaggcaaataactttgaaaatgtagtatttgcctttattttgctctgctttgcatataggaagtgttatggactgaatgtttgtgtcccctcaaaatgcatatgttgaaatcctaacacccagtttgatagtattataaggtggacctttgagaggtgattaggttgtaagagtggagcactcatgatgggatcagtgcttttataagaagaaacaacttgaccaaaaatttgtcacagaattttgagacccattaaaaaagttaaatgagaaaaa

SEQ ID NO: 6838 - DNA, 450 bp, Homo sapiens
atcagccttcagaagagcatttaaacactgccacacgctgtccgtctgtttgtcctgcaaccaggttctccccttggtctcagtggaagcctgaatcacaagcactgccacgttcacaaagctgttaattcttcaaaacgccaaatggtattcaaaaagggaagtataggctgggcacggtggctcacacctgtaatcccagcactttgggaggccgaggcaggctgatcatgaggccaagagatcctggtgaaactatcctagccaacatggtgaaaccctgtctagtaaaaatgcaaaaattagctgggcgtggtagtgtgcacttgtaatcccagctactcgggaggctgaggcaggagaatcacttgaacctgggaggcggaggttgcggcgagctgagattgcggcactgcactccagcctggtgacagagtgagactccgtttc

SEQ ID NO: 6839 - DNA, 1646 bp, Homo sapiens
actgcgcatgcgtcaggcatggagagcggaagcggaaggttgaatgcgtcgggtgggcacctcagcaaccagtagccatgcgcggcttggaggagccggggcctcggcctacagcgaccccgtgcggctgcgtgaagccggctctggagacagggaatcttttaactgagccagtcggctacttggaatcttgtttctcggccaagaatggtactccaagacagccatccatttgtagctattctcgagcctgtttgaggattagaaagaggatctttaataatcctgaacattccttgatgggcctagaacagttttctcatgtttggattttgtttgtttttcacaaaaatggtcatttgagctgtaaggcaaaagtgcagcctcctaggctgaatggtgcaaagactggagttttttccacaaggagccctcatcgtcccaatgcaataggactgaccctggccaagctggaaaaggtagaaggtggagctatatacctttctggaattgacatgatacatggcacacccgtactagacatcaagccctacatagctgagtatgactcaccgcaaaatgtgatggagcctttagcagactttaatttacagaataaccaacatacaccaaacactgtgtcccagtctgacagcaagactgacagctgtgaccagcgacagctctcagggtgtgatgagccacaaccccaccatagcactaagaggaaacctaaatgtcctgaagacagaacttcagaagaaaactacctgacacacagtgacacagccagaattcagcaagcatttcctatgcacagggagatagcagtggattttggtttggaatcaagacgtgatcagagttccagcgtggcagaagaacaaattggcccatattgcccagagaagagcttttcagagaaaggtacagacaagaagctagaaagagtggaaggagcagcagtcttgcaaggaagcagggcagagacacagcccatggcccctcactgccctgctggaagggctgatggagctccccgcagcatggttcctgcctgggtgacagaggctcctgtggccactttagaagtgcggtttactcctcatgccgagatggaccttgggcagctcagttcacaagatgttggtcaggcgtcatttaaatattttcagtcagcagaggaagcaaagcgtgccattgaggctgtgctgtcagcggatcctcggtctgtgtaccgccggaagctttgccaggaccgccttttctactttactgtagacatagcgcatgtcacttgctggtttggtgatggctttgcagaggtgctgaggatcaagccggcttctgagcctgttcatatgactggccctgtggggtccttggtgtctctagggtcttaaggagcctccctcatgtctttaaggtagcatcattgatctttggatgtggcttttggattttctgaacaagctaatgttgtgtcgagaagcaacactttgtgatctcatggctttgattgatttgggctgttcaaaatgtttatttgaaaaacgtatacattaataaacttaacaaagagatataaaatacagagaaatcaccaaatgctttttgatctgttgatattaaagaatcaaaaggtg

SEQ ID NO: 6840 - DNA, 1593 bp, Homo sapiens
actgcgcatgcgtcaggcatggagagcggaagcggaaggttgaatgcgtcgggtgggcacctcagcaaccagtagccatgcgcggcttggaggagccggggcctcggcctacagcgaccccgtgcggctgcgtgaagccggctctggagacagggaatcttttaactgagccagtcggctacttggaatcttgtttctcggccaagaatggtactccaagacagccatccatttgtagctattctcgagcctgtttgaggattagaaagaggatctttaataatcctgaacattccttgatgggcctagaacagttttctcatgtttggattttgtttgtttttcacaaaaatggtcatttgagctgtaaggcaaaagtgcagcctcctaggctgaatggtgcaaagactggagttttttccacaaggagccctcatcgtcccaatgcaataggactgaccctggccaagctggaaaaggtagaaggtggagctatatacctttctggaattgacatgatacatggcacacccgtactagacatcaagccctacatagctgagtatgactcaccgcaaaatgtgatggagcctttagcagactttaatttacagaataaccaacatacaccaaacactgtgtcccagtctgacagcaagactgacagctgtgaccagcgacagctctcagggtgtgatgagccacaaccccaccatagcactaagaggaaacctaaatgtcctgaagacagaacttcagaagaaaactacctgacacacagtgacacagccagaattcagcaagcatttcctatgcacagggagatagcagtggattttggtttggaatcaagacgtgatcagagttccagcgtggcagaagaacaaattggcccatattgcccagagaagagcttttcagagaaaggtacagacaagaagctagaaagagtggaaggagcagcagtcttgcaaggaagcagggcagagacacagcccatggcccctcactgccctgctggaagggctgatggagctccccgcagcatggttcctgcctgggtgacagaggctcctgtggccactttagaagtgcggtttactcctcatgccgagatggaccttgggcagctcagttcacaagatgttggtcaggcgtcatttaaatattttcagtcagcagaggaagcaaagcgtgccattgaggctgtgctgtcagcggatcctcggtctgtgtaccgccggaagctttgccaggaccgccttttctactttactgtagacatagcgcatgtcacttgctggtttggtgatggctttgcagaggtgctgaggatcaagccggcttctgagcctgttcatatgactggccctgtggggtccttggtgtctctagggtcttaaggagcctccctcatgtctttaaggtagcatcattgatctttggatgtggcttttggattttctgaacaagctaatgttgtgtcgagaagcaacactttgtgatctcatggctttgattgatttgggctgttcaaaatgtttatttgaaaaacgtatacattaataaacttaacaaagagatataaaatac

SEQ ID NO: 6841 - DNA, 3015 bp, Homo sapiens
  misc_feature (1417)..(1417): n is a, c, g, or t
  misc_feature (1468)..(1468): n is a, c, g, or t
attttatcaatttgtaatggctaacaaacttggatagcaagtactagaagattttatgattattcagggacatattttctagcactgaatatgtgccagacattgtcctaggtgctagagctatagtgataaacaaatcagatgaaagtagaaatccatgccctaaagaacttaatgtttcaattgggaaggtcaagtcagataggttaaaaggcaaacacagtagcactgtagacattactatataagctttatggcaactagtgtttgtgcagtgctttacagttagtaaacagtgttcacgtaccttatctcacagtggctttgtgggtttgacaaagtagcaatcctcatctcataggtgaggaaactagggctctttaagattagataatctgtctaatagcatccagccaggtggtcatctgactctaaatcctttgaagtcttacttatgctacagtgcctttctttttcctacagatattgttaggcataattcatcatctagcaagtccagaatcatctttccagagttccagctcattcataataacatgtttcagaaatcagggtcctgtattagttacgtttttcttaaatggagacggaatcaaatgtgactgcatgtagtttttctgttctcatttggcctattttccaagagtaaggttagtagatggctatttgtagcagtaactggacagcatctgtccagtgggacagctggagacttgtctttagtatttggtaatgctgacttatgtgctgcttaatcttttgagtcttgatggatgtattagatttctattgttgtgtaacaaattaccacagaatcatcagtttaaacaacacacatgtattatgtgtttgaaacattattatgtatctgtgggtcagaaggatgggcacagcttaactaggtcatctgcttaggtctcactagactgcaattaaattgtcagctgatatgagttcttatctggaggcttgaccatggaagaatctgcttaagctcactcagactgttggccacattgatttccttgccatcgtagtaggactgggggccccagattcttgctggttgttggctggaggctgccctcagtgtctaaaggctgtttgcagttccttgctatgtgggcttcctagcacgcctgcctacttcagcaagccttcaaggagagtctctcgagtgagtcttccagccagcagcagtgctaatgaaaagcatagtcactggagggacatcatacctcttttgccatattctgttggttagaagccagtcacactcaaggggaaggattatataagggcatgaacttcaggaggtgcgggtcacagggccacttttggatctgtttgccacagtaagaaccttcattggtcccacagagatatactgaggacnactatatccctggaacagaagcaccagtgatacaaagatgagttggtcccngcctgtgttaaggggcctgcctgcgtctagggatgaagactctaagcaggtcactaccctaccgtggggaaagcgctctagcagaggtttgtgcacaggcttctctatggggactgtaggaaagaatgcttttgtctggaggagccagaaaggctttgtaaaaggtgtgcttttgagggcctcaaagagcaagtaggagtttgataggtagagaagaggatgggctaccaggtagcaagaagggtgtgtgttggtactaggtctgtgtgagagaattatgagtaagtgcagtgaggcgtaagcagacagtgttagaggattctggggcgtgactgtattctccaagtgtttgcactgttcttcatttttcacgtttttatgtcataggtggagctatatacctttctggaattgacatgatacatggcacacccgtactagacatcaagccctacatagctgagtatgactcaccgcaaaatgtgatggagcctttagcagactttaatttacagaataaccaacatacaccaaacactgtgtcccagtctgacagcaagactgacagctgtgaccagcgacagctctcagggtgtgatgagccacaaccccaccatagcactaagaggaaacctaaatgtcctgaagacagaacttcagaagaaaactacctgacacacagtgacacagccagaattcagcaagcatttcctatgcacagggagatagcagtggattttggtttggaatcaagacgtgatcagagttccagcgtggcagaagaacaaattggcccatattgcccagagaagagcttttcagagaaaggtacagacaagaagctagaaagagtggaaggagcagcagtcttgcaaggaagcagggcagagacacagcccatggcccctcactgccctgctggaagggctgatggagctccccgcagcatggttcctgcctgggtgacagaggctcctgtggccactttagaagtgcggtttactcctcatgccgagatggaccttgggcagctcagttcacaagatgttggtcaggcgtcatttaaatattttcagtcagcagaggaagcaaagcgtgccattgaggctgtgctgtcagcggatcctcggtctgtgtaccgccggaagctttgccaggaccgccttttctactttactgtagacatagcgcatgtcacttgctggtttggtgatggctttgcagaggtgctgaggatcaagccggcttctgagcctgttcatatgactggccctgtggggtccttggtgtctctagggtcttaaggagcctccctcatgtctttaaggtagcatcattgatctttggatgtggcttttggattttctgaacaagctaatgttgtgtcgagaagcaacactttgtgatctcatggctttgattgatttgggctgttcaaaatgtttatttgaaaaacgtatacattaataaacttaacaaagagatataaaatacagagaaatcaccaaatgctttttgatctgttgatattaaagaatcaaaaggtg

SEQ ID NO: 6842 - DNA, 3204 bp, Homo sapiens
  misc_feature (1417)..(1417): n is a, c, g, or t
  misc_feature (1468)..(1468): n is a, c, g, or t
attttatcaatttgtaatggctaacaaacttggatagcaagtactagaagattttatgattattcagggacatattttctagcactgaatatgtgccagacattgtcctaggtgctagagctatagtgataaacaaatcagatgaaagtagaaatccatgccctaaagaacttaatgtttcaattgggaaggtcaagtcagataggttaaaaggcaaacacagtagcactgtagacattactatataagctttatggcaactagtgtttgtgcagtgctttacagttagtaaacagtgttcacgtaccttatctcacagtggctttgtgggtttgacaaagtagcaatcctcatctcataggtgaggaaactagggctctttaagattagataatctgtctaatagcatccagccaggtggtcatctgactctaaatcctttgaagtcttacttatgctacagtgcctttctttttcctacagatattgttaggcataattcatcatctagcaagtccagaatcatctttccagagttccagctcattcataataacatgtttcagaaatcagggtcctgtattagttacgtttttcttaaatggagacggaatcaaatgtgactgcatgtagtttttctgttctcatttggcctattttccaagagtaaggttagtagatggctatttgtagcagtaactggacagcatctgtccagtgggacagctggagacttgtctttagtatttggtaatgctgacttatgtgctgcttaatcttttgagtcttgatggatgtattagatttctattgttgtgtaacaaattaccacagaatcatcagtttaaacaacacacatgtattatgtgtttgaaacattattatgtatctgtgggtcagaaggatgggcacagcttaactaggtcatctgcttaggtctcactagactgcaattaaattgtcagctgatatgagttcttatctggaggcttgaccatggaagaatctgcttaagctcactcagactgttggccacattgatttccttgccatcgtagtaggactgggggccccagattcttgctggttgttggctggaggctgccctcagtgtctaaaggctgtttgcagttccttgctatgtgggcttcctagcacgcctgcctacttcagcaagccttcaaggagagtctctcgagtgagtcttccagccagcagcagtgctaatgaaaagcatagtcactggagggacatcatacctcttttgccatattctgttggttagaagccagtcacactcaaggggaaggattatataagggcatgaacttcaggaggtgcgggtcacagggccacttttggatctgtttgccacagtaagaaccttcattggtcccacagagatatactgaggacnactatatccctggaacagaagcaccagtgatacaaagatgagttggtcccngcctgtgttaaggggcctgcctgcgtctagggatgaagactctaagcaggtcactaccctaccgtggggaaagcgctctagcagaggtttgtgcacaggcttctctatggggactgtaggaaagaatgcttttgtctggaggagccagaaaggctttgtaaaaggtgtgcttttgagggcctcaaagagcaagtaggagtttgataggtagagaagaggatgggctaccaggtagcaagaagggtgtgtgttggtactaggtctgtgtgagagaattatgagtaagtgcagtgaggcgtaagcagacagtgttagaggattctggggcgtgactgtattctccaagtgtttgcactgttcttcatttttcacgtttttatgtcataggtggagctatatacctttctggaattgacatgatacatggcacacccgtactagacatcaagccctacatagctgagtatgactcaccgcaaaatgtgatggagcctttagcagactttaatttacagaataaccaacatacaccaaacactgtgtcccagtctgacagcaagactgacagctgtgaccagcgacagctctcagggtgtgatgagccacaaccccaccatagcactaagaggaaacctaaatgtcctgaagacagaacttcagaagaaaactacctgacacacagtgacacagccagaattcagcaagcatttcctatgcacagggagatagcagtggattttggtttggaatcaagacgtgatcagagttccagcgtggcagaagaacaaattggcccatattgcccagagaagagcttttcagagaaaggtacagacaagaagctagaaagagtggaaggagcagcagtcttgcaaggaagcagggcagagacacagcccatggcccctcactgccctgctggaagggctgatggagctccccgcagcatggttcctgcctgggtgacagaggctcctgtggccactttagaagtgcggtttactcctcatgccgagatggaccttgggcagctcagttcacaagatgttggtcaggcgtcatttaaatattttcagtcagcagaggaagcaaagcgtgccattgaggctgtgctgtcagcggatcctcggtctgtgtaccgccggaagctttgccaggaccgccttttctactttactgtagacatagcgcatgtcacttgctggtttggtgatggctttgcagaggtgctgaggatcaagccggcttctgagcctgttcatatgactggccctgtggggtccttggtgtctctagggtcttaaggagcctccctcatgtctttaaggtagcatcattgatctttggatgtggcttttggattttctgaacaagctaatgttgtgtcgagaagcaacactttgtgatctcatggctttgattgatttgggctgttcaaaatgtttatttgaaaaacgtatacattaataaacttaacaaagagatataaaatacagagaaatcaccaaatgctttttgatctgttgatattaaagaatcaaaaggtgatgctgtctcgataatttctgaaagaagctgttcttggtgcacttgataaaattagacaaagttcattccagcagagactttctagttgaggggatctattcagtaattcatattggttttcctgtctgtctggaaaagcctgacctttctatttgattccaaatcaaacctatatcaggaaactaaca

SEQ ID NO: 6843 - DNA, 1361 bp, Homo sapiens
actgcgcatgcgtcaggcatggagagcggaagcggaaggttgaatgcgtcgggtgggcacctcagcaaccagtagccatgcgcggcttggaggagccggggcctcggcctacagcgaccccgtgcggctgcgtgaagccggctctggagacagggaatcttttaactgagccagtcggctacttggaatcttgtttctcggccaagaatggtactccaagacagccatccatttgtagctattctcgagcctgtttgaggattagaaagaggatctttaataatcctgaacattccttgatgggcctagaacagttttctcatgtttggattttgtttgtttttcacaaaaatggtcatttgagctgtaaggcaaaagtgcagcctcctaggctgaatggtgcaaagactggagttttttccacaaggagccctcatcgtcccaatgcaataggactgaccctggccaagctggaaaaggtagaaggtggagctatatacctttctggaattgacatgatacatggcacacccgtactagacatcaagccctacatagctgagtatgactcaccgcaaaatgtgatggagcctttagcagactttaatttacagaataaccaacatacaccaaacactgtgtcccagtctgacagcaagactgacagctgtgaccagcgacagctctcagggtgtgatgagccacaaccccaccatagcactaagaggaaacctaaatgtcctgaagacagaacttcagaagaaaactacctgacacacagtgacacagccagaattcagcaagcatttcctatgcacagggagatagcagtggattttggtttggaatcaagacgtgatcagagttccagcgtggcagaagaacaaattggcccatattgcccagagaagagcttttcagagaaaggtacagacaagaagctagaaagagtggaaggagcagcagtcttgcaaggaagcagggcagagacacagcccatggcccctcactgccctgctggaagggctgatggagctccccgcagcatggttcctgcctgggtgacagaggctcctgtggccactttagaagtgcggtttactcctcatgccgagatggaccttgggcagctcagttcacaaggtatcttcagtttcttcattctgaatgagagatgaacttttactttgagatttagccaagtttggtatttgtgaaggcaggtatgtggagtgtttgtcagtatgactggtttttaggaaacaggtatgaaataatatttttgcagtaccatcatgtgatgacttttgttggacaactgtgtggtcagcacagttagttccaggctgtcagtaaagcat

SEQ ID NO: 6844 - DNA, 1696 bp, Homo sapiens
actgcgcatgcgtcaggcatggagagcggaagcggaaggttgaatgcgtcgggtgggcacctcagcaaccagtagccatgcgcggcttggaggagccggggcctcggcctacagcgaccccgtgcggctgcgtgaagccggctctggagacagggaatcttttaactgagccagtcggctacttggaatcttgtttctcggccaagaatggtactccaagacagccatccatttgtagctattctcgagcctgtttgaggattagaaagaggatctttaataatcctgaacattccttgatgggcctagaacagttttctcatgtttggattttgtttgtttttcacaaaaatggtcatttgagctgtaaggcaaaagtgcagcctcctaggctgaatggtgcaaagactggagttttttccacaaggagccctcatcgtcccaatgcaataggactgaccctggccaagctggaaaaggtagaagccttggggaaatggacagatatcatggctgcagtgctgatgtcaactgtgctgtgtggcaggagtctgggatgaatcacactacaaggacaaacattggtcaggtggagctatatacctttctggaattgacatgatacatggcacacccgtactagacatcaagccctacatagctgagtatgactcaccgcaaaatgtgatggagcctttagcagactttaatttacagaataaccaacatacaccaaacactgtgtcccagtctgacagcaagactgacagctgtgaccagcgacagctctcagggtgtgatgagccacaaccccaccatagcactaagaggaaacctaaatgtcctgaagacagaacttcagaagaaaactacctgacacacagtgacacagccagaattcagcaagcatttcctatgcacagggagatagcagtggattttggtttggaatcaagacgtgatcagagttccagcgtggcagaagaacaaattggcccatattgcccagagaagagcttttcagagaaaggtacagacaagaagctagaaagagtggaaggagcagcagtcttgcaaggaagcagggcagagacacagcccatggcccctcactgccctgctggaagggctgatggagctccccgcagcatggttcctgcctgggtgacagaggctcctgtggccactttagaagtgcggtttactcctcatgccgagatggaccttgggcagctcagttcacaagatgttggtcaggcgtcatttaaatattttcagtcagcagaggaagcaaagcgtgccattgaggctgtgctgtcagcggatcctcggtctgtgtaccgccggaagctttgccaggaccgccttttctactttactgtagacatagcgcatgtcacttgctggtttggtgatggctttgcagaggtgctgaggatcaagccggcttctgagcctgttcatatgactggccctgtggggtccttggtgtctctagggtcttaaggagcctccctcatgtctttaaggtagcatcattgatctttggatgtggcttttggattttctgaacaagctaatgttgtgtcgagaagcaacactttgtgatctcatggctttgattgatttgggctgttcaaaatgtttatttgaaaaacgtatacattaataaacttaacaaagagatataaaatac

SEQ ID NO: 6845 - DNA, 1418 bp, Homo sapiens
actgcgcatgcgtcaggcatggagagcggaagcggaaggttgaatgcgtcgggtgggcacctcagcaaccagtagccatgcgcggcttggaggagccggggcctcggcctacagcgaccccgtgcggctgcgtgaagccggctctggagacaggattttgtttgtttttcacaaaaatggtcatttgagctgtaaggcaaaagtgcagcctcctaggctgaatggtgcaaagactggagttttttccacaaggagccctcatcgtcccaatgcaataggactgaccctggccaagctggaaaaggtagaaggtggagctatatacctttctggaattgacatgatacatggcacacccgtactagacatcaagccctacatagctgagtatgactcaccgcaaaatgtgatggagcctttagcagactttaatttacagaataaccaacatacaccaaacactgtgtcccagtctgacagcaagactgacagctgtgaccagcgacagctctcagggtgtgatgagccacaaccccaccatagcactaagaggaaacctaaatgtcctgaagacagaacttcagaagaaaactacctgacacacagtgacacagccagaattcagcaagcatttcctatgcacagggagatagcagtggattttggtttggaatcaagacgtgatcagagttccagcgtggcagaagaacaaattggcccatattgcccagagaagagcttttcagagaaaggtacagacaagaagctagaaagagtggaaggagcagcagtcttgcaaggaagcagggcagagacacagcccatggcccctcactgccctgctggaagggctgatggagctccccgcagcatggttcctgcctgggtgacagaggctcctgtggccactttagaagtgcggtttactcctcatgccgagatggaccttgggcagctcagttcacaagatgttggtcaggcgtcatttaaatattttcagtcagcagaggaagcaaagcgtgccattgaggctgtgctgtcagcggatcctcggtctgtgtaccgccggaagctttgccaggaccgccttttctactttactgtagacatagcgcatgtcacttgctggtttggtgatggctttgcagaggtgctgaggatcaagccggcttctgagcctgttcatatgactggccctgtggggtccttggtgtctctagggtcttaaggagcctccctcatgtctttaaggtagcatcattgatctttggatgtggcttttggattttctgaacaagctaatgttgtgtcgagaagcaacactttgtgatctcatggctttgattgatttgggctgttcaaaatgtttatttgaaaaacgtatacattaataaacttaacaaagagatataaaatac

SEQ ID NO: 6846 - DNA, 1521 bp, Homo sapiens
actgcgcatgcgtcaggcatggagagcggaagcggaaggttgaatgcgtcgggtgggcacctcagcaaccagtagccatgcgcggcttggaggagccggggcctcggcctacagcgaccccgtgcggctgcgtgaagccggctctggagacaggattttgtttgtttttcacaaaaatggtcatttgagctgtaaggcaaaagtgcagcctcctaggctgaatggtgcaaagactggagttttttccacaaggagccctcatcgtcccaatgcaataggactgaccctggccaagctggaaaaggtagaagccttggggaaatggacagatatcatggctgcagtgctgatgtcaactgtgctgtgtggcaggagtctgggatgaatcacactacaaggacaaacattggtcaggtggagctatatacctttctggaattgacatgatacatggcacacccgtactagacatcaagccctacatagctgagtatgactcaccgcaaaatgtgatggagcctttagcagactttaatttacagaataaccaacatacaccaaacactgtgtcccagtctgacagcaagactgacagctgtgaccagcgacagctctcagggtgtgatgagccacaaccccaccatagcactaagaggaaacctaaatgtcctgaagacagaacttcagaagaaaactacctgacacacagtgacacagccagaattcagcaagcatttcctatgcacagggagatagcagtggattttggtttggaatcaagacgtgatcagagttccagcgtggcagaagaacaaattggcccatattgcccagagaagagcttttcagagaaaggtacagacaagaagctagaaagagtggaaggagcagcagtcttgcaaggaagcagggcagagacacagcccatggcccctcactgccctgctggaagggctgatggagctccccgcagcatggttcctgcctgggtgacagaggctcctgtggccactttagaagtgcggtttactcctcatgccgagatggaccttgggcagctcagttcacaagatgttggtcaggcgtcatttaaatattttcagtcagcagaggaagcaaagcgtgccattgaggctgtgctgtcagcggatcctcggtctgtgtaccgccggaagctttgccaggaccgccttttctactttactgtagacatagcgcatgtcacttgctggtttggtgatggctttgcagaggtgctgaggatcaagccggcttctgagcctgttcatatgactggccctgtggggtccttggtgtctctagggtcttaaggagcctccctcatgtctttaaggtagcatcattgatctttggatgtggcttttggattttctgaacaagctaatgttgtgtcgagaagcaacactttgtgatctcatggctttgattgatttgggctgttcaaaatgtttatttgaaaaacgtatacattaataaacttaacaaagagatataaaatac

SEQ ID NO: 6847 - DNA, 991 bp, Homo sapiens
  misc_feature (6)..(6): n is a, c, g, or t
gaatcnagccgttaccttccagcaacgccaaacactgtgtcccagtctgacagcaagactgacagctgtgaccagcgacagctctcagggtgtgatgagccacaaccccaccatagcactaagaggaaacctaaatgtcctgaagacagaacttcagaagaaaactacctgacacacagtgacacagccagaattcagcaagcatttcctatgcacagggagatagcagtggattttggtttggaatcaagacgtgatcagagttccagcgtggcagaagaacaaattggcccatattgcccagagaagagcttttcagagaaaggtacagacaagaagctagaaagagtggaaggagcagcagtcttgcaaggaagcagggcagagacacagcccatggcccctcactgccctgctggaagggctgatggagctccccgcagcatggttcctgcctgggtgacagaggctcctgtggccactttagaagtgcggtttactcctcatgccgagatggaccttgggcagctcagttcacaagatgttggtcaggcgtcatttaaatattttcagtcagcagaggaagcaaagcgtgccattgaggctgtgctgtcagcggatcctcggtctgtgtaccgccggaagctttgccaggaccgccttttctactttactgtagacatagcgcatgtcacttgctggtttggtgatggctttgcagaggtgctgaggatcaagccggcttctgagcctgttcatatgactggccctgtggggtccttggtgtctctagggtcttaaggagcctccctcatgtctttaaggtagcatcattgatctttggatgtggcttttggattttctgaacaagctaatgttgtgtcgagaagcaacactttgtgatctcatggctttgattgatttgggctgttcaaaatgtttatttgaaaaacgtatacattaataaacttaacaaagagatataaaatac

SEQ ID NO: 6848 - DNA, 669 bp, Homo sapiens
tgtaccctttctctgaaaagctcttctctgggctagtatgggccaatatgttcttctgccacgctggaaactctgatcacgtcttgattccaaaccaaaatccactgctatctccccgcagcatggttcctgcctgggtgacagaggctcctgtggccactttagaagtgcggtttactcctcatgccgagatggaccttgggcagctcagttcacaagatgttggtcaggcgtcatttaaatattttcagtcagcagaggaagcaaagcgtgccattgaggctgtgctgtcagcggatcctcggtctgtgtaccgccggaagctttgccaggaccgccttttctactttactgtagacatagcgcatgtcacttgctggtttggtgatggctttgcagaggtgctgaggatcaagccggcttctgagcctgttcatatgactggccctgtggggtccttggtgtctctagggtcttaaggagcctccctcatgtctttaaggtagcatcattgatctttggatgtggcttttggattttctgaacaagctaatgttgtgtcgagaagcaacactttgtgatctcatggctttgattgatttgggctgttcaaaatgtttatttgaaaaacgtatacattaataaacttaacaaagagatataaaatac

SEQ ID NO: 6849 - DNA, 473 bp, Homo sapiens
tatgattcctcaaaaataagaggaaaattttaacaattatgccctaagatggacccatgacaatttaggagtcattgggatcaccccccaaagccaaatgttaatttccttgggatttccttctgtacatgcaaagaacttcaggccatcctatgatccctcacaaataagaggaagattttaacaattatgctctaagatggaacatgacaatttaggagtcactgggatcaccccccccacctttccaacgttactctgctttaactacaaatatgtcgaatggttttctaatttttctttaacttaacctctaaagttcgagagctgtcatctttgtcaagtctgattgttgagtatgtgaatggatgtttttggctcaatgttagagccaaaatttataaataataattatttatacataatgatattgcaaataaactttaagaaagagctttaaacataaaaaaaat

SEQ ID NO: 6850 - DNA, 393 bp, Homo sapiens
tgcggtccatttgcagcctgagtggagaggatggggcagggatcccaggtgaggtcgagtaaggaagtcgcagttctgacctgggaatctgccgggacaagcctgctctgtctcagcatcaaggcgtttggtacctagaggagcagggtgccagggtgtccagaccgggcaaaccaggagccctagatcccgtccctggaactaggtcctccgccagctttgcgggcctcctccgcaccaggctcaggtctcgcccatccccagcaggaggtctctctgccccccaccctccggaggggggttatatgatcttaaagcttccccagagggaggaaaggtgggggcggggcggctgctgaggcccaggatataagggctggaggtgctgctttc

SEQ ID NO: 6851 - DNA, 399 bp, Homo sapiens
gattctcgcattcttgctcttaatcctcccttggcgaccttctactcagacatcatcttttatgcagagaagcaggcacgtttctcatcattaattctgttctcagccaggtgtgtagccacagagcatacagaccacaggatgattgaaagcatattgactttcctgacttcttatgaccacatttgaggaaaggagtaagcactggaatcaccaacacagcatgcttacggagggtggtcaccagcttcatcagcctcccaattccacggagccccttgaaaatccaggagcgcagactggcaacagtagagatttaataggagtttactggaggttatactccagtcaaagaagatggaaaccaagaaaggacacattttggagattagcactggc

SEQ ID NO: 6852 - DNA, 704 bp, Homo sapiens
ttgagacaaggtctccctctgttgccccgactagactgcagtggcatgatcactgcagcggcatgatcactgcagccttgacctcccaggctcaagcaatcctcccacctcagcttcccaagtagttgggactacaggtgtgtgccatcatgcccaactaatttgtaaattttttttatagagataagtctccctatgttgcccaggctaaacttgaactcttgaactactgggctcaagtgatcctcccacctcagtctcttgaagtgctgaaattataggtatgagccaccatgctcagctatttatataatttcagattaattttgtcccagccattcctctagaaaacaaaatatggtcagctctccatacccatggattctgcatccacggattccaccaaccatggaatgaaaatattataaataaataaataacaatatgaataaaaaaatacaaattttaagatacagcaaaaaattatttacataacattcacactgtattattaggtattataagtaatctaaggtgatttcaagtatacaagagaaatactgtaccgttttatataatggacttgagcatctgtagattttggtatccaattccccatagatactgaggaactgtacacagaatctgcattttagctttaaggtctataaaatccctctagcatccatcacttctgaggatac

SEQ ID NO: 6853 - DNA, 628 bp, Homo sapiens
cccatgctcccactgtatttgttgagtgggcgaaccttagtggagagtactgtacggaagacaggtcggtagctttatgcagccagttatttgaactaaagaattatgaatccttccttttcctcccactttgttcccctttcctcaccctcgtgacctccgatcttagggcagttgttagcagcaggaagtggcccagatcataaaccactccttccttgcaagctactttggcagttcattagtgacctgaaaactcaaagcgtaaatgcttcagagccgaggtaattttttataaaataagtaattcttataaggataaaaatttctcctaatttatctgatttgtaaatttggatatacattttaaatgtttgaaggcacttatttataactgttgggagatctagccctaatttggatttatcttctatttcgttaggatgttatagaatgataatagatgcaaatgagatagttgttgaatgcagcaactatctacgatctatgatctctgatctgggctaggtccagagagaggggtgggtaaacggtttacatctgggccatagagtttggaaggcctagtgataagatatttaagtaacttggcaatgaaaggaacatc

SEQ ID NO: 6854 - DNA, 725 bp, Homo sapiens
gagttcgagaccctgtttctacaataacatataaaaattaggtgtagtggcatgtagttctagctgctcaggagggtgaggtgagaagattgcttcaccagggagttcaaggctggattaagctaggatcgcaccactgcactcgggcctaggctacagagcgagactgtgggggggggggcagtatgaggaagtgtgtcaacactgggaagatctgtgtaactcattgaaccaatattttcccaaatgaccaattcatgttacaaaatcgtgcatgggtaggcgatccgttcaaagtacaacatagacaaatggatttttatatacaccagagccaaaaagttcactgatacagtgaattccacattgcaactaacctttcagaattgccacttgagttttggtgttgaataaaagatgaatatccattgttttctgagaaggctgttaaaatactcctctcttccaattagctgtccatgtgagacacgttttcttcatgtactttaaacaaaacaacatatcatagcagattgaatgcagaagcagatatgggaatccagctgtctcctattaagctaggcattaagagaaatttgtgaagatgtaaaacagtgttactctgattcctgactttgttttagaaaattctgtttttcataagatgtttatattaacgtaatgggtttattattttaaatgaattaataaagcaaataccaaaa

SEQ ID NO: 6855 - DNA, 748 bp, Homo sapiens
cagagcgagaccgtctcaaaaaaaaaaaaaaaataccatctcccaccggtcagaatagctattatcaaaaatacaacacatgctatcaaggctgcagataaaaaaaacccataccccgttggtgagaatgtaaattagttcagccactgtggaaagcagtttggagatttctcaaagaacttaaaacagagttaccatttgacccagcaattccataactgggtatatcccaaaatgaaaataaattattataccaataagacacatgcactcatatactcatcactgcagtactcacagtagcagagaagtggaatcaatctaggtgcccgacaatgctggattgtattaagaaaacgtacatttacaccatggaataatatgaagctataaaaaaataaaatcatgttctcagcagcaacatagatgaagctggaagccataatctaaagcagattaactctggaacagaaaaccaaataccacgtgttctcacttagaagtggaagataaacaaataggcactgtggattcctaggagagtaggaagagagacgggcatgtgttgaaagactacctgtgggtgccatgcttactatacccaaaatacccatgtaacagtcctacacatgtatcccccgatttaataaaagctgaaatattaaaaatcacattgtacaccacaagtatatataattgtaatttgtcaattataccttaataaatctgaataaagaataaagtgtaa

SEQ ID NO: 6856 - DNA, 582 bp, Homo sapiens
atgcattttttcagcaatgtttagtcaaagggctgcatgtgagtggtcttttgagtcatcagtagatgtagtataatgtcacttctgtgtcttcgcttacttttattgccctattgcatagcaagactttatttatcagttttagacaacgattatggtgggaacttgagggcaggatagagcttttctactagttaggacatatatgtagttttcaaacatgaggatgttgctactaatgcatctcctagaatatgaagaagaaaaccacataataaagaatgcaggccaggcgtggtggctcacgcctgtgatcccagcactttgagaggctgaggtgggtggatcctgaggtcaggagttcgagaccagcctggtgaaaccctgactctactaaaaacacaaaaattagccagcaatggtggtgcgcacctgtagtcccagctactcgggaggctgaggcaggagaatttcttgaacccaggaggtggaggttgcagtgagccgagattgcgccactgcactccagcctgggcaacagaacaagactccatcttaaaaaaaaaaaaaaaaaaaaaaaaa

SEQ ID NO: 6857 - DNA, 347 bp, Homo sapiens
aagactctgtctaacaacaacaacaactatagctatagatatagatatataggattaactgcatatcctatcatgcatttcaattattatatattaaatgttctctctttagtatttcacttcacatctctgctggattgaggatctcagggagtgttttacagctaacgtgtgccagacttccccatctcagtcccattctaggccaactcatgatgcatgccctgtccgggttccaatagaggtttggcggaagaatccttacaaacaccaaatccttgatctgtcctgaggaagcctgaatcatctgattggccccagaatcaccctgattttccatgaattcc

SEQ ID NO: 6858 - DNA, 462 bp, Homo sapiens
gaaatggtgaaatatcatttcattaatttttaccaatttttctaattgaatcccgtggttttcttatagtgagttttgaaaattctttatatattctaaatactagtcctttattggaagtgtagtttacaaataatttctcccagtctgtagcttgccttttcatcctctttcatgtcatgtttcagagagcaaaggttttttattttaatgagttccaatttcctgttacgggttgtgttcatgtcaagtctaagaattcttgcctagtcctagatcctgaagatttcacctatgctttttgcttttttacagcaccatatgttgaaaaggctatcttccctccattggcttgtttttgcatctttgtccaaaatcaagccaggcactgtagtgcttgcccgtggtcctagctaatcggaaggctggggcaggtagatcacttgagcccaggagtttgag

SEQ ID NO: 6859 - DNA, 449 bp, Homo sapiens
ttgtgtctacagcatttttactgactgcttggcattcttttgctcctcatccatggcctctattcatacctagaatggatggctgttcagaatgaagctggcatcactgtgttcaccattcaggaagagggatatttttctttgctatctctcagctccttatgagactcctcaatgtagcctgcacggagtgggtgtttatctccttccaaaaagtgcacacttgtctcacccaatttggaactggagtttgcgatttggctagaactctacaaagattgcactccagctgatgataagtttgcacgttctagtctctctctccaccacctctcactgggtcacctagaatccctctgggtgaggcacaagaaaacaacattttcattgctttaagtcagaggcagttgtttagaactggtttgtttttccataaagtcattgtcctt

SEQ ID NO: 6860 - DNA, 426 bp, Homo sapiens
ccaatttaccatgtggcagtgtgctttccagctgttttcccatcaagacacacatgggaaataacatttgcctagtacactggggtaaactgacaaggtgctcacggccacaggtgaccatccagggcctccaatcatcccaggctcagccctgccactcaaagggctaaggtgatcagtagctttagctatttgtggcacacagatagagaagttcttccatacagcatatgctaaggaaaaaaacaatagtggtagaattctttggtgtaggttctcatttgtgcagcattgtttctcaaaaagacatttaaagcattcaattgacttgcaatataaatggcttttgaactatatatataatatacaaatatatatatattataggagttaactacatatatatatgtatcataacacacaaat

SEQ ID NO: 6861 - DNA, 300 bp, Homo sapiens
tttatttggcaaccttggctctactctaaaacctatcatttctggattattgccacagattaatctcttagtgtaaaggttaaatcctctcctttctctgagctctcatgctcacattcacacacaggctcaggaggcccgacttcctgacttccagggctgcggggttgcaatgtgtgagattctctagctaggcagatcctatgcatttgacagaggagactgcagccagagcaacccctccaacatggaggcccaaaggaatgggggatgagaggagtgttctggcattcacacagt

SEQ ID NO: 6862 - DNA, 782 bp, Homo sapiens
ttcagcagctccacctcctccagggtctggctgtgctcctgtccctcggccccaggatgcagaatctgtaatgactggtgcttacctgccccccaacccccaccccagggagggcaggggccttgcctcactccactccgtgcccagcatggtgcctagcactacctgagtgttcagaaagtgtctgagagaacacagaggagttggaagcaaactccagccagcaccaggaggcatctttacattaaacagcaacagtcagcggaaccagagccagcatgtgccagcctctcttttcccctcagtggtgtcaccaggagccgacagagagaaatgaggctcttccggttaggggcttcaaggacgctttctgtacagtgtgtctgcaaagttaagggacatgtgtgcacgtctggatgtgctcacttctcgagggcctcctccctggggatctggggaaaggtagagctcagttctgaagcctctctagcatcaagggctacctcctgagaccaaagggaaattctacaaagttcacagaaaataaggggtttcagcatatcacagaaaaactgaaattcagtaatgtgacaatgaacccaagaggaacaggttctgacagagtttaaaaggggtccttgcttctcctgggatgctcagaatgggaactctgccacaggtttatcaaaaacccaggattgctatttttatttccctcttctattagttcgtctcaaaagaaatatcagctccttaaagggacagacaatgtttttcaactt

SEQ ID NO: 6863 - DNA, 357 bp, Homo sapiens
ttaattaatctttctctgatcgctaatgacagttggttctgttatcagccaccaatcatgttaaatacagtatgtagaatggttcaaatctaggaagcatttcgtttgcaaagaaacctgtatatttacagactttaaaagatggatttttttttttttagagagagacttgataatttttaaaacaaagcttttgaaaagtgggcagttcttggggtggggggagggaaagcactaggagatacacctaatgtaaatgacaagttaatgggtgcagcacactaacatgacacatgtatacatatgtaacaaacctgcatgttgtgcacatgtaccctagaacttaaagtataataa

SEQ ID NO: 6864 - DNA, 339 bp, Homo sapiens
ctgcaggtgttcactaaacttggaaaaatgccaccgcctttctggcacaatgtaccatcttggaacaccagcattctgccctgaagccagccctggcctcagaggcctgggccacagggagaacctcacagcccaggacactgtggcactctgctgtctagaagcctgtctccccacccttcccattctaaccccatgcgttcctcagcctccccactgtgcaagcctaggtaaggacattatgaagacgtcagcctgcctctcacattcccctgcacactgctgtccctctcccgcgggccaagcagacccactgtggcaaaaatatagaagaatgac

SEQ ID NO: 6865 - DNA, 414 bp, Homo sapiens
caatgatcaagggggatttatccctggcattcaggtttggttcaacaaatgcaaatcaataaaagtgattcaccatattaacagaatgaaggataaaaaccatatgacaatctcaatagatgcagaaaaagcatctggtcaggcatggtggctcatacctgtaatcccaaaacattggaagaccaaggtgggaggagcacttgagcccaggtgttctagaccagcctaagcaacgtggtgagaccctgtctgtacaaaaaataaaaaagttagcagggcatagtggcacatgcttgtagtcccgtttgagaggctgtggtgggaggactgcttgagcctgggaggtcaaggctataatgagctgtgatcatgccaatgcactccaacctggttgacagagtgagaccctgtctc

SEQ ID NO: 6866 - DNA, 387 bp, Homo sapiens
acaaaactcaaaagagttaatattcagtgtctagttcctctcctcctattctttccttcaatccaattgttctagttaaggtcgtgagcttcatttccaactccaggttgttaaacgcaggagtcagttatcagcctacctttgataactttgcatttgatgctgacactccctcctccttggaacaattcctttggtttccaggggaccacacttctggtttctgcttaccggcaggaactccttttccatgctctcttgttggttctttttcatcttcacaactgaaaatgtgagtgccccagggctcaggggcagtcctttgatcccctccttttcttgtctacctcactcctgagcagcccatcacctcatgcctttaaatgt

SEQ ID NO: 6867 - DNA, 290 bp, Homo sapiens
acgctatgatatatgtataaattcttgtagagacatttaaaaagtctattaactttaatttctgcccccaccttggtcttcttatccttcatcatttctattttatattgtacttatcctcactttcttaacacttaagatacatggatcctttctggtaatcccaatcagagaagccaggtagactttcttagaccatttatattttattcccaaatacttcattattctaactcaagcctcatgtttcagagatgcagatataacttgtcacttaaatgttgaaagaa

SEQ ID NO: 6868 - DNA, 270 bp, Homo sapiens
atatatctccatgatgcaattaagctagaaaacaataacaaaatgataatacaaagtccccgtatgtttggatatttaggaaaatagaagttctggatgacccatatagcaaagaaaaataattataaacttaaaaaatgaaattgctatatataccaaaacttgtgaaatacaactaaagtcacacttagacatttatagcattaggtacctacatttgagaagaaggtttaaaaattcatgaactaagcattcaaggcaaacatcaaa

SEQ ID NO: 6869 - DNA, 453 bp, Homo sapiens
ctgactccctagttccctggcacaaaagagatcttgagtaattccctgaacctccctagataggaagaggcacttagcccatgttctgctcaccacaaatacttgtgtatggtaggcattggttgttcccttcctaagatccactttacatccattctttcctaacagaaatctgattttgtttggagcagcaatgctcagctcatatccagcttcccacactctcttacagttaggaaagactgtatgacccatttgtggctgggcagatgtatgtggaagtcactggatggaactttctggaaagcttttagaaagagactgacttggctggcatcctctttcccctttgcctttccccctcttcttgcctagggagaatgtgtcaaacttggagatccagcagccgtctatgacaatgaaagtgaaagcctcactgaaggacagcagagg

SEQ ID NO: 6870 - DNA, 312 bp, Homo sapiens
gttgcctcagctggtcttgaactcccagtcttggcctcaagtgatccttctgcctcagccttctgagtagctggaagcacagctgtgagccagcacacctggctttttttaatttctaataaaaaagttaatagagtttcttgtttcactggacaaagtatgcatatataggaaggaaagacttttggacttgagattgtgctgaagaagaaaaatggaaaaattaagcattttagtctctcagtgtgttatttttgtagcttatacagatatgtctttttaaagtgtctttaaaaagctttattgagataa

SEQ ID NO: 6871 - DNA, 367 bp, Homo sapiens
ttttgatagagtgtcatccagtctggagtgcagtggccaatctcagctcactacaacctctgcctcctgggttcaaaccattgtcctgcctcaacctcccaagtagctggaattataggcatgagcactatacctggctaatttttgtatttttagtagagacaggtttcaccatgtccaggctagtctcgaactactgacctcaagtgatccacccacctcggcctcccaaagtgctgagtaaaattacatgaaacgtaatttgtgagatactaaaacatctacttaaagtaagatgctttataaaaagttggaggataaggagttaaatgaacagagtatatatttttaataattagattctaca

SEQ ID NO: 6872 - DNA, 470 bp, Homo sapiens
  misc_feature (438)..(439): n is a, c, g, or t
  misc_feature (468)..(468): n is a, c, g, or t
tgggtgaggggaggccggaagcttgggaaaggtgtgtgccccccccccccgcaccgcgccgcccgggtgctgggtgggccaggcgacgggaatcctggagcgtgccggggccgcgcgccttcgcctgtttcccgtgcagaccgcccagcgatcggcggcgcagagcccggcaggggcggccctcccgtcgtgcggtttagaaatcgcacacgttcccggtctgtgagtccccggcgccggggtggtgccagtgctgccgtgggctttcgccgggggctcgggccggcgctcggtgacaaagagtcggcttgggggaggggaggcgacgccgcagtgctcgctccccacgtccccccaccccgcacgtgaagaggaacaatttgtttatcttgggcttcaagaatccttccctcctcccagttctccgggggcgctcanntttttttttttttttttccaggttggggnga

SEQ ID NO: 6873 - DNA, 217 bp, Homo sapiens
aaaaaaaaaaaaaaaaacaggatctaaatgggcttttaatttttttttttaagagaaaactagaattgttgaccacattaccaaggaagaataagaatagagaattttattgttaagccacaccaaatttctgccttgttaagagaatggcattactgaaaaactgaagacttcatcaagaaaatgtacataagctaacaatataagattaatcact

SEQ ID NO: 6874 - DNA, 350 bp, Homo sapiens
gggagaggagagggaagcaaactctgactcttgttgtggaatggtagagttctagaagatcacctgggaccaaaaataccactgtggccatttttagaaaatacagtttaccagaggctgaaaacacagctactggaggctgcttctcttgggatttcactctgtctttcagtgctagttctaaactagttgagacagttggcttaacaactttgtggtgaataatggaacaaggccactttcctgtcttcttagacttgtaataggtatatcagtttataagtcaagacaatattctacctttgggctattctcacatcatcaaattaagagcagattttggttaagtt

SEQ ID NO: 6875 - DNA, 420 bp, Homo sapiens
tgtgttctgtccaggaacttgtatcctatcctgcctgcatttcctctgactgcaggcactgccgtggcaccatagagaggatacagaaggcctctctcattatttgtgtgtttaagtgggagggcacttccagtgacagatctttaagaaagagagggctcactcaaccacagcaaaggccagacctctctttgggcaacatgaaattcttgactacacgataatgttgattttgaaaaattatgattgaatttactagaaatggcctgtgttttaactgtgtttttataaatgaggttcaggccggttgcagtggctcatgcctttaatcccagtgctttgcaaggcctaggcaggaggattgcttgaggccaggagttcaagaccagcttgggtaacatggtgagacccctatttcta

SEQ ID NO: 6876 - DNA, 584 bp, Homo sapiens
atgtatactagtcattattggagtgactattatataaagacaaaagccactagggtagccatggttttttgccagttattagccatatatagtgcgtgcatgcacacatacacacacacatacatatatgtaatatataattttagtatatttaaattaatccatattttcaagaacttcattaacttgaacactcagaaataccctgagtgttttaagacataattgcaaataactcatgtaatgcgtatatttttatatctttgcatgtatgaagtttatacattcaggcttgtgcaaatgtgtttatatcatttgcctaagcccttgattatttacatgttcctatgtgggatcacagtccttcagatatgaatcatagcacagtgatttctttacatattcgtattctactattgagatactttaagaatcctgtgagttgtgtacctggaaatataaaattgatattattattaatccattcagaaatcatattgggcaatagcactactacatgtacatttagtagcaaacatagatagaatatttggagataatgaagatttcaatactgtgttaag

SEQ ID NO: 6877 - DNA, 505 bp, Homo sapiens
tgagacagagtcttgctctgtcacccagggtggagtgcagtggcacgatcttggcttactgcaacctgtacctcccaggttcaagcgacagaatctcaattttataatcatgactcaacctcacattttgggggaacgttaaatcttctactgtttgagtattttaattgaaatatatttaaaacattatggaaatgtaaacaagatcagagagtatcttctattttttgccgtctctgtgtatgttattggacatgatatgagaagctttatctcaacgttcctgtgcctaacaaccactgtggtaaactagttaaaatgtaaattcctgggccttatcctctgagatttaactcacaaatctgatttttaataagccctataaatcattttgatcttttgagcaataccgttaaagtgaaacagaaacactgaatcttccgtctgtacgtttctgttgcaaaattcagatgtctttctctttgtcgatgtctataaatttgca

SEQ ID NO: 6878 - DNA, 330 bp, Homo sapiens
ccactgtagttctaatggacataattacagttagcaaattcaggctcttctgccatagtgccatttcaaaaccataactcagaatatgcttgtaagaatttaggatgcatattaaagctttgaaaaaaatagcattttcatacaatgtggttttattaatgttagtctgaagagtagctgaaactaatggatctaacttgatttgttgtcgtttcaataaatcttcagtcctctaagcaatacacaaaataagaaactctttaagattagatgtttactgtaatcttctctgtaataaatatatataataaaatatataataaaattttt

SEQ ID NO: 6879 - DNA, 486 bp, Homo sapiens
gaaacattaatcaaaaagtgagtagtagtagctaacttaatgtaccctttgcttaggtttttaaacatgttactattaagactacgtattgtaaaccttctgtaattttcacatatgaatgacaggagaaagttaaacctaatcgaaggagttttggaataaaaaagtggtgctggggaaattcaccatggttcacaaagtatgcctttgtaaaactgaatcaacttttagcaagaattaatttatgtagttttaaatgttaaattgtgtatatttaacagaaaatacttatctggcacctcagcagttttaatgttaccttatacttttaacagtatgatttatattgaatacttagatgttttcataagattttatcaaatttgataatgcggtggttttatgctctggaaaatgtcatcactttaccatagaatcgcgggcccgtgtttttacctctggtttcagcctaatgcatgattacgg

SEQ ID NO: 6880 - DNA, 749 bp, Homo sapiens
gaaacattaatcaaaaagtgagtagtagtagctaacttaatgtaccctttgcttaggtttttaaacatgttactattaagactacgtattgtaaaccttctgtaattttcacatatgaatgacaggagaaagttaaacctaatcgaaggagttttggaataaaaaagtggtgctggggaaattcaccatggttcacaaagtatgcctttgtaaaactgaatcaacttttagcaagaattaatttatgtagttttaaatgttaaattgtgtatatttaacagaaaatacttatctggcacctcagcagttttaatgttaccttatacttttaacagtatgatttatattgaatacttagatgttttcataagattttatcaaatttgataatgtaatgataaaatgtttttttaaatgtgaactatttaacatataaatggggacacaaaacctgaattgtgatttctacataatgtgataattagggttcaaattatgactcatcatttaattgattataaatgagtatatttctgaactctttattgcctccatttttacaatcataatatagcaataatttctatttttatttcataggactgtggtgaagttatttatcatgacacctttatctttgatttctgaggggaaaggggtgtatattttgtagttaagataaatgagaaagttcctaatagtacaaatgcccttttccagggttatctttgctatttgttgccattttt

SEQ ID NO: 6881 - DNA, 446 bp, Homo sapiens
gtgagggagacatcagcctcgtgttttgtgtctgtaatatcaccgccgtttactgagtgcctcctacgagccaggcactgggccgtgtgctttacacgaaatgttctatgtaacacttgcagcagatctgggtagcccatagcctaccaaagggcaaatcgagcttcagagaaagtgagtcttgcctgaaagccagcacctggcagaggtgggctgaggtttggatctggttctgaagcacgttgttcttccccgtggctgtggctttgttcacattagaccacctgacaagtctgcccacctttcccgtctttactggataaaggtcagatcctaagtgtattggaaagttcaaggcaacaggatctgaccacattgattttctaaatgacttccaataagactaacattgaagagtatcaggagcttttccttcctttccaaaa

SEQ ID NO: 6882 - DNA, 1758 bp, Homo sapiens
ttgcagtgagccgagattacaccactgcactccagcctgggtgacaagagggaaactccattaaaaaaatgtaattcccgtgtctgccatcttaagtgtaaaggtggctaaattatatagaaaaataagacaatatcatttcccaattacattcctttcctaccgcactctatgatgctagctgagatttttccaaaagaaaatggcttaaataaaaccctaagagaaagaaaaactttaaatccctccaaagctcaaaagtaatagaaacagatgagtttggagtcaggatttctctgtaagattgcctaggctgtgtactgcacatctccaggtgccactgttcacagagattataactacaatgtgaagtgaatggtgccactgacagttatgcaaaccgtccagagcatagccacctgatcctgctgggattcctctttgccagtccatcagcagttccccttgaaagtttcaccaaacatcccttaaatctgccctctcctgcccgtccccagtggaggtcctcatcatttttcacctgcatttttgcaggagctttcttatatccaccttcctccttttctctcagcccatcatctagctacacagtctccagggtaagctttcagaaaggcaatctcttgtctgtaaaacctaagcaggaccaaggccaagtttcttagcctgaaaaatgtgcttttctgactgaactgttcaggcactgactctacatataattatgcttttctaccccctcacactcaacactttgactccagcaatcccaaatccccagatccctaagtgtgctgtgctattttcacatggctctcagacttggccagtgctgtttccattttggtctttattccccacatctctgcctggggggtagattctaccctgaaaaatgttcttggcacagccttgcaaactcctcctccactcagcctctgcctggatgcccttgattgttccatgtcctcagcataccatgtttgtctttcccagcactgacctaccatgtgtcacccctgcttggctgtaccttccatgaggctaggactatgtgtctcctttgttgactgctgttgccctagcatcttgcacagttccttgcacacaattagagctctataaatgtcaaataaatgtgttataattatatgtttaagatagttgttcaaataaactctaaataaccccaactccaagagtgttagcaagaaatataaattttacagaagaatggttggaggtggggagggtgtccacggagtgagttacctcacacaggcacggaaaaacttgaacctcctaaggacatttttaagctctctttcccattttctctcctggattcccattgcctggtctcatttctctcttctccaccacaccacttcctcaaaaaacacaataacttcccctaccttacacctacaaccttcatatagaaccaaaaaagagcccaaatagccaaagtaatcctgagcaaaaagaccaaagctggcaagcatcacatttacccaaacttccaactcttactacaaggcctatagcaacctttacataccacgccttggccacttggttaccacacaccagaccggttcgcactaaccggaacccgaataggcccactccgcaaattacggccccacaccctcaggccttttgaacttggacccagctcacccatattcaggtcctgcgcgaaagacctcctatttccaacacgtaatgcgggctaag

SEQ ID NO: 6883 - DNA, 1210 bp, Homo sapiens
ttgcagtgagccgagattacaccactgcactccagcctgggtgacaagagggaaactccattaaaaaaatgtaattcccgtgtctgccatcttaagtgtaaaggtggctaaattatatagaaaaataagacaatatcatttcccaattacattcctttcctaccgcactctatgatgctagctgagatttttccaaaagaaaatggcttaaataaaaccctaagagaaagaaaaactttaaatccctccaaagctcaaaagtaatagaaacagatgagtttggagtcaggatttctctgtaagattgcctaggctgtgtactgcacatctccaggtgccactgttcacagagattataactacaatgtgaagtgaatggtgccactgacagttatgcaaaccgtccagagcatagccacctgatcctgctgggattcctctttgccagtccatcagcagttccccttgaaagtttcaccaaacatcccttaaatctgccctctcctgcccgtccccagtggaggtcctcatcatttttcacctgcatttttgcaggagctttcttatatccaccttcctccttttctctcagcccatcatctagctacacagtctccagggtaagctttcagaaaggcaatctcttgtctgtaaaacctaagcaggaccaaggccaagtttcttagcctgaaaaatgtgcttttctgactgaactgttcaggcactgactctacatataattatgcttttctaccccctcacactcaacactttgactccagcaatcccaaatccccagatccctaagtgtgctgtgctattttcacatggctctcagacttggccagtgctgtttccattttggtctttattccccacatctctgcctggggggtagattctaccctgaaaaatgttcttggcacagccttgcaaactcctcctccactcagcctctgcctggatgcccttgattgttccatgtcctcagcataccatgtttgtctttcccagcactgacctaccatgtgtcacccctgcttggctgtaccttccatgaggctaggactatgtgtctcctttgttgactgctgttgccctagcatcttgcacagttccttgcacacaattagagctctataaatgtcaaataaatgtgttataattatatgtttaagatagttgttcaaataaactctaaataacccca

SEQ ID NO: 6884 - DNA, 1734 bp, Homo sapiens
tagccgcagagctccaccgctgaggccaacgaggccacactttcatttgcttgttacagatgtccaccgcgttgctcgcaaggtaatctcgctccgcgcagctgagcgccccgcatctcgcgcctgctacatcaaagggcccgcgcacaaagcagtgtttcttcgccacggtgcatcttcatggtaagttaggatttctatggcaatgtgcaagtcgcactgaaatcctgaaaggccaagcctggagcccgtccaggcttttcattaaggacataatatttacgtctaacagaccttttttcttgtgtatacaagtatatatttttgtttgacgcggactaaatcattttcatttaatttccggtaaacaaaacccacgcgaatggacacttgtacccgatcataataaaaatggataataatgtgaaggaagaaaagagccgcttgaatcgccgctcagccccctttgtttctgctttctgcggtgatcagagggcgcgtttgggtttgatggcgagtttctaaaggcgaggaaatggtttgtaagaggggaaagaaaaggagaaaggtctaatcaagctcgggttgttcaaagagtcgggttttggggttgaaagtgtgagtttgacggtgcatcagcatgccgcgttaggctcgccatggaaatacgcgcggggagcggccgcttcaaaggcggcacacttcactacagacactctattaagatacatttgcgctgacctttgctttcacgccatttaatactgtcactgcgctctccagtatatacttcctttctagaacccgacttgcccacgtttaggggttcactctgcaccctgatgtgggaggctttggcgcaggggacactttcaggaaagggaggagcacaaggactctgtgcatcttgactgcgccccaaagaggctccaggatcaggagtgaaagattttaaagcagcctccgaagcttaacaaatgagcattccaagctcagttttgtgcaaatcgcctttctgactcttgagtaggatggaggcttaaatttaatggcgacttggggggaagggagccaccctgggggagtctgaggagttcagactgtgcccttgggaatttccactctggctttccgtgccactcttcttcctttccatcccaaaagtctcttgcggcccctgaaacttgtttctttctaaggcagggtgtgtggtacccttaggcctggactagtcctagatgcaaactcaagagcccaaggccaaggggatgtggggaagatggcaggaaagttagaagtccatgttcccttaattgtcttgttgtttattttatccaagtaccccagtgaataggggaaaaataaacacagtgaaaaaaaaaatcaaacagtggagtcttctttagtgccagtccttgtggttgaataaaaaggatggtccgctttctattgagctgagaaatctttgaagtgggagttattatctgagacattcctgcttgtcgtcctaacaacgctgatgaaacgtaaaaggttctttgtcagcgatttgttctcctctctgtcaaactccctctaccccgttagtttcagaccgtttcctaagtccataattgtgtttctgcttctttctgctctggtttgcattcaatcagcccaagttgggtcacatagatgggtttcctttgggtacccctcaggctcctaatattcttgcccaggatccttggaact

SEQ ID NO: 6885 - DNA, 294 bp, Homo sapiens
acacactgcatcaatacataactttaggtctaagtcttgctaagggataaacaaaagcaatgcctagacatcagggtcagggcctggtctggtgaagtatgcagaagttggggggccctcgggacaagctttgggacatgaggaaaagaatgcagagagggtgcaagcagaatacataccctaagtccataattgtgtttctgcttctttctgctctggtttgcattcaatcagcccaagttgggtcacatagatgggtttcctttgggtacccctcaggctcctaatattctt

SEQ ID NO: 6886 - DNA, 1242 bp, Homo sapiens
cagctgggtttcaaaagcttgttgaaagtgaagtttggtgcttttgattgtatttgtttttataagattaccattgctttgcattccagatgcctctcttatccttaaggagagagaagacagaactgcttactcactctctggaactctcctagcctgatgggggaggaacagagccaccagtctgactttgcagtgccccaaacagtaacccacaaggcaacatacaggttaagacttggctctgccaccaacttctgtgactttgaccgagccatttctagtctcttggcctcagtttactcatctgtaaagtgaggggattgagtaggcaatagcagatcttttctagtacactttctatggttctcagtacaaggtgggcatgggaagctctttaatagtgtttctctcttcatctgtttttttgtttttgttttatttgtttgcttgtttttgagacagagttttgctgtcacccaggctggagcgcagggatacaatcctggctcaccgcagccttgacctcccagtttcaagcgattctcccatctcaacctcccaagtagctggaactactggcatgtgccaccatgcccagctaattcttttatttttttagagacagggtctctatcagttaaggttggagaatttatctgggaaggcttcctggaggaggtaaggaaaagaagtcagcttggagccagaattaagtattctgattaatgagggacctggagcattgtaggcttcggagcacctttttggctccacctactcctcaggaggaaaggcctgagtctgaggtttaatagatacagttttgttcctcctttccctgtaattacctggcctgagacactctcagactctgtccaccactcctgtccttcaactcctcccactgtcacctgaggataggctgtatctagattcacattctctacctcctactccagaagagtaggttgtagggcaggtgtcaaagaagagactcccaagctctagacctgtggtgtccaatatggcagccatgagccacacatggtgattgaacatggggagtgtggctggtctgaactgagatatgctgtacgtgtaaaatacacaacagattcagagccttcatgtgaaaaaagaatgtaaaatttcttattaatactttttatattgattatgcatatgttgaagtgatactttttacataatgagttaaataaaatgattaaaattaaaaaa

SEQ ID NO: 6887 - DNA, 561 bp, Homo sapiens
aggaaacagggaaaatggaaggcgggcggctctgcaagtccgacctgggtgccccagagagctgctccgggaaagacgtttacctgctgcccagagctgggactgcagaccctgattggcgagggcttggagagtagctgagaaccttcccttcagctactgaagaccagacagggctttctgtatcacgctgcctgacgatgatgagggtgcagtgactaagagtgcagatgaaaggcccagctctccaaccaggtggatggatttgcaaggagcttctatctgggcgtggtggctcatgcctgtaatcccagcactttgggaggctgaggcgagcgaaccacctgagggtgggagttcaagaccagcctgaccaacatggagaaaccccatctctactaaaaatacaaaattagccgggcatggtggcaggcacctgtaatcccagctactcgggaggctgaggcaggagaatcgcttgaacccgggaggcggaggttgcagtgagccaagatcgtgccattgcactccagcctgggcgacagagtgagactccatttc

SEQ ID NO: 6888 - DNA, 675 bp, Homo sapiens
gcggcttgctcggtactcagctgacttcctgtccctggaagagcagctgccggtatgctggggcagggcggtccccttcctgtggttcaggtaagggcataaccccatgccttcttggcatcctccctctctcctttctcaggctctgcaagtccgacctgggtgccccagagagctgctccgggaaagacgtttacctgctgcccagagctgggactgcagaccctgattggcgagggcttggagagtagctgagaaccttcccttcagctactgaagaccagacagggctttctgtatcacgctgcctgacgatgatgagggtgcagtgactaagagtgcagatgaaaggcccagctctccaaccaggtggatggatttgcaaggagcttctatctgggcgtggtggctcatgcctgtaatcccagcactttgggaggctgaggcgagcgaaccacctgagggtgggagttcaagaccagcctgaccaacatggagaaaccccatctctactaaaaatacaaaattagccgggcatggtggcaggcacctgtaatcccagctactcgggaggctgaggcaggagaatcgcttgaacccgggaggcggaggttgcagtgagccaagatcgtgccattgcactccagcctgggcgacagagtgagactccatttc

SEQ ID NO: 6889 - DNA, 998 bp, Homo sapiens
gggaaagaaaaaagtagggagaagctggcctatggatgtggctttgaagagaagacaggattttggcattccttgctaagcacgttcaatggaggagagccatgaagttttacaaaaataattatggtaaattaaaaggatattagatattggatctcagactagggctgctataatacagttctctgattcgcacaccagatgttctgccagcgaactgttgtctgggcattggaaggagttaggttttttgtgtttgtgaaaatctcctggattagtaaaaaaattttctagatataaagtggttttatttgggctcatgaccattgcccaaagtgtactgagcttttcactaagtgctcagcattggcctcctgttctcatttattcattttatgagatggacttggacatcactaatgcaaacacaggattcataaattattctgaagtttatttagtgccttgcctcaatggagcttaaagcatagcacataaattttatcttatttagccctggagcatcactaagaagcagctaggaactatggcttgccagacagattatgcttgtgccagagaagtggagaagcctgaaatcccttgtcaagtattccacaggaaggaaaggtagtctttgggctttggtctactgacctgtggattaaactctatcccttagattatcccatttctaaatacatttattcaatcagtatttctataatcacttagcatttgataggcttcttccttgatacatttaacataacgcctcagttgcatattacattatggaagaatatacgattgcttcatataacaacattctcatcaccagtgacagtgtcctactggtttgaagaaagatattcttggattatgtgttttatatctaaatggttattctgagactggttgtattttcttctcctactcgtgaaacgatgtgaacaagcattttaaggacaataaaaagttagctggttgaaaaaaaa

SEQ ID NO: 6890 - DNA, 559 bp, Homo sapiens
tagtagctgggactacaggcacacatcaccatgcctagctaattttttgtaatttttttgtagagatagggtctcactatgttgcccaggatggtcttgaactcctagcctcaagcagtcctcctacctcagcctcctaaaatgttgggattacaggggtaagccaatgcccctggcctctatgattcttgatatgcacatataaaggaccactaataaatgttttcacaaagtgagaacattaagataggccaagacaaaaagataggccaagacaagaacttcataaaacttctacttcagggcattaagaaatcagttgggtggggtgcggtggctcacgcttgtaatcccagcactttgggagactgaggcaggtggatcacgaggtcaggaaatcgagaccacggtgaaaccccgtctctactaaaaatacaaaaaaattagctgggcatggtggtgggcgcgtgtagtcccagctactcggagaggctgaggcaggagaatggcgtgaacccgggaggtggaggttgcagtgagccgagatcacgccactgca

SEQ ID NO: 6891 - DNA, 414 bp, Homo sapiens
ctctgccagtttatatgtacatatatttatgtaaaacattttctcccagctctttgccagctgttccacattttccagctgccacttcagtttgaaatgatggactgtctgcgtctccaagtcaaagaaccctttagtcaaaggtatggagggccggccgctgtgcaaatacatggcagtgccattagccgggctggtattattagttctaaaaaatacctcctgctccccttttcctctcctccctcttctctccagttaggctttccagagcacagtatatacactttgctgaaaattcgagtaattaggcctttccctcttaaatgtgatttttgtacagaatttggatgaggccgtttttttagatccctgaaatatgtgtctggtggaaataaattaacttttaaaaat

SEQ ID NO: 6892 - DNA, 482 bp, Homo sapiens
gcccatcctataaccattcataacaactcagattatagagacttgggtgaagtgttcatctttgaaggctggtcaaccccactgaagtagcagggactgaaagtagggaagggctgggtttccaaaggttaatctaagtgttgctacccaagggttgctgtgattcgaaaatcataactggtcaagtgtggtggctcatgcctctaatcccagtgctttgggaggttgggcagtaggattgtttgatgacaggagctcaaggccagactgggcatcattgcgagaccccaactcaaaaaaaagtagttaaaaagacattagccatgtatagtggcacctttagttctaggtactcaggatgctggggtgggaagattgcttcatcccaggagttggaggttacaggttacagtgagctatgatcatgccactgctttctagccttctagcctgtatgacagagaaaaagaccttgtctctga

SEQ ID NO: 6893 - DNA, 513 bp, Homo sapiens
aatggaaacaatggctccagtttggaatgcagtgtgttgcccaaggtgttcagcatgatgagttagcattcaacgcacaaagtactaactacaaaggaagccaaagctgccctgcaccatgaggttcagtgactttgatggtggtgatacaaatgatgcttgacaccaatgtgacctgactcaatcacttacccgtaatgtcttgctggatccctgtcccacccagcctttcttcacatgcagctaaaggggcttgacttctgcctacaatcaaccctaacccaggaactagactacttctcttcttacagatgatttaagtcctactttacagatgatgaaactgaggtccagagaaactcagtgcaagtctaagatcaaagaattctagaaatctagtgtctggacttccagtccaatataaccaaggatggatgaataaagagactccatttataatgttaatcttatgctaataagtgaaagtgaatgtaaatctgtgcatacagaatg

SEQ ID NO: 6894 - DNA, 311 bp, Homo sapiens
aggaggtggatctagcccccatcctaactcgctgagttcctctcttggagagagtactgctaccagaactgttgtccaggcaggtgctcctgtaaagatatgctaaacatcgaagtgtggaatgatcccacatttctacttggctgaacatgtggcactggttgcaagtggcctcatggctgttgacaggaaaaaagaaaaagcaggccaggtgcagtggctcacacctatcatccccacacttttggaggccgaggcaggtggattgcttgaacccagcctgaacaacatagagagatcctatctctaca

SEQ ID NO: 6895 - DNA, 701 bp, Homo sapiens
  misc_feature (632)..(632): n is a, c, g, or t
aaacattcagctctaaagaaataatcacaaagcacctcggtgcctgatttttgcaaggcagtccttgccggaggatcgggcattcgtgcacattcacccggagaccgtgctgtccacttccagaaggggaggaagggcagcgctcagaagcacgcccagactgtctccagccctgctagtccacgcctggctgaggccatctcgcctgctcagcccccaagttcccccacagtccatgtccctgggttatgaatgtcacctggtgtctgtcagatccccaccccattgttcttgtcaatgagcaggagtggggtggacctgccatcctgcgaatcctttacagcctgcagcgctccctgccaactcttcacaaccattagcacccactaacaatccatttcccctggagctcttcactctaaagatagaagaccaaaaaatagaagtgtcctcatttctcacagtactacaggaggaggtgagaaccgatgcatccgtgcatcttaggagaatctcatttcagacctcggctttgagtgcgcctcctgctcagtcagccctctccctcgctgcaggttgacgtgggtcagacagtgcgcagtcaggcagcctgattttcggttctggggttnggtccaagattgaccgggtcccttttgttcacttgccccctcctgtgcaaccccctgggtttgtctgcc

SEQ ID NO: 6896 - DNA, 636 bp, Homo sapiens
aaacattcagctctaaagaaataatcacaaagcacctcggtgcctgatttttgcaaggcagtccttgccggaggatcgggcattcgtgcacattcacccggagaccgtgctgtccacttccagaaggggaggaagggcagcgctcagaagcacgcccagactgtctccagccctgctagtccacgcctggctgaggccatctcgcctgctcagcccccaagttcccccacagtccatgtccctgggttatgaatgtcacctggtgtctgtcagatccccaccccattgttcttgtcaatgagcaggagtggggtggacctgccatcctgcgaatcctttacagcgggggagaaggctgggactggaatgtggggtgctctctaggaaagggggaccaccccagcagatgcagaattgcccagggaacactctggagcctgtgatccccaaaccggctggggaagagagcctgatttgagggggctgggggtttagataagaagattgagccaaagcttgggagcagtgaatgctggagctaaggagctggaaccccgaggcagagggggcctttgggagttatttaacagagaaatgcattaagaagggattttagggacccagcagccaaccggg

SEQ ID NO: 6897 - DNA, 417 bp, Homo sapiens
gagaggccagctgccatgtcatgaagacactcaagaagccctgtgaagaggaagcaaggcctgccaacaacagccagcaccaactttccagccaagggattgagccatctcacagtggatcctccagcccccaccaagccttcatatgaccaaaccaataccaacatgtaactgtgacctcatgtgagtccccaagccagaatacccatctcctgtctcagaaatgatgagaaataataaatatatgtgctcacacacattaccatctaattttctacaatatatgtttatttccccactgtatataagatccaaggactgtttttttttttcactgctatattccaagaacctagaacaaatctggcatatggtaagtatacaataaatatctgttgaattaattaatgggaaaaa

SEQ ID NO: 6898 - DNA, 272 bp, Homo sapiens
tatggaggcagccctgttaccagtctctggtggttgccaaaacaaatccaaagggagagtttatttcgtgtctcttctaggtatctgtcttggagagttttgctgtgcagcttttaatttgccttagtaaaataatgagtaggttaacaataaaagttgttttgtaactttgaacatgacctaacaaaagtactaaaagttgtaagctcaggaaggaaaaataaaatacacgggaaaattttaacgtcactgaaattgtgaaactccgtctc

SEQ ID NO: 6899 - DNA, 433 bp, Homo sapiens
tagctctgtggcagctcagcccggccatgcttccttctcagctggagcaggaattttggttgctaggatcctggcgagcctcagccggctactcctttctctccctcctccaccagccactgagtccttgtgccccgacccagccccagccggggtctgtgggtggggcagcactcccttctggttcttagttgccatggaccttaccctctggcaggactcctgctgtcctctcctgcagggtggatggcaaaatgggaccagcacagctcctgatacaatgaaccctgggctctaatcccagccctgccatgtataagctgtgtgacctcaagtatgtgaactcatctctctgtgcctgtttactccctaacatgcaactaacagtagtactctaccctaagagctgttgtgaggctttcctcaccttttt

SEQ ID NO: 6900 - DNA, 584 bp, Homo sapiens
acagtgtaatttggtggagtatacacattttggcaaacagttggcattaactgtatttgccaatattaaatttagtaacagatcaggcacttggccagcaggtgaggaaagtttggtcatgtaaaaaactgaatacaggaggagaaagaaaaccagattcgttaagcacccacaatatcagatccattaatttttttatctccataattcctcagtgaagttggtaagtattcctgctctacaggtggggagtctgaggtctaggtattttaggtaaattggcttggattacatgtatgtctaataaatccagatggatattaccacacagcttatctatactatttctagtaaactgcatcctgtgataaacttgtagagaatcttactgttgtttttctttatactcttccctggttcccataaatccaaggatttaaagcctcaaaaaaaacatgcctttcggccaggcacggtggctcacgcgtgtaatcccagcactttgggaggctgaggcaagcggatcacttgaggtcaggagtttgagaccagactgtccaacatggtgaaaccccatctctact

SEQ ID NO: 6901 - DNA, 384 bp, Homo sapiens
  misc_feature (30)..(31): n is a, c, g, or t
attgaaaggggaaaattgagagagctagcnntccatggtcttggtcttccataaaggggaactgggacatccactggaggcggctctgatgcacaagtaattacatttgcacagacacagatgacacagacagtggatggagtcgctctggtgctcacagaggagcccgcctccagccaacacctgaatgtcactgggttggggggaataaaacctgtttggacctgatgatctctttgggggaagaagtgagcccacatttgagaccctttccggagagccagccactccagcagatgggaagactggcttgtgcccggtaccggaaagaaaccagatggtgactcaaacgaacacagacccaaggcctcacgcacagatttc

SEQ ID NO: 6902 - DNA, 2407 bp, Homo sapiens
  misc_feature (1766)..(1766): n is a, c, g, or t
gcgcatctgccggatggtgcggaggcggcacggctccggagccggagcgcacgcgcgccgagctcgagaaactgatccagcagcgcgccgtgctccgggtcagctacaaggggagcatctcgtaccgcaacgcggcgcgcgtccagccgccccggcgcggagccaccccgccggccccgccgcgcgcccccggcggcgcggcgcggcccgtgagcctgcgggaagtcgtgcgctacctcgggggcagcggcggcgccggcggtcgcctaacccgcggccgcgtgcaggggctgctggaggaggaggcggcggctcgaggccgtctggagcgcacccgtctcggagcgcttgcgctgccccgcggggacaggcccggacgggcgccgccggccgccagcgcccgcccgtctcgcagcaagagaggtggagaagagcgagtacttgagaaagaagaggaagaagatgatgatgaagatgaagatgaagaagatgatgtgtcagagggctctgaagtgcccgagagtgaccgtcctgcaggtgcccagcaccaccagcttaacggcgagcggggacctcagagtgccaaggagagggtcaaggagtggaccccctgcggaccgcaccagggccaggatgaagggcgggggccagccccgggcagcggcacccgccaggtgttctccatggcagccatgaacaaggaagggggaacagcttctgttgccaccgggccagactccccgtcccccgtgcctttgcccccaggcaaaccagccctacctggggccgacgggaccccctttggctgtcctcccgggcgcaaagagaagccatctgatcccgtcgagtggaccgtgatggatgtcgtcgaatattttactgaggctggattcccggagcaggcgacagctttccaagagcaggaaattgatggcaaatctttgctgctcatgcagcgcacagatgtgctcaccggcctgtccatccgcctcgggccagccctgaaaatctacgagcaccacatcaaggtgcttcagcaaggccactttgaggatgatgaccccgatggcttcttaggctgagcgcccagcctcacccctgccccagcccattccggcccccatctcacccaagatcccccagagtccaggagctggacggggacaccctcagccctcataacagattccaaggagagggcaccctcttgtccttatctttgccccttgtgtctgtctcacacacatctgctcctcagcacgtcggtgtggggaggggattgctccttaaaccccaggtggctgaccctccccacccagtccaggacattttaggaaaaaaaaaatgaaatgtggggggcttctcatctccccaagatcctcttccgttcagccagatgtttcctgtataaatgtttggatctgcctgtttattttggtgggtggtctttcctccctcccctaccacccatgccccccttctcagtctgcccctggcctccagcccctaggggactagctgggttggggttcctcgggccttttctctcctccctcttttctttctgttgattgtcgctccagctggctgtattgctttttaatattgcaccgaaggttttttaaataaaattttaaaaaaagaaaaagggaaaaaaaaaaaaaaaaaataaaaaaaagaaaaaaacagaaaaaaaaaaagaagaagagggggggcggcgcgcgctaataaagatatttctctccgaagtggggggcgccccccangtcttacccggtcctccccgcgttgttttttttattaaagcagcgaggggccgccctatttagaggagagcgttatatatatatctaactcgcatagcgcgccttgggcgcccgcggtttttttatccacaacacgcgctcgcgagggcgagtgggagacacacacgcgctgagctctatcgtgcgtgaggatacatctcttgatggggggagacgcgagcgacaccccccctatattgtgtctggcgggggggggggagcgagaaccacatatctgtgtgaggcggacaccacaccaatttctcttctctatatgagacgagatctattttatactaacgtactctctctcatgagggcggcgatcataacatatcatctaaaatcactctcttttttctgagcaacggcgtggtggtgatactccgcagtagtgcggtgtgccgctcaaaacaccacccatctatgtcgcggtcgctgccttatgattttgtggttgcgctgcggcgcgatcctctgcgttagaaaacaacctgttttttgtcggggcatctacagcgcggggcaaggtttattgtgactatcttgcgttcgcaaaaatctatatttttttcttcccgcgcgcggcggacgccttcccc

SEQ ID NO: 6903 - DNA, 2345 bp, Homo sapiens
  misc_feature (1704)..(1704): n is a, c, g, or t
gcgcatctgccggatggtgcggaggcggcacggctccggagccggagcgcacgcgcgccgagctcgagaaactgatccagcagcgcgccgtgctccgggtcagctacaaggggagcatctcgtaccgcaacgcggcgcgcgtccagccgccccggcgcggagccaccccgccggccccgccgcgcgcccccggcggcgcggcgcggcccgtgagcctgcgggaagtcgtgcgctacctcgggggcagcggcggcgccggcggtcgcctaacccgcggccgcgtgcaggggctgctggaggaggaggcggcggctcgaggccgtctggagcgcacccgtctcggagcgcttgcgctgccccgcggggacaggcccggacgggcgccgccggccgccagcgcccgcccgtctcgcagcaagagaggtggagaagagcgagtacttgagaaagaagaggaagaagatgatgatgaagatgaagatgaagaagatgatgtgtcagagggctctgaagtgcccgagagtgaccgtcctgcaggtgcccagcaccaccagcttaacggcgagcggggacctcagagtgccaaggagagggtcaaggagtggaccccctgcggaccgcaccagggccaggatgaagggcgggggccagccccgggcagcggcacccgccaggtgttctccatggcagccatgaacaaggaagggggaacagcttctgttgccaccgggccagactccccgtcccccgtgcctttgcccccaggcaaaccagccctacctggggccgacgggaccccctttggctgtcctcccgggcgcaaagagaagccatctgatcccgtcgagtggaccgtgatggatgtcgtcgaatattttactgaggctggattcccggagcaggcgacagctttccaagagcaggaaattgatggcaaatctttgctgctcatgcagcgcacagatgtgctcaccggcctgtccatccgcctcgggccagccctgaaaatctacgagcaccacatcaaggtgcttcagcaaggccactttgaggatgatgaccccgatggcttcttaggctgagcgcccagcctcacccctgccccagcccattccggcccccatctcacccaagatcccccagagtccaggagctggacggggacaccctcagccctcataacagattccaaggagagggcaccctcttgtccttatctttgccccttgtgtctgtctcacacacatctgctcctcagcacgtcggtgtggggaggggattgctccttaaaccccaggtggctgaccctccccacccagtccaggacattttaggaaaaaaaaaatgaaatgtggggggcttctcatctccccaagatcctcttccgttcagccagatgtttcctgtataaatgtttggatctgcctgtttattttggtgggtggtctttcctccctcccctaccacccatgccccccttttctctcctccctcttttctttctgttgattgtcgctccagctggctgtattgctttttaatattgcaccgaaggttttttaaataaaattttaaaaaaagaaaaagggaaaaaaaaaaaaaaaaaataaaaaaaagaaaaaaacagaaaaaaaaaaagaagaagagggggggcggcgcgcgctaataaagatatttctctccgaagtggggggcgccccccangtcttacccggtcctccccgcgttgttttttttattaaagcagcgaggggccgccctatttagaggagagcgttatatatatatctaactcgcatagcgcgccttgggcgcccgcggtttttttatccacaacacgcgctcgcgagggcgagtgggagacacacacgcgctgagctctatcgtgcgtgaggatacatctcttgatggggggagacgcgagcgacaccccccctatattgtgtctggcgggggggggggagcgagaaccacatatctgtgtgaggcggacaccacaccaatttctcttctctatatgagacgagatctattttatactaacgtactctctctcatgagggcggcgatcataacatatcatctaaaatcactctcttttttctgagcaacggcgtggtggtgatactccgcagtagtgcggtgtgccgctcaaaacaccacccatctatgtcgcggtcgctgccttatgattttgtggttgcgctgcggcgcgatcctctgcgttagaaaacaacctgttttttgtcggggcatctacagcgcggggcaaggtttattgtgactatcttgcgttcgcaaaaatctatatttttttcttcccgcgcgcggcggacgccttcccc

SEQ ID NO: 6904 - DNA, 2503 bp, Homo sapiens
  misc_feature (200)..(200): n is a, c, g, or t
  misc_feature (204)..(204): n is a, c, g, or t
  misc_feature (1862)..(1862): n is a, c, g, or t
agcggggggagccggggaggggggcgccgcgctgggagggaggcagcgcgcacggtgcagccgggccgggcgggaggcatggcggggccaccggccctatccccgccggagacggcggcggccgccaccacggcggccgccgcgctcgtcgtccgccgcttccccgcactaccaagagtggatcctggacaccatcgacncgcngcggtttcctgcgggctcggtgcgtggtgaccttggcaagtgattgaatctcccggagcctcagtttcctccgctgtaaacgcggtttaataacagtagcgaccccttggggttgttgagcgagtttagtaagatttggttgtcgagggctttagttaacacagagcctggcacggagtgaatgcgtaaaagttagtccgtattgttcttaaaggtggaatcggttcctcctccccaccgcccggacgccacagtcagggtctgggattagaacagctactaattttgcatgcttctctcctcggctccagagaggtggagaagagcgagtacttgagaaagaagaggaagaagatgatgatgaagatgaagatgaagaagatgatgtgtcagagggctctgaagtgcccgagagtgaccgtcctgcaggtgcccagcaccaccagcttaacggcgagcggggacctcagagtgccaaggagagggtcaaggagtggaccccctgcggaccgcaccagggccaggatgaagggcgggggccagccccgggcagcggcacccgccaggtgttctccatggcagccatgaacaaggaagggggaacagcttctgttgccaccgggccagactccccgtcccccgtgcctttgcccccaggcaaaccagccctacctggggccgacgggaccccctttggctgtcctcccgggcgcaaagagaagccatctgatcccgtcgagtggaccgtgatggatgtcgtcgaatattttactgaggctggattcccggagcaggcgacagctttccaagagcaggaaattgatggcaaatctttgctgctcatgcagcgcacagatgtgctcaccggcctgtccatccgcctcgggccagccctgaaaatctacgagcaccacatcaaggtgcttcagcaaggccactttgaggatgatgaccccgatggcttcttaggctgagcgcccagcctcacccctgccccagcccattccggcccccatctcacccaagatcccccagagtccaggagctggacggggacaccctcagccctcataacagattccaaggagagggcaccctcttgtccttatctttgccccttgtgtctgtctcacacacatctgctcctcagcacgtcggtgtggggaggggattgctccttaaaccccaggtggctgaccctccccacccagtccaggacattttaggaaaaaaaaaatgaaatgtggggggcttctcatctccccaagatcctcttccgttcagccagatgtttcctgtataaatgtttggatctgcctgtttattttggtgggtggtctttcctccctcccctaccacccatgccccccttctcagtctgcccctggcctccagcccctaggggactagctgggttggggttcctcgggccttttctctcctccctcttttctttctgttgattgtcgctccagctggctgtattgctttttaatattgcaccgaaggttttttaaataaaattttaaaaaaagaaaaagggaaaaaaaaaaaaaaaaaataaaaaaaagaaaaaaacagaaaaaaaaaaagaagaagagggggggcggcgcgcgctaataaagatatttctctccgaagtggggggcgccccccangtcttacccggtcctccccgcgttgttttttttattaaagcagcgaggggccgccctatttagaggagagcgttatatatatatctaactcgcatagcgcgccttgggcgcccgcggtttttttatccacaacacgcgctcgcgagggcgagtgggagacacacacgcgctgagctctatcgtgcgtgaggatacatctcttgatggggggagacgcgagcgacaccccccctatattgtgtctggcgggggggggggagcgagaaccacatatctgtgtgaggcggacaccacaccaatttctcttctctatatgagacgagatctattttatactaacgtactctctctcatgagggcggcgatcataacatatcatctaaaatcactctcttttttctgagcaacggcgtggtggtgatactccgcagtagtgcggtgtgccgctcaaaacaccacccatctatgtcgcggtcgctgccttatgattttgtggttgcgctgcggcgcgatcctctgcgttagaaaacaacctgttttttgtcggggcatctacagcgcggggcaaggtttattgtgactatcttgcgttcgcaaaaatctatatttttttcttcccgcgcgcggcggacgccttcccc

SEQ ID NO: 6905 - DNA, 2215 bp, Homo sapiens
  misc_feature (200)..(200): n is a, c, g, or t
  misc_feature (204)..(204): n is a, c, g, or t
  misc_feature (1574)..(1574): n is a, c, g, or t
agcggggggagccggggaggggggcgccgcgctgggagggaggcagcgcgcacggtgcagccgggccgggcgggaggcatggcggggccaccggccctatccccgccggagacggcggcggccgccaccacggcggccgccgcgctcgtcgtccgccgcttccccgcactaccaagagtggatcctggacaccatcgacncgcngcgcccgcccgtctcgcagcaagagaggtggagaagagcgagtacttgagaaagaagaggaagaagatgatgatgaagatgaagatgaagaagatgatgtgtcagagggctctgaagtgcccgagagtgaccgtcctgcaggtgcccagcaccaccagcttaacggcgagcggggacctcagagtgccaaggagagggtcaaggagtggaccccctgcggaccgcaccagggccaggatgaagggcgggggccagccccgggcagcggcacccgccaggtgttctccatggcagccatgaacaaggaagggggaacagcttctgttgccaccgggccagactccccgtcccccgtgcctttgcccccaggcaaaccagccctacctggggccgacgggaccccctttggctgtcctcccgggcgcaaagagaagccatctgatcccgtcgagtggaccgtgatggatgtcgtcgaatattttactgaggctggattcccggagcaggcgacagctttccaagagcaggaaattgatggcaaatctttgctgctcatgcagcgcacagatgtgctcaccggcctgtccatccgcctcgggccagccctgaaaatctacgagcaccacatcaaggtgcttcagcaaggccactttgaggatgatgaccccgatggcttcttaggctgagcgcccagcctcacccctgccccagcccattccggcccccatctcacccaagatcccccagagtccaggagctggacggggacaccctcagccctcataacagattccaaggagagggcaccctcttgtccttatctttgccccttgtgtctgtctcacacacatctgctcctcagcacgtcggtgtggggaggggattgctccttaaaccccaggtggctgaccctccccacccagtccaggacattttaggaaaaaaaaaatgaaatgtggggggcttctcatctccccaagatcctcttccgttcagccagatgtttcctgtataaatgtttggatctgcctgtttattttggtgggtggtctttcctccctcccctaccacccatgccccccttctcagtctgcccctggcctccagcccctaggggactagctgggttggggttcctcgggccttttctctcctccctcttttctttctgttgattgtcgctccagctggctgtattgctttttaatattgcaccgaaggttttttaaataaaattttaaaaaaagaaaaagggaaaaaaaaaaaaaaaaaataaaaaaaagaaaaaaacagaaaaaaaaaaagaagaagagggggggcggcgcgcgctaataaagatatttctctccgaagtggggggcgccccccangtcttacccggtcctccccgcgttgttttttttattaaagcagcgaggggccgccctatttagaggagagcgttatatatatatctaactcgcatagcgcgccttgggcgcccgcggtttttttatccacaacacgcgctcgcgagggcgagtgggagacacacacgcgctgagctctatcgtgcgtgaggatacatctcttgatggggggagacgcgagcgacaccccccctatattgtgtctggcgggggggggggagcgagaaccacatatctgtgtgaggcggacaccacaccaatttctcttctctatatgagacgagatctattttatactaacgtactctctctcatgagggcggcgatcataacatatcatctaaaatcactctcttttttctgagcaacggcgtggtggtgatactccgcagtagtgcggtgtgccgctcaaaacaccacccatctatgtcgcggtcgctgccttatgattttgtggttgcgctgcggcgcgatcctctgcgttagaaaacaacctgttttttgtcggggcatctacagcgcggggcaaggtttattgtgactatcttgcgttcgcaaaaatctatatttttttcttcccgcgcgcggcggacgccttcccc

SEQ ID NO: 6906 - DNA, 1517 bp, Homo sapiens
  misc_feature (876)..(876): n is a, c, g, or t
ataagcggtccggaatggcgacattcaagagcagaaattgatggcaaatctttgctgctcatgcagcgcacagatgtgctcaccggcctgtccatccgcctcgggccagccctgaaaatctacgagcaccacatcaaggtgcttcagcaaggccactttgaggatgatgaccccgatggcttcttaggctgagcgcccagcctcacccctgccccagcccattccggcccccatctcacccaagatcccccagagtccaggagctggacggggacaccctcagccctcataacagattccaaggagagggcaccctcttgtccttatctttgccccttgtgtctgtctcacacacatctgctcctcagcacgtcggtgtggggaggggattgctccttaaaccccaggtggctgaccctccccacccagtccaggacattttaggaaaaaaaaaatgaaatgtggggggcttctcatctccccaagatcctcttccgttcagccagatgtttcctgtataaatgtttggatctgcctgtttattttggtgggtggtctttcctccctcccctaccacccatgccccccttctcagtctgcccctggcctccagcccctaggggactagctgggttggggttcctcgggccttttctctcctccctcttttctttctgttgattgtcgctccagctggctgtattgctttttaatattgcaccgaaggttttttaaataaaattttaaaaaaagaaaaagggaaaaaaaaaaaaaaaaaataaaaaaaagaaaaaaacagaaaaaaaaaaagaagaagagggggggcggcgcgcgctaataaagatatttctctccgaagtggggggcgccccccangtcttacccggtcctccccgcgttgttttttttattaaagcagcgaggggccgccctatttagaggagagcgttatatatatatctaactcgcatagcgcgccttgggcgcccgcggtttttttatccacaacacgcgctcgcgagggcgagtgggagacacacacgcgctgagctctatcgtgcgtgaggatacatctcttgatggggggagacgcgagcgacaccccccctatattgtgtctggcgggggggggggagcgagaaccacatatctgtgtgaggcggacaccacaccaatttctcttctctatatgagacgagatctattttatactaacgtactctctctcatgagggcggcgatcataacatatcatctaaaatcactctcttttttctgagcaacggcgtggtggtgatactccgcagtagtgcggtgtgccgctcaaaacaccacccatctatgtcgcggtcgctgccttatgattttgtggttgcgctgcggcgcgatcctctgcgttagaaaacaacctgttttttgtcggggcatctacagcgcggggcaaggtttattgtgactatcttgcgttcgcaaaaatctatatttttttcttcccgcgcgcggcggacgccttcccc

SEQ ID NO: 6907 - DNA, 1474 bp, Homo sapiens
  misc_feature (833)..(833): n is a, c, g, or t
tggaatccagtgaggaatcagacattattattcaactcagcgtgcaacagcatatcccgttgtgatactgagaaatgctttcctcttgagacctttgggaggacagccatttacacaagaattccctgcattcacttttgaattacctgttagctgtagaactcagccaggatcttggcctcgtgccggcacgaggccaagatcccccagagtccaggagctggacggggacaccctcagccctcataacagattccaaggagagggcaccctcttgtccttatctttgccccttgtgtctgtctcacacacatctgctcctcagcacgtcggtgtggggaggggattgctccttaaaccccaggtggctgaccctccccacccagtccaggacattttaggaaaaaaaaaatgaaatgtggggggcttctcatctccccaagatcctcttccgttcagccagatgtttcctgtataaatgtttggatctgcctgtttattttggtgggtggtctttcctccctcccctaccacccatgccccccttctcagtctgcccctggcctccagcccctaggggactagctgggttggggttcctcgggccttttctctcctccctcttttctttctgttgattgtcgctccagctggctgtattgctttttaatattgcaccgaaggttttttaaataaaattttaaaaaaagaaaaagggaaaaaaaaaaaaaaaaaataaaaaaaagaaaaaaacagaaaaaaaaaaagaagaagagggggggcggcgcgcgctaataaagatatttctctccgaagtggggggcgccccccangtcttacccggtcctccccgcgttgttttttttattaaagcagcgaggggccgccctatttagaggagagcgttatatatatatctaactcgcatagcgcgccttgggcgcccgcggtttttttatccacaacacgcgctcgcgagggcgagtgggagacacacacgcgctgagctctatcgtgcgtgaggatacatctcttgatggggggagacgcgagcgacaccccccctatattgtgtctggcgggggggggggagcgagaaccacatatctgtgtgaggcggacaccacaccaatttctcttctctatatgagacgagatctattttatactaacgtactctctctcatgagggcggcgatcataacatatcatctaaaatcactctcttttttctgagcaacggcgtggtggtgatactccgcagtagtgcggtgtgccgctcaaaacaccacccatctatgtcgcggtcgctgccttatgattttgtggttgcgctgcggcgcgatcctctgcgttagaaaacaacctgttttttgtcggggcatctacagcgcggggcaaggtttattgtgactatcttgcgttcgcaaaaatctatatttttttcttcccgcgcgcggcggacgccttcccc

SEQ ID NO: 6908 - DNA, 2131 bp, Homo sapiens
  misc_feature (1490)..(1490): n is a, c, g, or t
cggacggcgtgggtcgacccacgcgtcgggcggcggctcgaggccgtctggagcgcacccgtctcggagcgcttgcgctgccccgcggggacaggcccggacgggcgccgccggccgccagcgcccgcccgtctcgcagcaagagaggtggagaagagcgagtacttgagaaagaagaggaagaagatgatgatgaagatgaagatgaagaagatgatgtgtcagagggctctgaagtgcccgagagtgaccgtcctgcaggtgcccagcaccaccagcttaacggcgagcggggacctcagagtgccaaggagagggtcaaggagtggaccccctgcggaccgcaccagggccaggatgaagggcgggggccagccccgggcagcggcacccgccaggtgttctccatggcagccatgaacaaggaagggggaacagcttctgttgccaccgggccagactccccgtcccccgtgcctttgcccccaggcaaaccagccctacctggggccgacgggaccccctttggctgtcctcccgggcgcaaagagaagccatctgatcccgtcgagtggaccgtgatggatgtcgtcgaatattttactgaggctggattcccggagcaggcgacagctttccaagagcaggaaattgatggcaaatctttgctgctcatgcagcgcacagatgtgctcaccggcctgtccatccgcctcgggccagccctgaaaatctacgagcaccacatcaaggtgcttcagcaaggccactttgaggatgatgaccccgatggcttcttaggctgagcgcccagcctcacccctgccccagcccattccggcccccatctcacccaagatcccccagagtccaggagctggacggggacaccctcagccctcataacagattccaaggagagggcaccctcttgtccttatctttgccccttgtgtctgtctcacacacatctgctcctcagcacgtcggtgtggggaggggattgctccttaaaccccaggtggctgaccctccccacccagtccaggacattttaggaaaaaaaaaatgaaatgtggggggcttctcatctccccaagatcctcttccgttcagccagatgtttcctgtataaatgtttggatctgcctgtttattttggtgggtggtctttcctccctcccctaccacccatgccccccttctcagtctgcccctggcctccagcccctaggggactagctgggttggggttcctcgggccttttctctcctccctcttttctttctgttgattgtcgctccagctggctgtattgctttttaatattgcaccgaaggttttttaaataaaattttaaaaaaagaaaaagggaaaaaaaaaaaaaaaaaataaaaaaaagaaaaaaacagaaaaaaaaaaagaagaagagggggggcggcgcgcgctaataaagatatttctctccgaagtggggggcgccccccangtcttacccggtcctccccgcgttgttttttttattaaagcagcgaggggccgccctatttagaggagagcgttatatatatatctaactcgcatagcgcgccttgggcgcccgcggtttttttatccacaacacgcgctcgcgagggcgagtgggagacacacacgcgctgagctctatcgtgcgtgaggatacatctcttgatggggggagacgcgagcgacaccccccctatattgtgtctggcgggggggggggagcgagaaccacatatctgtgtgaggcggacaccacaccaatttctcttctctatatgagacgagatctattttatactaacgtactctctctcatgagggcggcgatcataacatatcatctaaaatcactctcttttttctgagcaacggcgtggtggtgatactccgcagtagtgcggtgtgccgctcaaaacaccacccatctatgtcgcggtcgctgccttatgattttgtggttgcgctgcggcgcgatcctctgcgttagaaaacaacctgttttttgtcggggcatctacagcgcggggcaaggtttattgtgactatcttgcgttcgcaaaaatctatatttttttcttcccgcgcgcggcggacgccttcccc

SEQ ID NO: 6909 - DNA, 2036 bp, Homo sapiens
gcgcatctgccggatggtgcggaggcggcacggctccggagccggagcgcacgcgcgccgagctcgagaaactgatccagcagcgcgccgtgctccgggtcagctacaaggggagcatctcgtaccgcaacgcggcgcgcgtccagccgccccggcgcggagccaccccgccggccccgccgcgcgcccccggcggcgcggcgcggcccgtgagcctgcgggaagtcgtgcgctacctcgggggcagcggcggcgccggcggtcgcctaacccgcggccgcgtgcaggggctgctggaggaggaggcggcggctcgaggccgtctggagcgcacccgtctcggagcgcttgcgctgccccgcggggacaggcccggacgggcgccgccggccgccagcgcccgcccgtctcgcagcaagagaggtggagaagagcgagtacttgagaaagaagaggaagaagatgatgatgaagatgaagatgaagaagatgatgtgtcagagggctctgaagtgcccgagagtgaccgtcctgcaggtgcccagcaccaccagcttaacggcgagcggggacctcagagtgccaaggagagggtcaaggagtggaccccctgcggaccgcaccagggccaggatgaagggcgggggccagccccgggcagcggcacccgccaggtgttctccatggcagccatgaacaaggaagggggaacagcttctgttgccaccgggccagactccccgtcccccgtgcctttgcccccaggcaaaccagccctacctggggccgacgggaccccctttggctgtcctcccgggcgcaaagagaagccatctgatcccgtcgagtggaccgtgatggatgtcgtcgaatattttactgaggctggattcccggagcaggcgacagctttccaagagcaggaaattgatggcaaatctttgctgctcatgcagcgcacagatgtgctcaccggcctgtccatccgcctcgggccagccctgaaaatctacgagcaccacatcaaggtgcttcagcaaggccactttgaggatgatgaccccgatggcttcttaggctgagcgcccagcctcacccctgccccagcccattccggcccccatctcacccaagatcccccagagtccaggagctggacggggacaccctcagccctcataacagattccaaggagagggcaccctcttgtccttatctttgccccttgtgtctgtctcacacacatctgctcctcagcacgtcggtgtggggaggggattgctccttaaaccccaggtggctgaccctccccacccagtccaggacattttaggaaaaaaaaaaaaaaaaaaaaccctcgagttttttattgtttattatcttttttcgtgggcgctgaggcgaacttcgatcacactgtatcacaacatcgtctgacctaagactgctctttggtctctccaccattattagagagtagataaactagctccaccacacagcttatgggcgcccccacggaggtgacatcagagagaggaaaacattacacacacagcgccaacgaagcccgccagacaacacacggtcacgcaaggaggggcacagcagcacacagagtcatacaccgcgtgtggaacacagagacaccgagcacaacatgcagaacgaagagacgcgtgcgcaaatagtctacctacgagaagatctacacagtatacacacaagcaaccacgcacaatctaccgccaaaggaaacacagcacaaaaaaatcgatacaggagccacaagatgatgaggcgagggcacaacgcccagcagagacagaataaatctatcctaataacaaaacccgccccaagagagacgagacaaactaacagagcgcagggggggcacccaaccaaccaacgccacaatgcgagcgacgacacgccggggcagcaacaatcaacacaacagaaaataagatgatgacagcccgctatatataaacaacccgcaactttggaggaaagaaataaccgggcgagg

SEQ ID NO: 6910 - DNA, 1697 bp, Homo sapiens
  misc_feature (1056)..(1056): n is a, c, g, or t
gcgcatctgccggatggtgcggaggcggcacggctccggagccggagcgcacgcgcgccgagctcgagaaactgatccagcagcgcgccgtgctccgggtcagctacaaggggagcatctcgtaccgcaacgcggcgcgcgtccagccgccccggcgcggagccaccccgccggccccgccgcgcgcccccggcggcgcggcgcggcccgtgagcctgcgggaagtcgtgcgctacctcgggggcagcggcggcgccggcggtcgcctaacccgcggccgcgtgcaggggctgctggaggaggaggcggcggctcgaggccgtctggagcgcacccgtctcggagcgcttgcgctgccccgcggggacaggcccggacgggcgccgccggccgccagcgcccgcccgtctcgcagcaagagaggtggagaagagcgagtacttgagaaagaagaggaagaagatgatgatgaagatgaagatgaagaagatgatgtgtcagagggctctgaagtgcccgagagtgaccgtcctgcaggtgcccagcaccaccagcttaacggcgagcggggacctcagagtgccaaggagagggtcaaggagtggaccccctgcggaccgcaccagggccaggatgaagggcgggggccagccccgggcagcggcacccgccaggtgttcagccagatgtttcctgtataaatgtttggatctgcctgtttattttggtgggtggtctttcctccctcccctaccacccatgccccccttctcagtctgcccctggcctccagcccctaggggactagctgggttggggttcctcgggccttttctctcctccctcttttctttctgttgattgtcgctccagctggctgtattgctttttaatattgcaccgaaggttttttaaataaaattttaaaaaaagaaaaagggaaaaaaaaaaaaaaaaaataaaaaaaagaaaaaaacagaaaaaaaaaaagaagaagagggggggcggcgcgcgctaataaagatatttctctccgaagtggggggcgccccccangtcttacccggtcctccccgcgttgttttttttattaaagcagcgaggggccgccctatttagaggagagcgttatatatatatctaactcgcatagcgcgccttgggcgcccgcggtttttttatccacaacacgcgctcgcgagggcgagtgggagacacacacgcgctgagctctatcgtgcgtgaggatacatctcttgatggggggagacgcgagcgacaccccccctatattgtgtctggcgggggggggggagcgagaaccacatatctgtgtgaggcggacaccacaccaatttctcttctctatatgagacgagatctattttatactaacgtactctctctcatgagggcggcgatcataacatatcatctaaaatcactctcttttttctgagcaacggcgtggtggtgatactccgcagtagtgcggtgtgccgctcaaaacaccacccatctatgtcgcggtcgctgccttatgattttgtggttgcgctgcggcgcgatcctctgcgttagaaaacaacctgttttttgtcggggcatctacagcgcggggcaaggtttattgtgactatcttgcgttcgcaaaaatctatatttttttcttcccgcgcgcggcggacgccttcccc

SEQ ID NO: 6911 - DNA, 602 bp, Homo sapiens
ggtatcattcttctgagccctcttcatgtgcattgtcttggcatttaaagtaggagtttgtgtgtacatgaacacgagtatatgtacacatgtgtgatcttcccatttacatttaagatcctcgagcagtgtttttcagctttgggctcctctggtctctggggattacgaagaggtagtaatggcttcattacagcttatcacagggacactgctagagatgtaaaaatgagtgagacatggtccctatctataggaaattcagagtgtgggacgggctccagtcatagaaacagaatttcaatacggtatgctgagagctgtaatacagacacgcacaggatgcagctgtaggtgtgtgcgcttcaggaggtcttcttcagaaagtttatcactggtcacatgtttatcccacaacgggttttcacattttaattagaatgtcagctttttctcttggttggcatttttttcaactcagtatgatcattctagatgtttcctgctgatgaaatttgattgacattttgtctttgatttaaaaaaataaaaaaaatgatgaagttgtaagctaataaatgcagtttggcagatgaaatctt

SEQ ID NO: 6912 - DNA, 416 bp, Homo sapiens
ccatgttggcccggctggtctcgaactcctgatggcaaggtgatctgcctgcctcagcctcccaaagtgctgggattacaggcatgagccactgagcccggctgtttttttgtgttttttttgttgttgtttgtttgttttttttttgagacagagtcttgctctgtcgcccaggctggagtgccagtggcgcgatttcagctcactcaggagtgagccaccacacctggcctgtgattggctctattttgagtgattacgtgtaaatcatctagaaccagctctgagcaatggcgttgcggtgtccctccctccccgctggggccataccagcccctctccactgggagcccaagttgccaatgactgtggccaaactcccccatttttgtctgtatcctgctctctttaggtta

SEQ ID NO: 6913 - DNA, 445 bp, Homo sapiens
tattttgtgttaatcacctaatatcattcctttggattaaggtctcttttggaccataaacagaagtatcttaccagctatgcaagtctatttgtgtcagtatccttagtgtttttgatttatattttaaaataaaattcctgtttttctatggctatttaattgaaacagtatgatactccttcctaacactggctaaaataaagcaatttctcttccttctctgttctaattttctcccatttttcttcaacaggctattctagggaagagtatttttctaggtctcaaagcaattttatttaaaaaattgtatgtgaagaatttatttgacagctgaggtttcaagaacatttaaaagtactgtatgatagtgtattttctgaagttttactttttaaataatcattgttctatgtaaaggtatacttacataggtccccta

SEQ ID NO: 6914 - DNA, 2821 bp, Homo sapiens
gcggccctgcccccggcacggcccccaggtgcgctccttctccggctgcttgtagcactggtctcactgtccccgccgtcagccaccggttccttatccgtctcattccccattgtggcttggctgagccggtcgccaggcctcgctgtcctcctttaccttcctctctcctcagcggccgtactttgcgccgtacctcacctggcctgcaggatgaagaaccccatgctggaggtggtgtctttactactggagaagctgctcctcatctccaacttcacgctctttagttcgggcgccgcgggcaaggacaaagggaggaacagtttttatgaaaccagctctttccaccgaggcgacgtgctggaggtgccccggacccacctgacccactatggcatctacctaggagacaaccgtgttgcccacatgatgcccgacatcctgttggccctgacagacgacatggggcgcacgcagaaggtggtctccaacaagcgtctcatcctgggcgttattgtcaaagtggccagcatccgcgtggacacagtggaggacttcgcctacggagctaacatcctggtcaatcacctggacgagtccctccagaaaaaggcactgctcaacgaggaggtggcgcggagggctgaaaagctgctgggctttaccccctacagcctgctgtggaacaactgcgagcacttcgtgacctactgcagatatggcaccccgatcagtccccagtccgacaagttttgtgagactgtgaagataattattcgtgatcagagaagtgttcttgcttcagcagtcttgggattggcgtctatagtctgtacgggcttggtatcatacactacccttcctgcaatttttattccattcttcctatggatggctggctaacttcatacccccatgtcagtgtgtgtattctgtatgtaaatatgtttatatttatagagcatcaatcaatataagcattattgagaaaaatgtgacccgtaacactgtgttctggataaaaatgtgattaggaatcacgcaaagtgcttactgtgtaagcccaagaacaaaggctttctgaatcttctcaggcagttcagatttaaagcaccatccaaaccttggaaatacgacagggtgtggcagaattcagcaatatgagaaaccagcccctaaaatgatagccacaagcagattaattgtgttttttttctcctgtaatccttgtactgttcggctgaatttgaagattggaagcttatattgagaccagtaactttactgtaaatttactttgtttcattgaaaaaagcaaattgataaacatattaaactggaagaattttcaaatcgaaaacatgtttgatgactggggaaaaaataagctcgataatctatttttttcatgtagtatataagtcaagaatgttttattgtcattatgtgaaaccaatattggcaaatagtactttaatgatgaagcaaatgaccagaaattatagaaatctgagttttcctgtaaaaatagcactatagtatcacttgaacaatttgatttggctttacttactaggaagcctggaattcattatttttttccttttatgtgcccactgtggctactttaaatcactctgagaggtaaatggatataggattgaagttatgtgggtatttggccatgtgtgtgtgaaataaatatgtagatagtcacatatacaccagactgagagataaaattgttcttgattgccttattatccatccatacctaggtgtggtccattaatagggtatctgtagaggtgaatgtaaaagtaagtccaatctattttcttatgtcattgaatttgtagtgttaacttgcatatatgttattggatgggttgtcttttaaagcatttactaatgtactctgaaatttttaaaagccttcagatttgttttctagtcacttttttccatatcatttctaattatagtttatatccttaaaagaaggatgccacagtagtatgtaaaacccaaacaagtagaacccaagcaaataaaattattgaaaataattttaaagtggcttagtactgccagtcatgtaaattgattctgctgagggtcttataagaattgagatataacaatggtaaaacaagcattcaagcacttttacaaaattaccaaattcttaaaatcgaagccacagctagacttgcatttcaggtattaaaattgctttcttaactgtcaagaatcacaaaataacaaatcatattatgagtgaatatggggagggcggggcaatcagtcaatgataatctgaacaaattttaagagcagattttagattaataatgttttatcaccactaatttgcccacaacaaactcagtatttaatttttcaaattaaatattaaattatttaagtattttaaataattaaaacattaaatggcaacaccatagaatataggtgttctctggacctattctaaccacttaaaattatcttaagtatgcatacataaaagcaaccactatgagaactaccgtgttagtggtttttcacttactgtatattacccttgtaggaatagttgaaggagattcgatttctgaaaaaatatagtgtcctcaaataattgaattttttttgcaaactttagttattacaggcagcaaaaaccactgtctgaaactaaatctgtgttcaaagatgaagacccctcattaaaagccaaggacgttcttaagattggaactgacataattagtcttgacttacttcattaaagcaagattcaattccttgttca

SEQ ID NO: 6915 - DNA, 2364 bp, Homo sapiens
ggcaatgcaggaccgcttccagagattccagagctgcccagtattgctgcagaagtcatcaggtgtccacccacagtgtagttcaaacgacaaaggcacgtagaagaatacagaggacttgtgcatcaaacatctcagttaatcctcagaacaatttgagtgttcccatttgactacttgaggtgacatagccaataagagctggagccaggactcagacataggccatcatttctaagtaaaattatttttctaaggaaaacattacacatattagaaggatgcattcctcagggttttgtgagactgtgaagataattattcgtgatcagagaagtgttcttgcttcagcagtcttgggattggcgtctatagtctgtacgggcttggtatcatacactacccttcctgcaatttttattccattcttcctatggatggctggctaacttcatacccccatgtcagtgtgtgtattctgtatgtaaatatgtttatatttatagagcatcaatcaatataagcattattgagaaaaatgtgacccgtaacactgtgttctggataaaaatgtgattaggaatcacgcaaagtgcttactgtgtaagcccaagaacaaaggctttctgaatcttctcaggcagttcagatttaaagcaccatccaaaccttggaaatacgacagggtgtggcagaattcagcaatatgagaaaccagcccctaaaatgatagccacaagcagattaattgtgttttttttctcctgtaatccttgtactgttcggctgaatttgaagattggaagcttatattgagaccagtaactttactgtaaatttactttgtttcattgaaaaaagcaaattgataaacatattaaactggaagaattttcaaatcgaaaacatgtttgatgactggggaaaaaataagctcgataatctatttttttcatgtagtatataagtcaagaatgttttattgtcattatgtgaaaccaatattggcaaatagtactttaatgatgaagcaaatgaccagaaattatagaaatctgagttttcctgtaaaaatagcactatagtatcacttgaacaatttgatttggctttacttactaggaagcctggaattcattatttttttccttttatgtgcccactgtggctactttaaatcactctgagaggtaaatggatataggattgaagttatgtgggtatttggccatgtgtgtgtgaaataaatatgtagatagtcacatatacaccagactgagagataaaattgttcttgattgccttattatccatccatacctaggtgtggtccattaatagggtatctgtagaggtgaatgtaaaagtaagtccaatctattttcttatgtcattgaatttgtagtgttaacttgcatatatgttattggatgggttgtcttttaaagcatttactaatgtactctgaaatttttaaaagccttcagatttgttttctagtcacttttttccatatcatttctaattatagtttatatccttaaaagaaggatgccacagtagtatgtaaaacccaaacaagtagaacccaagcaaataaaattattgaaaataattttaaagtggcttagtactgccagtcatgtaaattgattctgctgagggtcttataagaattgagatataacaatggtaaaacaagcattcaagcacttttacaaaattaccaaattcttaaaatcgaagccacagctagacttgcatttcaggtattaaaattgctttcttaactgtcaagaatcacaaaataacaaatcatattatgagtgaatatggggagggcggggcaatcagtcaatgataatctgaacaaattttaagagcagattttagattaataatgttttatcaccactaatttgcccacaacaaactcagtatttaatttttcaaattaaatattaaattatttaagtattttaaataattaaaacattaaatggcaacaccatagaatataggtgttctctggacctattctaaccacttaaaattatcttaagtatgcatacataaaagcaaccactatgagaactaccgtgttagtggtttttcacttactgtatattacccttgtaggaatagttgaaggagattcgatttctgaaaaaatatagtgtcctcaaataattgaattttttttgcaaactttagttattacaggcagcaaaaaccactgtctgaaactaaatctgtgttcaaagatgaagacccctcattaaaagccaaggacgttcttaagattggaactgacataattagtcttgacttacttcattaaagcaagattcaattccttgttca

SEQ ID NO: 6916 - DNA, 2673 bp, Homo sapiens
atcacagaatgtagccacctttcttaacggtccgggaaaccagaggtctctccagctactcagggatgaagaaccccatgctggaggtggtgtctttactactggagaagctgctcctcatctccaacttcacgctctttagttcgggcgccgcgggcaaggacaaagggaggaacagtttttatgaaaccagctctttccaccgaggcgacgtgctggaggtgccccggacccacctgacccactatggcatctacctaggagacaaccgtgttgcccacatgatgcccgacatcctgttggccctgacagacgacatggggcgcacgcagaaggtggtctccaacaagcgtctcatcctgggcgttattgtcaaagtggccagcatccgcgtggacacagtggaggacttcgcctacggagctaacatcctggtcaatcacctggacgagtccctccagaaaaaggcactgctcaacgaggaggtggcgcggagggctgaaaagctgctgggctttaccccctacagcctgctgtggaacaactgcgagcacttcgtgacctactgcagatatggcaccccgatcagtccccagtccgacaagttttgtgagactgtgaagataattattcgtgatcagagaagtgttcttgcttcagcagtcttgggattggcgtctatagtctgtacgggcttggtatcatacactacccttcctgcaatttttattccattcttcctatggatggctggctaacttcatacccccatgtcagtgtgtgtattctgtatgtaaatatgtttatatttatagagcatcaatcaatataagcattattgagaaaaatgtgacccgtaacactgtgttctggataaaaatgtgattaggaatcacgcaaagtgcttactgtgtaagcccaagaacaaaggctttctgaatcttctcaggcagttcagatttaaagcaccatccaaaccttggaaatacgacagggtgtggcagaattcagcaatatgagaaaccagcccctaaaatgatagccacaagcagattaattgtgttttttttctcctgtaatccttgtactgttcggctgaatttgaagattggaagcttatattgagaccagtaactttactgtaaatttactttgtttcattgaaaaaagcaaattgataaacatattaaactggaagaattttcaaatcgaaaacatgtttgatgactggggaaaaaataagctcgataatctatttttttcatgtagtatataagtcaagaatgttttattgtcattatgtgaaaccaatattggcaaatagtactttaatgatgaagcaaatgaccagaaattatagaaatctgagttttcctgtaaaaatagcactatagtatcacttgaacaatttgatttggctttacttactaggaagcctggaattcattatttttttccttttatgtgcccactgtggctactttaaatcactctgagaggtaaatggatataggattgaagttatgtgggtatttggccatgtgtgtgtgaaataaatatgtagatagtcacatatacaccagactgagagataaaattgttcttgattgccttattatccatccatacctaggtgtggtccattaatagggtatctgtagaggtgaatgtaaaagtaagtccaatctattttcttatgtcattgaatttgtagtgttaacttgcatatatgttattggatgggttgtcttttaaagcatttactaatgtactctgaaatttttaaaagccttcagatttgttttctagtcacttttttccatatcatttctaattatagtttatatccttaaaagaaggatgccacagtagtatgtaaaacccaaacaagtagaacccaagcaaataaaattattgaaaataattttaaagtggcttagtactgccagtcatgtaaattgattctgctgagggtcttataagaattgagatataacaatggtaaaacaagcattcaagcacttttacaaaattaccaaattcttaaaatcgaagccacagctagacttgcatttcaggtattaaaattgctttcttaactgtcaagaatcacaaaataacaaatcatattatgagtgaatatggggagggcggggcaatcagtcaatgataatctgaacaaattttaagagcagattttagattaataatgttttatcaccactaatttgcccacaacaaactcagtatttaatttttcaaattaaatattaaattatttaagtattttaaataattaaaacattaaatggcaacaccatagaatataggtgttctctggacctattctaaccacttaaaattatcttaagtatgcatacataaaagcaaccactatgagaactaccgtgttagtggtttttcacttactgtatattacccttgtaggaatagttgaaggagattcgatttctgaaaaaatatagtgtcctcaaataattgaattttttttgcaaactttagttattacaggcagcaaaaaccactgtctgaaactaaatctgtgttcaaagatgaagacccctcattaaaagccaaggacgttcttaagattggaactgacataattagtcttgacttacttcattaaagcaagattcaattccttgttca

SEQ ID NO: 6917 - DNA, 350 bp, Homo sapiens
ggagcatttcagatttcggatttttgtatttgggatgctcagcccttatattatttcagctagtaaccaggtcaaaacttcgttatcttacttgtttataacctagccagccctttataattttttctctacctcccttttttcttctggtttgacatttttagttcagattattagtttttattgaacatcagcagagtgatgaaaaacagattttttaaaactattcttcagaaattgatagcaatctgcctactcctgtttatgactgagaactgtacatacatttcactcactgtagttaatattgagctcccccagacatagataatccactttggatttttctg

SEQ ID NO: 6918 - DNA, 836 bp, Homo sapiens
agaaacgaaacaaatgaagtgccctagcttattgtctggaggcatagcacagagaagggaaacccaaagagagcccagtagtcttgctgagctgaagagttaagacagaattagcaaaacagagtacctgaaggtaggtactgcacagacaggaggtagctgcacagagagaaagctccagaggtccacaggggggttctcccaagcctttggctgagtattcatctgcatgtactgtgacatctttgagactggggaaagagtcactgtggaaaggagtaggtggagcaatttccagacctcacacagggctgggaatagtttgtatttccactaagcagagtaagagtaacaagaccttctaccatactgagcatcaagtccttagaagcatattgcctcagtaatagagccaagttagcccttgacaaaaggctgatttggatcttccttgataaagcttaaaagcaagccttaacgggttctaattaatttcagctaaactaaatagttcccagaaaaaaaagcctcaacatatttaaaggaataatttaaaaaaaatacagcacccaacaacataaaacttcagatgtttgacattcaccaaaaaattaccacgcccaaaaatatgtccagtaactgggggaaaatacagtcaacagaaacagtccctgaagagacccagataatagataaggacattaaaatatactccaaggctgagtgcagtagttcacctctgtaacaccagcactttgggaggccaaggcaggcggattccttgagcttaggagtttgaaaccaccctggacaacatggtgaaaccctgtctcaaa

SEQ ID NO: 6919 - DNA, 438 bp, Homo sapiens
ttttttttttagggtaagggccatgtcttatgtacctttgtattctaatcactccaagcacaaatctttccatacttaaacattttgacgcacgagcacaaaaaaacccagattgtaaaagcaaactgaagacttgcgaagaatagtttccccttaaaatgtaactgcatgtgcacaggatgaagagttagaatctgaaaatcagctgggcactagccatgcctgccctgctacctttccatagccagaatcacagcagcatgaactgcactcaagctccagaccaagaaactctaattaccttcagcgagcaagtaaactgacagtaacagctattgcaggaggcaaaagcagctacaaccttcaattccaggcacggaggtgggaataaggaaagaagtcgggatggaactgttggtttcattaggttgttggttt

SEQ ID NO: 6920 - DNA, 328 bp, Homo sapiens
acgaggatgggctgcatgcatgctgagtaaacatgcctgttacatgcaacccatgttcactttggggtggagacaacaggcatgtttactcagcatgcatgcagcaggatcccttcacaaatattcagagctccccctattccctgttgaatatgtatatgtggccagccagatcaacgtaaatcactattcgccctcccctccctggaaacctacttttcgggtttcagcaggaagctatgcctcccagtctgtcagaatggccacttgcaggctgtaaccctttataaaaaaataaaatctcctttctaaatttaaaaaaaaaaaa

SEQ ID NO: 6921 - DNA, 2341 bp, Homo sapiens
tgcagctccacggggactggcctctctgcacggctgtgtacacctgagcgagacgctcagtcgctctctaaagccgcttctgcggatgacagacacggagataaacgtgagaggtggcccaccacgacttgccctcctttgcccgggtttgcccctcgctgcggaggctgttctacatctggcccttggagcaggccggctgacagcgtggtaaaggaagatttctgcgggagggcggccagtgcaaaacaattccctgaccgggaatcgaacccgggccgtggcgctttcagcaccgaatcctagccactagacaaccatgcagatgcggaaagctgctttctctcccttcttcgacctgaagcgacactttcctgtgctctaggaggacttgggtcttgtgagagtctccctttgctcctggagtcgtctcacaaggccgttcactccctgctttcttcaaaaaaagaacctgcaggcgacacaccaagggctccacgagggagtcctgagtactggagcgagttgcggccacgcggccgcagctcaccactggcctagagatgccctttgccaggcggcagcaactgacaagatggtcgcgggtcgccgggtccggagccgcccaccaggttgccaggaggaggcgggagcggggaggcgcccgaggtgagacgggggcaccctctgcatcataaaggacccagaccccggcaccctcaacatcataaggaatcagacggatgcggaaaccgaggcgggctggataggaaactctttccaggaaggctccggggcactcaactggtctccaaccttcccctgcaacctgtgacgcctgccattttcccattttaggcgatggcaacgcaacccctccgtttgctctgggcaaaacttcgagagttccctctgaagctggagctttttcctcagatccaagatccaattggtcaccaattcgtgatttccgtcggccaagtgcgtgggcattgatctacacgcgagtttctccacctctgccgaatggctacttcggggtgggggaggggccctcccaccgtggattgcaaggtgtttagcagcatctgtctcctccgctgactagacacatgccagggggataacattctccctcccgcttcccccagccgcggcctagtgtcccagcggggttgggagaggcatgtgagggcgaagttgccccctgttgagaaccattgctgcgcgtagtccttctctctgaacttgtgcagaggactctccaggtgaaggctcaagggtggatccagctcgagacaccctcgctccccctcacagtcggaccttaggatttaggctttaacatctccacatcatgagattcgaaacctttaggtcttgtcttccgttctgtcctccaaatcggcctcttccgagcctgttgaccagggccagccgggcagagggctgggctcgctcaacgaggctcctctcgcacctcctggagcttcaggcttctttccgttgcagagaagctttatgggccaattcgttcggcatccccgggggcaggtgcgcggtgcgcggggaagaagaggatttgactgcggttctccacccccggcgcccaacctccaccccggtgcgcgcgctcttccaggctcctgctggtcccacttgccaggagttaggtctcaggtcagcctgagctcctgagacgcccaggcccggaaagacacgtaggggaaaccatctgctcacttctgtcctgtccggaagggatccctttctgacgggaaagaaaggcgctaaacaagcactggccttgagataagcaatgctgaagcacttgcagctcacctattaccataaactgactgagccctccctacacaagccgtaactactgctttgattggacaagagactgatttcagtagttttctcttgataagagaccactggccgtgggcgggttctggacagtttacagaagctatgcacttgattgcctttgtgtccctgcttcaccttttgaagcatagggcctaattataatgtatttaaatgttgtctccaccccaaagtgaacatgggttgcatgtaacaggcatgtttactcagcatgcatgcagcaggatcccttcacaaatattcagagctccccctattccctgttgaatatgtatatgtggccagccagatcaacgtaaatcactattcgccctcccctccctggaaacctacttttcgggtttcagcaggaagctatgcctcccagtctgtcagaatggccacttgcaggctgtaaccctttataaaaaaataaaatctcctttctaaatttaaaaaaaaaaaa

SEQ ID NO: 6922 - DNA, 2484 bp, Homo sapiens
tgcagctccacggggactggcctctctgcacggctgtgtacacctgagcgagacgctcagtcgctctctaaagccgcttctgcggatgacagacacggagataaacgtgagaggtggcccaccacgacttgccctcctttgcccgggtttgcccctcgctgcggaggctgttctacatctggcccttggagcaggccggctgacagcgtggtaaaggaagatttctgcgggagggcggccagtgcaaaacaattccctgaccgggaatcgaacccgggccgtggcgctttcagcaccgaatcctagccactagacaaccatgcagatgcggaaagctgctttctctcccttcttcgacctgaagcgacactttcctgtgctctaggaggacttgggtcttgtgagagtctccctttgctcctggagtcgtctcacaaggccgttcactccctgctttcttcaaaaaaagaacctgcaggcgacacaccaagggctccacgagggagtcctgagtactggagcgagttgcggccacgcggccgcagctcaccactggcctagagatgccctttgccaggcggcagcaactgacaagatggtcgcgggtcgccgggtccggagccgcccaccaggttgccaggaggaggcgggagcggggaggcgcccgaggtgagacgggggcaccctctgcatcataaaggacccagaccccggcaccctcaacatcataaggaatcagacggatgcggaaaccgaggcgggctggataggaaactctttccaggaaggctccggggcactcaactggtctccaaccttcccctgcaacctgtgacgcctgccattttcccattttaggcgatggcaacgcaacccctccgtttgctctgggcaaaacttcgagagttccctctgaagctggagctttttcctcagatccaagatccaattggtcaccaattcgtgatttccgtcggccaagtgcgtgggcattgatctacacgcgagtttctccacctctgccgaatggctacttcggggtgggggaggggccctcccaccgtggattgcaaggtgtttagcagcatctgtctcctccgctgactagacacatgccagggggataacattctccctcccgcttcccccagccgcggcctagtgtcccagcggggttgggagaggcatgtgagggcgaagttgccccctgttgagaaccattgctgcgcgtagtccttctctctgaacttgtgcagaggactctccaggtgaaggctcaagggtggatccagctcgagacaccctcgctccccctcacagtcggaccttaggatttaggctttaacatctccacatcatgagattcgaaacctttaggtcttgtcttccgttctgtcctccaaatcggcctcttccgagcctgttgaccagggccagccgggcagagggctgggctcgctcaacgaggctcctctcgcacctcctggagcttcaggcttctttccgttgcagagaagctttatgggccaattcgttcggcatccccgggggcaggtgcgcggtgcgcggggaagaagaggatttgactgcggttctccacccccggcgcccaacctccaccccggtgcgcgcgctcttccaggctcctgctggtcccacttgccaggagttaggtctcaggtcagcctgagctcctgagacgcccaggcccggaaagacacgtaggggaaaccatctgctcacttctgtcctgtccggaagggatccctttctgacgggaaagaaaggcggtgagtcctgtcctgttgagtaggcggaagagagatcaaagggaagacaagaaaaatcctgtgagttttcaggatctaaagttaccatgaggtcgacctaacctcctctggaggtcctcccggtcctcccgtggctgtcgaagctaaacaagcactggccttgagataagcaatgctgaagcacttgcagctcacctattaccataaactgactgagccctccctacacaagccgtaactactgctttgattggacaagagactgatttcagtagttttctcttgataagagaccactggccgtgggcgggttctggacagtttacagaagctatgcacttgattgcctttgtgtccctgcttcaccttttgaagcatagggcctaattataatgtatttaaatgttgtctccaccccaaagtgaacatgggttgcatgtaacaggcatgtttactcagcatgcatgcagcaggatcccttcacaaatattcagagctccccctattccctgttgaatatgtatatgtggccagccagatcaacgtaaatcactattcgccctcccctccctggaaacctacttttcgggtttcagcaggaagctatgcctcccagtctgtcagaatggccacttgcaggctgtaaccctttataaaaaaataaaatctcctttctaaatttaaaaaaaaaaaa

SEQ ID NO: 6923 - DNA, 214 bp, Homo sapiens
aagagctagagctgacactcggcgatgagctaagacgctgtttcagagcgtttgggtcctctgaggccccttgaccaggtgagcggaccctggagctgggccccgggctggggcggaactgcggcctaggggcctagggagcagctgcttcccggcgggtgcagagaatcttccctcgaccgagggggcggggtccgtagcggaggtgtcggcc

SEQ ID NO: 6924 - DNA, 2700 bp, Homo sapiens
aagagctagagctgacactcggcgatgagctaagacgctgtttcagagcgtttgggtcctctgaggccccttgaccaggagtgtctctgaagatacagtccaaagaaagttctccaaaacaaggagaacagtctgaagctggggatggcaacagcattggtgagtgcccattccctggctcccctgaatctgaagaaggaggggcttcgggtagtgagggaggatcactactctacttgggaacagggattcaagctgcaaggaaacagtaaaggccttggacaggagccattgtgcaaacaattcaggcagttgcgttatgaagagaccacaggacctcgagaagcactaagtcggctccgggagctctgtcaacagtggctacagcccgagacccataccaaggagcagatcctggagctgctggtgctggagcagtttctgatcatcctgcctaaggagctccaggcccgggtgcaggagcatcacccagagagcagggaggacgtggttgttgttctggaggatttgcagctggatcttggagaaacaggacaacaggtggacccagaccagccaaagaaacaaaaaatacttgtggaggagatggcccctctgaaaggagtacaggaacagcaggttcggcatgagtgtgaagttacaaagcctgagaaagagaagggtgaggagacaaggattgagaatgggaagcttattgtagtaacagactcttgtggaagagtagagtcatctgggaaaatatctgaacccatggaggctcataatgagggctctaacttggaaaggcatcaggccaagcccaaagagaagattgagtataaatgctcagaacgtgagcagagattcatccagcacttggacctgattgaacatgcgagtacacacacgggaaagaaactctgcgagtctgatgtgtgtcagagttccagtcttacaggacataagaaagtcctctctagagagaaaggtcatcagtgtcatgagtgtgggaaagcctttcagaggagttcacacctcgtcagacatcagaaaatccatcttggtgagaagccttatcagtgcaatgagtgtggcaaagtctttagccagaatgcaggccttttggaacatctcagaattcatactggagagaaaccttatctatgtatccattgtggaaaaaattttaggcgcagctctcaccttaatcgacatcagagaattcacagtcaggaggagccctgtgagtgcaaggagtgtggaaaaacctttagtcaggccttactcctcacccaccatcagagaatccatagtcactccaaaagccatcaatgtaacgagtgtggaaaagctttcagtttgacctcagaccttattcgacaccacagaattcatactggagaaaaacctttcaagtgtaacatatgccagaaagccttccgactaaactcacaccttgctcagcatgtaagaatccacaatgaagaaaaaccctatcagtgtagtgaatgtggagaagccttcaggcaaaggtcaggtctttttcaacatcagagatatcaccacaaagacaaactggcttgatgaggtgttctctccttgtagaacatcagagaaggcacattgactagcaaacagcactttaggaaaagtcaccgtagcccactgtggcatcagaaaattcttgggggctgagttggaggctccctgcctctattctctctcctttgctttccttgaagtcagctttggaccacaataatttcactgtagatgatatgctaggatcaaagttaaacagcattcttcactgcaggacatctcagagcatgtaacataactgcatgattatatactctaagcaatagagagcttcatgactgagtaagagttttgaagtcagcagtgaatcaagtgcccacagatttgcaggcttaagcagaacaagggaagattgatatttttggatatgctatagcagctttctcctatgaaataaaactgatgatgtttggaagtatactactctcaaaggtgtctttaaagtacaggttaatggtgaacattttcccccagtggcttcacctcattcctcccactggccttaccccttccttccccagtggaagcattttcaaaagcaaagataattttcgctggtgaacttcagaacttgccttcagggttagcttcatgtaattttaccatttcccatccccattccccaccacattatgtcaagattcaagttataaattaacgttttacttagactttgaaagagatttcatgagtaatttgaatgaaccttgctgaattaatctgaatagcaactgtctgacttgataactccagtgccagtatagtggctgctgcatagacactattcagtaaatgtctgatgaaagaaattggactttttccctttaatactgatgatgcaattttgaaatgttgcttgttctggaatacttcggaagttaaacaataaagtcagcttggagaggagatcatgatctttatactgtgaatagcagaatgtcacagatgaagaatattaaaattaggggcgtccactccaaaacatatcaccagagtgacaacttcagccctcagcctctgcaatccatatatatcctggtcttgggagtccatagaatactgtttccttctaataaaggtttcaaacaaaaaaaagca

SEQ ID NO: 6925 - DNA, 2288 bp, Homo sapiens
tggtaaacagagtacaaccttctgctgcatatttttcatccattcagcgcaattttaagtagatattaaaggagtgtctctgaagatacagtccaaagaaagttctccaaaacaaggagaacagtctgaagctggggatggcaacagcattggacccagaccagccaaagaaacaaaaaatacttgtggaggagatggcccctctgaaaggagtacaggaacagcaggttcggcatgagtgtgaagttacaaagcctgagaaagagaagggtgaggagacaaggattgagaatgggaagcttattgtagtaacagactcttgtggaagagtagagtcatctgggaaaatatctgaacccatggaggctcataatgagggctctaacttggaaaggcatcaggccaagcccaaagagaagattgagtataaatgctcagaacgtgagcagagattcatccagcacttggacctgattgaacatgcgagtacacacacgggaaagaaactctgcgagtctgatgtgtgtcagagttccagtcttacaggacataagaaagtcctctctagagagaaaggtcatcagtgtcatgagtgtgggaaagcctttcagaggagttcacacctcgtcagacatcagaaaatccatcttggtgagaagccttatcagtgcaatgagtgtggcaaagtctttagccagaatgcaggccttttggaacatctcagaattcatactggagagaaaccttatctatgtatccattgtggaaaaaattttaggcgcagctctcaccttaatcgacatcagagaattcacagtcaggaggagccctgtgagtgcaaggagtgtggaaaaacctttagtcaggccttactcctcacccaccatcagagaatccatagtcactccaaaagccatcaatgtaacgagtgtggaaaagctttcagtttgacctcagaccttattcgacaccacagaattcatactggagaaaaacctttcaagtgtaacatatgccagaaagccttccgactaaactcacaccttgctcagcatgtaagaatccacaatgaagaaaaaccctatcagtgtagtgaatgtggagaagccttcaggcaaaggtcaggtctttttcaacatcagagatatcaccacaaagacaaactggcttgatgaggtgttctctccttgtagaacatcagagaaggcacattgactagcaaacagcactttaggaaaagtcaccgtagcccactgtggcatcagaaaattcttgggggctgagttggaggctccctgcctctattctctctcctttgctttccttgaagtcagctttggaccacaataatttcactgtagatgatatgctaggatcaaagttaaacagcattcttcactgcaggacatctcagagcatgtaacataactgcatgattatatactctaagcaatagagagcttcatgactgagtaagagttttgaagtcagcagtgaatcaagtgcccacagatttgcaggcttaagcagaacaagggaagattgatatttttggatatgctatagcagctttctcctatgaaataaaactgatgatgtttggaagtatactactctcaaaggtgtctttaaagtacaggttaatggtgaacattttcccccagtggcttcacctcattcctcccactggccttaccccttccttccccagtggaagcattttcaaaagcaaagataattttcgctggtgaacttcagaacttgccttcagggttagcttcatgtaattttaccatttcccatccccattccccaccacattatgtcaagattcaagttataaattaacgttttacttagactttgaaagagatttcatgagtaatttgaatgaaccttgctgaattaatctgaatagcaactgtctgacttgataactccagtgccagtatagtggctgctgcatagacactattcagtaaatgtctgatgaaagaaattggactttttccctttaatactgatgatgcaattttgaaatgttgcttgttctggaatacttcggaagttaaacaataaagtcagcttggagaggagatcatgatctttatactgtgaatagcagaatgtcacagatgaagaatattaaaattaggggcgtccactccaaaacatatcaccagagtgacaacttcagccctcagcctctgcaatccatatatatcctggtcttgggagtccatagaatactgtttccttctaataaaggtttcaaacaaaaaaaagca

SEQ ID NO: 6926 - DNA, 2020 bp, Homo sapiens
aagagctagagctgacactcggcgatgagctaagacgctgtttcagagcgtttgggtcctctgaggccccttgaccaggagtgtctctgaagatacagtccaaagaaagttctccaaaacaaggagaacagtctgaagctggggatggcaacagcattggtgagtgcccattccctggctcccctgaatctgaagaaggaggggcttcgggtagtgagggaggatcactactctacttgggaacagggattcaagctgcaaggaaacagtaaaggccttggacaggagccattgtgcaaacaattcaggcagttgcgttatgaagagaccacaggacctcgagaagcactaagtcggctccgggagctctgtcaacagtggctacagcccgagacccataccaaggagcagatcctggagctgctggtgctggagcagtttctgatcatcctgcctaaggagctccaggcccgggtgcaggagcatcacccagagagcagggaggacgtggttgttgttctggaggatttgcagctggatcttggagaaacaggacaacaggtggacccagaccagccaaagaaacaaaaaatacttgtggaggagatggcccctctgaaaggagtacaggaacagcaggttcggcatgagtgtgaagttacaaagcctgagaaagagaagggtgaggagacaaggattgagaatgggaagcttattgtagtaacagactcttgtggaagagtagagtcatctgggaaaatatctgaacccatggaggctcataatgagggctctaacttggaaaggcatcaggccaagcccaaagagaagattgagtataaatgctcagaacgtgagcagagattcatccagcacttggacctgattgaacatgcgagtacacacacgggaaagaaactctgcgagtctgatgtgtgtcagagttccagtcttacaggacataagaaagtcctctctagagagaaaggtcatcagtgtcatgagtgtgggaaagcctttcagaggagttcacacctcgtcagacatcagaaaatccatcttggtgagaagccttatcagtgcaatgagtgtggcaaagtctttagccagaatgcaggccttttggaacatctcagaattcatactggagagaaaccttatctatgtatccattgtggaaaaaattttaggcgcagctctcaccttaatcgacatcagagaattcacagtcaggaggagccctgtgagtgcaaggagtgtggaaaaacctttagtcaggccttactcctcacccaccatcagagaatccatagtcactccaaaagccatcaatgtaacgagtgtggaaaagctttcagtttgacctcagaccttattcgacaccacagaattcatactggagaaaaacctttcaagtgtaacatatgccagaaagccttccgactaaactcacaccttgctcagcatgtaagaatccacaatgaagaaaaaccctatcagtgtagtgaatgtggagaagccttcaggcaaaggtcaggtctttttcaacatcagagatatcaccacaaagacaaactggcttgatgaggtgttctctccttgtagaacatcagagaaggcacattgactagcaaacagcactttaggaaaagtcaccgtagcccactgtggcatcagaaaattcttgggggctgagttggaggctccctgcctctattctctctcctttgctttccttgaagtcagctttggaccacaataatttcactgtagatgatatgctaggatcaaagttaaacagcattcttcactgcaggacatctcagagcatgtaacataactgcatgattatatactctaagcaatagagagcttcatgactgagtaagagttttgaagtcagcagtgaatcaagtgcccacagatttgcaggcttaagcagaacaagggaagattgatatttttggatatgctatagcagctttctcctatgaaataaaactgatgatgtttggaagta

SEQ ID NO: 6927 - DNA, 2295 bp, Homo sapiens
aagagctagagctgacactcggcgatgagctaagacgctgtttcagagcgtttgggtcctctgaggccccttgaccaggagtgtctctgaagatacagtccaaagaaagttctccaaaacaaggagaacagtctgaagctggggatggcaacagcattggacccagaccagccaaagaaacaaaaaatacttgtggaggagatggcccctctgaaaggagtacaggaacagcaggttcggcatgagtgtgaagttacaaagcctgagaaagagaagggtgaggagacaaggattgagaatgggaagcttattgtagtaacagactcttgtggaagagtagagtcatctgggaaaatatctgaacccatggaggctcataatgagggctctaacttggaaaggcatcaggccaagcccaaagagaagattgagtataaatgctcagaacgtgagcagagattcatccagcacttggacctgattgaacatgcgagtacacacacgggaaagaaactctgcgagtctgatgtgtgtcagagttccagtcttacaggacataagaaagtcctctctagagagaaaggtcatcagtgtcatgagtgtgggaaagcctttcagaggagttcacacctcgtcagacatcagaaaatccatcttggtgagaagccttatcagtgcaatgagtgtggcaaagtctttagccagaatgcaggccttttggaacatctcagaattcatactggagagaaaccttatctatgtatccattgtggaaaaaattttaggcgcagctctcaccttaatcgacatcagagaattcacagtcaggaggagccctgtgagtgcaaggagtgtggaaaaacctttagtcaggccttactcctcacccaccatcagagaatccatagtcactccaaaagccatcaatgtaacgagtgtggaaaagctttcagtttgacctcagaccttattcgacaccacagaattcatactggagaaaaacctttcaagtgtaacatatgccagaaagccttccgactaaactcacaccttgctcagcatgtaagaatccacaatgaagaaaaaccctatcagtgtagtgaatgtggagaagccttcaggcaaaggtcaggtctttttcaacatcagagatatcaccacaaagacaaactggcttgatgaggtgttctctccttgtagaacatcagagaaggcacattgactagcaaacagcactttaggaaaagtcaccgtagcccactgtggcatcagaaaattcttgggggctgagttggaggctccctgcctctattctctctcctttgctttccttgaagtcagctttggaccacaataatttcactgtagatgatatgctaggatcaaagttaaacagcattcttcactgcaggacatctcagagcatgtaacataactgcatgattatatactctaagcaatagagagcttcatgactgagtaagagttttgaagtcagcagtgaatcaagtgcccacagatttgcaggcttaagcagaacaagggaagattgatatttttggatatgctatagcagctttctcctatgaaataaaactgatgatgtttggaagtatactactctcaaaggtgtctttaaagtacaggttaatggtgaacattttcccccagtggcttcacctcattcctcccactggccttaccccttccttccccagtggaagcattttcaaaagcaaagataattttcgctggtgaacttcagaacttgccttcagggttagcttcatgtaattttaccatttcccatccccattccccaccacattatgtcaagattcaagttataaattaacgttttacttagactttgaaagagatttcatgagtaatttgaatgaaccttgctgaattaatctgaatagcaactgtctgacttgataactccagtgccagtatagtggctgctgcatagacactattcagtaaatgtctgatgaaagaaattggactttttccctttaatactgatgatgcaattttgaaatgttgcttgttctggaatacttcggaagttaaacaataaagtcagcttggagaggagatcatgatctttatactgtgaatagcagaatgtcacagatgaagaatattaaaattaggggcgtccactccaaaacatatcaccagagtgacaacttcagccctcagcctctgcaatccatatatatcctggtcttgggagtccatagaatactgtttccttctaataaaggtttcaaacaaaaaaaagca

SEQ ID NO: 6928 - DNA, 3030 bp, Homo sapiens
aagagctagagctgacactcggcgatgagctaagacgctgtttcagagcgtttgggtcctctgaggccccttgaccaggagtgtctctgaagatacagtccaaagaaagttctccaaaacaaggagaacagtctgaagctggggatggcaacagcattggtgagtgcccattccctggctcccctgaatctgaagaaggaggggcttcgggtagtgagggaggatcactactctacttgggaacagggattcaagctgcaaggaaacagtaaaggccttggacaggagccattgtgcaaacaattcaggcagttgcgttatgaagagaccacaggacctcgagaagcactaagtcggctccgggagctctgtcaacagtggctacagcccgagacccataccaaggagcagatcctggagctgctggtgctggagcagtttctgatcatcctgcctaaggagctccaggcccgggtgcaggagcatcacccagagagcagggaggacgtggttgttgttctggaggatttgcagctggatcttggagaaacaggacaacaggtggtaagggtcagatgtgctctttttcaggaatgcaggaattgagatctctggccagacaggtggacatgggctcatcagcggaaggagaattactaagctttgattcagtttttttccagtctagctgttaatttccttaggtcttacctcaaccttacctggcccttgcttggagaaaactgaatgtgcaccagattccccatcttcttttctttgcccctctggggtttctctttcttctcttttttaacacctaggtgttttactgaacagcagtttcctaaacccacatatatctaattatgcctccatatacctaattgtccctaggacccagaccagccaaagaaacaaaaaatacttgtggaggagatggcccctctgaaaggagtacaggaacagcaggttcggcatgagtgtgaagttacaaagcctgagaaagagaagggtgaggagacaaggattgagaatgggaagcttattgtagtaacagactcttgtggaagagtagagtcatctgggaaaatatctgaacccatggaggctcataatgagggctctaacttggaaaggcatcaggccaagcccaaagagaagattgagtataaatgctcagaacgtgagcagagattcatccagcacttggacctgattgaacatgcgagtacacacacgggaaagaaactctgcgagtctgatgtgtgtcagagttccagtcttacaggacataagaaagtcctctctagagagaaaggtcatcagtgtcatgagtgtgggaaagcctttcagaggagttcacacctcgtcagacatcagaaaatccatcttggtgagaagccttatcagtgcaatgagtgtggcaaagtctttagccagaatgcaggccttttggaacatctcagaattcatactggagagaaaccttatctatgtatccattgtggaaaaaattttaggcgcagctctcaccttaatcgacatcagagaattcacagtcaggaggagccctgtgagtgcaaggagtgtggaaaaacctttagtcaggccttactcctcacccaccatcagagaatccatagtcactccaaaagccatcaatgtaacgagtgtggaaaagctttcagtttgacctcagaccttattcgacaccacagaattcatactggagaaaaacctttcaagtgtaacatatgccagaaagccttccgactaaactcacaccttgctcagcatgtaagaatccacaatgaagaaaaaccctatcagtgtagtgaatgtggagaagccttcaggcaaaggtcaggtctttttcaacatcagagatatcaccacaaagacaaactggcttgatgaggtgttctctccttgtagaacatcagagaaggcacattgactagcaaacagcactttaggaaaagtcaccgtagcccactgtggcatcagaaaattcttgggggctgagttggaggctccctgcctctattctctctcctttgctttccttgaagtcagctttggaccacaataatttcactgtagatgatatgctaggatcaaagttaaacagcattcttcactgcaggacatctcagagcatgtaacataactgcatgattatatactctaagcaatagagagcttcatgactgagtaagagttttgaagtcagcagtgaatcaagtgcccacagatttgcaggcttaagcagaacaagggaagattgatatttttggatatgctatagcagctttctcctatgaaataaaactgatgatgtttggaagtatactactctcaaaggtgtctttaaagtacaggttaatggtgaacattttcccccagtggcttcacctcattcctcccactggccttaccccttccttccccagtggaagcattttcaaaagcaaagataattttcgctggtgaacttcagaacttgccttcagggttagcttcatgtaattttaccatttcccatccccattccccaccacattatgtcaagattcaagttataaattaacgttttacttagactttgaaagagatttcatgagtaatttgaatgaaccttgctgaattaatctgaatagcaactgtctgacttgataactccagtgccagtatagtggctgctgcatagacactattcagtaaatgtctgatgaaagaaattggactttttccctttaatactgatgatgcaattttgaaatgttgcttgttctggaatacttcggaagttaaacaataaagtcagcttggagaggagatcatgatctttatactgtgaatagcagaatgtcacagatgaagaatattaaaattaggggcgtccactccaaaacatatcaccagagtgacaacttcagccctcagcctctgcaatccatatatatcctggtcttgggagtccatagaatactgtttccttctaataaaggtttcaaacaaaaaaaagca

SEQ ID NO: 6929 - DNA, 2096 bp, Homo sapiens
aagagctagagctgacactcggcgatgagctaagacgctgtttcagagcgtttgggtcctctgaggccccttgaccaggtgaggagacaaggattgagaatgggaagcttattgtagtaacagactcttgtggaagagtagagtcatctgggaaaatatctgaacccatggaggctcataatgagggctctaacttggaaaggcatcaggccaagcccaaagagaagattgagtataaatgctcagaacgtgagcagagattcatccagcacttggacctgattgaacatgcgagtacacacacgggaaagaaactctgcgagtctgatgtgtgtcagagttccagtcttacaggacataagaaagtcctctctagagagaaaggtcatcagtgtcatgagtgtgggaaagcctttcagaggagttcacacctcgtcagacatcagaaaatccatcttggtgagaagccttatcagtgcaatgagtgtggcaaagtctttagccagaatgcaggccttttggaacatctcagaattcatactggagagaaaccttatctatgtatccattgtggaaaaaattttaggcgcagctctcaccttaatcgacatcagagaattcacagtcaggaggagccctgtgagtgcaaggagtgtggaaaaacctttagtcaggccttactcctcacccaccatcagagaatccatagtcactccaaaagccatcaatgtaacgagtgtggaaaagctttcagtttgacctcagaccttattcgacaccacagaattcatactggagaaaaacctttcaagtgtaacatatgccagaaagccttccgactaaactcacaccttgctcagcatgtaagaatccacaatgaagaaaaaccctatcagtgtagtgaatgtggagaagccttcaggcaaaggtcaggtctttttcaacatcagagatatcaccacaaagacaaactggcttgatgaggtgttctctccttgtagaacatcagagaaggcacattgactagcaaacagcactttaggaaaagtcaccgtagcccactgtggcatcagaaaattcttgggggctgagttggaggctccctgcctctattctctctcctttgctttccttgaagtcagctttggaccacaataatttcactgtagatgatatgctaggatcaaagttaaacagcattcttcactgcaggacatctcagagcatgtaacataactgcatgattatatactctaagcaatagagagcttcatgactgagtaagagttttgaagtcagcagtgaatcaagtgcccacagatttgcaggcttaagcagaacaagggaagattgatatttttggatatgctatagcagctttctcctatgaaataaaactgatgatgtttggaagtatactactctcaaaggtgtctttaaagtacaggttaatggtgaacattttcccccagtggcttcacctcattcctcccactggccttaccccttccttccccagtggaagcattttcaaaagcaaagataattttcgctggtgaacttcagaacttgccttcagggttagcttcatgtaattttaccatttcccatccccattccccaccacattatgtcaagattcaagttataaattaacgttttacttagactttgaaagagatttcatgagtaatttgaatgaaccttgctgaattaatctgaatagcaactgtctgacttgataactccagtgccagtatagtggctgctgcatagacactattcagtaaatgtctgatgaaagaaattggactttttccctttaatactgatgatgcaattttgaaatgttgcttgttctggaatacttcggaagttaaacaataaagtcagcttggagaggagatcatgatctttatactgtgaatagcagaatgtcacagatgaagaatattaaaattaggggcgtccactccaaaacatatcaccagagtgacaacttcagccctcagcctctgcaatccatatatatcctggtcttgggagtccatagaatactgtttccttctaataaaggtttcaaacaaaaaaaagca

SEQ ID NO: 6930 - DNA, 788 bp, Homo sapiens
gaaactcttgccatatatccatattcataatcattattcttcctgtgctaaaaagtacttctgaggatgaccttcattctcctatctaaattttagagtacttatgttgcaaccttctaagcccagtgatagtctgtggatgaaaggattaatattgcttagctttatgttggatttaagtgtaaatgtccatgattgtctctaacagagaagcaaatggaacccattttctcacatagaggtgcagggactgattgggtggctgcccttcagattataattgggctgaaagatgcagtatgttcagctaagaatacatcctggtgccagggagttttgtcccttaataatgttgctttgccatataagctttgcctcccagggagactctgagaatggggcagcagaatgagaaagaaaagggaaagagactgtgcttcagtttttgaaagatagagaaaattgctggcaattacttttagaagcagaaaatttgctatacagtttcatgtaaccataagcaagaacctgctttctcaattccttcccctgttccctcaacccttttggacagtctggtcctgagggtgcctttccatattacctttggctattgaaataaataattatttaaataaatgtttggaagttgctaggagattaaagttaaaggaaaggaagttaggaaccatgcagaggagcggtttttgagaaacaacaatctccggtttggggcataataggtgctcagtgagtatttgatgattagtactataatttataagcaa

SEQ ID NO: 6931 - DNA, 339 bp, Homo sapiens
caaaggatggatgtgatataagcacatcttaaatatgatggtgataccacatacttcatacctcatatgtgagatatatacataactcactaaaatattgaaactattccgatttttaattgtgggaagaagttaaggaattcattggcacacttaacagaaaaaaatcaatgttcattttaccatgtttcaaatagtacttgtgtagctaaaaccaattcctagtataataatgttaaaataggagtagaaacacaatggccaggctcagtggctcacacttgtaatcccagcactttgggaggctgagatggaggatcacttgaacctgtctcaaaa

SEQ ID NO: 6932 - DNA, 387 bp, Homo sapiens
gaggtcatcttgcaaactaaaatgaaaaatggtcagataaatttaaacttttgtgttctcacaatttagctctgtgccaggcactttaaaggcaatcagtaaatatttgttaaacgaatgaaaagtagatttctttcagtttttgtgctgagagtttaagtgaaagtaagccgtttgctttatgtgatgcttagatgcttagaattttaggctcttattgctggaaaaggcctttaagatctagtccaggttttataaaagcgtcttgtgggccatcactggaagacagagttgggcaacagcaagaagaggcttaagcgagtgaaagtggctcatcctgcttccctcactcccttccaaatacccctgagtgggcattcaactctt

SEQ ID NO: 6933 - DNA, 6733 bp, Homo sapiens
atgggcttcttgcccaagcttctcctcctggcctcattcttcccagcaggccaggcctcatggggcgtctccagtccccaggacgtgcagggtgtgaaggggtcttgcctgcttatcccctgcatcttcagcttccctgccgacgtggaggtgcccgacggcatcacggccatctggtactacgactactcgggccagcggcaggtggtgagccactcggcggaccccaagctggtggaggcccgcttccgcggccgcaccgagttcatggggaaccccgagcacagggtgtgcaacctgctgctgaaggacctgcagcccgaggactctggttcctacaacttccgcttcgagatcagtgaggtcaaccgctggtcagatgtgaaaggcaccttggtcacagtaacagaggagcccagggtgcccaccattgcctccccggtggagcttctcgagggcacagaggtggacttcaactgctccactccctacgtatgcctgcaggagcaggtcagactgcagtggcaaggccaggaccctgctcgctctgtcaccttcaacagccagaagtttgagcccaccggcgtcggccacctggagaccctccacatggccatgtcctggcaggaccacggccggatcctgcgctgccagctctccgtggccaatcacagggctcagagcgagattcacctccaagtgaagtatgcccccaagggtgtgaagatcctcctcagcccctcggggaggaacatccttccaggtgagctggtcacactcacctgccaggtgaacagcagctaccctgcagtcagttccattaagtggctcaaggatggggtacgcctccaaaccaagactggtgtgctgcacctgccccaggcagcctggagcgatgctggcgtctacacctgccaagctgagaacggcgtgggctctttggtctcaccccccatcagcctccacatcttcatggctgaggtccaggtgagcccagcaggtcccatcctggagaaccagacagtgacactagtctgcaacacacccaatgaggcacccagtgatctccgctacagctggtacaagaaccatgtcctgctggaggatgcccactcccataccctccggctgcacttggccactagggctgatactggcttctacttctgtgaggtgcagaacgtccatggcagcgagcgctcgggccctgtcagcgtggtagtcaaccacccgcctctcactccagtcctgacagccttcctggagacccaggcgggacttgtgggcatccttcactgctctgtggtcagtgagcccctggccacactggtgctgtcacatgggggtcatatcctggcctccacctccggggacagtgatcacagcccacgcttcagtggtacctctggtcccaactccctgcgcctggagatccgagacctggaggaaactgacagtggggagtacaagtgctcagccaccaactcccttggaaatgcaacctccaccctggacttccatgccaatgccgcccgtctcctcatcagcccggcagccgaggtggtggaaggacaggcagtgacactgagctgcagaagcggcctaagccccacacctgatgcccgcttctcctggtacctgaatggagccctgcttcacgagggtcccggcagcagcctcctgctccccgcggcctccagcactgacgccggctcataccactgccgggcccgggacggccacagtgccagtggcccctcttcgccagctgttctcactgtgctctacccccctcgacaaccaacattcaccaccaggctggaccttgatgccgctggggccggggctggacggcgaggcctccttttgtgccgtgtggacagcgacccccccgccaggctgcagctgctccacaaggaccgtgttgtggccacttccctgccatcagggggtggctgcagcacctgtgggggctgttccccacgcatgaaggtcaccaaagcccccaacttgctgcgtgtggagattcacaaccctttgctggaagaggagggcttgtacctctgtgaggccagcaatgccctgggcaacgcctccacctcagccaccttcaatggccaggccactgtcctggccattgcaccatcacacacacttcaggagggcacagaagccaacttgacttgcaacgtgagccgggaagctgctggcagccctgctaacttctcctggttccgaaatggggtgctgtgggcccagggtcccctggagaccgtgacactgctgcccgtggccagaactgatgctgccctttacgcctgccgcatcctgactgaggctggtgcccagctctccactcccgtgctcctgagtgtactctatcccccggaccgtccaaagctgtcagccctcctagacatgggccagggccacatggctctgttcatctgcactgtggacagccgccccctggccttgctggccttgttccatggggagcacctcctggccaccagcctgggtccccaggtcccatcccatggtcggttccaggctaaagctgaggccaactccctgaagttagaggtccgagaactgggccttggggactctggcagctaccgctgtgaggccacaaatgttcttggatcatccaacacctcactcttcttccaggtccgaggagcctgggtccaggtgtcaccatcacctgagctccaagagggccaggctgtggtcctgagctgccaggtacacacaggagtcccagaggggacctcatatcgttggtatcgggatggccagcccctccaggagtcgacctcggccacgctccgctttgcagccataactttgacacaagctggggcctatcattgccaagcccaggccccaggctcagccaccacgagcctagctgcacccatcagcctccacgtgtcctatgccccacgccacgtcacactcactaccctgatggacacaggccctggacgactgggcctcctcctgtgccgtgtggacagtgaccctccggcccagctgcggctgctccacggggatcgccttgtggcctccaccctacaaggtgtggggggacccgaaggcagctctcccaggctgcatgtggctgtggcccccaacacactgcgtctggagatccacggggctatgctggaggatgagggtgtctatatctgtgaggcctccaacaccctgggccaggcctcggcctcagctgacttcgacgctcaagctgtgaatgtgcaggtgtggcccggggctaccgtgcgggaggggcagctggtgaacctgacctgccttgtgtggaccactcacccggcccagctcacctacacatggtaccaggatgggcagcagcgcctggatgcccactccatccccctgcccaacgtcacagtcagggatgccacctcctaccgctgcggtgtgggcccccctggtcgggcaccccgcctctccagacctatcaccttggacgtcctctacgcgccccgcaacctgcgcctgacctacctcctggagagccatggcgggcagctggccctggtactgtgcactgtggacagccgcccgcccgcccagctggccctcagccacgccggtcgcctcttggcctcctcgacagcagcctctgtccccaacaccctgcgcctggagctgcgagggccacagcccagggatgagggtttctacagctgctctgcccgcagccctctgggccaggccaacacgtccctggagctgcggctggagggtgtgcgggtgatcctggctccggaggctgccgtgcctgaaggtgcccccatcacagtgacctgtgcggaccctgctgcccacgcacccacactctatacttggtaccacaacggtcgttggctgcaggagggtccagctgcctcactctcattcctggtggccacgcgggctcatgcaggcgcctactcttgccaggcccaggatgcccagggcacccgcagctcccgtcctgctgccctgcaagtcctctatgcccctcaggacgctgtcctgtcctccttccgggactccagggccagatccatggctgtgatacagtgcactgtggacagtgagccacctgctgagctggccctatctcatgatggcaaggtgctggccacgagcagcggggtccacagcttggcatcagggacaggccatgtccaggtggcccgaaacgccctacggctgcaggtgcaagatgtgcctgcaggtgatgacacctatgtttgcacagcccaaaacttgctgggctcaatcagcaccatcgggcggttgcaggtagaaggtgcacgcgtggtggcagagcctggcctggacgtgcctgagggcgctgccctgaacctcagctgccgcctcctgggtggccctgggcctgtgggcaactccacctttgcatggttctggaatgaccggcggctgcacgcggagcctgtgcccactctcgccttcacccacgtggctcgtgctcaagctgggatgtaccactgcctggctgagctccccactggggctgctgcctctgctccagtcatgctccgtgtgctctaccctcccaagacgcccaccatgatggtcttcgtggagcctgagggtggcctccggggcatcctggattgccgagtggacagcgagccgctcgccagcctgactctccaccttggcagtcgactggtggcctccagtcagccccagggtgctcctgcagagccacacatccatgtcctggcttcccccaatgccctgagggtggacatcgaggcgctgaggcccagcgaccaaggggaatacatctgttctgcctcaaatgtcctgggctctgcctctacctccacctactttggggtcagagccctgcaccgcctgcatcagttccagcagctgctctgggtcctgggactgctggtgggcctcctgctcctgctgttgggcctgggggcctgctacacctggagaaggaggcgtgtttgtaagcagagcatgggcgagaattcggtggagatggcttttcagaaagagaccacgcagctcattgatcctgatgcagccacatgtgagacctcaacctgtgccccacccctgggctgaccagtggtgttgcctgccctccggaggagaaagtggccagaatctgtgatgactccagcctatgaatgtgaatgaggcagtgttgagtcctgcccgcctctacgaaaacagctctgtgacatctgactttttatgacctggccccaagcctcttgcccccccaaaaatgggtggtgagaggtctgcccaggagggtgttgaccctggaggacactgaagagcactgagctgatctcgctctctcttctctggatctcctcccttctctccatttctccctcaaaggaagccctgccctttcacatccttctcctcgaaagtcaccctggactttggttggattgcagcatcctgcatcctcagaggctcaccaaggcattctgtattcaacagagtatcagtcagcctgctctaacaagagaccaaatacagtgacttcaacatgatagaattttatttttctctcccacgctagtctggctgttacgatggtttatgatgttggggctcaggatccttctatcttccttttctctatccctaaaatgatgcctttgattgtgaggctcaccatggccccgctttgtccacatgccctccagccagaagaaggaagagtggaggtagaagcacacccatgcccatggtggacgcaactcagaagctgcacaggacttttccactcacttcccattggctggagtattgtcacatggctactgcaagctacaagggagactgggaaatgtagtttttattttgagtccagaggacatttggaattggacttccaaaggactcccaactgtgagctcatccctgagacttttgacattgttgggaatgccaccagcaggccatgttttgtctcagtgcccatctactgagggccagggtgtgcccctggccattctggttgtgggcttcctggaagaggtgatcactctcacactaagactgaggaaataaaaaaggtttggtgttttcctagggagagagcatgccaggcagtggagttgcctaagcagacatccttgtgccagatttggcccctgaaagaagagatgccctcattcccaccaccaccccccctacccccagggactgggtactaccttactggcccttacaagagtggagggcagacacagatgttgtcagcatccttattcctgctccagatgcatctctgttcatgactgtgtgagctcctgtccttttcctggagaccctgtgtcgggctgttaaagagaatgagttaccaagaaggaatgacgtgcccctgcgaatcagggaccaacaggagagagctcttgagtgggctagtgactccccctgcagcctggtggagatggtgtgaggagcgaagagccctctgctctaggatttgggttgaaaaacagagagagaagtggggagttgccacaggagctaacacgctgggaggcagttgggggccgggtgaactttgtgtagccgaggccgcaccctccctcattccaggctcattcattttcatgctccattgccagactcttgctgggagcccgtccagaatgtcctcccaataaaactccatcctatgaaaaacggaaagtgaatc

SEQ ID NO: 6934 - DNA, 392 bp, Homo sapiens
gcctcgggcagtggactgacccctggggcactgagaagggctgctctaagtgtgcatttctcggggcagggcagaatttgggagcccagctggggcaccttctctggggcaggtcgcagggctctgtggcaccctgaggcctgtatcaccctcccctctgtccccctgccgttcttcccccaggccaggcctcatggggcgtctccagtccccaggacgtgcagggtgtgaaggggtcttgcctgcttatcccctgcatcttcagcttccctgccgacgtggaggtgcccgacggcatcacggccatctggtactacgactactcgggccagcggcaggtggtgagccactcggcggaccccaagctggtggaggcccgcttccgcggccgc

SEQ ID NO: 6935 - DNA, 7899 bp, Homo sapiens
atgggcttcttgcccaagcttctcctcctggcctcattcttcccagcaggccaggcctcatggggcgtctccagtccccaggacgtgcagggtgtgaaggggtcttgcctgcttatcccctgcatcttcagcttccctgccgacgtggaggtgcccgacggcatcacggccatctggtactacgactactcgggccagcggcaggtggtgagccactcggcggaccccaagctggtggaggcccgcttccgcggccgcaccgagttcatggggaaccccgagcacagggtgtgcaacctgctgctgaaggacctgcagcccgaggactctggttcctacaacttccgcttcgagatcagtgaggtcaaccgctggtcagatgtgaaaggcaccttggtcacagtaacagaggagcccagggtgcccaccattgcctccccggtggagcttctcgagggcacagaggtggacttcaactgctccactccctacgtatgcctgcaggagcaggtcagactgcagtggcaaggccaggaccctgctcgctctgtcaccttcaacagccagaagtttgagcccaccggcgtcggccacctggagaccctccacatggccatgtcctggcaggaccacggccggatcctgcgctgccagctctccgtggccaatcacagggctcagagcgagattcacctccaagtgaagtatgcccccaagggtgtgaagatcctcctcagcccctcggggaggaacatccttccaggtgagctggtcacactcacctgccaggtgaacagcagctaccctgcagtcagttccattaagtggctcaaggatggggtacgcctccaaaccaagactggtgtgctgcacctgccccaggcagcctggagcgatgctggcgtctacacctgccaagctgagaacggcgtgggctctttggtctcaccccccatcagcctccacatcttcatggctgaggtccaggtgagcccagcaggtcccatcctggagaaccagacagtgacactagtctgcaacacacccaatgaggcacccagtgatctccgctacagctggtacaagaaccatgtcctgctggaggatgcccactcccataccctccggctgcacttggccactagggctgatactggcttctacttctgtgaggtgcagaacgtccatggcagcgagcgctcgggccctgtcagcgtggtagtcaaccacccgcctctcactccagtcctgacagccttcctggagacccaggcgggacttgtgggcatccttcactgctctgtggtcagtgagcccctggccacactggtgctgtcacatgggggtcatatcctggcctccacctccggggacagtgatcacagcccacgcttcagtggtacctctggtcccaactccctgcgcctggagatccgagacctggaggaaactgacagtggggagtacaagtgctcagccaccaactcccttggaaatgcaacctccaccctggacttccatgccaatgccgcccgtctcctcatcagcccggcagccgaggtggtggaaggacaggcagtgacactgagctgcagaagcggcctaagccccacacctgatgcccgcttctcctggtacctgaatggagccctgcttcacgagggtcccggcagcagcctcctgctccccgcggcctccagcactgacgccggctcataccactgccgggcccgggacggccacagtgccagtggcccctcttcgccagctgttctcactgtgctctacccccctcgacaaccaacattcaccaccaggctggaccttgatgccgctggggccggggctggacggcgaggcctccttttgtgccgtgtggacagcgacccccccgccaggctgcagctgctccacaaggaccgtgttgtggccacttccctgccatcagggggtggctgcagcacctgtgggggctgttccccacgcatgaaggtcaccaaagcccccaacttgctgcgtgtggagattcacaaccctttgctggaagaggagggcttgtacctctgtgaggccagcaatgccctgggcaacgcctccacctcagccaccttcaatggccaggccactgtcctggccattgcaccatcacacacacttcaggagggcacagaagccaacttgacttgcaacgtgagccgggaagctgctggcagccctgctaacttctcctggttccgaaatggggtgctgtgggcccagggtcccctggagaccgtgacactgctgcccgtggccagaactgatgctgccctttacgcctgccgcatcctgactgaggctggtgcccagctctccactcccgtgctcctgagtgtactctatcccccggaccgtccaaagctgtcagccctcctagacatgggccagggccacatggctctgttcatctgcactgtggacagccgccccctggccttgctggccttgttccatggggagcacctcctggccaccagcctgggtccccaggtcccatcccatggtcggttccaggctaaagctgaggccaactccctgaagttagaggtccgagaactgggccttggggactctggcagctaccgctgtgaggccacaaatgttcttggatcatccaacacctcactcttcttccaggtccgaggagcctgggtccaggtgtcaccatcacctgagctccaagagggccaggctgtggtcctgagctgccaggtacacacaggagtcccagaggggacctcatatcgttggtatcgggatggccagcccctccaggagtcgacctcggccacgctccgctttgcagccataactttgacacaagctggggcctatcattgccaagcccaggccccaggctcagccaccacgagcctagctgcacccatcagcctccacgtgtcctatgccccacgccacgtcacactcactaccctgatggacacaggccctggacgactgggcctcctcctgtgccgtgtggacagtgaccctccggcccagctgcggctgctccacggggatcgccttgtggcctccaccctacaaggtgtggggggacccgaaggcagctctcccaggctgcatgtggctgtggcccccaacacactgcgtctggagatccacggggctatgctggaggatgagggtgtctatatctgtgaggcctccaacaccctgggccaggcctcggcctcagctgacttcgacgctcaagctgtgaatgtgcaggtgtggcccggggctaccgtgcgggaggggcagctggtgaacctgacctgccttgtgtggaccactcacccggcccagctcacctacacatggtaccaggatgggcagcagcgcctggatgcccactccatccccctgcccaacgtcacagtcagggatgccacctcctaccgctgcggtgtgggcccccctggtcgggcaccccgcctctccagacctatcaccttggacgtcctctacgcgccccgcaacctgcgcctgacctacctcctggagagccatggcgggcagctggccctggtactgtgcactgtggacagccgcccgcccgcccagctggccctcagccacgccggtcgcctcttggcctcctcgacagcagcctctgtccccaacaccctgcgcctggagctgcgagggccacagcccagggatgagggtttctacagctgctctgcccgcagccctctgggccaggccaacacgtccctggagctgcggctggagggtgtgcgggtgatcctggctccggaggctgccgtgcctgaaggtgcccccatcacagtgacctgtgcggaccctgctgcccacgcacccacactctatacttggtaccacaacggtcgttggctgcaggagggtccagctgcctcactctcattcctggtggccacgcgggctcatgcaggcgcctactcttgccaggcccaggatgcccagggcacccgcagctcccgtcctgctgccctgcaagtcctctatgcccctcaggacgctgtcctgtcctccttccgggactccagggccagatccatggctgtgatacagtgcactgtggacagtgagccacctgctgagctggccctatctcatgatggcaaggtgctggccacgagcagcggggtccacagcttggcatcagggacaggccatgtccaggtggcccgaaacgccctacggctgcaggtgcaagatgtgcctgcaggtgatgacacctatgtttgcacagcccaaaacttgctgggctcaatcagcaccatcgggcggttgcaggtagaaggtgcacgcgtggtggcagagcctggcctggacgtgcctgagggcgctgccctgaacctcagctgccgcctcctgggtggccctgggcctgtgggcaactccacctttgcatggttctggaatgaccggcggctgcacgcggagcctgtgcccactctcgccttcacccacgtggctcgtgctcaagctgggatgtaccactgcctggctgagctccccactggggctgctgcctctgctccagtcatgctccgtgtgctctaccctcccaagacgcccaccatgatggtcttcgtggagcctgagggtggcctccggggcatcctggattgccgagtggacagcgagccgctcgccagcctgactctccaccttggcagtcgactggtggcctccagtcagccccagggtgctcctgcagagccacacatccatgtcctggcttcccccaatgccctgagggtggacatcgaggcgctgaggcccagcgaccaaggggaatacatctgttctgcctcaaatgtcctgggctctgcctctacctccacctactttggggtcagaggtgaggggagggggctccatctcccaggccactctgcacaaaagcccagctcttaggcccaaaggcttccttccctgtatccctcctgctgcagcatgatttgcctgtcgactctaaactgattgctcggggcacccttgtgtggagagcttcagcgataaagcaaaagttagaaggtgtcatcttgggtgggtccccttggaaggaagcactgggggcctgcagctgtggctgctctgagtcccgctctgtgttccagccctgcaccgcctgcatcagttccagcagctgctctgggtcctgggactgctggtgggcctcctgctcctgctgttgggcctgggggcctgctacacctggaggtgggtctggagctgggagtgggccagaagattggggtaaggcagcccacctcgtcttctccccaaattcccccaggtcctttaggacctcctattaagttcacaggctgcctacttcccagactgcccctccaaattggaaatcccttctagaattgtccctaaatcctccttgctgtagtttctttctttcctcctctctgccctggctgtgctaaagcaagggctagggaggaagacagaggaagcacccactctccatgaggttcccacgctcttgtggtctggagccagcctgtggggagcgggagaggaatgggggcaggaggtggggaggggagaggctctctgagtccactccgggccttgcagaaggaggcgtgtttgtaagcagagcatgggcgagaattcggtggagatggcttttcagaaagagaccacgcaggtatccattcaacacacacgggcagatataatacccagctaacccacagtgccaactggcatctggagactgctgtcatttagaggatggtgcctgggaccaaggggaggttggggagagtgtgcagggaaccaggagcccctcaggagataggagagccctgttctgctcggggcagagggaatccctgtgtcagctggcggctggcttagaggactaggggagactttctggacttggcagcatcccctccatttccaagacacgtatgttctgactcccccacctttgttctgaggcctcttccccactcccaagcctgcccgtcacctgggcagaagtgaaagtcagtttctcctcccctgtggtgtgtcccttctgcagctgattcacctggtaggccagggctccaagtcacacttccagccatgcacactcccaccaatcctcttgggaccccacctgaggctgggggcctgggggcctgccctggctcccagaggcctcctgtgaccagggttttctctgtgggaagctcattgatcctgatgcagccacatgtgagacctcaacctgtgccccacccctgggctgaccagtggtgttgcctgccctccggaggagaaagtggccagaatctgtgatgactccagcctatgaatgtgaatgaggcagtgttgagtcctgcccgcctctacgaaaacagctctgtgacatctgactttttatgacctggccccaagcctcttgcccccccaaaaatgggtggtgagaggtctgcccaggagggtgttgaccctggaggacactgaagagcactgagctgatctcgctctctcttctctggatctcctcccttctctccatttctccctcaaaggaagccctgccctttcacatccttctcctcgaaagtcaccctggactttggttggattgcagcatcctgcatcctcagaggctcaccaaggcattctgtattcaacagagtatcagtcagcctgctctaacaagagaccaaatacagtgacttcaacatgatagaattttatttttctctcccacgctagtctggctgttacgatggtttatgatgttggggctcaggatccttctatcttccttttctctatccctaaaatgatgcctttgattgtgaggctcaccatggccccgctttgtccacatgccctccagccagaagaaggaagagtggaggtagaagcacacccatgcccatggtggacgcaactcagaagctgcacaggacttttccactcacttcccattggctggagtattgtcacatggctactgcaagctacaagggagactgggaaatgtagtttttattttgagtccagaggacatttggaattggacttccaaaggactcccaactgtgagctcatccctgagacttttgacattgttgggaatgccaccagcaggccatgttttgtctcagtgcccatctactgagggccagggtgtgcccctggccattctggttgtgggcttcctggaagaggtgatcactctcacactaagactgaggaaataaaaaaggtttggtgttttcctagggagagagcatgccaggcagtggagttgcctaagcagacatccttgtgccagatttggcccctgaaagaagagatgccctcattcccaccaccaccccccctacccccagggactgggtactaccttactggcccttacaagagtggagggcagacacagatgttgtcagcatccttattcctgctccagatgcatctctgttcatgactgtgtgagctcctgtccttttcctggagaccctgtgtcgggctgttaaagagaatgagttaccaagaaggaatgacgtgcccctgcgaatcagggaccaacaggagagagctcttgagtgggctagtgactccccctgcagcctggtggagatggtgtgaggagcgaagagccctctgctctaggatttgggttgaaaaacagagagagaagtggggagttgccacaggagctaacacgctgggaggcagttgggggccgggtgaactttgtgtagccgaggccgcaccctccctcattccaggctcattcattttcatgctccattgccagactcttgctgggagcccgtccagaatgtcctcccaataaaactccatcctatgaaaaacggaaagtgaatc

SEQ ID NO: 6936 - DNA, 910 bp, Homo sapiens
ttttgagacggagtctaactctgttgcccaggctggagcgcagtggcccaatctcggcccactgcaagctccacctcctgggttcacgccattctcctgcctcagcctcccgagtagctgggactacaggcacccgccaggcggatcacaaggtcaggagatcgagaccatcctggctaacatggcgtttcactttttaaaagcttaagctttatggaatgagggagcacggtggactctgacaggaaccttttcaaatcaatgctgaggctgtatttcttagccgtccacaaactagtccataggtaaagagcatacaaaacagacgccgaggtgatcagtgattccaaaggctgacgctcagcagcgccacctccatgccagccaactaggctacgggatggaggggcggtctgtgaaacaccagccatcccgtgaaagctcagcttgccactgtcatgtaacagggtgggtggtggcacagcagaggctcacacttgtcaccttcagcctctagaagctccccgtggggcacgaaggctggggacagagtgtcctgaggttttgttacaaggctagactttaaaatacctttcaaagtttcatcccgcctcatgtcgcaggactgctgtgtttgtgaaagcgcgtttgtttccacaagacaagctccgtgtagtcgccagcgggtgcctggcccaggagctgccctgtggagccagcgttgtccccgagctgctcgcctgtggccgtggctccttttctgaggctcctgactccattcttgcagattctggtggatcaggagcttacattctaaatgctacatagaggtgttgaagaaaatttcataggttctgtaatagtggatgggattaaaagaaaaaatgttaaattatatatatatatatgg

SEQ ID NO: 6937 - DNA, 3459 bp, Homo sapiens
catggcggccttagcaagctatagctgcgagatttgaattactccactcgtagctattgcattcctgacgatggcctctgtggcttcgtgcgattcgcgtccgagctcagacgagctccctggagacccctcttcacaagaagaagatgaggactatgattttgaagatcgggtcagcgactcgggttcatattcctcagcgagtagcgattatgatgatcttgagcctgaatggctggacagtgtgcagaaaaatggagagctgttttatttggaattgagtgaggatgaagaagaaagcctccttcctgagacaccaactgtgaaccatgtcaggttcagtgaaaatgagattatcattgaagatgactacaaagaaagaaaaaagtatgaacccaaactcaagcagtttaccaaaattttaagaaggaaaagacttttacccaagcgctgcaataaaaaaaatagcaatgacaatggaccagtatccattctaaagcatcagtccaatcagaagacaggagtcattgtccaacagcggtacaaagatgtgaatgtttatgtaaaccccaaaaagctaactgttatcaaagccaaagagcagctcaagcttctggaagtgctggttggaattattcatcagaccaagtggagctggagaagaaccggaaagcagggtgatggagagaggcttgtggttcatggcctgctgccagggggatctgctatgaagagcggtcaggtactcattggtgatgtccttgttgctgtgaatgatgtcgatgttactactgaaaacatcgagagagttctgtcttgcattcctggacctatgcaggtgaaactgacatttgaaaatgcatatgatgtgaaaagggagacatcccatccaagacagaaaaagacacagtccaacacaagtgatttagtcaagcttctctggggagaagaggttgaaggtatccagcagagtggcctaaacactcctcatatcattatgtatctcacactacagctcgactcagaaacctcaaaggaagagcaggaaattctttatcattatccaatgtctgaagcatctcagaaacttaaaagtgtgagagggatttttctcacactctgtgacatgctggaaaacgtaactgggacacaagttactagttcatccctccttttaaatggaaaacaaattcatgtggcttattggaaagaatctgacaagttgttgctaattggcctgcctgctgaagaagttcctcttcctcgtctaaggaacatgatagaaaatgtcatccaaaccttaaaatttatgtatggttctttagatagtgccttttgccagattgagaatgttcctcgtttggatcatttttttaacttgttctttcaaagagcacttcagcctgcgaaactgcattccagcgccagtcccagtgctcagcagtacgatgcttccagtgcagtacttttagacaacctccctggagtccggtggctcacacttccactggaaatcaagatggaattagacatggcattaagtgacttggaggctgcagattttgcagaactgtccgaggattactatgacatgaggcggctgtatacaattttggggtcttctctattttacaagggttatttgatatgcagtcatttgcccaaggatgatcttattgatattgccgtatactgtcgccactattgcctgctgcctttagcagcaaaacaaagaattggtcagttgatcatatggagagaagtgtttcctcagcatcacctccgacctttggcagactcaagcactgaagtctttccggaacctgaaggaagatattttttgctagttgttggcttgaaacattatatgctatgtgtactattagaagctggaggttgcgcatccaaagctattgggagtcctggaccagactgtgtatatgtggatcaagtcaaaacaactcttcaccagctggatggagtagattctcgcatagatgaacggctagcatcttctccagtcccctgtttgtcttgtgctgactggttccttactggatcacgtgaaaaaacagatagcttgaccacttcgcctattctcagtaggctacaaggtacttccaaagtagcaacttctccaacatgcagaagaacgctttttggtgactattccttaaagacacgcaagcctagtccttcctgtagtagtggaggatctgacaatggttgtgaaggtggagaagatgatggctttagcccccatactacaccggatgcagtacggaagcaaagagaatctcagggctctgatggtttagaagaaagtgggaccttgcttaaggtcactaaaaagaagtctactcttccaaatccatttcatttgggaaacttgaaaaaggaccttccagaaaaagaattagaaatatataacacagtgaaactgacatctggtcctgagaacacacttttccactacgttgccttagaaacagtgcaaggaatctttattactcctacccttgaagaggtggcacagctaagtggctctatccaccctcagctaataaagaatttccatcagtgttgtctttccattcgtgcagttttccaacagacattggtggaagagaaaaagaaaggactaaatagtggagaccattcagattctgcaaagtcagtgtcttctcttaaccctgttaaagaacatggtgtgttgtttgaatgttcacctggaaactggactgatcagaaaaaagcaccaccagttatggcttactgggtagtagggagactttttcttcatccaaaacctcaagaactttatgtctgttttcatgactcagtcacagaaattgccattgaaatagcttttaaattgttctttgggttaaccttgtagctgtgctttcttgatgcgtagaaacacgtgcatggaggatcaaacactgtcagaattgctgaaatcaatacacaaagagataaagtttagcttctttttactattcaatattgaacataatattgttaaatattgagatgaaatgctgttggatttgatacattaaatcttaatgtaatattgtaagacttttgagaatatacttgattaaaatgtgaaagaagggattgttaacttattgctattttggtatataatgttaatttattgactagtttgaaataatgtgaagtgttttttatatcagattaatataggaaatgtttattcttgaaaaatactcaatttgttgttgtttatttttctcaaaattcatactgatatctgatgaaatgattatgaaattgggagcaggtgaccaggtgctgtaactaagtagtgctatgaccatgagcaagtttttgtacctctctaagctcagagttttcatgtaaaatgagatgattgcattgaggtttcaaaaatacctcttaagtaaaatgtgcttttattttatttta

SEQ ID NO: 6938 - DNA, 1120 bp, Homo sapiens
  misc_feature (10)..(10): n is a, c, g, or t
  misc_feature (26)..(26): n is a, c, g, or t
cctggccganagctccaccgctgagnccaacgaggccaattttttatttgccaaaaaaagctaccatatatttaatgttttaataaaaattaaacattagaaagtaaagagcaataaaatacttaataactattgtgcctataatgctagtgctattgcctttattataataactagatttgctatttaaaaactgagtggtatcataatacatattgataaaataggattattacactctagagcaataaaaactaattgacctaaggcatatattatttatttagaaataaatctagctgctttctccctagtatagatttagattcatggattttaaatttactactgatgctttcagaaacaaaaattaaattaattggatggttagagtttttgttgtttgttgttttaatttctgaaatgagtgtgttcttttcttctgcaggagactttttcttcatccaaaacctcaagaactttatgtctgttttcatgactcagtcacagaaattgccattgaaatagcttttaaattgttctttgggttaaccttgtagctgtgctttcttgatgcgtagaaacacgtgcatggaggatcaaacactgtcagaattgctgaaatcaatacacaaagagataaagtttagcttctttttactattcaatattgaacataatattgttaaatattgagatgaaatgctgttggatttgatacattaaatcttaatgtaatattgtaagacttttgagaatatacttgattaaaatgtgaaagaagggattgttaacttattgctattttggtatataatgttaatttattgactagtttgaaataatgtgaagtgttttttatatcagattaatataggaaatgtttattcttgaaaaatactcaatttgttgttgtttatttttctcaaaattcatactgatatctgatgaaatgattatgaaattgggagcaggtgaccaggtgctgtaactaagtagtgctatgaccatgagcaagtttttgtacctctctaagctcagagttttcatgtaaaatgagatgattgcattgaggtttcaaaaatacctcttaagtaaaatgtgcttttattttatttta

SEQ ID NO: 6939 - DNA, 666 bp, Homo sapiens
  misc_feature (10)..(10): n is a, c, g, or t
  misc_feature (26)..(26): n is a, c, g, or t
  misc_feature (624)..(624): n is a, c, g, or t
  misc_feature (629)..(629): n is a, c, g, or t
cctggccganagctccaccgctgagnccaacgaggccaattttttatttgccaaaaaaagctaccatatatttaatgttttaataaaaattaaacattagaaagtaaagagcaataaaatacttaataactattgtgcctataatgctagtgctattgcctttattataataactagatttgctatttaaaaactgagtggtatcataatacatattgataaaataggattattacactctagagcaataaaaactaattgacctaaggcatatattatttatttagaaataaatctagctgctttctccctagtatagatttagattcatggattttaaatttactactgatgctttcagaaacaaaaattaaattaattggatggttagagtttttgttgtttgttgttttaatttctgaaatgagtgtgttcttttcttctgcaggagactttttcttcatccaaaacctcaagaactttatgtctgttttcatgactcagtcacagaaattgccattgaaatagcttttaaattgttctttgggttaaccttgtagctgtgctttcttgatgcgtagaaacacgtgcatggaggatcaaacacgtcgttaactgtaagtnggtgntgttggtgtgcggcgcggccgcgtgttgtgggggggg

SEQ ID NO: 6940 - DNA, 667 bp, Homo sapiens
  misc_feature (10)..(10): n is a, c, g, or t
  misc_feature (26)..(26): n is a, c, g, or t
cctggccganagctccaccgctgagnccaacgaggccaattttttatttgccaaaaaaagctaccatatatttaatgttttaataaaaattaaacattagaaagtaaagagcaataaaatacttaataactattgtgcctataatgctagtgctattgcctttattataataactagatttgctatttaaaaactgagtggtatcataatacatattgataaaataggattattacactctagagcaataaaaactaattgacctaaggcatatattatttatttagaaataaatctagctgctttctccctagtatagatttagattcatggattttaaatttactactgatgctttcagaaacaaaaattaaattaattggatggttagagtttttgttgtttgttgttttaatttctgaaatgagtgtgttcttttcttctgcaggagactttttcttcatccaaaacctcaagaactttatgtctgttttcatgactcagtcacagaaattgccattgaaatagcttttaaattgttctttgggttaaccttgtagctgtgctttcttgatgcgtagaaacacgtgcatggaggatcaaacacgttgtgacgttaaagtgtgggtgggtttgtgtgtatggtggatatggtggggcggggcat

SEQ ID NO: 6941 - DNA, 684 bp, Homo sapiens
  misc_feature (10)..(10): n is a, c, g, or t
  misc_feature (26)..(26): n is a, c, g, or t
cctggccganagctccaccgctgagnccaacgaggccaattttttatttgccaaaaaaagctaccatatatttaatgttttaataaaaattaaacattagaaagtaaagagcaataaaatacttaataactattgtgcctataatgctagtgctattgcctttattataataactagatttgctatttaaaaactgagtggtatcataatacatattgataaaataggattattacactctagagcaataaaaactaattgacctaaggcatatattatttatttagaaataaatctagctgctttctccctagtatagatttagattcatggattttaaatttactactgatgctttcagaaacaaaaattaaattaattggatggttagagtttttgttgtttgttgttttaatttctgaaatgagtgtgttcttttcttctgcaggagactttttcttcatccaaaacctcaagaactttatgtctgttttcatgactcagtcacagaaattgccattgaaatagcttttaaattgttctttgggttaaccttgtagctgtgctttcttgatgcgtagaaacacgtgcatggaggatcaaacactgtcagaattgctgaaatcaatacacaaagagataaagtttagcttcaaaaagtttataatgtctgggcattggctt

SEQ ID NO: 6942 - DNA, 3396 bp, Homo sapiens
catggcggccttagcaagctatagctgcgagatttgaattactccactcgtagctattgcattcctgacgatggcctctgtggcttcgtgcgattcgcgtccgagctcagacgagctccctggagacccctcttcacaagaagaagatgaggactatgattttgaagatcgggtcagcgactcgggttcatattcctcagcgagtagcgattatgatgatcttgagcctgaatggctggacagtgtgcagaaaaatggagagctgttttatttggaattgagtgaggatgaagaagaaagcctccttcctgagacaccaactgtgaaccatgtcaggttcagtgaaaatgagattatcattgaagatgactacaaagaaagaaaaaagtatgaacccaaactcaagcagtttaccaaaattttaagaaggaaaagacttttacccaagcgctgcaataaaaaaaatagcaatgacaatggaccagtatccattctaaagcatcagtccaatcagaagacaggagtcattgtccaacagcggtacaaagatgtgaatgtttatgtaaaccccaaaaagctaactgttatcaaagccaaagagcagctcaagcttctggaagtgctggttggaattattcatcagaccaagtggagctggagaagaaccggaaagcagggtgatggagagaggcttgtggttcatggcctgctgccagggggatctgctatgaagagcggtcaggtactcattggtgatgtccttgttgctgtgaatgatgtcgatgttactactgaaaacatcgagagagttctgtcttgcattcctggacctatgcaggtgaaactgacatttgaaaatgcatatgatgtgaaaagggagacatcccatccaagacagaaaaagacacagtccaacacaagtgatttagtcaagcttctctggggagaagaggttgaaggtatccagcagagtggcctaaacactcctcatatcattatgtatctcacactacagctcgactcagaaacctcaaaggaagagcaggaaattctttatcattatccaatgtctgaagcatctcagaaacttaaaagtgtgagagggatttttctcacactctgtgacatgctggaaaacgtaactgggacacaagttactagttcatccctccttttaaatggaaaacaaattcatgtggcttattggaaagaatctgacaagttgttgctaattggcctgcctgctgaagaagttcctcttcctcgtctaaggaacatgatagaaaatgtcatccaaaccttaaaatttatgtatggttctttagatagtgccttttgccagattgagaatgttcctcgtttggatcatttttttaacttgttctttcaaagagcacttcagcctgcgaaactgcattccagcgccagtcccagtgctcagcagtacgatgcttccagtgcagtacttttagacaacctccctggagtccggtggctcacacttccactggaaatcaagatggaattagacatggcattaagtgacttggaggctgcagattttgcagaactgggttatttgatatgcagtcatttgcccaaggatgatcttattgatattgccgtatactgtcgccactattgcctgctgcctttagcagcaaaacaaagaattggtcagttgatcatatggagagaagtgtttcctcagcatcacctccgacctttggcagactcaagcactgaagtctttccggaacctgaaggaagatattttttgctagttgttggcttgaaacattatatgctatgtgtactattagaagctggaggttgcgcatccaaagctattgggagtcctggaccagactgtgtatatgtggatcaagtcaaaacaactcttcaccagctggatggagtagattctcgcatagatgaacggctagcatcttctccagtcccctgtttgtcttgtgctgactggttccttactggatcacgtgaaaaaacagatagcttgaccacttcgcctattctcagtaggctacaaggtacttccaaagtagcaacttctccaacatgcagaagaacgctttttggtgactattccttaaagacacgcaagcctagtccttcctgtagtagtggaggatctgacaatggttgtgaaggtggagaagatgatggctttagcccccatactacaccggatgcagtacggaagcaaagagaatctcagggctctgatggtttagaagaaagtgggaccttgcttaaggtcactaaaaagaagtctactcttccaaatccatttcatttgggaaacttgaaaaaggaccttccagaaaaagaattagaaatatataacacagtgaaactgacatctggtcctgagaacacacttttccactacgttgccttagaaacagtgcaaggaatctttattactcctacccttgaagaggtggcacagctaagtggctctatccaccctcagctaataaagaatttccatcagtgttgtctttccattcgtgcagttttccaacagacattggtggaagagaaaaagaaaggactaaatagtggagaccattcagattctgcaaagtcagtgtcttctcttaaccctgttaaagaacatggtgtgttgtttgaatgttcacctggaaactggactgatcagaaaaaagcaccaccagttatggcttactgggtagtagggagactttttcttcatccaaaacctcaagaactttatgtctgttttcatgactcagtcacagaaattgccattgaaatagcttttaaattgttctttgggttaaccttgtagctgtgctttcttgatgcgtagaaacacgtgcatggaggatcaaacactgtcagaattgctgaaatcaatacacaaagagataaagtttagcttctttttactattcaatattgaacataatattgttaaatattgagatgaaatgctgttggatttgatacattaaatcttaatgtaatattgtaagacttttgagaatatacttgattaaaatgtgaaagaagggattgttaacttattgctattttggtatataatgttaatttattgactagtttgaaataatgtgaagtgttttttatatcagattaatataggaaatgtttattcttgaaaaatactcaatttgttgttgtttatttttctcaaaattcatactgatatctgatgaaatgattatgaaattgggagcaggtgaccaggtgctgtaactaagtagtgctatgaccatgagcaagtttttgtacctctctaagctcagagttttcatgtaaaatgagatgattgcattgaggtttcaaaaatacctcttaagtaaaatgtgcttttattttatttta

SEQ ID NO: 6943 - DNA, 309 bp, Homo sapiens
tcctactgcttactggcttgagagagtaacttcgccttatgggcctcagttttctcatctgtaaaatgaagttaaaaagcacattcttcctcatagggcagtggtgaggactaaaggaggcgatgagaagagagtccccacaaggagtctggcacagaggaagtttcgacgtatgctgtccattgcaacttcgacttatgctgcgtttctgtgtcggaacagtggaagacattcaacaagcactttgtctcagaggcttagttacaattaattgagcctgaaagaccatagacttgaaaaagccctcaa

SEQ ID NO: 6944 - DNA, 444 bp, Homo sapiens
aaaaaagagaacgctggcattatgatcaggaaaacccattgtcatcgccgaccctccctcccgtcccaccacacgctgctgtcacgacgtaggtgcgaaagacctttttgtacagagatatattttttatgaagaatttgtaaaattattaaatatgctgtaattttttgattaatgtaggtacattgttaaaaaataaatgtttttacaatacagaactgtaattttcccaataatgtaaaatgtaccatctctagctgattttcagttccaatcctattacacatgtattaatattaaagtggcctgttaaaatgaacagtatcttttttttgtcaaaaaaattataaagagggtgtaatatagcctgtgcaatgccaccaatctttaaagcaaatcagagttctaattaaatatttaattttagatttctatttttctgtg

SEQ ID NO: 6945 - DNA, 695 bp, Homo sapiens
  misc_feature (28)..(28): n is a, c, g, or t
gcctactactactaaattcgcggccgcntcgacttttttttttttctattctaatctattaacttttggttattttggattaagctacaaattctaattacatcaaccaacagaaatgacatattatgcctttcaggactttgccaaatgatttatttcatgcagttcaaattgaatgtcactgtcttacatttatcacagtgcatcttgcattgtgcaattttaccctagaaatgcacttagcacctagagatgcattgtgagatttcaacttcagaggttcacaatacccagggcatttacaagctattcccaaagacggattacgcagtggatggaggatgcaaatgtggatggaggatgaagcagaggaacaaaacgagtctttgagggcttagagatgaaaaactatagctgttagtgaataagtaaagttctgtgtatgaattgcaagtatttgctgattttaaacaaagtatgccatattcctttaaactagattcaaaatgttaagtatactaatatgttattcaaacagtaaacctcccatcccctatgaaagttgacgatcgagcgctccagggtatgaattctctcagtgacttacatgttgaaaagtatccagggccaggtgggaggccacaggacctcaccgataatgttggtcgacgcggccgcgaatttagtagtagtag

SEQ ID NO: 6946 - DNA, 460 bp, Homo sapiens
acctaaagcccattccaaaacagacatacttccccatgatttccatgtgatgctaagtgcatttgttctaatctgttgtttcgttgagagtacagttcttcaggaatcttatctttatgcatgatatatgtgtacttgtttctccttactagtccccaaggcttcagacaccttggtcaccaagactggcacaaatctgccccaggtcatctccagcttccattgatgcttagcattccgactttttctttctttctgcttctttttcttctttctctctctgtgtgtgtgtgtgtatggtggggttgaggggaatcaaggaatttactttattgctttcccagttattataaaaggatgttcattacttctaactagcatttccaagtttttgtcataaatgggaggcccttcacattaatttgtgtaccttgatgccaaaaacagaagtcattacatt

SEQ ID NO: 6947 - DNA, 812 bp, Homo sapiens
tgaaattatgcacacataactggccaaatatcagataagtgaactgttaatatatgagagaattttctggacttttaagttattaatctcaattatttgtgtggtgagtactaaattattttctgtttgtgttgatctgtccatttctgtatatagttgtccctcagtatattgagggattgattccaggtcaaccccgtcctcttcagataccaaaatccacagatactcaagtcccttatataaaatggtgtagtgtttgcatatatcctacacacattctcttgatactttaaatcatctctaaattacctgatacgtaatacaatgtaaatgctatgtaaatagttgttatactgtattgtttagggaataataatgataagacaaaaagtctatacctgttcggtacagatgcaaccattctgcctcctccctaccccctcccaaatatttttcatcctggttgaattcacaaatcctacatggttacggagggttgactgtatttgcatatgttgttaaagtggtgtttaaaatgtgcaatctgtactacaattctaaattttggattgatttgaactaggatctttgcaaataaatctcatagacattaatgtttgtaagaaatttttaattaaatgatggaaggaacatagaatggctacctgtgattttgattagtgtttaacagattgccacagctgtgattgaattccttttgtactggatgagcatggtcatttgggattactgatggtgaagtctagctggtgttaagagaataaatattgctgatgctaaacctggtt

SEQ ID NO: 6948 - DNA, 400 bp, Homo sapiens
gtgtccctcgcattatcttgaggacgtgcctaggctgttctgctgtcctggatggagcatttgagatgcatgatgaaggactgagttaaaccagctgcccagcatagataagctgagtagaataacttaatttttttcattaagtttattttccaattaacaaaaagaacatctgtagcaatgcttttggctttgttagctgtagcaaacttgctggtttatgcaaaagtgtaaaagtgtgacacacatagatccagctaaacaataagaagaaactggtatttatatacacaagtatatttatatacataaaccatcacattgagtagtttgatctcttttccctacaggaagacatataatcagctttctttgttctgatacaaccattcaaaaaaga

SEQ ID NO: 6949 - DNA, 565 bp, Homo sapiens
ttctttttcttttttttttttttttttttgagacagagtcttgctctgttgctaggctggattgcagtgacgcaatctcggctcactgcaacctccgcctcctgggttcaagtgattctcctgcctcagcctcccgagtagctgggactacaggcatacgccaccacgcctagctaatttttgtatttttagtacagacggggtttcaccatgttggccaggatggtcttaatctcttgacctcatgatccgcctgcctctgcctcccaaagtgctgggattacaggtgtgagccatcgtgcctggccccatccaacattttctaaagtgcctaatcttactgaaaaaggtgacattgaatatacagaaaacatgctggaatcaggcacttgaaagagaaattgattgatttttttaatctagcatttttaagaaatgaacattcttgctatagaaatgacttgatttaaatcactaatcagaaaggttcaacttagtctatgcattgcattattcgatgtactctaaattccttttacaactcagaaatgttgtctatggatgt

SEQ ID NO: 6950 - DNA, 440 bp, Homo sapiens
gattatagcacctttatgttcaatatcatctatagaaactcaactgttggatgcattagcatcagaatgacagcttgtagtacactcatttgtgttcacagatctcagaaatttttatgtcctaaatggagggacttttaaaaataatgatggagctgggcatggtggcacacacctgtaatcccagcactttgggaggccgaggcgggcagatcacctgaggtcaggagtttgagatcagcctgactaacatggtgaaaccccatctctacaaatacaaaaaattaggtgtggtggcgggcgcctgtaatctcagctgctttggaggctgaggcaggagaatcacttgaacccgagaggcagaggttgcagtgagctgacatcatgccattgcacttcagcctgggcaacaagagtgaaaccccatctcagaaaaaaac

SEQ ID NO: 6951 - DNA, 490 bp, Homo sapiens
gcaatggaggcagcagagggttcactttttgttctggtttatattaaattaggaaagctagatttgctaattgtcatatgactttgattacctctccaacatttgctttttaccatgtttaaaatccttttattggtgatttgtttttggacacagtatactctgtccaagcttcaaatgaaagcactgctctttaagctcctagcatcttaccttaagttctgttggaactgggtgagacctcatgtttgcgtatgcggtctcactgagttttagtaagactcagtttttaagcttcagcaactaatatttggaattgcactttttaaattatagaatatgatttgtgtccttgaagtttgatcattacctgaagaattggctgaaaacaataaatgtttaaatgttgcaatttagagaatgtctttattgtgttgccaaatgctgaatgacagagagctttaattctaactgctttaattagaaagag

SEQ ID NO: 6952 - DNA, 411 bp, Homo sapiens
tcgaaataccaatatttatattattaccaatatggaactacagaggaaagtttaatacttctttgtaatttttgttttgttcttaaaatgcattccactaagggtatgtattaaaaatactgtgttctaaaattcctaaaaataaattcttcctcagagagcatgtcacccagtttgatgtatggttaggctcatatcattcagtttcttttcagtttaggacattttgaatggagcttttttaagatgggtaatgcattacgtggctgaagggtcaaaactatgtagatgtgggccgggtgcggtggctcacgcctgtaatcccagcactttgggaggccgaggtgggcggatgatgaggtcaggagattgagaccatcctggctaacatggtgaaacaccgtctctact

SEQ ID NO: 6953 - DNA, 278 bp, Homo sapiens
aacgacgctccgtaacgtccgtaacagcgccaaggtttattttatttgttgccaatatgtctcctgcaccagaatacgggcatcctaggggcatggacctagtcttgtacgtgcctggcatgtggtaggcactcattaaatacatatttatgccaggcatggtggttcacgcctataatcccaacactttgggaggctgaggcaggcggatcacctgaggtcaggagctcgagcccaggctggccaacatggtgaaaccccgtctctgttaaagatac

SEQ ID NO: 6954 - DNA, 404 bp, Homo sapiens
tttgctatgccacctcatttccacgtgagaaggaagtgcacgttcagggtggttggtcagagttaagtcagcctgtatccgtggggtgaaattaacagacatgtgggaattgaaccttaaacattctcagtttcactaggaacctaaaattataatcacgccacagagattgtaaatttgaaatttaccttgtttccatggaaattttgaattcaaaacatttaatgtgtaaaatatcactagtaagagggcacatagcattgggagatatacctaatgctagatgacacgttagtgggtgcagcgcaccagcatggcacatgtatacatatgtaactaacctgcacaatgtgcacatgtaccctaaaacttaaagtataataaaaaaaaaaaacattattcca

SEQ ID NO: 6955 - DNA, 695 bp, Homo sapiens
tttaagaggcagatcttgctcttccgtggcagtccagcacctgctgcctcgccctactgcggcccactttggggccgcagggcttacccgctcctttccgtgcatcatactttgttttctgttgaatactttcctcttagatcaccaccctgagatggtagaaaacataaaaatccctgtgtacacgtggagggagaccctctgggcctgtggagcccaaatatgaatctaaggcaatgggtggattctggattaactgcgtttcacgctgggaagtgactgcggggagtttgggtcctgtgtggtggtgaccgacgattctgtcctagatcccagtggagaacaccaaagcgagcgaggaggaggaggacccgaccttctgtgaggtgtgcggcaggagcgaccgtgaggacaggcttttgctctgcgacggctgcgatgcggggtaagggacggttgggactggcacacgtgccctgctgcgtgcaaggcgggccaggcgcaggagggatgcagagcctcttcgctctgtgaagtctgagtcccagcacctggagctgtgctcaccaccctcagcagcgcggttcagtcctgcgggccttcctgttacactcatttacacttcagtctttccccaaaaaacattctgaggctgcccacagaagtgcaggtaatacatcaagacaaaaaagaaa

SEQ ID NO: 6956 - DNA, 1101 bp, Homo sapiens
tttaagaggcagatcttgctcttccgtggcagtccagcacctgctgcctcgccctactgcggcccactttggggccgcagggcttacccgctcctttccgtgcatcatactttgttttctgttgaatactttcctcttagatcaccaccctgagatggtagaaaacataaaaatccctgtgtacacgtggagggagaccctctgggcctgtggagcccaaatatgaatctaaggcaatgggtggattctggattaactgcgtttcacgctgggaagtgactgcggggagtttgggtcctgtgtggtggtgaccgacgattctgtcctagatcccagtggagaacaccaaagcgagcgaggaggaggaggacccgaccttctgtgaggtgtgcggcaggagcgaccgtgaggacaggcttttgctctgcgacggctgcgatgcggggtaccacatggaatgcttggacccccctctccaggaggtgccggtggacgagtggttctgcccggaatgtgctgcgcctggtgttgtccttgccgctgatgcgggtcccgtgagtgaggaggaggtctccctgctcttggctgatgtggtgcccaccaccagcaggcttcggcctcgagcaggtaggacccgggcgatagccaggacacggcagagtgagagagtgagagcaaccgtgaaccggaaccggatctccacggccaggagggtccagcacacaccagggcgcctcgggtcttccctgctggatgaagccatcgaggctgtggcgactggcctgagcactgccgtgtatcagcgccccctgacgccgcgcactcccgcccgacggaagaggaagacaagtaagcctgaagggaaggactctcccgccagccacaggctgggacccacgcccgaggtccactcactgcttccctcaaggctgtgggcatttccatttcttctttctgcaagttaatcttctctgctgaaaacactacacagaagccgcgccgggcccgggaggtgtgggtctgatgtgccgatctgcgaccacgctgcctctggcattgtgtcagggtgatgccggccttcccgcattgttcccctctgct

SEQ ID NO: 6957 - DNA, 295 bp, Homo sapiens
aagaaagaaaaccccgtccggaccatccgcaaaaagtaagagctcagcgacaagatctaagaaacgccaacatcgagtgaagaagagaagagggaagaaggtaaaggtgagcattgggtggcagggcctgagtctcctgctggccacagcaccctcgcgtggttacggagcagggcctaagcctcccgctggccttggcaccctcgcgcggttatggagcagggatcatcatcgtctttgcttttctgtatttactcagtgatttgctgatggaaatgaacatttctgtagcaca

SEQ ID NO: 6958 - DNA, 1084 bp, Homo sapiens
  misc_feature (15)..(15): n is a, c, g, or t
  misc_feature (72)..(72): n is a, c, g, or t
  misc_feature (74)..(74): n is a, c, g, or t
  misc_feature (110)..(110): n is a, c, g, or t
agctgtaccgtccgnattccggatcgggtggggactttcgcgcggccggtgcctcggtcgtaccctgggcgngngcggctgcctcattagtattcgaacccacgaggcgngcagcgggccctcggggacagcgagcgtcgcggccatggcttatcactcgggctacggagcccacggctccaagcacagggcccgggcagccccggatccccctcccctcttcgatgacacaagcggtggttattccagccagcccgggggatacccagccacaggagcagacgtggccttcagtgtcaaccacttgcttggggacccaatggccaatgtggctatggcctatggcagctccatcgcatcccatgggaaggacatggtgcacaaggagctgcaccgttttgtgtctgtgagcaaactcaagtatttttttgctgtggacacagcctacgtggccaagaagctagggctgctggtcttcccctacacacaccagaactgggaagtgcagtacagtcgtgatgctcctctgcccccccggcaagacctcaacgcccctgacctctatatccccacgatggccttcattacttacgtgctcctggctgggatggcactgggcattcagaaaaggttctccccggaggtgctgggcctgtgtgcaagcacagcgctggtgtgggtggtgatggaggtgctggccctgctcctgggcctctacctggccaccgtgcgcagtgacctgagcacctttcacctgctggcctacagtggctacaaatacgtgggaatgatcctcagtgtgctcacggggctgctgttcggcagcgatggctactacgtggcgctggcctggacctcatcggcgctcatgtacttcattgtgcgctctttgcggacagcagccctgggccccgacagcatggggggccccgtcccccggcagcgtctccagctctacctgactctgggagctgcagccttccagcccctcatcatatactggctgactttccacctggtccggtgaccccctggccccagatggcactgagtttttcattcattgaagatttgatttccttga

SEQ ID NO: 6959 - DNA, 1138 bp, Homo sapiens
gggacgggagaaaacttaggctaggtcgaggcctggtgttagacgccacggacatggtggccgagaccggcggggtgggggacgtgtcgcgcggccgggtggcctcggtcggtaccctgggcgcggagcagctgcctcattagtattcgtacccacgaggcggcgcagcgggccctcggggacagcgagcgtcgcggccatggcttatcactcgggctacggagcccacggctccaagcacagggcccgggcagccccggatccccctcccctcttcgatgacacaagcggtggttattccagccagcccgggggatacccagccacaggagcagacgtggccttcagtgtcaaccacttgcttggggacccaatggccaatgtggctatggcctatggcagctccatcgcatcccatgggaaggacatggtgcacaaggagctgcaccgttttgtgtctgtgagcaaactcaagtatttttttgctgtggacacagcctacgtggccaagaagctagggctgctggtcttcccctacacacaccagaactgggaagtgcagtacagtcgtgatgctcctctgcccccccggcaagacctcaacgcccctgacctctatatccccacgatggccttcattacttacgtgctcctggctgggatggcactgggcattcagaaaaggttctccccggaggtgctgggcctgtgtgcaagcacagcgctggtgtgggtggtgatggaggtgctggccctgctcctgggcctctacctggccaccgtgcgcagtgacctgagcacctttcacctgctggcctacagtggctacaaatacgtgggaatgatcctcagtgtgctcacggggctgctgttcggcagcgatggctactacgtggcgctggcctggacctcatcggcgctcatgtacttcattgtgcgctctttgcggacagcagccctgggccccgacagcatggggggccccgtcccccggcagcgtctccagctctacctgactctgggagctgcagccttccagcccctcatcatatactggctgactttccacctggtccggtgaccccctggccccagatggcactgagtttttcattcattgaagatttgatttccttga

SEQ ID NO: 6960 - DNA, 1033 bp, Homo sapiens
gggacgggagaaaacttaggctaggtcgaggcctggtgttagacgccacggacatggtggccgagaccggcggggtgggggacgtgtcgcgcggccgggtggcctcggtcggtaccctgggcgcggagcagctgcctcattagtattcgtacccacgaggcggcgcagcgggccctcggggacagcgagcgtcgcggccatggcttatcactcgggctacggagcccacggctccaagcacagggcccgggcagccccggatccccctcccctcttcgatgacacaagcggtggttattccagccagcccgggggatacccagccacaggagcagacgtggccttcagtgtcaaccacttgcttggggacccaatggccaatgtggctatggcctatggcagctccatcgcatcccatgggaaggacatggtgcacaaggagctgcaccgttttgtgtctgtgagcaaactcaagtatttttttgctgtggacacagcctacgtggccaagaagctagggctgctggtcttcccctacacacaccagaactgggaagtgcagtacagtcgtgatgctcctctgcccccccggcaagacctcaacgcccctgacctctatatccccacgatggccttcattacttacgtgctcctggctgggatggcactgggcattcagaaaaggttctccccggaggtgctgggcctgtgtgcaagcacagcgctggtgtgggtggtgatggaggtgctggccctgctcctgggcctctacctggccaccgtgcgcagtgacctgagcacctttcacctgctggcctacagtggctacaaatacgtgggaatgatcctcagtgtgctcacggggctgctgttcggcagcgatggctactacgtggcgctggcctggacctcatcggcgctcatgtacttcattgtgcgctctttgcggacagcagccctgggccccgacagcatggggggccccgtcccccggcagcgtctccgctttggaaagggatcctctaagtcacct

SEQ ID NO: 6961 - DNA, 1227 bp, Homo sapiens
gggacgggagaaaacttaggctaggtcgaggcctggtgttagacgccacggacatggtggccgagaccggcggggtgggggacgtgtcgcgcggccgggtggcctcggtcggtaccctgggcgcggagcagctgcctcattagtattcgtacccacgaggcggcgcagcgggccctcggggacagcgagcgtcgcggccatggcttatcactcgggctacggagcccacggctccaagcacagggcccgggcagccccggatccccctcccctcttcgatgacacaagcggtggttattccagccagcccgggggatacccagccacaggagcagacgtggccttcagtgtcaaccacttgcttggggacccaatggccaatgtggctatggcctatggcagctccatcgcatcccatgggaaggacatggtgcacaaggagctgcaccgttttgtgtctgtgagcaaactcaagtatttttttgctgtggacacagcctacgtggccaagaagctagggctgctggtcttcccctacacacaccagaactgggaagtgcagtacagtcgtgatgctcctctgcccccccggcaagacctcaacgcccctgacctctatatccccacgatggccttcattacttacgtgctcctggctgggatggcactgggcattcagaaaaggttctccccggaggtgctgggcctgtgtgcaagcacagcgctggtgtgggtggtgatggaggtgctggccctgctcctgggcctctacctggccaccgtgcgcagtgacctgagcacctttcacctgctggcctacagtggctacaaatacgtgggaatgatcctcagtgtgctcacggggctgctgttcggcagcgatggctactacgtggcgctggcctggacctcatcggcgctcatgtacttcattgtgagtctggtgcacccccccattcccctgccttcacttgagggcaaacctccccctcctggccaggcttcagttctcctttcttccaggtgcgctctttgcggacagcagccctgggccccgacagcatggggggccccgtcccccggcagcgtctccagctctacctgactctgggagctgcagccttccagcccctcatcatatactggctgactttccacctggtccggtgaccccctggccccagatggcactgagtttttcattcattgaagatttgatttccttga

SEQ ID NO: 6962 - DNA, 1174 bp, Homo sapiens
gggacgggagaaaacttaggctaggtcgaggcctggtgttagacgccacggacatggtggccgagaccggcggggtgggggacgtgtcgcgcggccgggtggcctcggtcggtaccctgggcgcggagcagctgcctcattagtattcgtacccacgaggcggcgcagcgggccctcggggacagcgagcgtcgcggccatggcttatcactcgggctacggagcccacggctccaagcacagggcccgggcagccccggatccccctcccctcttcgatgacacaagcggtggttattccagccagcccgggggatacccagccacaggagcagacgtggccttcagtgtcaaccacttgcttggggacccaatggccaatgtggctatggcctatggcagctccatcgcatcccatgggaaggacatggtgcacaaggagctgcaccgttttgtgtctgtgagcaaactcaagtatttttttgctgtggacacagcctacgtggccaagaagctagggctgctggtcttcccctacacacaccagaactgggaagtgcagtacagtcgtgatgctcctctgcccccccggcaagacctcaacgcccctgacctctatatccccacgatggccttcattacttacgtgctcctggctgggatggcactgggcattcagaaaaggatgcctggctctgagccacccctgctttggcgcaggttctccccggaggtgctgggcctgtgtgcaagcacagcgctggtgtgggtggtgatggaggtgctggccctgctcctgggcctctacctggccaccgtgcgcagtgacctgagcacctttcacctgctggcctacagtggctacaaatacgtgggaatgatcctcagtgtgctcacggggctgctgttcggcagcgatggctactacgtggcgctggcctggacctcatcggcgctcatgtacttcattgtgcgctctttgcggacagcagccctgggccccgacagcatggggggccccgtcccccggcagcgtctccagctctacctgactctgggagctgcagccttccagcccctcatcatatactggctgactttccacctggtccggtgaccccctggccccagatggcactgagtttttcattcattgaagatttgatttccttga

SEQ ID NO: 6963 - DNA, 982 bp, Homo sapiens
gggacgggagaaaacttaggctaggtcgaggcctggtgttagacgccacggacatggtggccgagaccggcggggtgggggacgtgtcgcgcggccgggtggcctcggtcggtaccctgggcgcggagcagctgcctcattagtattcgtacccacgaggcggcgcagcgggccctcggggacagcgagcgtcgcggccatggcttatcactcgggctacggagcccacggctccaagcacagggcccgggcagccccggatccccctcccctcttcgatgacacaagcggtggttattccagccagcccgggggatacccagccacaggagcagacgtggccttcagtgtcaaccacttgcttggggacccaatggccaatgtggctatggcctatggcagctccatcgcatcccatgggaaggacatggtgcacaaggagctgcaccgttttgtgtctgtgagcaaactcaagtatttttttgctgtggacacagcctacgtggccaagaagctagggctgctggtcttcccctacacacaccagaactgggaagtgcagtacagtcgtgatgctcctctgcccccccggcaagacctcaacgcccctgacctctatatccccacgatggccttcattacttacgtgctcctggctgggatggcactgggcattcagaaaagaatgatcctcagtgtgctcacggggctgctgttcggcagcgatggctactacgtggcgctggcctggacctcatcggcgctcatgtacttcattgtgcgctctttgcggacagcagccctgggccccgacagcatggggggccccgtcccccggcagcgtctccagctctacctgactctgggagctgcagccttccagcccctcatcatatactggctgactttccacctggtccggtgaccccctggccccagatggcactgagtttttcattcattgaagatttgatttccttga

SEQ ID NO: 6964 - DNA, 1052 bp, Homo sapiens
gggacgggagaaaacttaggctaggtcgaggcctggtgttagacgccacggacatggtggccgagaccggcggggtgggggacgtgtcgcgcggccgggtggcctcggtcggtaccctgggcgcggagcagctgcctcattagtattcgtacccacgaggcggcgcagcgggccctcggggacagcgagcgtcgcggccatggcttatcactcgggctacggagcccacggctccaagcacagggcccgggcagccccggatccccctcccctcttcgatgacacaagcggtggttattccagccagcccgggggatacccagccacaggagcagacgtggccttcagtgtcaaccacttgcttggggacccaatggccaatgtggctatggcctatggcagctccatcgcatcccatgggaaggacatggtgcacaaggagctgcaccgttttgtgtctgtgagcaaactcaagtatttttttgctgtggacacagcctacgtggccaagaagctagggctgctggtcttcccctacacacaccagaactgggaagtgcagtacagtcgtgatgctcctctgcccccccggcaagacctcaacgcccctgacctctatatccccacgatggccttcattacttacgtgctcctggctgggatggcactgggcattcagaaaaggttctccccggaggtgctgggcctgtgtgcaagcacagctgctggcctacagtggctacaaatacgtgggaatgatcctcagtgtgctcacggggctgctgttcggcagcgatggctactacgtggcgctggcctggacctcatcggcgctcatgtacttcattgtgcgctctttgcggacagcagccctgggccccgacagcatggggggccccgtcccccggcagcgtctccagctctacctgactctgggagctgcagccttccagcccctcatcatatactggctgactttccacctggtccggtgaccccctggccccagatggcactgagtttttcattcattgaagatttgatttccttga

SEQ ID NO: 6965 - DNA, 541 bp, Homo sapiens
ccccagctcaccctctgttgccccagtctctcttcctcacccctgcctcaggatgcctggctctgagccacccctgctttggcgcaggttctccccggaggtgctgggcctgtgtgcaagcacagcgctggtgtgggtggtgatggaggtgctggccctgctcctgggcctctacctggccaccgtgcgcagtgacctgagcacctttcacctgctggcctacagtggctacaaatacgtgggaatgatcctcagtgtgctcacggggctgctgttcggcagcgatggctactacgtggcgctggcctggacctcatcggcgctcatgtacttcattgtgcgctctttgcggacagcagccctgggccccgacagcatggggggccccgtcccccggcagcgtctccagctctacctgactctgggagctgcagccttccagcccctcatcatatactggctgactttccacctggtccggtgaccccctggccccagatggcactgagtttttcattcattgaagatttgatttccttga

SEQ ID NO: 6966 - DNA, 663 bp, Homo sapiens
  misc_feature (629)..(629): n is a, c, g, or t
  misc_feature (634)..(634): n is a, c, g, or t
  misc_feature (661)..(661): n is a, c, g, or t
gggacgggagaaaacttaggctaggtcgaggcctggtgttagacgccacggacatggtggccgagaccggcggggtgggggacgtgtcgcgcggccgggtggcctcggtcggtaccctgggcgcggagcagctgcctcattagtattcgtacccacgaggcggcgcagcgggccctcggggacagcgagcgtcgcggccatggcttatcactcgggctacggagcccacggctccaagcacagggcccgggcagccccggatccccctcccctcttcgatgacacaagcggtggttattccagccagcccgggggatacccagccacaggagcagacgtggccttcagtgtcaaccacttgcttggggacccaatggccaatgtggctatggcctatggcagctccatcgcatcccatgggaaggacatggtgcacaaggagctgcaccgttttgtgtctgtgagcaaactcaagtatttttttgctgtggacacagcctacgtggccaagaagctagggctgctggtcttcccctacacacaccagaactgggaagtgcagtacagtcgtgatgctcctctgcccccccggcaagacctcaacgcccctgacctctatatccccaaanccccnttccccctttaattattccccccaacnaa

SEQ ID NO: 6967 - DNA, 839 bp, Homo sapiens
gggacgggagaaaacttaggctaggtcgaggcctggtgttagacgccacggacatggtggccgagaccggcggggtgggggacgtgtcgcgcggccgggtggcctcggtcggtaccctgggcgcggagcagctgcctcattagtattcgtacccacgaggcggcgcagcgggccctcggggacagcgagcgtcgcggccatggcttatcactcgggctacggagcctgcaccgttttgtgtctgtgagcaaactcaagtatttttttgctgtggacacagcctacgtggccaagaagctagggctgctggtcttcccctacacacaccagaactgggaagtgcagtacagtcgtgatgctcctctgcccccccggcaagacctcaacgcccctgacctctatatccccagctgcccacacatacagctgactcttctctgtcctgttggctgcacagggccaggcccatcgtggacacccaggcgatggccttcattacttacgtgctcctggctgggatggcactgggcattcagaaaagaatgatcctcagtgtgctcacggggctgctgttcggcagcgatggctactacgtggcgctggcctggacctcatcggcgctcatgtacttcattgtgcgctctttgcggacagcagccctgggccccgacagcatggggggccccgtcccccggcagcgtctccagctctacctgactctgggagctgcagccttccagcccctcatcatatactggctgactttccacctggtccggtgaccccctggccccagatggcactgagtttttcattcattgaagatttgatttccttga

SEQ ID NO: 6968 - DNA, 251 bp, Homo sapiens
cggtggtttgggctcatgcttggtatttctgtcatctactctgatacctccaaacccacggctccaagcacagggcccgggcagccccggatccccctcccctcttcgatgacacaagcggtggttattccagccagcccgggggatacccagccacaggagcagacgtggccttcagtgtcaaccacttgcttggggacccaatggccaatgtggctatggcctatggcagctccatcgcatcccatggg

SEQ ID NO: 6969 - DNA, 510 bp, Homo sapiens
gcatctctctggcacttggcagcgatggccttcattacttacgtgctcctggctgggatggcactgggcattcagaaaaggtcagtgccaagcccctcccttaccctcccctccctgtgagctcttctcccaacctccctagggcatatgtggtggtccccagctcaccctctgttgccccagtctctcttcctcacccctgcctcaggatgcctggctctgagccacccctgctttggcgcaggttctccccggaggtgctgggcctgtgtgcaagcacagcgctggtgtgggtggtgatggaggtgctggccctgctcctgggcctctacctggccaccgtgcgcagtgacctgagcacctttcacctgctggcctacagtggctacaaatacgtggggtgagcacttgtgggccagggggaggtggccttggatctgggcctgcatagctgtagcctcgaactgtgaccctggacatgtctcggcccctagtgacctctagcactgc

SEQ ID NO: 6970 - DNA, 187 bp, Homo sapiens
ctaaagggccacattccacttgatcccttttattaacgaaattgtactttgcagcaaggtggggtgtggccacagagctctttaaagatgggagcctggaggcgggaggttggctaattgcatgttgccttttggcttctttccagtctttaatcatggatgacctcttatctgtaagttctaggcc

SEQ ID NO: 6971 - DNA, 593 bp, Homo sapiens
aatcactgcacccggcttctgtggcttttctgacatattccatgcctgactttgaaaaaactctcaggtgaaagtcttggttgtatgcagtagcaagcatgtactagattgataaatacaaaggggcttaccacaagatctctctctccatctctggatggagacaccatcagatctctctctccatctctgtctctaggtttgtctgcatactagcttaatttcttcttactcaagccttttctccataaggcgagatatgtggtcacaaaagctcctgtatttctcattacacacagttcctgtcatcacagagaatgattaacttggcctggttccagtttggaaaaatattcaagggaagaattctgattggccaatttaggccagatgttcatccctgagccaatcaactgaggccagaggggtggagtcatgtgagaacatggcagcccccatgagaggcacgtgactggagtaggaagtgtgagtctccatagaggggagagggctgctaggctgaaaaggcaaaagatgtctgcagtaaaaggaatagattaggagatatattctgttaaacctgttaattatta

SEQ ID NO: 6972 - DNA, 386 bp, Homo sapiens
ggttgcctttgctgaatgaacgttgagtggtcacagggccagaggctttgtctcttactgataccaaaggagttccccaacttgagtggcttctgatgccagtgcagaagagcattagtatttgagcagttgagaagtacattcagaggaaatttagagaaaaagattattgaaattatcccaattatgatgccaactaacatatgtatgtgattatttttaactaaagaagaaggataaagaactttgaaccagtatagtgtggtcctttgtctatttatttgcatattttgatttttaaataatgaacaaaaaggattcattcaaagcaaagctattttaaacttaccctgaaaagttaaaagtgattctttgggaaaagaagg

SEQ ID NO: 6973 - DNA, 477 bp, Homo sapiens
ggggaggccaaatctgttttctttctgtcttcccttgcctctctttctttgtcctctttccattattacctcctccttcctctcatctccaacgttaattcatttgataaatatttagtgagtgcttatgatgtgctaagtactgttctgacactaaggatacagcagcaagcaaaatgacgcccctgcattctagtgcagtgcatctcaagctttaatgtcatatgcatcatctgtgggtcctgccaaagagaagaattggactcagctttcaaataaaggtgatgctgatgccaccagtccacatcctctgggaagtaaggttctagactagaacactggttctcaagcttggttgcacataggaatctcctgggagttttacaaaatactaatgctgagtctcttccttataacattactgaatttaattgttctagaacacaggagaggatttttttaaactcccagggtgat

SEQ ID NO: 6974 - DNA, 1050 bp, Homo sapiens
acctgggcataaattaaataaacatatacaggatctgtatgctaaaaattgcaaaatactgataaaagaaatcaaagcaaacccaaagaagtggagacacataccgtgttcatgtactggaaggctcagcagagacgtgggttccctccagactgatgtacaggtttgatgtacttgctagcaaaaatcccagcaaggtatttttttgtagatgcgcaagattattctaaaatttgtatggaagggcagtgaaactaaaagtcacgaaaataatcttgaaaaagaaaaagaaaatgggcagaatcactgtatttgataacataccttgctatataactgcagtaatcaagacagtatagtgttggtgaagggacagacacaaggtcaatgaaacagaatagagaacccagacatagacccacacaagtaccaccagtggatttggacaaggtgcaaaagcaactcattggaggaaggcagcctatttagccaatgtgactggagcactggatacccataagccaaaaaaagaaaaaaaaaaaaaaggaccttgtctttggcctcacacttttgtaaaattaactcaaatggaaaatgaaattaactgtaaaacataaaactattacacttttgggaaaaaaatagaagatctttggtatctagggtcaggcaaagagttcttagacttcataccaaaagcataatctataaaaggaaaagttgataaattggaaacatttttaattcaacattttaaattcaaaattaaaaatgtcgctctattaggataaggaaaagacaacctactgccagggagaaaatacttgcaaacctcctgtctgacagagatcttatacctagaaaatataaagaatctcagaactcaacattaaaaacaatccagttagaaagtaggccaaagatagacattttaccaaagacattcagatggtaaataagtacatgaaaagttgttcaacataattaaccattagggaaatgcaaattaaaaccacagtgagatagcactacacacggattagagcagct

SEQ ID NO: 6975 - DNA, 490 bp, Homo sapiens
caaaaagaggtcacatgactagtttctacttgcacggaagctgggaaagaaagtttcagtttctactttgaagaggtgcatattagccacacagaaggataaatgtttcctttaatattccatgatgtacaacactctaaataggccttgccatcatgctgatattatgctttgaacatcgtaagttaataaggtctggggagcaagaagcattacaaaacacttagttgggaaatgcacatacacacacagaacaaaggaatgaatattcctatttagatatctggtaatcctttaagacctgtaagttcttccctaagagtagattcccaatagaaatctgattaaattcactccaatccctaaattctaaaaccctgctgtactactaccaccactgtcacgttcttatttttatatttgtagaaaagtcccaatgaatacctggccaaaacaacatcaaaaacaaaaacaacacacacaaacaaat

SEQ ID NO: 6976 - DNA, 270 bp, Homo sapiens
gggaattataattcaagatgagatttgggtggggacacagccaagccatatgaatcctccctttttccttcaacaatggatatcctggacaaataagttacactaggacagaaaaagaaagggacaccaacgattattccaataaatttttgaagtatacagttccaaatcaggtatttattttattgtaaaagatcaagaaaatgaaaataatccaagtcttttcatattttattctatacgtattatgttgtcaagtcatataacatt

SEQ ID NO: 6977 - DNA, 515 bp, Homo sapiens
accactcatgccacacatccccaaattgatcaacccagtccttgtgtgtgtgtgtgtcccccaaacacactgctggagctgagaaggagctgaccaggttagtttcgacaactcagtccttcattcagaaagatgaacaaccaaggatcatgatgggaaaaccaccagcacataagaggaaaggtcaggaagaacaaacagaatagtccctgaaggaagcagataaattagggaactggaagaaaattttctaaaaatctcatagtgtcctgcaagagttttgggaagatagtacatctgtaaactgttaataagaagtatgttctaggcttaaagtataataataataaaaaaagaagtatgttctaggaaatgaagcaatgaaaacaaagagtctgtagaaattagacacatgactgtcacaagattcggtacctgaagtagatgataaaatttcggagatcttatggagtttaaagcaaactatagagaggcaaaaaatataatagaaatgc

SEQ ID NO: 6978 - DNA, 453 bp, Homo sapiens
gacactaaacattctgacatctgttttcgacacattaccaggtttcagaattggcaaagagaaattatttcttaactgctcacccaccattatatatgctttccacccatatgttacccaccttcctccttaaaaaatttgatgatgttatttaataaatttctaaacctaagtcaccccagcctattttgagatgttttgataattattttcaggtgaaattttagaaacagttttgaaaaaggtgggaatagctggtaaggtctctttattatttatttatttattcatttattcaattctttttttttcttttcaccaaatagattttaggtaaaccaaggctttgaatagaacagaaaagtgtatgtatgtttgtacatgtgaactaattcgccaaattcgatgtatttttttctaccgaatctaaaattctattgaagagcttttttt

SEQ ID NO: 6979 - DNA, 451 bp, Homo sapiens
taacctgtagtaagttcagtaagtgttgaatcaatgaatgaatgggttccttggatgagggagaaagcccaaagctcagcgtgttgtagttatttgttacatttatatacaaggttgtccaggatgtataatccaggctttgttgagtggatgagggtatcctgactggggcctggcaaccccccgacatccacagaggaaaacaagtgtttgtgagagaagtgatagaatttgtcaaaagtatatgaaattagttacataaaatctgaaacatacattgtggttctgtttgtcctgtgactatgtaaaattgccattgaaaaaacccagaaagccgggcgtggtgactcatgcccgtaatcccagcactttgagaggctgaagcgggtggattgcttgcgcccaggagtttgagaccagtctgggcaatatagagaccctatctcaaaaa

SEQ ID NO: 6980 - DNA, 654 bp, Homo sapiens
ttcatctgacttaaattcttacactttgggctacaacttaaaaaaggctatgacttagtggaaattggcacttttaagtacaatatgaattaatagtataatttcgctgtcccccagagataatgctagtaccaatcgaaagctcagggatgctactgttgacgcatcagcaagagttcttgagcagttttacctgtccatcaatacaaagagttcccacaacagtagtgggattcctctgcctctctgaagatatgagagctataggagggattcccatgttggaggttagaagagctgacctccaatgtcccgtctaattccaagattctccaataatgactttggaacagctgtgtacagattatacttggaattatgcttagatactattgctgcaggaatgaatagacaaattttgttattaaaaaattgattttattaagtggaagttgacagaattatcctctttataatggaggaacattatgcttatgcatatgcatataccttatgcatatgattatgcttgtgcttccttctttaatggatttacctattcaaaagcttaataaatgttataagactctaaaacatttaaatctttcatttctcaattttatcaaataaacattcctggaatttgtgcatatt

SEQ ID NO: 6981 - DNA, 566 bp, Homo sapiens
ggaagggagaagggtaagacacaaagcagagattgaataaataggatttagcatcttactggatgtgagagtttagggcaagaaagtcattaaaagttgtataatgaaggttttaatggagagaaacatgacagacatgttgattttgagacaatgagaaaaccacctcttttttaaaatcttcagacacatacctgtggccactcatttcctaactgccaaccctacttcactcaatattatgacttgtacttttaggggacgtataagaatcttgaaaaaagaagaaaggattcaaactagggtttgctaactccagcctttcccactgcaccaagaaactaccatgtcacatcattatatatgatgtgtatatgggtattttgtttaggatttttttttgggataggggtcttgctttgctgcccgggctgggactccaaactccggggctcaagtgatccctcctgccttagcctcctgagttgctgggattacaggcaccagctgctgcacccagcttatatggtatttttatccaagaaatctagtcatcttacaaataa

SEQ ID NO: 6982 - DNA, 288 bp, Homo sapiens
  misc_feature (13)..(14): n is a, c, g, or t
ttgaggatccccnncttgtaatccaagcagtcgaactaaagactatttgctatatattagcattacggttagaagtctggaagcctttggaggctggcaaatctgagttcaggtctagctcttcgagtttactggctgtgtaaccttaggcaatttacttaacctccgtgagtctcagtttccttatctgtcaaatgaggataaaagaacttagagttgttattgagattaaacgggatgattcatgtaaaatggcttagaataacgactgcttggattacaaggatt

SEQ ID NO: 6983 - DNA, 844 bp, Homo sapiens
aagaggctgccctgcaaccctgggctggagtattgctgtggtcctggatttctggactttatttgcgttctcaagtggcgaagtgttcctcaacctggacccacatcagaagcaggttctccgagcccctaagcagcggcgtgacaaagtaattgtttaccctggaaatagactgttattttttaaaaattattgtcagggcttgctttaatgttcttaatgtttttgtatgagatcctccatgtgagatttgaaaagatccactatgcgggtcatctaaccggtcactagacattgattccacacttactacgtcgagcacagttgacactgggaatacatggatggacttatactagccctaaaataactccttttctattagaactttactaggtaaaggtatttgaatgtctgaactccatgtttagaaggagtcattggttttaaggctctgtcctagtacacctgtaagagcatttgcttaaaattgcctggcctttgtatgttatctctgtcacttcatatttgaaaatcacttgctagaatatggcctgatcaatgctgttatgctagtgagaaaatccacaactaaagactatttgctatatattagcattacggttagaagtctggaagcctttggaggctggcaaatctgagttcaggtctagctcttcgagtttactggctgtgtaaccttaggcaatttacttaacctccgtgagtctcagtttccttatctgtcaaatgaggataaaagaacttagagttgttattgagattaaacgggatgattcatgtaaaatggcttagaataacgactgcttggattacaaggatt

SEQ ID NO: 6984 - DNA, 262 bp, Homo sapiens
ttttttttggccaaaccgcagacaaagtgatcatcctcctgcaagaaagcacttgaatcatatgaaaaaggcagctgcatataattgtttctagaaatacacgaagcataaccaaatcattctaaacatcctccaaagagaggtatatgcaaccagctgtgaaagccaggagctgctggaacagccacaccagggtgtcggtgcatggccagagagactgaggtatgacaaagtctcactgccaaacaccaagccactcaaa

SEQ ID NO: 6985 - DNA, 469 bp, Homo sapiens
acatcttctatagcacatgagaggacctgggggagacccaggactgaggatcaagtctctcagtttcttttgcatcaatgcagtgatggaggcagaggcattaaaaaaacaaaacttactctggaccatgctcactgttaaatagaggcttaaggcaaaagctcttagatgtatgtgagtaatgatgagtaaaagatgcagctgcaactaattaggtaataccatatttagaagaaaagacttcgttttggagatatgcatgatacatagaaatatacttgacacccataatgtatcaagacaaaaatagatatacttttatcatagaactgcaagaaaatcactttatgcataaattctcaaagctttctctccctgtcactgcttagatttaatcaatgtatagactaattatgtttactccctcttaatcctgcctttgtctatgaccctgaaaaagaacaaaata

SEQ ID NO: 6986 - DNA, 312 bp, Homo sapiens
atatacataccatattacaagcttgatattcctctaggtcagaagttacaactttatttccatttcctcatgatctagcatagtgcccagtactgctcatttgagtgaaaataacttatgtgacactctacatttgtacatatatcttaaatgatgtccatgaaagccctatgtgttagatgaactacccattctgcaaaaaaatactattctggaagttttaaagttcatttttattggttgttcttttttgtgtgtgagcagcaaacatatttcttagtactgctacattaggtcaaagagtaaagagaa

SEQ ID NO: 6987 - DNA, 392 bp, Homo sapiens
aaaagagctccagggaattctgatgctcagacaggtctggaagttactgctctaaatcttattttgttgatttactggtatgttataatgaaattagtagtgagagtcttattagagtaatggtagtgctttgcagagttcttagaagacaaaaacaaaatgtaagttctgtcagtgaatataagaggttatcctagttctttaaacacaaacaaacaggcctttagctggattctatagcaacagtgaagaggcaaggggagacagctaatttctaagccactcaaggcctaaactactgaagcaatttatgagaaggcaatgcatattagctcaattattatcactcctccagggaatttaaatgaaccggtctcatgccttctttgttt

SEQ ID NO: 6988 - DNA, 665 bp, Homo sapiens
gcctcccagattcaagcgattctcctgtctcagccttccgagtagctgggattacaggcgtgcgtgccaccatgcccaactcattttgtatttttagtagagatggggtttctccatgttggtcaggctggtctcgaactcccaacctcaggtgatccacctgcctcagcctcccgaagtgctcggattacaggtgtgagccaccgtgcccacccccatcatcttcttataaggacactagttattggattcagggcacacactaaatccaatgtgattgcatctcaagatccttaactagttatagctccaaaaactctctttccaaatgaggtgacattctgaagttctggatgggcgtgaagtttgggagatgctacacagtggaagcacagaggagcagttaatttatagcaggtgctcatgaaaggtttcatgaaggaaggagcattcgactgagccttgaagaaggtcaagtgtttcaaccagaaggggtgtgacaagggaaatctaggtacaagaaaccacctgatcaaaagctctacctggctggaattgcgggagggaagaggaaagggaagcaagaaaacattgtattgtgggatagggaggtaagcagggagtttacacctcagactctgagtcaggtcagtactggtgagaat

SEQ ID NO: 6989 - DNA, 334 bp, Homo sapiens
ttgaatcaggtttcaagtactcttagcttttttctacgtcagagaatccaggtctctaagtctgacccagcttcttgtgcttgagccactagcaagccctaccagggaagacacaaatgaaacttactagctgcgtgaccttgagcaagttgctgaacctctctgtgcttcaacgtcctcatctataagttggggataacagtaccatttatgtcacagagttgtcatgaagctaaatgcacatatataattataatgtataatatgttatatatattacttgtataatattatacatgatataaatatatatattatataatgattcctggga

SEQ ID NO: 6990 - DNA, 865 bp, Homo sapiens
ctttactaagatctcttccacccctatctcatatatcgggtttatgggggccggtcgcatcgtagtttatgtaacaaattcaaagtgaaaatcatgtttacttttacttatacttatttgataaaaatatttttgaaacgatagtacttattttattatttgatatttcagttcctattcaattgtggcagattttctctgtttcacattttagattggcgttggtaatagaaatgtcagaatgttcaaattggccttcacgttgtcggagtgaacacattgacacctagctttaagactgatttatctgttggtgtactgaaggtttccatgtaggacttcaaatgtggaaaaggaaaagcagtcaggaaaatggggcattctttggagagtcacgcgttttgattcggacatttccgtagagctcggctcccagtgttgtgttcctcggtcgaaagggtctctgctgtttggggactcactggcctctcctagggactcctttgtcttgtgaaccccacgctgttggattctgtatcattatgctgaattctctgcacagttttccctggccaacctgcccacatccttggagatttgctttgccagtgggaatccttacattgctgtttcacagtagacgggacgaggtcagcgggagtcgtgctcctaacacacacattgaacgaaacagaagatgattgaaagtgtgaggaggctcgtgtgcaagggagaacagggttactatacatattagtgtatatatatacatacatatatatatatatatattgtacatatctaagtttgagtcattcaaactaggtgcaaaatgctgacttcagagtctgaattaacatctctg

SEQ ID NO: 6991 - DNA, 476 bp, Homo sapiens
attcattttttttttttaatttgggaagtgggacttgactaaaatgaaagacttaggctctgtgaaaggcactttaaagaaaataaaaagagccaggcatggtggctcatgcctataatctcaacactttggaaggctgaagtgggagaattgcttgaatccaggagtttgagaccagcctaggcaacatagcaggaccacgtctctacaaaaaattaaaaatttttgacattttaggaagaaggatcacttgagccctggaggttgaggctgcaaatagctatgatcacaccactgcactccagcctgggtgacagagtgagaatccatatcaacgaaaagaagagaacaggtcagacgcggtggctcacgcctgtaattccagcactttgggaggccgaggcgggtggatcacgaggtcaggagattgagaccatcctgcccaacaacatggtgaaaccccgtctctattaaaa

SEQ ID NO: 6992 - DNA, 396 bp, Homo sapiens
cctcctgatccgcccatctcggcctcccaaagtgctgggattacaggattgttctcaaatgcttttaactagtatcttgcctgcacatgtgttaatggtaaaaagccaggaatgttgtcttttttcaattccatgaattggatttagcagctgaattagatggtattcattataaatggcttcattagatttgaagctactaaacttacctatttgtataaaaatttatctcaatcatcatcataaccacaattaatttgaatcatttttgtgcacagccttttgccctaaagatattagacaaatctagaccttgctttatataagtacccaacagtgtttaatgacaattagcccacttgtgaagtaaaatgaaattttaaataaaacctttac

SEQ ID NO: 6993 - DNA, 839 bp, Homo sapiens
cagttatccttgtaactcctaatgtctatataaaagatttttatattttttaattcttaaaattttattatttatttcacaccaggccatcactgtgatacattttttaaaacacattaaattatcaccagaaaagtgctgtgatggaaaatataaattgaaataccttttctggttaggagagtaattctgtttttctgatagagaatagaagagtccttcaggcccctccaaactgtcatattccgggcatcgggtgtccccatcctcacttcagtccacaggcagggtcctcagtcttcagcgctccttctctttcccctttgtcttgtgtctccttgggtctcttttctccaagacctaaactccctgaggacaggactattttttacatcttgatgtcactcctgagcacttgctttaatgtgttggacactgggtccattaaagattgtatgtgaaattataaaagaaacgttttcacctttctgtggtacagctataatttctggtttcatttaccaactgggtgaaagtggaccagtgacaccatttgtctgggccttcctttcctgaaatataatattggggcaatagtccctggttcttgtaaggtgttcaggcacaaaacgctaggcatgtaacatactaaatgaggttttcccagttaatttatatgattgcaaaggacgttcatatacacggtctgctaaagaattctggggccaattaatctctgtggcatgatgggtaagtcgatcccttctctgggcgtctattacttcagaaaaggcatgaactcaattttagggaccacacaaaaaaatttattcactatc

SEQ ID NO: 6994 - DNA, 1248 bp, Homo sapiens
cccgatacatcgagctcgtaccaagtcatataagcgtaaagatacagtaaaataaactcatcatttttaatgtaggtttttcaaactttgacacacacagagctgtgtctgtaagcctcagcacaatcaggaaacagcctctggcaaccaccaatcccttttcttccctagatgtgccttgtccagaatgtcgtatcaacaggaccacaggcgtgcagccttttgagtccgactccacagcattctgcgtgagatgctgcatgtgtgagcggtttctcagatgtcaagtatagggtattctcacaaaatgttcttttctgcattttcaaagaaagagaagctcaaaatttctacactgctctgagagaagtggtatcagacctcactgcgacaaagtgcagggctatggagtgagacaagcacaacctgtggcgtcaggagcgaggcacctgaactccgccttcgccgatgatcagcaacggctggggatgagacgccggctctgcatgtgctggcctcctgagctgtcgtcagatccacagagacacagtgtctgaagtagctacccttttaatactgcctgtacctttctaactacagatagaaaagggtcatgtttataaggtacggcggtgctagtttttatttcacttgagtccatacaaaaagcaaaaagcgcctgttctataaaaacagcagaaatgatgctaaacagttaacaccagagaaagctaacgggaagaacgtgggcctggggtcccaccatccttgccacgcaaacatccaccagtgcctcatccacctcacactgttctgagcacacgaggctgcatgaccaccgtgaggatctctggaggtgggaacgatgctaactgtcctgttcttagtgcacgtaagactcacgctcccacacacggtattccttttcctgcacattatttgacgctatcctgaaaagaaaaccagcaagtgaaatcgaatctgtccgtagagggtgggaatcctgttcactctaagtcagcccttctcctctaatagaggttagctgtacttttagaatggcctaaattatttttctaagtaccaagaagttacatattcattcatgccaactattttaaatatttcattgcaagtaagtgatttttatcaggcaagtaatacgtaatgaacttcccctaaaaataacagcttcctaatagtgctttttctaagcagaaaataatgactgcaaaataatttttaaaa

SEQ ID NO: 6995 - DNA, 641 bp, Homo sapiens
tatataaatagcttatattgtatttctgttggacaatactgttccaacaccttacagggtacctgttacagaattaggtactcagaaatttattggaatttatgataaaactgttaaacaggatggactctaatagtattccactagaggcctccctgcaactactttttggtatgagatagtttcaactgtgtcatcttgatcactgtcccttggatatacttagctttgtcaacaactttctgaaaatgtccatctgcattcgaacacactagtcttaaaatttaagtataacacttaggaatatattgatatttgccaaaaaaccccagtatttcctccttaaatatattaaaacaatttacaccctgcagattttatgatgtgtgataatttggctttgacacttatcttccattattttgagggcaactgtgtacagaaccaactaagggagccaataaaattcgctaggagtggctgggaggctaggatgaccaaaggtcaaatacatttaagaaaactaagctttagtgtagcacctagatgtcttaggataatttatatttaatttcacattctatgctctaaagtgatacttgataactgtgaacatttcttaataaatgccattattatta

SEQ ID NO: 6996 - DNA, 2951 bp, Homo sapiens
  misc_feature (1)..(1): n is a, c, g, or t
  misc_feature (3)..(3): n is a, c, g, or t
ntntttttttctcctaggtaagatagagtacctttcttatgcatagtaggcccacagatacttgcagaattgagttttaactctttggtgtcagacttatatatgctttagctatttagggtgtagtatgtgcttaattgaagaaaaatgtaatcctaagtctaatacctggacaatagtaatgagaactaaattacttttgacattgaattcttagagctttaaccaaaactggcctcatttctgtaattaatcaggagtgatggtaggtcttcaggtactgtccttggcataggcatttgcatctgatagaaggtgatagcagtgggctaggggaggtcctcaaatgctggtgggaccccaaaccctgctggtgtctaggcgcttgacatcctcacaagaatgaattcaagtatgagttagaaaatagtgaaagtgtggagatttattgcaaagcaaaaagtacacactcaagaaaggggagtgtgggcatgcttgagagagtcacacaaggtggtttggggctgctacctttatggatttctttaaccaagggatggagtattcacggagattcctggaagaagctggagatttctcagaactatggtgctacccatttttacctcaaataacgatgttctggaactgtcatggcactggtgggtatatgattgaatatgtgaatgagcatagaataaggtcctaggagaaacctggatcaaatccagcaccatgttggacccagtttgtctttgccagcttggcccacaccctgtttttcagggtcttatcagccccaagcttctgcagctatttcagcagtttccttttgcttagtcatgtgaaactgctgcctagaattttttattctgctgcaaccatcctgcattattcttgtctaaaaaccatatagacagaccaagcaaatggattattatcctaatagccatgggaatgaagacaaggtagcaacatgcccccgacaaacttagttgttatagataggtcagaagagcctcaaccgatttatccaatcttgaggtgcaaaaggtgttattctgtgttgatcttgctttctaaaacatgcaatgccgctcacagctcaaagtctcttaaatcccttcctctttttctcccatctttgcgtgagtgaatttttttttttcacatcatagtaaagtgaattctttaacctctttaaccaaaatgtcattggaatcttctggttttataataatattcattattatattctggcatgcctgtgcagatagggttttgttcagtgaataattccttttgagccacatatggcagagagagtaccataccaggtaccaggataccaggaaggaggaccaaagaagagtctttgccttcgagaagattgtttttaaagcttttcatcttttttagtaagttgggattccattcatctgcctaagaaggatgaaaggattatctttgtttttattggcaggaatgaggggtgaagtaggggagttcaacatctattttttgcaaataaagtaatatgctttagagtagccagatcctttgggctttgatcactgttagagcatagccaagcgtactaacgcaatatggaaccagatgctagaaagacatttaaaaggccatgtatcttaagtagtttatgtagcaggatttttccccctctacctcttgagccaataaatccattctatctaatttgaccaccactaattaattagttcagatgtaaattaaaggaagttattatttggctgttgaaagatttttatgtatgactacatcattttctcatgttttgatgaatatttagaatcccaatcttatattttttttccttaaaaaatcttgctacaaatcttgtaatagctgaagtgcatgttttaggaaggcagggagcacctttagtttaatggtatgtgatggtggcaagaatgttaacccaaagctttgcttatggtgggggtgggattggggtctaagcctgatgtcactgagcaaacacatacatggcttcaatgtacatgatgacaaatgagtcttaattacatgaatacagatagtaagcttatactgtgcgtggtttgtgacatgcctgaaaacatgagtgtattgagtagatgaagactaaatcattaacagtcaaccattgtgctccttgaattcttttttccttaaaaaacaattttttaaggggattaacacatctggttttgtgttgaaatatctcttaacgaaaatttatggtcttgaaataaagaccagggtgagaaaaaggagtcatctattttttcttattggctaatttattaatagccccatggaaggacatatgaccatcttacctaaattgatgttttcttagttgtgtggcagtgtatatttttgagccccgagactaccaaacagaaaaaaatacatttggaagtaaaaaccaccctttggatatttatattagttcagagtcttctttgcaagaagcagaaactgactctaacacatagaggaaagggttgatcgaaaagatgttgagaaaagcacagacttgacaaggagcctggagaaccaggcttggaaaatgggcaggcattcctaaaatgtggctatactctggctctgcctttgaagctgcgccaccagaaataccatttggggttctggtcatgctttttcttctcttccaaatgacatggaccatagctagcaatctgctggctcataaaactcttatctactggttaaggacctcaaccagtccccacttcagatttctaaacactacgcttcatctcattaccaaggggaaccttgaagtcttcaacctagctcttgctctcaactttttcttagtctttttactttttccattatattctttgatatatttgagaaaatggcttgcttttaaaaagtgtctccaaaggtttggcaaa

SEQ ID NO: 6997 - DNA, 431 bp, Homo sapiens
gggaagatattgcttctgtgcatttcacactatagagagaaacttgcctcattgtgacccctaacctatgtagtaaatcctctaaaattaattttggttccttctgatctgtgcccccatgtgactccccccaagatttcattattagattttgacagccttttaaatttgtaaatgccacaaatttgtcactagagatgaatgggtaaaaagaaaattccttgcagtggaggatatgggtaaaatatttcaagtgacagatctgcatcaataatgttaatgtttatggggtgatgaaaaccatgtaagtcttaagccagaatcttttttcagctgagtcccagaaattttgaccacagaagccaaggcacattccgtttattccaacaagtgttttttcacatcctttccaactgtctgaaagacaattg

SEQ ID NO: 6998 - DNA, 735 bp, Homo sapiens
ggatacagtaacgtaaaaccgcagaactgatgggtcatacaactcatttttgaatttgtactcaaggcctctgctacaaaatcccttgttgtttaacttaaaaagcctagaagcccttaagagctagctgttcttgaattttatctgggttgccttatagtctgagagttgcttatcagatttcctctcccctacatctcgtcatatgtattttcactttcacaaaggtgagtgcagcattaatgaggcaaaagttaatcttttctttgccagcattaataagagaccctaaagagcagcaaaggcatgtccagtgaactcagtcttcagaaaacttaagctttaaaacttcagtaatgaatttagtgcgattttgggaagctaattttgggatgctgttaaaattttgctcttacttgtggattacaggacattgaattaagatgcccaggctgtgcacagtggctcatgcctgaaatcccagcactttgggaggccaaggtgggtgggtcacctgaggtcaggagttagagaccagctggctaatgtggtgacaccatatttctactaaaaataaaaaaaaaatcagctgggtgtggaggcatgcacctgtaatcccagctcctcgggaggctgaggcaggagaatcgcttgaacccaggaggcggaggttgcagtgagctgagatcacgctactgcactccaacctgggcgagtgtgaaactccgtttcggc

SEQ ID NO: 6999 - DNA, 278 bp, Homo sapiens
ttcactattagaggctgttagcactcagacttcatcctgaacctggattagtgatcggttttgttttaagatcctaagagcacaaacaatgagacagaaacaggctccattcgctaatgcactgctcattgaggaatgtcagtgatgacatacatgtggaaaatttggggctaccagacctctccccagtctcatctcagtctcaggcccagaatgaggtgaaaattggagagagggccctggagcagagaaagggggattcctgggacatgtagggc

SEQ ID NO: 7000 - DNA, 462 bp, Homo sapiens
tcatgtctggaatgcataaatgtggatgatgacatgtttgagatgaacaagcacctcacgtacttgagaagcatcatcactttgggggaacttttccctgcagacccggggtgtaagagtagccagaccagtgccctcaggactggacttttctcctggttctcataccagagaaaactaattgttgggtgtgaatgcattgccttgggggttgtgactgggtacagccatcttagaaagcaaagcggtcatatgaataaaaagtcataaggatggattcccactctggaaagttcatcgaaataaaaaatacatacacataaaggagttcatcccaatgacataaatgcaaagagaatttttttggggaagaaattccttgatgtgatgtgtaagaatagactctgggctttcctcagctcctaagtgttggaaaaattgcctacatgagaaaaagaaaaa

SEQ ID NO: 7001 - DNA, 204 bp, Homo sapiens
aggctggagtgcagtggcatgatcatagctcgctgcagcctcggacccctgggcttaagcgatcctcttacctcagcctcccaagtagctggaattacaggtgcatctcaccacgcccagctgatttatttattttttgtagagacagggtcttgctatgttgcccagggtggcctcaaactcctggcttcaagtgatcctccc

SEQ ID NO: 7002 - DNA, 408 bp, Homo sapiens
ttttttttggctttttttttgtgagacagtctcaccctgtcgcccaggctagagttgtttccagctagaaaaggtagtatttttttaaaacactgtgttattctcaaagaacagtgtctctagaagctgaggtttataaaagtaggactaaatatttctgtgttctcctaaaacacatctccttcattttaacctcaagggaatgccacagtatcgctttcaagtcttaagactatctggtagtgaggtataaatgaaagaacatggggttaggacttggaaaatttagatctaaatcccaactctatcatttaatacctgtgaaatcacagcaagtttctaaagctttcatttcatcttctacaaaatagaaaacaacaatacctgccctacaagtttactatgagg

SEQ ID NO: 7003 - DNA, 259 bp, Homo sapiens
ggtcgactggagagaaggcagccaggagcatctgcttcctgattaatggagagtgacatcaccgccgcatgcaccctgactttaaaagcatgtgtagttaagggacttcagcttttcctaaagagtattcctcaagggagtaaggaaaaaaccaaactcaaccactaaagtgttcttccctaaatgtcaaagaaatctggtgggttgctgatgttgtttttctaaacctctttgccctaacaacactttgtaacataca

SEQ ID NO: 7004 - DNA, 411 bp, Homo sapiens
ttttttttttgtataattttgtattccctacagataatcactgccttagctttatctttttttaggttgcttaattttctatctacctacaataatttattcccaaactgtctatagaattataaatctgcaaacatctctggtctactatagtatccttcccatcctctgtatcattgtgggtttatgggggtttttattcctcattggcattttagtgacatttcaatgaggacagatgaacacacgtgctcaatcaatcatatttaaccaggagctagagatgttcattcgtttgtttgtttgtttaagaaatggtctcactatgtagtccaggctggtctcaaaatgctgggctaaagtgatcctcctgcctcaggctcccaaaaagctagggctacaggtgtgcac

SEQ ID NO: 7005 - DNA, 431 bp, Homo sapiens
aaaatttggtactatttaaatgtctcaagaaagccacagagtcacaccaggctaaccctgcgaacacagtagaaaccaaccagcataaatcacagaaagaaagtacacattaaaaaaaaagatcagtgagctgtagaacaacttttagtagcataacttacatgttactggaatacccaaaggagaataaacagaacaaaagcttaaaaagccccagaaaattgaagaaataatagtagaaaaaatacaaaattgatgaaaacaataaacccacagttttaagaatctcaaataacctcaagcacaagaaatgtgaagaaaactatacgaatgcagttcactttcaaaccacttatcactaaaaaaccaaagataagtagaaaatattaaaaaaaaaaaccaggatttttttaaggatgtcttatgcgcta

SEQ ID NO: 7006 - DNA, 141 bp, Homo sapiens
aatgagctccaccagtgtccatacctttggtctccctcaggaaatactcaagttgggttttcataatttggaaagacagggagaattgctttacagaacaaggctagttttgagatgtcattctcccctgccaaaaaaaag

SEQ ID NO: 7007 - DNA, 483 bp, Homo sapiens
gttaacagtgataattccattctaagactttattcatcttctaaaataaaaatgaagatttatatcatgaacttagctgtgatttgtattccagtttaatgggctttaccctaatcactagtgtgattttgtgtctatgaaaaacaaagtattgaaagttagtgttcctgtacaaagagtaatatcacatttgcaacatttagaacctttgtatgtgtggattaataatatcttacatttgatacagttctatatattattttcatggaaactaagtagatatggccggtggtgttttactcatttggcagttaaactttagctgctaaagaaacaagaaacagcctgggcagagtggcttatgcctgtaatcctagcactttggggggccgaggtgggaggatcacttgagcccgtgaggtgaagaccagtctgggcaacataatgagaccttgtctcaattattaaaaaaaaacaacaaca

SEQ ID NO: 7008 - DNA, 498 bp, Homo sapiens
ttgtcactggatccataactagggtcaaatcttagcatgttacagtgggacataaaactcagataactaactcagaaggaaatcacttacacaccaaaagaatggtaagattttgctaataaatattggaagaaacctgggaaacatgtcgagttgattctaagagtgttagatccaacagggtaggctatcacactccatttgtttaattcattgatatagatgcacttaccagagagtctggatttcatggtttagcttgagcagcaggaggtgactcaacatttgcctacatttgatgaggtggagatgtcagagcttccctgctatgatttgggggagagaatccaaagatgtagggagacaggaatgtcacagtggatttatcatgtgtgacttacacgtctaccaccaagcacccattcctaaccatgagaaggcccagaagacacttctttactaagacattgagaaatagaatagtgaggggagcatctg

SEQ ID NO: 7009 - DNA, 482 bp, Homo sapiens
ttgattaaccatatgcatatttgacattaaaataattcataattaggactaacagatttctggcttaaaaaatctaacaattactttaagaagcaaaagacatttccagaataaagtagggggatatatagaaaagttggtaccttttttaaacagagtcttcttttgtaaggaagtagaatttattcatcaaaggagatttatgaaaagtatggtggtatagtgagtggcctcactagttttaatgattgatatttgaatatagcttagtcttataacaactccccaaataaaaatttaaaattcatttgtatccctttgattttcagtgctaaaaactagattgtgaatgtcaaggaaatatttaagttatttctgaactaatgtatttgtagagagaagaagggagtgtgcacgtgatcgagaattatgttttgaaaataaatgaatgattggctattaaaaaaatttttaagccttaa

SEQ ID NO: 7010 - DNA, 2040 bp, Homo sapiens
aactgattcaggtagtttataatggtaatatactctcagatatcccaatatccaacactgattgcatgcacattatgataaacaattatttattcattaggcaaataaatattaatataatttctaatcttgaaaagcattattttaaaaataaaactattcataaacataagttgcatgtgaattatgaataaattataatttatttttgtaacccacaccttattttccaggaacataaatgtgtaagacaaaagcacagtatcagtggaatttctttccttttttaaaaattgatgcttaactttgtaaaactatatcccacattctgaatcctggagtaacttcagctctttagttggagaggctattaaaacattaagaaaagtaatgttgaaaggattctttaatgaaacccttagtgaatatgacagtgagtagtgaaaaataagtttattaagctacttcgcatcctagagtttcatgaaaccctatgaagttttaaataaaacatttatttactattaagtgtagttagtttttaaaatgttaatgaataaagaacttactctctcagtttatcttttacaatctttgaccagttaaaggggaaacaatttttacttaataaaatatttagaagtctgtagagtaggaatctttgaattggatgaaatttagtatttatctaattcatatactcaaacagccatcagatataagattcaggtcttactttctaaattatattattgtatgtatatatgaaatttcaaaaacaatttggtctctttccacttgagaatagtgcatgaagaaaataagtaattcaaatatatggatgtttagtccaaatttagaaatttccaccattttgtaaaattagttcattctacctgatgttaatatctcttttcttaaaaacttattcgagtatgtttttccttttatttttggtttatattataatacctatatacttatgaatctttgcaagtaaacacatagaatttaaactgaaaatgacaggagatagaaattgtactgtctatatattatgttagtgttttataaatagttgtgatgatgaagataatatgataataccagtgattcattagtctgaaaactagaaatgtcactttttcaggcatagcataagtcagatttagttgcagatttgtttggtatatgtaatttcatgtatacactgccctacattaatagaatggtactactatggtaaaaatattaaacatggtcatatttgaatttcaatctaatgactttttagaattcaactttatacagctaaatgcaaaactgaagatgattttaaagttggaacaattatagtttacatattatgctcatcatatgctcaccacaagaagagcatatagactcataattcagattttataatttcagcatagcagagtgagtatatgaattgatttggggatgacaaaaatccgattttgaatcccagcatatagcttaatattcaaccttctctatataattactctatatcagtttcaaatgggaaatataacagaatcttcctcataaggatttatagaaaaaaaatgagctgatgtatgtacagtctttaagatactagtataaatatatatatatatatatacaaacacatatgtaatataaatgtggttgtatgttgttaacttaattatccattaatgtgtagttttacaaacattattattacttctttttcttatgattttacaaccatgacatttcaacttttgatatgggcaactaacagtgacccatctgtcagtcagaagtcctcgtgggtccctctgtctgtctgctaaaagtcctcatgggtccgtctgtctgtgttctaaatgaagtacttcttttctggcctactgcaattttacaaattaccttgtagagattagatacatttgtcccctctagacagaggtaacacctgagtacagaccttaataaatggagtgtggtctgattgaatgaatatttccatgcaggcaaaaaaaaaaa

SEQ ID NO: 7011 - DNA, 422 bp, Homo sapiens
cacaggctggagtgcagtggcacaatctcagctcactgcaacctccgcttcctgggctcaagtgatcctcccacctcaacctcctggagtaactggggactacatgcacaagccaccatgcctggctaatttttgtattttttgtggagtcagcgtttcaccatgttggtgtctcaaactcctgagctcaagcgatcctcccaccttggcctcccaaagtgctgggattacaggcatgagccactgcacctggcatcttatcctccaaggctgtgctaggaggagcaaacacacatagtgatttctgtaaacagatttatttatttatttatttatttatttatttatttattgaaacaaggggtctccaggctggagtgcagtggcgcaatcatatttcactacagcctcaaactcctggg

SEQ ID NO: 7012 - DNA, 109 bp, Homo sapiens
tgatgtctgagttgttttaccattccttgtctgaactttgcatgttagttccccatatcaaattctattgaataaatgatattatgtggtttttacgatgggttgccaa

SEQ ID NO: 7013 - DNA, 500 bp, Homo sapiens
aaactccatgtaagtattaatcttctaaatgttatctttgttacaaatttttttccaattttattttttggctgttgaatttgtggtcctcaaactttagcgatgtatcagaatcatgtggaaagcttattgaaaactggattgctgggcaccacacccagttcctggttcagtaagatgggtggaaggcaagaatttgcatgtccaacaagttcccaggtgatgctgctgccactgctgctggtccagggaccatagtgtgggaatcactagtttttgccatataaaagtttaaaatttggccaggtgtgatggctcatgcctgaaatcccagcagtttgggaggcagaggcaggcagatcacttgagctcaggagttcgagaccagcctgggcaacatggcaaaacccctgtccctacaaaaaatacaaaaattagccaggtgaggtggtgcgtgcctgtaatcccagtaactcaggaggctgaggtgggagaattgc

SEQ ID NO: 7014 - DNA, 678 bp, Homo sapiens
  misc_feature (619)..(620): n is a, c, g, or t
gagttgagcacagagggacagaggcacggaacccccagaaatgtccctcctcagaaacaggctccaggccctgcctgccctgtgcctctgcgtgctggtcctggcctgcattggggcatgccagccagaggcccaggaaggaaccctgagccccccaccaaagctaaagatgagtcgctggagcctggtgaggggcaggatgaaggagctgctggagacagtggtgaacaggaccagagacgggtggcaatggttctggagcccgagcaccttccggggcttcatgcagacctactatgacgaccacctgagggacctgggtccgctcaccaaggcctggttcctcgaatccaaagacagcctcttgaagaagacccacagcctgtgccccaggcttgtctgtggggacaaggaccagggttaaaatgttcataaaagccaggtgtggttgtggcgggtgcctgtagtcccagctactcaggaggctgaggtaggatgatggcttgagcccaggagttcgagaccagcctgggcaacacagcgagatctcttgggggtaaaacaaaaagaaaaaaaaaagttcatacttctccaataaataaagtctcacctgggaaannaattcccctatagggaggcgattacaattcactggccggcggtttacccgcggactgg

SEQ ID NO: 7015 - DNA, 949 bp, Homo sapiens
gagttgagcacagagggacagaggcacggaacccccagaaatgtccctcctcagaaacaggctccaggccctgcctgccctgtgcctctgcgtgctggtcctggcctgcattggggcatgccagccagaggcccaggaaggaaccctgagccccccaccaaagctaaagatgagtcgctggagcctggtgaggggcaggatgaaggagctgctggagacagtggtgaacaggaccagagacgggtggcaatggttctggagcccgagcaccttccggggcttcatgcagacctactatgacgaccacctgagggacctgggtccgctcaccaaggcctggttcctcgaatccaaagacagcctcttgaagaagacccacagcctgtgccccaggcttgtctgtggggacaaggaccagggttaaaatgttcataaaagccaggtgtggttgtggcgggtgcctgtagtcccagctactcaggaggctgaggtaggatgatggcttgagcccaggagttcgagaccagcctgggcaacacagcgagatctcttgggggtaaaacaaaaagaaaaaaaaaagttcatacttctccaataaataaagtctcacctgtgtccctgtctggatccttccccagtgtggccagaaatggggaaggaagagtagggaggtcgggaagggtatcaaggaataacaccctattgtgggcttgcggagaatgggggacttcaaggcgtgtcagtttcaggagggtgagggcaggagcgtgggtggagtcagcaggtccccatgatggccctcactgagagcttcgcccttgtctcctacaagctctgactccattcccagtgggcacccagcaccttcaaccccttcacagcccccaacccagcctctgtcggaggcgaattctcagagtgagggttccctgtcacttgagagaaggtt

SEQ ID NO: 7016 - DNA, 751 bp, Homo sapiens
  misc_feature (9)..(9): n is a, c, g, or t
  misc_feature (60)..(60): n is a, c, g, or t
  misc_feature (692)..(693): n is a, c, g, or t
ttaacctcncctaaaggaaccaaaagctgaagctccaccgcgggtgcggccggctctagnccggccggatccccgggctgcaagatttcggcacgagcacggaacccccagaaatgtccctcctcagaaacaggctccaggccctgcctgccctgtgcctctgcgtgctggtcctggcctgcattggggcatgccagccagaggcccaggaaggaaccctgagccccccaccaaagctaaagatgagtcgctggagcctggtgaggggcaggatgaaggagctgctggagacagtggtgaacaggaccagagacgggtggcaatggttctggagcccgagcaccttccggggcttcatgcagacctactatgacgaccacctgagggacctgggtccgctcaccaaggcctggttcctcgaatccaaagacagcctcttgaagaagacccacagcctgtgccccaggcttgtctgtggggacaaggaccagggttaaaatgttcataaaagccaggtgtggttgtggcgggtgcctgtagtcccagctactcaggaggctgaggtaggatgatggcttgagcccaggagttcgagaccagcctgggcaacacagcgagatctcttgggggtaaaacaaaaagaaaaaaaaaagttcatacttctccaataaataaagtctcacctgggaaannaattcccctatagggaggcgattacaattcactggccggcggtttacccgcggactgg

SEQ ID NO: 7017 - DNA, 976 bp, Homo sapiens
gagagggtcccggttcaaaaccaccacttgctggttgaggagtcgtcagtaagtggctgcgcccccaccctgaggcttgtttctccatctgtacaatggaaatgatgaagatgcccacctgatagggtttttgtggcaaataacatgccagccagaggcccaggaaggaaccctgagccccccaccaaagctaaagatgagtcgctggagcctggtgaggggcaggatgaaggagctgctggagacagtggtgaacaggaccagagacgggtggcaatggttctggagcccgagcaccttccggggcttcatgcagacctactatgacgaccacctgagggacctgggtccgctcaccaaggcctggttcctcgaatccaaagacagcctcttgaagaagacccacagcctgtgccccaggcttgtctgtggggacaaggaccagggttaaaatgttcataaaagccaggtgtggttgtggcgggtgcctgtagtcccagctactcaggaggctgaggtaggatgatggcttgagcccaggagttcgagaccagcctgggcaacacagcgagatctcttgggggtaaaacaaaaagaaaaaaaaaagttcatacttctccaataaataaagtctcacctgtgtccctgtctggatccttccccagtgtggccagaaatggggaaggaagagtagggaggtcgggaagggtatcaaggaataacaccctattgtgggcttgcggagaatgggggacttcaaggcgtgtcagtttcaggagggtgagggcaggagcgtgggtggagtcagcaggtccccatgatggccctcactgagagcttcgcccttgtctcctacaagctctgactccattcccagtgggcacccagcaccttcaaccccttcacagcccccaacccagcctctgtcggaggcgaattctcagagtgagggttccctgtcacttgagagaaggtt

SEQ ID NO: 7018 - DNA, 1698 bp, Homo sapiens
cttctttaggtcctctccatctgtcccaaggacatgagagctgatatctgtgttcatctaaaccggaaggtttttaatgaacatcctgcttttcgattggccagcgatgggtgtctgcgcgccttggcggtagagttccaaaccattcactgtgctcccggggacctcatttaccatgctggagaaagtgtggatgccctctgctttgtggtgtcaggatccttggaagtcatccaggatgatgaggtggtggctattttagggaagggtgatgtatttggagacatcttctggaaggaaaccacccttgcccatgcatgtgcgaacgtccgggcactgacgtactgtgacctacacatcatcaagcgggaagccttgctcaaagtcctggacttttatacagcttttgcaaactccttctcaaggaatctcactcttacttgcaatctgaggaaacggatcatctttcgtaagatcagtgatgtgaagaaagaggaggaggagcgcctccggcagaagaatgaggtgaccctcagcattcccgtggaccacccagtcagaaagctcttccagaagttcaagcagcagaaggagctgcggaatcagggctcaacacagggtgaccctgagaggaaccaactccaggtagagagccgctccttacagaatggagcctccatcaccggaaccagcgtggtgactgtgtcacagattactcccattcagacgtctctggcctatgtgaaaaccagtgaatcccttaagcagaacaaccgtgatgccatggaactcaagcccaacggcggtgctgaccaaaaatgtctcaaagtcaacagcccaataagaatgaagaatggaaatggaaaagggtggctgcgactcaagaataatatgggagcccatgaggagaaaaaggaagactggaataatgtcactaaagctgagtcaatggggctattgtctgaggaccccaagagcagtgattcagagaacagtgtgaccaaaaacccactaagaaaaacagattcttgtgacagtggaattacaaaaagtgaccttcgtttggataaggctggggaggcccgaagtccgctagagcacagtcccatccaggctgatgccaagcaccccttttatcccatccccgagcaggccttacagaccacactgcaggaagtcaaacacgaactcaaagaggacatccagctgctcagctgcagaatgactgccctagaaaagcaggtggcagaaattttaaaaatactgtcggaaaaaagcgtaccccaggcctcatctcccaaatcccaaatgccactccaagtacccccccagataccatgtcaggatatttttagtgtctcaaggcctgaatcacctgaatctgacaaagatgaaatccacttttaatatatatacatatatatttgttaatatattaaaacagtatatacatatgtgtgtatatacagtatatacatatatatattttcacttgctttcaagatgatgaccacacatggattttgatatgtaaatattgcatgtccagctggattctggcctgccaaagaagatgatgattaaaaacatagatattgcttgtatattatgcagttgactgcatgcacactttacatttatttataatctctattctataataaaagagtatgatttttgttacccaaggcaatgtaa

SEQ ID NO: 7019 - DNA, 759 bp, Homo sapiens
taggatatactggtactggcttttagttttagtaaatgttaagttggacaagttaggggcctagcttgggagctgcagaaattggctgagccccacaggtgatttatagataatctttccagtaagaacattgaagggctacacacaatgacacttagaaaaagaagggaaatgaagctgttccttgactactacccagtttctgttgaggtttattacttctagatgataaggtttacacgaagtttacattatgttttttcagttctcaagtttcagcaaatacctgaaccaagtttttttctgttattctaagaactgccctggagtgccttttaacttttgtactaccacgcaaagtgtactatcaattcatgtcctttagctcttctattcttcaatgcatttctcccattcctgtaggtatggcggggatcaacttttcataccaccaagagtcacccctattccctttgaagtactgccctatggcataagcttgttcatacggtgttcaaacagctaccgttcacttctatgagggtcaccttactggaaaccaaggtatgacgagtaactaaatcttctcatcaagcagaagggagctggactttagaaatggagcctgggccacgcagagtggtcacgcctgtaatcccaggactttgggaggccgaggtgggcagatcgcttgagcccaggagtttgagaccagcctgggcaacatggtgaaaccctgtttctacaaaaaaaatacaa

SEQ ID NO: 7020 - DNA, 591 bp, Homo sapiens
cttttcagttttcctagccacacttctcattggccaggaaaattaaatgcatgtcaacactgaagaaaacagatcttggttaaaagcaatgatgtagctaatatcccgttcaggtaaaagattacttatatagtgtgagacaggcatgaggcagagaagtgcttacaggttggtttctgctttgttagcagatttacttttagatcatatactactttgtttttactgttttattgagaaaaaataacaaatatttccaaaattttgcagcatgcaactcagtgcttcagttggcattcaatcaaaatttccttgaaataaaaaaagacaagagagagacttggaattatgactcttctactagattagctccttcatgtcaaaatctgtcaagtttatgatttattcagatagcacttgtttttggtgtaataactaaactgttgctttagagtctactacattctcctctattatttggcatttttctctttattattttgttcaagtaggatattgtgctgagttgaaccatgaaatgaattgtattgagcaacatcaacaacataaatattctggggtgtcatctgc

SEQ ID NO: 7021 - DNA, 1246 bp, Homo sapiens
gttaaagtttgatgttttcagactctaaagcctatgtttttgtaacttaattggactttcagagtgttaaattatggcttcagagtttggctctacctaaaatttagttagatgccaaccagggagaaattaaacctaatccttcaccccaaatatcagaggttagacaaacccatgttaattggagccttatggttattcatattggaggcaatagctttatttagaggaagcccaggacagggccgtctgggatgctagttctggaaatgcagaagcagccactgtatccctgcccaccccctccatccagcccttttggtactactcagtattgttgacaacatttggaatcataagtaacataggacagtaagtattagagaatgattctccgttagaattggacctcagccgatttgagccaaaatttaggaactattcagaagacagtttctttcttttgagtgcttaagacagtgtaaatggttcgaatcacacacattttaagattccattgtatacataagcattttaagaatattgttttaacataattattaggcatactaagttatcatgaatgaaaatgtacatgtgacctgtagtatgttatatattattatggctaaatgttaaatgccatttttttgctttttagttttatgtatttttgtatgtatatacccacatttttacattgatttatgttctaaataataattaaaacaaagtattataaaatgaatgaaatatttttgtgttccatggtcaaattattaataaattcaggaaagaaaatctgatgataaatctgatataaataccagaataattattattaatataaaataatattttcacatatgaaggtatgtcttcatactacaggatttctgacttgaatatattctataatgctttaattcattaccataacaaatgtactaagaattaatgttgcatctttagtattccattttttggaactgtttttcaaatgttctatatcctctagcttattatgctatctaaaataatttcagtgtgttttttcctggggcaactgaatgattcttgttttgaatgagtgataaaatgttttgtgatagtatctaatatttggtcctttacagaaaaaatggcttgtggtactatattgaaaaaactattgtatttcctcaattttactgtgtgttgtcttgtttctataaacaaaaataagttttggatttgtttgaataat

SEQ ID NO: 7022 - DNA, 544 bp, Homo sapiens
ccttctggtatcttcttctttgtcttcccctctcaccactcttatagattcacttttttgctcaagccttcagcttaaattatattcaattaatctaacagaagagttatttgtgctttgtaaatataatcagtctttcccgagtaactgtctacagaaggctgtttgctgtgaagcgtcgttgaatacttttctgtgtctgtggtttactggacttgaaactgtttatttgaaatgttattttctggaatgttctggtgtcagtggacaaagcctatggccaatgatgctccaaaatgctcatttggcacttagaaaataaactaccatccatcccaaattcttccaactgtatcattttctatgaagttagaattttgagtttccaggtctaaagaaatgaaagatatgagaattaacagtattacctggttgttggaatgtggaatatataagaaacatttttccagaaaaaatgtaaatgttgagcctcctgactgtgattactatagagcttgaaagtctatgtcttagaaaaatattt

SEQ ID NO: 7023 - DNA, 427 bp, Homo sapiens
aagagaatacagagtaaaggagaagtccttgtcttccaaatctctctctggatgggactttgagaaaactaccctttttaaaaaatttttttgagacagtctctcactctgtctcccaggctggagtgcagtggtgcagtctcggctcactacaacctctgtctcctgggttcaagcgattctcctgactcagcctcccaagtagctaggattacaggtgcatgccaccatgccaggctaatttttgtaattgtagtagagactgggttttaccatggctggttttgaactcctgacctcaggtgatccaccagcctcggcctcccaaagtgctgaaaatacaggcatgagccaccgcccctggctttttctttttctttttctttttttttttgtaaattaagtaaactgtgtcgttggaggtggg

SEQ ID NO: 7024 - DNA, 294 bp, Homo sapiens
tctcagcacttggcatataggcacataataaatatgaatgaatgaatggattcctagtacttcttgcttctctttctatcatagtcatcatgattatgatgcagtacctagtgtgtctctacctctagaatgaaacaaagaaagctgtgtttttgtcttgctcaccttatatacccagcacttagaaggttctccaaattatatctactgcatgaatgaaggtttctgagatgctaatctgaccatcttcacccgtttctgcccttaaagcttactgccctcagtatcgaacct

SEQ ID NO: 7025 - DNA, 485 bp, Homo sapiens
ctgcgacaagcgtcaggctcacgaagagagggggaaatgcctgaatataaggaggtccagggagctagtgttaaaaactagaagaaaacagatgcccttagtatctgaccactgggcaggacaggatattccaaacttaaaatgaagagaagaaatcacacatgtgcacacacaccccacacacacacccatatgaagtttgaatacaaaggttagtatcctgcatgtggaaagcaaaattaaactttgagcagcagaataaactttacaatagatatgaaggaaaattcgtcagtgtatatgaggaatactaaaatctatcaggaaaatataaaactccccagaggaaaataggagcaaagaggccgggcacagtggctcatgcctgtaatcccagcactttgggaggccaaggcgggcagatcgcatgagctcaggagtttgaaaccagcctaggcaacatggcaaaaccctgtctccattta

SEQ ID NO: 7026 - DNA, 437 bp, Homo sapiens
gtcttgccacttttttacaaatttcatagccagcacgatggctcatgtgtgtaatcccaacagtttgggaggctgaggtgagagtatggcttcaaatcaggagtttgagactatcctgggcaacatagcaagaccctgtctcaaaaaaaaaaaaaaaattaggcaggcatcgtggttcacacctgtagtcccaattactcaggaggctgaggtggagggattgcctgagcccagggttcaagactggcctgtgcaatatagcaagaccccatccctaaaaaataaaaaacacctatcagggtgggtgcatgccagtagcctcagctactcaggaggctgaagagagaggatcacttgagtccagcaggttgggacagcagtgagctatgattgtgtctctgtacttcagcctgagtgacagagcaagaccctgtctc

SEQ ID NO: 7027 - DNA, 240 bp, Homo sapiens
aataagaggatgaaggatgaggaggaggaaaattaaattatacaattgtaaggttcttacattgtttgtggtcatttaatattattttaggctgggcgtggtggctcatgcctgtaattccagctactccagaggctgaggcacaagaatcactcgaactcaggagatggaggttgcagtgagacgagatcgtgccactgcactccagcctgggcaacagagtgagactctgcctcaaaa

SEQ ID NO: 7028 - DNA, 495 bp, Homo sapiens
cactgaattaattgctgttgaaaagaagtcaagtttcttttcatttccttcctaaaagcagtttcctttcctttaagactcactccaggtctctgattctttgattctgaaacactggaaaagcaatcaaatagcagatgccaactctttgtatgttgagcttttggagttttggaaagttgggtctgaacctagaagtgaatttacattacgtctttcctcttctagaggtttcctttggcctatagctttcacatgggagagaaaaatgctggcctaccctacagagattggagtcaggggagagaaaaagggagaaaggtagtgaaaagaggagaggaaacaattatcccttttaaaaccatcctttttggtggcttgatagaaatactctgtcagaaatgctgtttggtattcgttgccagagctagacatcaagggcttagtctcgtttgaaatgtttaggctttagaaggagcaagataagtggggaag

SEQ ID NO: 7029 - DNA, 381 bp, Homo sapiens
taagttatagcaggaggactttaatatagcagctgacagaacttcctgatcataagggatgtgaaaaacttcaaagaaatactgtttccatttgagatgaaaaacaacacaaacaattctccatttagaagtaatattacctagaaaaggagaaacggcttaatgtcttaagattcccatgtttttttcactaacatggagaaaaaaatgacagaaaaaggaaactctagagcgctctatatataaaaccctcagcctgtttacctgagtcctttggggactgagtagttttgaacagctgagttttctggtaaactatgtgtttatcattctaagaattaagtttggataaaaatatctactaaaaatatatttaaattc

SEQ ID NO: 7030 - DNA, 478 bp, Homo sapiens
acccttagggtgttctgacttaggaaaccccatgtgtggcttagctgggcagtggcttcatggcatggggtcacctcatacagccacaggcccaaataagctccaaagatcattgaacctgcttctcagccattcagacaacatcaacaacaacagatgacaatcagcttataactacagattcactgagccagggcacctttcttcaagtcagaaaattttgtcctcataaggagactacttaaatctttacttcactgcagcttaagtcaattttctcttctagcttcaaatggggtcagtaggagtgatcataatctctccaaaaatggtttccactctctcaggcttttatacaatgatgctctattggatattaacagattttcttcttataacattagattgtaagtttccatgaagtgcagttattattttcagattctttatttctcttttaagatgacagcacatgact

SEQ ID NO: 7031 - DNA, 508 bp, Homo sapiens
aggagatggcttcgttccctcaatcactcatccaaagacgtttaatgagcacctattgtgtgtcaggcattgtaccgggcaatggggatatcgtagtcagtaataagtgaggagagatgagttcatttgtgagaggctctgaccagtggaatcagaggaagggagttcccctgggtgggccaggttcaaagacattttggaagtagaatctgcagaacatgatgatcttttggaaacagggcagggacgtgaatgagcacgtaatgtccccatgggtttgtctttccgaaggtttaaaatcctcaagaataaggaacataggcatgtgtcgtaacggtctccacagtgggggagtattatgttagtgcacctgcatgttaactctgctcatgaaggggccacgtcttcaccaccacaaagcctcaagcatgcatatctggtccctcctaccccctccctattgaggtgcaataaaggcccatgtttctcctagtatgggaacagaact

SEQ ID NO: 7032 - DNA, 566 bp, Homo sapiens
ttttttttttagacggagtctccctgtcgcccaggctggagtgcagcggcgcaatcttggctcactgcaagctccacctcccgggttcacgccattttcctgcctcagcctcccgcgggggactacaggcatccgccacctcgcccggctaattttttttttttgcatttttagtagagacggagtttcaccgtgttagccaggatagtctggatctcctgacctcgtgatccgcccgcctcggcctcccaaagtgctgggattacaggcgtgagccaccgcgcccggccaattcatttgttaactattcttagcaccttcgctacaactgcaattccaagcctttcctcttaataggaaatcaaaacttgtcatttcaagtcttcaactgtgtactctacactctaccaactacaatgacttctctttcgaaggcaatacaaagaaaagctgaacccacttcctttctttctttcctcctccaaaactccctccgccattaaacaagagtcagaagagcaggatttgggcctgagctcaggcattactgcagtacgaggcccgtt

SEQ ID NO: 7033 - DNA, 927 bp, Homo sapiens
cagccccaggtcctaccccagacttaatcaaaatcggtatttttgctcgaggacaggaggtcaagaccagcctgggcaatatggcggacttggggcttgaacagtgcacagtcaagatggctgctgggtccagaggcttccacagaggacaggagaggcacccctgcatcccaggctcagcagaagatgccatccatctagagtgagactgaaaatacaaacaattcagaagttgtgactttccatgctctgcccacagaggctaccaaatgctaagggcgcttcctccccagcaccaggcttatggttctaagctccagaaaaatatcaaataaaccctgccctcgaggagaatacattcctgtcagggtttatcttccacaacctccctcccaccagcagtccctagggcacaaaagctgctaatgacctgtcaagctgaatgtcaccgcatctccatccttctccactggccttggcagggatgctaatgaggaggcttggggcaggcagcaaaaaggataatgtaaagcagggacacaggctgccagatatcccattttcccaaataatacatccaaagggtttgcaccaaactgtgaactctcaaaaaggaccagaggctagttacagacacctgactgcaggagtctaaacagatctagagccaaaaaaactgcataaaactattaaatttaatgatacggtttggatgtctgtcccctccaaatctcaagttgaaatatgacctccagtgttggaggtggggcctaaaggaaggtggtggatccttcatgaatgttttggtgccatcctcacagtgagttctcactctaagttcacgtgcaatctggttgtttaaaacagtgtggtggccgtgcgcagtggctcatgcctgtaatcccagcactttgggaggccgaggca

SEQ ID NO: 7034 - DNA, 552 bp, Homo sapiens
ttttttttgttgttgggacagagtcatgctctctcacccaggctggaatgcagtggtatgatcatagctcactgtaacctcaaactcctgggctcaagtgatcctcgcacctcagcctcttgagtggctgggactacaggcacgcaccaccacatctggctaattcttttcctttttgtaaagacagggtctcactatgttgcccaggctggtctcgcactcaaggactccagccctcctccggcctcagcctcccaaagcactgagattacaggcgtgagccactgcacctgtcctgcgctttccttatcctgcagtaagttctcaatcacctcttccaggcggacttggggcttgaacagtgcacagtcaagatggctgctgggtccagaggcttccacagaggacaggagaggcacccctgcatcccaggctcaggtgggtgctaactgccagcagctgacagttgtcacagattgataatagctaacagcacatctctcccccggctccttccctagtgcaccaattagcccagcctcatctgcacct

SEQ ID NO: 7035 - DNA, 843 bp, Homo sapiens
taagtttcttgaatgttattacatgtagcccctttaatgaatttgattaaattcaaaatgaataatttatgtctgatgaagagacttttatttataaaagcaaataaattagaaataagtttatttttctgggcacaaattattcattttaaatgtttattaagaattgaatcttgattagttgttaacatcaaaagccaatatgctagcaagcaatatgaaacaagcaatccataaaatagctatcagaaaaaactttaaaagtcaattgttttctctttaaaacctcttataccaggttgatactgatcataatcatatgctagtgaaaaagtaaaaaattggggggaaaaagcttaacatttgtacatgcacatgcaaaacaaaagctcccttgataataaagggattgcagatataatgataaactagctgggatgattcaacttgattattaaggagagaaaaagattgtaaatcattattttataacctacctgtttttagtacaactagttgggaaattttgccctagattatatcacctgccgaacaatccagagttgtcttttaaaaatggcaatcatataatttcaccttcttcttgtaaactttccagtggcttactatcacatgtggaataaaaatcagattttttacactgtagctgagaatgtatatataggctattgcctacaaagaaagttaaactgaagctggttgtggtggtatgtgcctgcagtcccagctgctggagaggttgggccaggagggtcacttgagcccagaagtttgaggccctggcctacatagtgagaccctgtctcaaactgaacaaccaac

SEQ ID NO: 7036 - DNA, 573 bp, Homo sapiens
tttcactaggtactcttgtaattctgccttggatccctggacaccctggattttatttttaggatgtttgcccacaaattgttactgtaaatttttttttaaaaaaaagcctaacagttaatattaattaccttgtttgttacgagaatgaatggctcggatgtgagccactgcgcctggtcaagaggtagtttttaaattcataaaatgggctgggctgggtgcagtggctcatacctgtaatcccagcacttcaggaggccaaggtggagggttgcttgagcccaggagttggagaccagcctgggcaacgtagcaagaccctgtctctgcaaaaaatataaaaattagctgggtgtgctggtatgcacctgtagtcccagctacttgggaggctgaggcaggaggatggcttgagcctagaaggttgaggctacagtgagccatgatcatactattgcattccagcctgggtggcaagcaagatcctctctcaaaaaaaaaaagggactggattacagttttgattaaaatatgcttgaagttaataacctattctggcttactgaacac

SEQ ID NO: 7037 - DNA, 536 bp, Homo sapiens
gaccactatgccctcagcccacctgcacttgtctgcagctgaggctagtcccaggcaggctgaatttcttgcctgaacatttccctctaggagctaggctgaatacaggtgtatcctataagaagtttggacgtggagttgattctgtgctcaaccctcagccaaggagggacgggagttgatagataaatgctccacctcgctgtccccagttgtgtcacttctgaggtgtgtgccatggagtgcctcaaagggttccagcaggaccatgccctggatgtccaagaggtaacttgctcattcatgcaccctcaaacaggcctgggactacttctcaaataaacgacccgcagccttttctcaggatctgcttttgggggagccctaagacaccatcacatagacataaatctttttttttctaaactccaaataatataatcaggctctatggatttttaagccaaggaatcaatctttccatgtgagttttccttgctataatacagaaacaacttctctttgaatttagcttt

SEQ ID NO: 7038 - DNA, 513 bp, Homo sapiens
aaaaaagatctttttaaaatctactatatgtctgctcaaacttaacatttaatgtatcagaaaatattacagaattatttgtttgttccagttatgttaactaaatttcattcaagatttagtcacttatagaggacaacaactacaagtaaatgagaaaaattatatatgtgtcatatacaatgaaaaggccagtaagaatctatatgtcctccaaatatcagagaaagatgatgctgcctgatcctttgattcttcttttgtgggacagaggaggttcatttcttcataaatttctgaggccctgcccttcctagactagcagaatatgtctggctccttccagaatggctgacagtctgtcatgtctctccactgcccattgcccctgacctcttccttcctcttctgcctgctttataacctcttctagattcaaacagtccagttttctcaattgtaagcaaagactagccttgataagtgatggggtccattcctagcctaacattt

SEQ ID NO: 7039 - DNA, 533 bp, Homo sapiens
agctgagacatctgtcttctctggcccatggacatcggaacacctggtctcaggtcttcagactgtggggcttacacgagcagcccccctggtttgcaggccttttgacttggtctgaattataccactggctttcctggttctccagcttgcagacggcatgttatggtacaacttggctttcataatggtgtgagcccattcctgtaataaatcttttatatgtctttatatatcctattagttttgttcctttggagaaccctgactaattcagaaattatttatgttaacatgcattgcattcatcattgctgttttcacatgaatcaatcaataaatgtttttaaaaattctgttttaatttttaattgaaaaatattgatagttataatccacgtaaacaaaatctttttggaattctcaatcagttttaagagaacaaaaattttgataactactactttaggatgaaactacagatgacccttgaacaacacaggatttaggggcactgtcccctcattgcagtc

SEQ ID NO: 7040 - DNA, 1256 bp, Homo sapiens
tgccttttaaacgcttgttctgtctctttctaactcctttgtctccgccggactcggggtatccgctgggtggtgtggggctggtttccccaacagctttctctccacccagcttcatagatgacaccctgcctgctaggccagatgttctccggccaagaacactattatagctgcctggcttctccctgagcagcgtcaggtgtgaggagtgcgcatggcagctgcccagtgacagatggaatctccctctctcacccaggctggagtgcaatggcacaatcagctcactgcaacctccacctcccgggttcaagtgattcttctgcctcagcctcccgagtagctgggactacagccttcatttcagtcaacaaccacataacagatcatcaaaatacataaagcaaaaactgacagaactaaagttaaatatacatatctacaattatggagagaataacaaacaaaaaaatagaacaaaaatgttccacgccttggtcaatggtaccaccagccagcgaggttcccaagccaagaacttcggaagcatccgtgattcttcatcttccacatccactttatcaccggaagcacgcattcaactttctaaacatccctcagactgacccacatctttctatccacttttcacatcttgcttgaatgacttccccaggcccagccagtctcccgcctccagctccgcccccttctgactccctttatgtggtacaatcagagagcccttcccaaagcacaaatctgctttcactgctttgcttcaagccctttcgtggctcctatttccagctggatgaggtccaagcctcttaacgtgctgtacgtgtacatgcctgacccccgctacttgaccagccaagtttcttcatagcgctgtgtctttgttcctcctgcctagaatgtccttccccttttctctcgcttcatggtgtgccaaactcctatcctgtgagatccagcttacacgtcagcttccccgtgatgcttttcctaactccctattcagccagtgaagtgctccctgcgttcccatgtggcttgtatctctgtaaaagctccacagagctgttttaatttatccgttaatgtacatgtcttccccactagacttttgctccttaaagtatctccttcatctctgctttgcataacctaacagagttcaacacataggagtgtcttaataaatgctgaataaaataattaataaacaaatgaaacaatacagcaaa

SEQ ID NO: 7041 - DNA, 366 bp, Homo sapiens
ccaagacgaggggcaacgatgcttgtccattgtctgtgcaggctagactggaggaaagggccttggggaggaacttaaggtagatggaatttgctgatggaaatgttatttacttgatcaaattttccactggcattggtacatacttccctaaagagggttaaaaataagaaaggccctcctgggagtcaggagaagtgatgagatgtgctgtagctaggcccttcctttgtgaaatggagtttatgctatagccagatgtcacaatgctcaacaaatgactgaagtccatcgtaaacaacaccaaaaacaacgaaatgcatttattttaaaactactattttgaaaaaacacagtccctatggc

SEQ ID NO: 7042 - DNA, 378 bp, Homo sapiens
aacaaattaaaagaaatccatgttcaaactgctgaacaataataacataatacaaatcttaaagcctgacaggtttattatcataggggaaggatgatttgaaagatagtggaattcttatcagaaaacaggcaggctagaatgaaatggcacaacagttttaaagtactgaatgtagaatattaggttgactgttctttttctctatctttctatagccttctccccttctttacatgtcctcctgtcttataaggacaccagatatttactctttagtggtattgttattcatgttaaatctatgtatgttactatttttatatgacaacattataacttttcctttaaagtcaaatgcttttaaggaatgtagat

SEQ ID NO: 7043 - DNA, 431 bp, Homo sapiens
gactgtatcttaaatgaaaacttcacttgatgagattaattgattagacactgcagaaaaaaatctgaacttgaaataatagaaatagaatcaattgcaaaggaagcacagggatgaaagaagactaagaaatcaaacaaaaacagagactcagttgcctgtgggataataccaagtgatctatcatatgtgtaattatagttctatgggaaatgagaaggtggagagacaaaagttatctgaaaaatgatgaaatagtttccagatttgatgaaaagtataaaccaatagatctgaggagcgctcaatgaaatccaatgaaaacgaaaaaagaaaacaatgcccaaaacatgataaaattactgaaaacaagtgaaaaggagaaaattgtaaatgcagcaagacctcctccccaaaaaaagataaagaat

SEQ ID NO: 7044 - DNA, 376 bp, Homo sapiens
gttagtctgaggttgctcatttccagcaaaactttgaatatggctctctgtgcatcatttctagaaggataccagcagcactctcacagtcttgcccactgtatcatctactttgtcctgcagccaagattctctctttaaaacatacaccagattatgccccttaaaatcctccagtggtgcttttcaacttcagattgttacatccaaggcctcactgaatctgtttgtgcctacttctctgacctcttctttttctgctctcttttactcattaatgccatgtcacatgggccttctctcattttcacaacagaccaaatatttgcattttagggcctttgtgcttaagataccctctgcttagactgttctg

SEQ ID NO: 7045 - DNA, 472 bp, Homo sapiens
agtttgccatctcacatggtcatggtccatggtgtcccaaataattacaatagtaacatcaaagatcactgattacagatcacaataacagatataataataatgaagaaactaaaaatattgtgagaattaccaaaatgtgaaacagagttatgaaatgagcacatgctattggaaaaaaatggcactgatagaattgcttgatgcgaggtttctacaaaacttcaatttctaaaaaacacaatgtgttttgcaaaatgcaaaaagtgaagttcaataaaatgaggtatgcttgtatatctagacaatattttgctgaaaatatgtgctcaataaagttacttaatagaaatttacaactaaatcacttaaatacaatttttttgttattttttattttacgtggcctttatatgattatgtaatcttttgcaaattctacttctaaaagcatttaaagtaaccagacaag

SEQ ID NO: 7046 - DNA, 667 bp, Homo sapiens
agtgttattttttttttttacagcaccttgttcactgatagtgttttttttaataggacataaaggttatagaatgtttatataggtttttaagtaatagtggtatctttcaaatattgccgaatgttatttcaataactacctctcaagttctgtttttaaataaatgaatttcttttaatcaaagattaaaattaattgactcctgacttgactataggaagttttatgtcacacagaaattttcactacaatatttgttatcatggaaccttacctgtgtgagatgtagataaatcaaaagaaaaacataaagtttactagaaagaaaatgctataattgtgtccccctagaaattcagatgttgaagtcctaagccccagtagctcagaatgtgactgtatttggagataggacctctgaaaagttacctaagttaaagtggggtctttaagatgaacgttaatccaatatgactggtgtccttagaagaagagatgaggacacagaaaacacagggcaacggccatattaagacacagtgacaaagcagccatctacaaggcaagaaaagaagcctcagaagaaaccaaccctgccaacaccttgatctagcctccagaattgtaagaaaataaatttctgttgtgtaagccacccaatgtg

SEQ ID NO: 7047 - DNA, 400 bp, Homo sapiens
agaaattgggcataagacaatatgaggggtggtctccgcccttaatctatattgcctcgctctgtccactaaagagggtctgggaactgcagtccaccaataccagtaagaaaaatttgtgttctaaatacctggttcttggttgctaaatgctgttccacactaaaaggaaccagactttttaaaaacattttactttaagttctgggatgcatgtgctgagcatgcaggtttgttatataggtatacatgtgccatggtggtgtgctgcacctatcaacccgtcatctagcttttaagccccgcatgcattaggtatttgtcctaatgctctccctcccctttccctctacccactgacaggccccagtgtgtggtgttcccctctctgtgtccatgt

SEQ ID NO: 7048 - DNA, 384 bp, Homo sapiens
atggaatgattaaggaataaggatttgaaatgatagatatgtttattaaaccaaactaatgaacatattcatcatttcaaatcctttttgttggggcagggtgcagtggctcatgcctgtaatcccagcaagttgggtggctgaggcaggcggattgcttgagtctaggagttcaagaccagtttaggcaatgtggcaaaaccccgtctctacaaaaaatacaaaaaaattagccgggtgtggtggtgtgcgcctgtggtcccagctatttgggaggctgaggtgggaggattgcttgagcttggcaggttgaggctgcagtgagcgatgattttgccactgcagtccagcctcggtgacagagtgagactttatctaaaaaaa

SEQ ID NO: 7049 - DNA, 476 bp, Homo sapiens
tttttgtatttaacctgcttggtgattgctgagattcctgaacctatggtttcatgtctgtcattaattttgaaacattctcaactgtcattattttaaatatttcttctggttctcactctcttccttctacttctggtattccgattatgggttacataggttacaccgtttgaaattatccaacagggccgggcgcggtgactcacttgcctgtaatcccagcactttgggaggctgaggcaggcggatcacaagttcaagagatccagaccatcctggctaccacggggaaaccacgtctctgctaaaaatacaaaaaattagctgggcgtggtggcaggcgcctgtagtcccagctactcgggaggctgaggcaggagaatggcgtgaacccaggaggcggagcttgcagtgagccgagattgcaccactgcactccagcctgagcgacagagagagactccatctcaaaa

SEQ ID NO: 7050 - DNA, 953 bp, Homo sapiens
gcctactactactaaattcgcggccgcgtcgacctattctggaataatacctgatactgtactacatttcagattttccagaactgtttttgttttgcattctttcttttgagcctcacaataatctttaagataattggccaggcatggtggctcacgtctgcaatcccagtactttcggaggctgaagcggtggttcacttgatgccaggctgctcttgaattcctgacctcaggtgatcctcccgcctcggcctcccaaggtgctgggattaaaggcatgagccactgtccccggccagaagcaagattcttttacgatacccctgattcagtttgatacatgctattgattgcttaaaatttcctactaaaaaattaatattctcaactaaattgaacttgtgccaaaatcagcatgttctcctatgcctcagccagttctaatgtaataggagatgcagtttatttaagctatttgcaagtgtaataacagttgttgttttaagaaattatttttatttttagccttttgtctgtgggaaaagcaggagacgcttcgatttttctgattctgaccacaacaggacattattccctctttcctctgctcttcactgcaccagaacttcccattaaaatcttactcatgttactattcaccatatatagtatttcgtcactgaagactttattcagaaaagaaaaacctctttttaattggatggaaactttctacctgcttggcctggggcctctggaagtctgctgtgaatttgtattccctttcacctcctggaaggtgaagtaccccttcatccctttgttactaacctcagtgtattgtgcagtaggcatcacatatgcttggttcaaactgtatgtttcagtattgattgactctgctattggcaagacaaagaaacaatgaataaaggaactgcttagatgtg

SEQ ID NO: 7051 - DNA, 1956 bp, Homo sapiens
ggcatcgagggatcccggatgtggatcaagttggtgggaagcgtgcggtgccgcagcaatggcggcgctcacaattgccacgggtactggcaattggttttcggctttggcgctcggggtgactcttctcaaatgccttctcatccccacataccattccacagattttgaagtacaccgaaactggcttgctatcactcacagtttgccaatatcacagtggtattatgaggcaacttcagagtggacgttggattacccccctttctttgcatggtttgagtatatcctgtcacatgttgccaaatattttgatcaagaaatgctgaatgtccataatttgaattactccagctcaaggaccttacttttccagagattttccgtcatctttatggatgtactctttgtgtatgctgtccgtgagtgctgtaaatgcattgatggaaaaaaagtgggtaaagaacttacagaaaagccaaaatttattctgtcggtattacttctgtggaacttcgggttattaattgtggaccatattcattttcagtacaatggctttttatttggattaatgctactctccattgcacgattatttcagaaaaggcatatggaaggagcatttctctttgctgttctcctacatttcaagcatatctacctctatgtagcaccagcttatggtgtatatctgctgcgatcctactgtttcactgcaaataaaccagatgggtctattcgatggaagagtttcagctttgttcgtgttatttccctgggactggttgttttcttagtttctgctctttcattgggtcctttcctggccttgaatcagctgcctcaagtcttttcccgactctttcctttcaagaggggcctctgtcatgcatattgggctccaaacttctgggctttgtacaatgctttggacaaagtgctgtctgtcatcggtttgaaattgaaatttcttgatcccaacaatattcccaaggcctcaatgacaagtggtttggttcagcagttccaacacacagtccttccctcagtgactcccttggcaaccctcatctgcacactgattgccatattgccctctattttctgtctttggtttaaaccccaagggcccagaggctttctccgatgtctaactctttgtgccttgagctcctttatgtttgggtggcatgttcatgaaaaagccatacttctagcaattctcccaatgagccttttgtctgtgggaaaagcaggagacgcttcgatttttctgattctgaccacaacaggacattattccctctttcctctgctcttcactgcaccagaacttcccattaaaatcttactcatgttactattcaccatatatagtatttcgtcactgaagactttattcagaaaagaaaaacctctttttaattggatggaaactttctacctgcttggcctggggcctctggaagtctgctgtgaatttgtattccctttcacctcctggaaggtgaagtaccccttcatccctttgttactaacctcagtgtattgtgcagtaggcatcacatatgcttggttcaaactgtatgtttcagtattgattgactctgctattggcaagacaaagaaacaatgaataaaggaactgcttagatgtgtgccaagcaattatttcatgggaaattaaccagaacttgaagaaagttgccagtggcatcagccatttgtttcagtagaactgttcagagcaccgttcttccacacttggtcttgcccagcctagcaaccggattgtcaccatggtgagaagccgccaactttttttttttggcgtgtacacaggcagatggtgtactgtccccattctgtacaccttgttccagattttttttgtttgaaattatacagtgacaatactcacaaagccaaggggagtagttaaggtataatttg

SEQ ID NO: 7052 - DNA, 1981 bp, Homo sapiens
ggcatcgagggatcccggatgtggatcaagttggtgggaagcgtgcggtgccgcagcaatggcggcgctcacaattgccacgggtactggcaattggttttcggctttggcgctcggggtgactcttctcaaatgccttctcatccccacataccattccacagattttgaagtacaccgaaactggcttgctatcactcacagtttgccaatatcacagtggtattatgaggcaacttcagagtggacgttggattacccccctttctttgcatggtttgagtatatcctgtcacatgttgccaaatattttgatcaagaaatgctgaatgtccataatttgaattactccagctcaaggaccttacttttccagagattttccgtcatctttatggatgtactctttgtgtatgctgtccgtgagtgctgtaaatgcattgatggaaaaaaagtgggtaaagaacttacagaaaagccaaaatttattctgtcggtattacttctgtggaacttcgggttattaattgtggaccatattcattttcagtacaatggctttttatttggattaatgctactctccattgcacgattatttcagaaaaggcatatggaaggagcatttctctttgctgttctcctacatttcaagcatatctacctctatgtagcaccagcttatggtgtatatctgctgcgatcctactgtttcactgcaaataaaccagatgggtctattcgatggaagagtttcagctttgttcgtgttatttccctgggactggttgttttcttagtttctgctctttcattgggtcctttcctggccttgaatcagctgcctcaagtcttttcccgactctttcctttcaagaggggcctctgtcatgcatattgggctccaaacttctgggctttgtacaatgctttggacaaagtgctgtctgtcatcggtttgaaattgaaatttcttgatcccaacaatattcccaaggcctcaatgacaagtggtttggttcagcagttccaacacacagtccttccctcagtgactcccttggcaaccctcatctgcacactgattgccatattgccctctattttctgtctttggtttaaaccccaagggcccagaggctttctccgatgtctaactctttgtgccttgagctcctttatgtttgggtggcatgttcatgaaaaagccatacttctagcaattctcccaatgagccttttgtctgtgggaaaagcaggagacgcttcgatttttctgattctgaccacaacaggacattattccctctttcctctgctcttcactgcaccagaacttcccattaaaatcttactcatgttactattcaccatatatagtatttcgtcactgaagactttattcagaaaagaaaaacctctttttaattggatggaaactttctacctgcttggcctggggcctctggaagtctgctgtgaatttgtattccctttcacctcctggaaggtgaagtaccccttcatccctttgttactaacctcagtgtattgtgcagtaggcatcacatatgcttggttcaaactgtatgtttcagtattgattgactctgctattggcaagacaaagaaacaatgaataaaggaactgcttagatgtgaaaacacaaaaacacaaaaacaccaacaacaacacacaaaaacaaaaaaaaaaaaaaaaaaaaaaaaaaaaaaaacaacaagacccaaaacaacacaaaaaaaaaacaacaaacacaacaagaaaaaagagaaagagaagacagaaagacgagagaagcaggacgagagagagaaaaagataaaacaacaagagaaaagaagagaacacacagaacagaaagagaaggagacaaccagaaaagaggaaagagacagacaagagacacagacagacggaacaaaagaaaaggaaatacgaacaacaaaatgaacaacaaac

SEQ ID NO: 7053 - DNA, 1754 bp, Homo sapiens
ggcatcgagggatcccggatgtggatcaagttggtgggaagcgtgcggtgccgcagcaatggcggcgctcacaattgccacgggtactggcaattggttttcggctttggcgctcggggtgactcttctcaaatgccttctcatccccacataccattccacagattttgaagtacaccgaaactggcttgctatcactcacagtttgccaatatcacagtggtattatgaggcaacttcagagtggacgttggattacccccctttctttgcatggtttgagtatatcctgtcacatgttgccaaatattttgatcaagaaatgctgaatgtccataatttgaattactccagctcaaggaccttacttttccagagattttccgtcatctttatggatgtactctttgtgtatgctgtccgtgagtgctgtaaatgcattgatggaaaaaaagtgggtaaagaacttacagaaaagccaaaatttattctgtcggtattacttctgtggaacttcgggttattaattgtggaccatattcattttcagtacaatggctttttatttggattaatgctactctccattgcacgattatttcagaaaaggcatatggaaggagcatttctctttgctgttctcctacatttcaagcatatctacctctatgtagcaccagcttatggtgtatatctgctgcgatcctactgtttcactgcaaataaaccagatgggtctattcgatggaagagtttcagctttgttcgtgttatttccctgggactggttgttttcttagtttctgctctttcattgggtcctttcctggccttgaatcagctgcctcaagtcttttcccgactctttcctttcaagaggggcctctgtcatgcatattgggctccaaacttctgggctttgtacaatgctttggacaaagtgctgtctgtcatcggtttgaaattgaaatttcttgatcccaacaatattcccaaggcctcaatgacaagtggtttggttcagcagttccaacacacagtccttccctcagtgactcccttggcaaccctcatctgcacactgattgccatattgccctctattttctgtctttggtttaaaccccaagggcccagaggctttctccgatgtctaactctttgtgccttgagctcctttatgtttgggtggcatgttcatgaaaaagccatacttctagcaattctcccaatgagccttttgtctgtgggaaaagcaggagacgcttcgatttttctgattctgaccacaacaggacattattccctctttcctctgctcttcactgcaccagaacttcccattaaaatcttactcatgttactattcaccatatatagtatttcgtcactgaagactttattcagaaaagaaaaacctctttttaattggatggaaactttctacctgcttggcctggggcctctggaagtctgctgtgaatttgtattccctttcacctcctggaagagtctcgctctgttgcccaggctggagtgcagtggcgcgatctcggctcactgcatcctctgcctcagcctcctgagtagctgggattacaagcacccgccaccatgcccagctaatttttgtatttttagcagagacagggtttcaccatgttggccaggctgctcttgaattcctgacctcaggtgatcctcccgcctcggcctcccaaagtgctgggattaaaggcatgagccactgtccc

SEQ ID NO: 7054 - DNA, 1736 bp, Homo sapiens
ggcatcgagggatcccggatgtggatcaagttggtgggaagcgtgcggtgccgcagcaatggcggcgctcacaattgccacgggtactggcaattggttttcggctttggcgctcggggtgactcttctcaaatgccttctcatccccacataccattccacagattttgaagtacaccgaaactggcttgctatcactcacagtttgccaatatcacagtggtattatgaggcaacttcagagtggacgttggattacccccctttctttgcatggtttgagtatatcctgtcacatgttgccaaatattttgatcaagaaatgctgaatgtccataatttgaattactccagctcaaggaccttacttttccagagattttccgtcatctttatggatgtactctttgtgtatgctgtccgtgagtgctgtaaatgcattgatggaaaaaaagtgggtaaagaacttacagaaaagccaaaatttattctgtcggtattacttctgtggaacttcgggttattaattgtggaccatattcattttcagtacaatggctttttatttggattaatgctactctccattgcacgattatttcagaaaaggcatatggaaggagcatttctctttgctgttctcctacatttcaagcatatctacctctatgtagcaccagcttatggtgtatatctgctgcgatcctactgtttcactgcaaataaaccagatgggtctattcgatggaagagtttcagctttgttcgtgttatttccctgggactggttgttttcttagtttctgctctttcattgggtcctttcctggccttgaatcagctgcctcaagtcttttcccgactctttcctttcaagaggggcctctgtcatgcatattgggctccaaacttctgggctttgtacaatgctttggacaaagtgctgtctgtcatcggtttgaaattgaaatttcttgatcccaacaatattcccaaggcctcaatgacaagtggtttggttcagcagttccaacacacagtccttccctcagtgactcccttggcaaccctcatctgcacactgattgccatattgccctctattttctgtctttggtttaaaccccaagggcccagaggctttctccgatgtctaactctttgtgccttgagctcctttatgtttgggtggcatgttcatgaaaaagccatacttctagcaattctcccaatgagccttttgtctgtgggaaaagcaggagacgcttcgatttttctgattctgaccacaacaggacattattccctctttcctctgctcttcactgcaccagaacttcccattaaaatcttactcatgttactattcaccatatatagtatttcgtcactgaagactttattcagacggagtttcacccttgttgcccaggctggagtgcaatggcacgatctcagctgactgaaacctccgcctcccagaaaagaaaaacctctttttaattggatggaaactttctacctgcttggcctggggcctctggaagtctgctgtgaatttgtattccctttcacctcctggaaggtgaagtaccccttcatccctttgttactaacctcagtgtattgtgcagtaggcatcacatatgcttggttcaaactgtatgtttcagtattgattgactctgctattggcaagacaaagaaacaatgaataaaggaactgcttagatgtg

SEQ ID NO: 7055 - DNA, 1521 bp, Homo sapiens
ggcatcgagggatcccggatgtggatcaagttggtgggaagcgtgcggtgccgcagcaatggcggcgctcacaattgccacgggtactggcaattggttttcggctttggcgctcggggtgactcttctcaaatgccttctcatccccacataccattccacagattttgaagtacaccgaaactggcttgctatcactcacagtttgccaatatcacagtggtattatgaggcaacttcagagtggacgttggattacccccctttctttgcatggtttgagtatatcctgtcacatgttgccaaatattttgatcaagaaatgctgaatgtccataatttgaattactccagctcaaggaccttacttttccagagattttccgtcatctttatggatgtactctttgtgtatgctgtccgtgagtgctgtaaatgcattgatggaaaaaaagtgggtaaagaacttacagaaaagccaaaatttattctgtcggtattacttctgtggaacttcgggttattaattgtggaccatattcattttcagtacaatggctttttatttggattaatgctactctccattgcacgattatttcagaaaaggcatatggaaggagcatttctctttgctgttctcctacatttcaagcatatctacctctatgtagcaccagcttatggtgtatatctgctgcgatcctactgtttcactgcaaataaaccagatgggtctattcgatggaagagtttcagctttgttcgtgttatttccctgggactggttgttttcttagtttctgctctttcattgggtcctttcctggccttgaatcagctgcctcaagtcttttcccgactctttcctttcaagaggggcctctgtcatgcatattgggctccaaacttctgggctttgtacaatgctttggacaaagtgctgtctgtcatcgccctctattttctgtctttggtttaaaccccaagggcccagaggctttctccgatgtctaactctttgtgccttgagctcctttatgtttgggtggcatgttcatgaaaaagccatacttctagcaattctcccaatgagccttttgtctgtgggaaaagcaggagacgcttcgatttttctgattctgaccacaacaggacattattccctctttcctctgctcttcactgcaccagaacttcccattaaaatcttactcatgttactattcaccatatatagtatttcgtcactgaagactttattcagaaaagaaaaacctctttttaattggatggaaactttctacctgcttggcctggggcctctggaagtctgctgtgaatttgtattccctttcacctcctggaaggtgaagtaccccttcatccctttgttactaacctcagtgtattgtgcagtaggcatcacatatgcttggttcaaactgtatgtttcagtattgattgactctgctattggcaagacaaagaaacaatgaataaaggaactgcttagatgtg

SEQ ID NO: 7056 - DNA, 1295 bp, Homo sapiens
ggcatcgagggatcccggatgtggatcaagttggtgggaagcgtgcggtgccgcagcaatggcggcgctcacaattgccacgggtactggcaattggttttcggctttggcgctcggggtgactcttctcaaatgccttctcatccccacataccattccacagattttgaagtacaccgaaactggcttgctatcactcacagtttgccaatatcacagtggtattatgaggcaacttcagagtggacgttggattacccccctttctttgcatggtttgagtatatcctgtcacatgttgccaaatattttgatcaagaaatgctgaatgtccataatttgaattactccagctcaaggaccttacttttccagagattttccgtcatctttatggatgtactctttgtgtatgctgtccgtgagtgctgtaaatgcattgatggaaaaaaagtgggtaaagaacttacagaaaagccaaaatttattctgtcggtattacttctgtggaacttcgggttattaattgtggaccatattcattttcagtacaatggctttttatttggattaatgctactctccattgcacgattatttcagaaaaggcatatggaaggagcatttctctttgctgttctcctacatttcaagcatatctacctctatgtagcaccagcttatggtgtatatctgctgcgatcctactgtttcactgcaaataaaccagatgggtctattcgatggaagagtttcagctttgttcgtgttatttccctgggactggttgttttcttagtttctgctctttcattgggtcctttcctggccttgaatcagctgcctcaagtcttttcccgactctttcctttcaagaggggcctctgtcatgcatattgggctccaaacttctgggctttgtacaatgctttggacaaagtgctgtctgtcatcggtttgaaattgaaatttcttgatcccaacaatattcccaaggcctcaatgacaagtggtttggttcagcagttccaacacacagtccttccctcagtgactcccttggcaaccctcatctgcacactgattgccatattgccctctattttctgtctttggtttaaaccccaagggcccagaggctttctccgatgtctaactctttgtgccttgagctcctttatgtttgggtggcatgttcatgaaaaagccatacttctagcaattctcccaatgagccttttgtctgtgggaaaagcaggagacgcgtcaaaatcggaatcctctagagtcaccg

SEQ ID NO: 7057 - DNA, 1487 bp, Homo sapiens
ggcatcgagggatcccggatgtggatcaagttggtgggaagcgtgcggtgccgcagcaatggcggcgctcacaattgccacgggtactggcaattggttttcggctttggcgctcggggtgactcttctcaaatgccttctcatccccacataccattccacagattttgaagtacaccgaaactggcttgctatcactcacagtttgccaatatcacagtggtattatgaggcaacttcagagtggacgttggattacccccctttctttgcatggtttgagtatatcctgtcacatgttgccaaatattttgatcaagaaatgctgaatgtccataatttgaattactccagctcaaggaccttacttttccagagattttccgtcatctttatggatgtactctttgtgtatgctgtccgtgagtgctgtaaatgcattgatggaaaaaaagtgggtaaagaacttacagaaaagccaaaatttattctgtcggtattacttctgtggaacttcgggttattaattgtggaccatattcattttcagtacaatggctttttatttggattaatgctactctccattgcacgattatttcagaaaaggcatatggaaggagcatttctctttgctgttctcctacatttcaagcatatctacctctatgtagcaccagcttatggtgtatatctgctgcgatcctactgtttcactgcaaataaaccagatgggtctattcgatggaagagtttcagctttgttcgtgttatttccctgggactggttgttttcttagtttctgctctttcattgggtcctttcctggccttgaatcagctgcctcaagtcttttcccgactctttcctttcaagaggggcctctgtcatgcatattgggctccaaacttctgggctttgtacaatgctttggacaaagtgctgtctgtcatcgggcccagaggctttctccgatgtctaactctttgtgccttgagctcctttatgtttgggtggcatgttcatgaaaaagccatacttctagcaattctcccaatgagccttttgtctgtgggaaaagcaggagacgcttcgatttttctgattctgaccacaacaggacattattccctctttcctctgctcttcactgcaccagaacttcccattaaaatcttactcatgttactattcaccatatatagtatttcgtcactgaagactttattcagaaaagaaaaacctctttttaattggatggaaactttctacctgcttggcctggggcctctggaagtctgctgtgaatttgtattccctttcacctcctggaaggtgaagtaccccttcatccctttgttactaacctcagtgtattgtgcagtaggcatcacatatgcttggttcaaactgtatgtttcagtattgattgactctgctattggcaagacaaagaaacaatgaataaaggaactgcttagatgtg

SEQ ID NO: 7058 - DNA, 1350 bp, Homo sapiens
ggcatcgagggatcccggatgtggatcaagttggtgggaagcgtgcggtgccgcagcaatggcggcgctcacaattgccacgggtactggcaattggttttcggctttggcgctcggggtgactcttctcaaatgccttctcatccccacataccattccacagattttgaagtacaccgaaactggcttgctatcactcacagtttgccaatatcacagtggtattatgaggcaacttcagagtggacgttggattacccccctttctttgcatggtttgagtatatcctgtcacatgttgccaaatattttgatcaagaaatgctgaatgtccataatttgaattactccagctcaaggaccttacttttccagagattttccgtcatctttatggatgtactctttgtgtatgctgtccgtgagtgctgtaaatgcattgatggaaaaaaagtgggtaaagaacttacagaaaagccaaaatttattctgtcggtattacttctgtggaacttcgggttattaattgtggaccatattcattttcagtacaatggctttttatttggattaatgctactctccattgcacgattatttcagaaaaggcatatggaaggagcatttctctttgctgttctcctacatttcaagcatatctacctctatgtagcaccagcttatggtgtatatctgctgcgatcctactgtttcactgcaaataaaccagatgggtctattcgatggaagagtttcagctttgttcgtgttatttccctgggactggttgttttcttagtttctgctctttcattgggtcctttcctggccttgaatcagctgcctcaagtcttttcccgactctttcctttcaagaggggcctctgtcatgcatattgggctccaaacttctgggctttgtacaatgctttggacaaagtgctgtctgtcatcggtttgaaattgaaatttcttgatcccaacaatattcccaaggcctcaatgacaagtggtttggttcagcagttccaacacacagtccttccctcagtgactcccttggcaaccctcatctgcacactgattgccatattgaaaagaaaaacctctttttaattggatggaaactttctacctgcttggcctggggcctctggaagtctgctgtgaatttgtattccctttcacctcctggaaggtgaagtaccccttcatccctttgttactaacctcagtgtattgtgcagtaggcatcacatatgcttggttcaaactgtatgtttcagtattgattgactctgctattggcaagacaaagaaacaatgaataaaggaactgcttagatgtg

SEQ ID NO: 7059 - DNA, 2445 bp, Homo sapiens
ggcatcgagggatcccggatgtggatcaagttggtgggaagcgtgcggtgccgcagcaatggcggcgctcacaattgccacgggtactggcaattggttttcggctttggcgctcggggtgactcttctcaaatgccttctcatccccacatagtaagggactcgcacggccaggtgctgggcggggaggccccgcggtcggtcagggcgggagagaaaggtgtggatatccctgggtatgaagagaaaactttaggtcgtgtttgtcgctatcctgcctttgctaagctttctgtttcgccagttgttacttgacttagccccagctggctaggttcagacctggcgctgtctgatttggaacaaatcactttaacgtttctgaacctcagggtcctcatccttaataggcagttaagaacctctgcctccaacagccattcagccagtattatcagatgcctgaggtgccaggtaccgttctaactcccgggagatgcggtggtgagcaagacattgctggtccttgccctcgaagttggtgggtggagctagacaaacaggaacttttcagattgtgataaaggaaatagagggttactaagtggctgtgcgctattcctttagaaggtgatgtctgagttgaaattcaaaaaatgaaaaagaataagtgatgtggaaagcagttcaggcataggaaagagtaagttcaaaggccctgtggcaggaaagaagtcagagcattctaggaacagaaagtgccccttgtggctgcagagcattgagggagaggagtggcacagcatggggtgcactggggacagataacacagggtttcgaagaccacagttagactgctgtgtaaaaaatggatgtagggccaagactgaaagcgtggaaaccaagaagcaaccatgaaatggtggtgtgtatacaccattccacagattttgaagtacaccgaaactggcttgctatcactcacagtttgccaatatcacagtggtattatgaggcaacttcagagtggacgttggattacccccctttctttgcatggtttgagtatatcctgtcacatgttgccaaatattttgatcaagaaatgctgaatgtccataatttgaattactccagctcaaggaccttacttttccagagattttccgtcatctttatggatgtactctttgtgtatgctgtccgtgagtgctgtaaatgcattgatggaaaaaaagtgggtaaagaacttacagaaaagccaaaatttattctgtcggtattacttctgtggaacttcgggttattaattgtggaccatattcattttcagtacaatggctttttatttggattaatgctactctccattgcacgattatttcagaaaaggcatatggaaggagcatttctctttgctgttctcctacatttcaagcatatctacctctatgtagcaccagcttatggtgtatatctgctgcgatcctactgtttcactgcaaataaaccagatgggtctattcgatggaagagtttcagctttgttcgtgttatttccctgggactggttgttttcttagtttctgctctttcattgggtcctttcctggccttgaatcagctgcctcaagtcttttcccgactctttcctttcaagaggggcctctgtcatgcatattgggctccaaacttctgggctttgtacaatgctttggacaaagtgctgtctgtcatcggtttgaaattgaaatttcttgatcccaacaatattcccaaggcctcaatgacaagtggtttggttcagcagttccaacacacagtccttccctcagtgactcccttggcaaccctcatctgcacactgattgccatattgccctctattttctgtctttggtttaaaccccaagggcccagaggctttctccgatgtctaactctttgtgccttgagctcctttatgtttgggtggcatgttcatgaaaaagccatacttctagcaattctcccaatgagccttttgtctgtgggaaaagcaggagacgcttcgatttttctgattctgaccacaacaggacattattccctctttcctctgctcttcactgcaccagaacttcccattaaaatcttactcatgttactattcaccatatatagtatttcgtcactgaagactttattcagaaaagaaaaacctctttttaattggatggaaactttctacctgcttggcctggggcctctggaagtctgctgtgaatttgtattccctttcacctcctggaaggtgaagtaccccttcatccctttgttactaacctcagtgtattgtgcagtaggcatcacatatgcttggttcaaactgtatgtttcagtattgattgactctgctattggcaagacaaagaaacaatgaataaaggaactgcttagatgtg

SEQ ID NO: 7060 - DNA, 1682 bp, Homo sapiens
ggcatcgagggatcccggatgtggatcaagttggtgggaagcgtgcggtgccgcagcaatggcggcgctcacaattgccacgggtactggcaattggttttcggctttggcgctcggggtgactcttctcaaatgccttctcatccccacatagtaagggactcgcacggccagccattccacagattttgaagtacaccgaaactggcttgctatcactcacagtttgccaatatcacagtggtattatgaggcaacttcagagtggacgttggattacccccctttctttgcatggtttgagtatatcctgtcacatgttgccaaatattttgatcaagaaatgctgaatgtccataatttgaattactccagctcaaggaccttacttttccagagattttccgtcatctttatggatgtactctttgtgtatgctgtccgtgagtgctgtaaatgcattgatggaaaaaaagtgggtaaagaacttacagaaaagccaaaatttattctgtcggtattacttctgtggaacttcgggttattaattgtggaccatattcattttcagtacaatggctttttatttggattaatgctactctccattgcacgattatttcagaaaaggcatatggaaggagcatttctctttgctgttctcctacatttcaagcatatctacctctatgtagcaccagcttatggtgtatatctgctgcgatcctactgtttcactgcaaataaaccagatgggtctattcgatggaagagtttcagctttgttcgtgttatttccctgggactggttgttttcttagtttctgctctttcattgggtcctttcctggccttgaatcagctgcctcaagtcttttcccgactctttcctttcaagaggggcctctgtcatgcatattgggctccaaacttctgggctttgtacaatgctttggacaaagtgctgtctgtcatcggtttgaaattgaaatttcttgatcccaacaatattcccaaggcctcaatgacaagtggtttggttcagcagttccaacacacagtccttccctcagtgactcccttggcaaccctcatctgcacactgattgccatattgccctctattttctgtctttggtttaaaccccaagggcccagaggctttctccgatgtctaactctttgtgccttgagctcctttatgtttgggtggcatgttcatgaaaaagccatacttctagcaattctcccaatgagccttttgtctgtgggaaaagcaggagacgcttcgatttttctgattctgaccacaacaggacattattccctctttcctctgctcttcactgcaccagaacttcccattaaaatcttactcatgttactattcaccatatatagtatttcgtcactgaagactttattcagaaaagaaaaacctctttttaattggatggaaactttctacctgcttggcctggggcctctggaagtctgctgtgaatttgtattccctttcacctcctggaaggtgaagtaccccttcatccctttgttactaacctcagtgtattgtgcagtaggcatcacatatgcttggttcaaactgtatgtttcagtattgattgactctgctattggcaagacaaagaaacaatgaataaaggaactgcttagatgtg

SEQ ID NO: 7061 - DNA, 1582 bp, Homo sapiens
ggcatcgagggatcccggatgtggatcaagttggtgggaagcgtgcggtgccgcagcaatggcggcgctcacaattgccacgggtactggcaattggttttcggctttggcgctcggggtgactcttctcaaatgccttctcatccccacatagcaacttcagagtggacgttggattacccccctttctttgcatggtttgagtatatcctgtcacatgttgccaaatattttgatcaagaaatgctgaatgtccataatttgaattactccagctcaaggaccttacttttccagagattttccgtcatctttatggatgtactctttgtgtatgctgtccgtgagtgctgtaaatgcattgatggaaaaaaagtgggtaaagaacttacagaaaagccaaaatttattctgtcggtattacttctgtggaacttcgggttattaattgtggaccatattcattttcagtacaatggctttttatttggattaatgctactctccattgcacgattatttcagaaaaggcatatggaaggagcatttctctttgctgttctcctacatttcaagcatatctacctctatgtagcaccagcttatggtgtatatctgctgcgatcctactgtttcactgcaaataaaccagatgggtctattcgatggaagagtttcagctttgttcgtgttatttccctgggactggttgttttcttagtttctgctctttcattgggtcctttcctggccttgaatcagctgcctcaagtcttttcccgactctttcctttcaagaggggcctctgtcatgcatattgggctccaaacttctgggctttgtacaatgctttggacaaagtgctgtctgtcatcggtttgaaattgaaatttcttgatcccaacaatattcccaaggcctcaatgacaagtggtttggttcagcagttccaacacacagtccttccctcagtgactcccttggcaaccctcatctgcacactgattgccatattgccctctattttctgtctttggtttaaaccccaagggcccagaggctttctccgatgtctaactctttgtgccttgagctcctttatgtttgggtggcatgttcatgaaaaagccatacttctagcaattctcccaatgagccttttgtctgtgggaaaagcaggagacgcttcgatttttctgattctgaccacaacaggacattattccctctttcctctgctcttcactgcaccagaacttcccattaaaatcttactcatgttactattcaccatatatagtatttcgtcactgaagactttattcagaaaagaaaaacctctttttaattggatggaaactttctacctgcttggcctggggcctctggaagtctgctgtgaatttgtattccctttcacctcctggaaggtgaagtaccccttcatccctttgttactaacctcagtgtattgtgcagtaggcatcacatatgcttggttcaaactgtatgtttcagtattgattgactctgctattggcaagacaaagaaacaatgaataaaggaactgcttagatgtg

SEQ ID NO: 7062 - DNA, 1778 bp, Homo sapiens
  misc_feature (159)..(159): n is a, c, g, or t
  misc_feature (186)..(186): n is a, c, g, or t
  misc_feature (189)..(189): n is a, c, g, or t
  misc_feature (221)..(221): n is a, c, g, or t
  misc_feature (257)..(257): n is a, c, g, or t
ggcatcgagggatcccggatgtggatcaagttggtgggaagcgtgcggtgccgcagcaatggcggcgctcacaattgccacgggtactggcaattggttttcggctttggcgctcggggtgactcttctcaaatgccttctcatccccacatagtctcnctctgcctctcaggctgtagtgcagtngcntgatctcatctcactgcaacctccacctttcnggctcaagcggtcctcctgcctcaacctgccaagtngctgggacttaagccattccacagattttgaagtacaccgaaactggcttgctatcactcacagtttgccaatatcacagtggtattatgaggcaacttcagagtggacgttggattacccccctttctttgcatggtttgagtatatcctgtcacatgttgccaaatattttgatcaagaaatgctgaatgtccataatttgaattactccagctcaaggaccttacttttccagagattttccgtcatctttatggatgtactctttgtgtatgctgtccgtgagtgctgtaaatgcattgatggaaaaaaagtgggtaaagaacttacagaaaagccaaaatttattctgtcggtattacttctgtggaacttcgggttattaattgtggaccatattcattttcagtacaatggctttttatttggattaatgctactctccattgcacgattatttcagaaaaggcatatggaaggagcatttctctttgctgttctcctacatttcaagcatatctacctctatgtagcaccagcttatggtgtatatctgctgcgatcctactgtttcactgcaaataaaccagatgggtctattcgatggaagagtttcagctttgttcgtgttatttccctgggactggttgttttcttagtttctgctctttcattgggtcctttcctggccttgaatcagctgcctcaagtcttttcccgactctttcctttcaagaggggcctctgtcatgcatattgggctccaaacttctgggctttgtacaatgctttggacaaagtgctgtctgtcatcggtttgaaattgaaatttcttgatcccaacaatattcccaaggcctcaatgacaagtggtttggttcagcagttccaacacacagtccttccctcagtgactcccttggcaaccctcatctgcacactgattgccatattgccctctattttctgtctttggtttaaaccccaagggcccagaggctttctccgatgtctaactctttgtgccttgagctcctttatgtttgggtggcatgttcatgaaaaagccatacttctagcaattctcccaatgagccttttgtctgtgggaaaagcaggagacgcttcgatttttctgattctgaccacaacaggacattattccctctttcctctgctcttcactgcaccagaacttcccattaaaatcttactcatgttactattcaccatatatagtatttcgtcactgaagactttattcagaaaagaaaaacctctttttaattggatggaaactttctacctgcttggcctggggcctctggaagtctgctgtgaatttgtattccctttcacctcctggaaggtgaagtaccccttcatccctttgttactaacctcagtgtattgtgcagtaggcatcacatatgcttggttcaaactgtatgtttcagtattgattgactctgctattggcaagacaaagaaacaatgaataaaggaactgcttagatgtg

SEQ ID NO: 7063 - DNA, 1719 bp, Homo sapiens
ggcatcgagggatcccggatgtggatcaagttggtgggaagcgtgcggtgccgcagcaatggcggcgctcacaattgccacgggtactggcaattggttttcggctttggcgctcggggtgactcttctcaaatgccttctcatccccacataggccaagactgaaagcgtggaaaccaagaagcaaccatgaaatggtggtgtgtatacaccattccacagattttgaagtacaccgaaactggcttgctatcactcacagtttgccaatatcacagtggtattatgaggcaacttcagagtggacgttggattacccccctttctttgcatggtttgagtatatcctgtcacatgttgccaaatattttgatcaagaaatgctgaatgtccataatttgaattactccagctcaaggaccttacttttccagagattttccgtcatctttatggatgtactctttgtgtatgctgtccgtgagtgctgtaaatgcattgatggaaaaaaagtgggtaaagaacttacagaaaagccaaaatttattctgtcggtattacttctgtggaacttcgggttattaattgtggaccatattcattttcagtacaatggctttttatttggattaatgctactctccattgcacgattatttcagaaaaggcatatggaaggagcatttctctttgctgttctcctacatttcaagcatatctacctctatgtagcaccagcttatggtgtatatctgctgcgatcctactgtttcactgcaaataaaccagatgggtctattcgatggaagagtttcagctttgttcgtgttatttccctgggactggttgttttcttagtttctgctctttcattgggtcctttcctggccttgaatcagctgcctcaagtcttttcccgactctttcctttcaagaggggcctctgtcatgcatattgggctccaaacttctgggctttgtacaatgctttggacaaagtgctgtctgtcatcggtttgaaattgaaatttcttgatcccaacaatattcccaaggcctcaatgacaagtggtttggttcagcagttccaacacacagtccttccctcagtgactcccttggcaaccctcatctgcacactgattgccatattgccctctattttctgtctttggtttaaaccccaagggcccagaggctttctccgatgtctaactctttgtgccttgagctcctttatgtttgggtggcatgttcatgaaaaagccatacttctagcaattctcccaatgagccttttgtctgtgggaaaagcaggagacgcttcgatttttctgattctgaccacaacaggacattattccctctttcctctgctcttcactgcaccagaacttcccattaaaatcttactcatgttactattcaccatatatagtatttcgtcactgaagactttattcagaaaagaaaaacctctttttaattggatggaaactttctacctgcttggcctggggcctctggaagtctgctgtgaatttgtattccctttcacctcctggaaggtgaagtaccccttcatccctttgttactaacctcagtgtattgtgcagtaggcatcacatatgcttggttcaaactgtatgtttcagtattgattgactctgctattggcaagacaaagaaacaatgaataaaggaactgcttagatgtg

SEQ ID NO: 7064 - DNA, 1400 bp, Homo sapiens
ggcatcgagggatcccggatgtggatcaagttggtgggaagcgtgcggtgccgcagcaatggcggcgctcacaattgccacgggtactggcaattggttttcggctttggcgctcggggtgactcttctcaaatgccttctcatccccacataccattccacagattttgaagtacaccgaaactggcttgctatcactcacagtttgccaatatcacagtggtattatgaggcaacttcagagtggacgttggattacccccctttctttgcatggtttgagtatatcctgtcacatgttgccaaatattttgatcaagaaatgctgaatgtccataatttgaattactccagctcaaggaccttacttttccagagattttccgtcatctttatggatgtactctttgtgtatgctgtccgtgagtgctgtaaatgcattgatggaaaaaaagtgggtaaagaacttacagaaaagccaaaatttattctgtcggtattacttctgtggaacttcgggttattaattgtggaccatattcattttcagtacaatggctttttatttggattaatgctactctccattgcacgattatttcagaaaaggcatatggaaggagcatttctctttgctgttctcctacatttcaagcatatctacctctatgtagcaccagcttatggtgtatatctgctgcgatcctactgtttcactgcaaataaaccagatgggtctattcgatggaagagtttcagctttgttcgtgttatttccctgggactggttgttttcttagtttctgctctttcattgggtcctttcctggccttgccctctattttctgtctttggtttaaaccccaagggcccagaggctttctccgatgtctaactctttgtgccttgagctcctttatgtttgggtggcatgttcatgaaaaagccatacttctagcaattctcccaatgagccttttgtctgtgggaaaagcaggagacgcttcgatttttctgattctgaccacaacaggacattattccctctttcctctgctcttcactgcaccagaacttcccattaaaatcttactcatgttactattcaccatatatagtatttcgtcactgaagactttattcagaaaagaaaaacctctttttaattggatggaaactttctacctgcttggcctggggcctctggaagtctgctgtgaatttgtattccctttcacctcctggaaggtgaagtaccccttcatccctttgttactaacctcagtgtattgtgcagtaggcatcacatatgcttggttcaaactgtatgtttcagtattgattgactctgctattggcaagacaaagaaacaatgaataaaggaactgcttagatgtg

SEQ ID NO: 7065 - DNA, 1626 bp, Homo sapiens
ggcatcgagggatcccggatgtggatcaagttggtgggaagcgtgcggtgccgcagcaatggcggcgctcacaattgccacgggtactggcaattggttttcggctttggcgctcgggccattccacagattttgaagtacaccgaaactggcttgctatcactcacagtttgccaatatcacagtggtattatgaggcaacttcagagtggacgttggattacccccctttctttgcatggtttgagtatatcctgtcacatgttgccaaatattttgatcaagaaatgctgaatgtccataatttgaattactccagctcaaggaccttacttttccagagattttccgtcatctttatggatgtactctttgtgtatgctgtccgtgagtgctgtaaatgcattgatggaaaaaaagtgggtaaagaacttacagaaaagccaaaatttattctgtcggtattacttctgtggaacttcgggttattaattgtggaccatattcattttcagtacaatggctttttatttggattaatgctactctccattgcacgattatttcagaaaaggcatatggaaggagcatttctctttgctgttctcctacatttcaagcatatctacctctatgtagcaccagcttatggtgtatatctgctgcgatcctactgtttcactgcaaataaaccagatgggtctattcgatggaagagtttcagctttgttcgtgttatttccctgggactggttgttttcttagtttctgctctttcattgggtcctttcctggccttgaatcagctgcctcaagtcttttcccgactctttcctttcaagaggggcctctgtcatgcatattgggctccaaacttctgggctttgtacaatgctttggacaaagtgctgtctgtcatcggtttgaaattgaaatttcttgatcccaacaatattcccaaggcctcaatgacaagtggtttggttcagcagttccaacacacagtccttccctcagtgactcccttggcaaccctcatctgcacactgattgccatattgccctctattttctgtctttggtttaaaccccaagggcccagaggctttctccgatgtctaactctttgtgccttgagctcctttatgtttgggtggcatgttcatgaaaaagccatacttctagcaattctcccaatgagccttttgtctgtgggaaaagcaggagacgcttcgatttttctgattctgaccacaacaggacattattccctctttcctctgctcttcactgcaccagaacttcccattaaaatcttactcatgttactattcaccatatatagtatttcgtcactgaagactttattcagaaaagaaaaacctctttttaattggatggaaactttctacctgcttggcctggggcctctggaagtctgctgtgaatttgtattccctttcacctcctggaaggtgaagtaccccttcatccctttgttactaacctcagtgtattgtgcagtaggcatcacatatgcttggttcaaactgtatgtttcagtattgattgactctgctattggcaagacaaagaaacaatgaataaaggaactgcttagatgtg

SEQ ID NO: 7066 - DNA, 980 bp, Homo sapiens
ggcatcgagggatcccggatgtggatcaagttggtgggaagcgtgcggtgccgcagcaatggcggcgctcacaattgccacgggtactggcaattggttttcggctttggcgctcggggtgactcttctcaaatgccttctcatccccacataccattccacagattttgaagtacaccgaaactggcttgctatcactcacagtttgccaatatcacagtggtattatgaggcaacttcagagtggacgttggattacccccctttctttgcatggtttgagtatatcctgtcacatgttgccaaatattttgatcaagaaatgctgaatgtccataatttgaattactccagctcaaggaccttacttttccagagattttccgtcatctttatggatgtactctttgtgtatgctgtccgtgagtgctgtaaatgcattgatggaaaaaaagtgggtaaagaacttacagaaaagccaaaatttattctgtcggtattacttctgtggaacttcgggttattaattgtggaccatattcattttcagtacaatggctttttatttggattaatgctactctccattgcacgattatttcagaaaaggcatatggaaggagcatttctctttgctgttctcctacatttcaagcatatctacctctatgtagcaccagcttatggtgtatatctgctgcgatcctactgtttcactgcaaataaaccagatgggtctattcgatggaagagtttcagctttgttcgtgttatttccctgggactggttgttttcttagtttctgctctttcattgggtcctttcctggccttgaatcagctgcctcaagtcttttcccgactctttcctttcaagaggggcctctgtcatgcatattgggctccaaacttctgggctttgtacaatgctttggacaaagtgctgtctgtcatcggtatggtagcgaaattcaattact

SEQ ID NO: 7067 - DNA, 1695 bp, Homo sapiens
ggcatcgagggatcccggatgtggatcaagttggtgggaagcgtgcggtgccgcagcaatggcggcgctcacaattgccacgggtactggcaattggttttcggctttggcgctcggggtgactcttctcaaatgccttctcatccccacataccattccacagattttgaagtacaccgaaactggcttgctatcactcacagtttgccaatatcacagtggtattatgaggcaacttcagagtggacgttggattacccccctttctttgcatggtttgagtatatcctgtcacatgttgccaaatattttgatcaagaaatgctgaatgtccataatttgaattactccagctcaaggaccttacttttccagagattttccgtcatctttatggatgtactctttgtgtatgctgtccgtgattgtttctgtttctttcctaatgtttcaatgtaggtgctgtaaatgcattgatggaaaaaaagtgggtaaagaacttacagaaaagccaaaatttattctgtcggtattacttctgtggaacttcgggttattaattgtggaccatattcattttcagtacaatggctttttatttggattaatgctactctccattgcacgattatttcagaaaaggcatatggaaggagcatttctctttgctgttctcctacatttcaagcatatctacctctatgtagcaccagcttatggtgtatatctgctgcgatcctactgtttcactgcaaataaaccagatgggtctattcgatggaagagtttcagctttgttcgtgttatttccctgggactggttgttttcttagtttctgctctttcattgggtcctttcctggccttgaatcagctgcctcaagtcttttcccgactctttcctttcaagaggggcctctgtcatgcatattgggctccaaacttctgggctttgtacaatgctttggacaaagtgctgtctgtcatcggtttgaaattgaaatttcttgatcccaacaatattcccaaggcctcaatgacaagtggtttggttcagcagttccaacacacagtccttccctcagtgactcccttggcaaccctcatctgcacactgattgccatattgccctctattttctgtctttggtttaaaccccaagggcccagaggctttctccgatgtctaactctttgtgccttgagctcctttatgtttgggtggcatgttcatgaaaaagccatacttctagcaattctcccaatgagccttttgtctgtgggaaaagcaggagacgcttcgatttttctgattctgaccacaacaggacattattccctctttcctctgctcttcactgcaccagaacttcccattaaaatcttactcatgttactattcaccatatatagtatttcgtcactgaagactttattcagaaaagaaaaacctctttttaattggatggaaactttctacctgcttggcctggggcctctggaagtctgctgtgaatttgtattccctttcacctcctggaaggtgaagtaccccttcatccctttgttactaacctcagtgtattgtgcagtaggcatcacatatgcttggttcaaactgtatgtttcagtattgattgactctgctattggcaagacaaagaaacaatgaataaaggaactgcttagatgtg

SEQ ID NO: 7068 - DNA, 1132 bp, Homo sapiens
  misc_feature (41)..(41): n is a, c, g, or t
  misc_feature (59)..(60): n is a, c, g, or t
  misc_feature (62)..(62): n is a, c, g, or t
gaaattaaaaatcgccaaaaggcaaggggggggggggctanctgcaacgactctcttanntntccaccgctacacaaaaggcatatggaaggagcatttctctttgctgttctcctacatttcaagcatatctacctctatgtagcaccagcttatggtgtatatctgctgcgatcctactgtttcactgcaaataaaccagatgggtctattcgatggaagagtttcagctttgttcgtgttatttccctgggactggttgttttcttagtttctgctctttcattgggtcctttcctggccttgaatcagctgcctcaagtcttttcccgactctttcctttcaagaggggcctctgtcatgcatattgggctccaaacttctgggctttgtacaatgctttggacaaagtgctgtctgtcatcggtttgaaattgaaatttcttgatcccaacaatattcccaaggcctcaatgacaagtggtttggttcagcagttccaacacacagtccttccctcagtgactcccttggcaaccctcatctgcacactgattgccatattgccctctattttctgtctttggtttaaaccccaagggcccagaggctttctccgatgtctaactctttgtgccttgagctcctttatgtttgggtggcatgttcatgaaaaagccatacttctagcaattctcccaatgagccttttgtctgtgggaaaagcaggagacgcttcgatttttctgattctgaccacaacaggacattattccctctttcctctgctcttcactgcaccagaacttcccattaaaatcttactcatgttactattcaccatatatagtatttcgtcactgaagactttattcagaaaagaaaaacctctttttaattggatggaaactttctacctgcttggcctggggcctctggaagtctgctgtgaatttgtattccctttcacctcctggaaggtgaagtaccccttcatccctttgttactaacctcagtgtattgtgcagtaggcatcacatatgcttggttcaaactgtatgtttcagtattgattgactctgctattggcaagacaaagaaacaatgaataaaggaactgcttagatgtg

SEQ ID NO: 7069 - DNA, 1135 bp, Homo sapiens
  misc_feature (44)..(44): n is a, c, g, or t
  misc_feature (62)..(63): n is a, c, g, or t
  misc_feature (65)..(65): n is a, c, g, or t
catcaattcctagattaagaatataaagagatatgaaaggctanctgcaacgactctcttanntntccaccgctacacaaaaggcatatggaaggagcatttctctttgctgttctcctacatttcaagcatatctacctctatgtagcaccagcttatggtgtatatctgctgcgatcctactgtttcactgcaaataaaccagatgggtctattcgatggaagagtttcagctttgttcgtgttatttccctgggactggttgttttcttagtttctgctctttcattgggtcctttcctggccttgaatcagctgcctcaagtcttttcccgactctttcctttcaagaggggcctctgtcatgcatattgggctccaaacttctgggctttgtacaatgctttggacaaagtgctgtctgtcatcggtttgaaattgaaatttcttgatcccaacaatattcccaaggcctcaatgacaagtggtttggttcagcagttccaacacacagtccttccctcagtgactcccttggcaaccctcatctgcacactgattgccatattgccctctattttctgtctttggtttaaaccccaagggcccagaggctttctccgatgtctaactctttgtgccttgagctcctttatgtttgggtggcatgttcatgaaaaagccatacttctagcaattctcccaatgagccttttgtctgtgggaaaagcaggagacgcttcgatttttctgattctgaccacaacaggacattattccctctttcctctgctcttcactgcaccagaacttcccattaaaatcttactcatgttactattcaccatatatagtatttcgtcactgaagactttattcagaaaagaaaaacctctttttaattggatggaaactttctacctgcttggcctggggcctctggaagtctgctgtgaatttgtattccctttcacctcctggaaggtgaagtaccccttcatccctttgttactaacctcagtgtattgtgcagtaggcatcacatatgcttggttcaaactgtatgtttcagtattgattgactctgctattggcaagacaaagaaacaatgaataaaggaactgcttagatgtg

SEQ ID NO: 7070 - DNA, 1205 bp, Homo sapiens
ggcatcgagggatcccggatgtggatcaagttggtgggaagcgtgcggtgccgcagcaatggcggcgctcacaattgccacgggtactggcaattggttttcggctttggcgctcggggtgactcttctcaaatgccttctcatccccacataccattccacagattttgaagtacaccgaaactggcttgctatcactcacagtttgccaatatcacagtggtattatgaggcaacttcagagtggacgttggattacccccctttctttgcatggtttgagtatatcctgtcacatgttgccaaatattttgatcaagaaatgctgaatgtccataatttgaattactccagctcaaggaccttacttttccagagattttccgtcatctttatggatgtactctttgtgtatgctgtccgtgagtgctgtaaatgcattgatggaaaaaaagtgggtaaagaacttacagaaaagccaaaatttattctgtcggtattacttctgtggaacttcgggttattaattgtggaccatattcattttcagtacaatggctttttatttggattaatgctactctccattgcacgattatttcagaaaaggcatatggaaggagcatttctctttgctgttctcctacatttcaagcatatctacctctatgtagcaccagcttatggtgtatatctgctgcgatcctactgtttcactgcaaataaaccagatgggtctattcgatggaagagtttcagctttgttcgtgttatttccctgggactggttgttttcttagtttctgctctttcattgggtcctttcctggccttgaatcagctgcttttattctctcctgctcagagaataaaagcagcagttcatcagccactttgagatgggacccaaagagggtattggaggctaactgcaagtcccagaattagaggggtcacaatggcatctgtgtagctgttaagactggcaataaagtcacgatcatggtataaaagtcttccttatgccttcctcgtaatatcccatcaaaccttttcaagtgcctatcaactacagacttaaaaaactccttcaacatgtggcttaccactctcagtgctatacctcaactttctaggttacatctttttttcctgatccctaaaacaagatctaaaataatcacttggcctaaaatctttttttc

SEQ ID NO: 7071 - DNA, 954 bp, Homo sapiens
actgataatgttccttttctgtagatgggtctattcgatggaagagtttcagctttgttcgtgttatttccctgggactggttgttttcttagtttctgctctttcattgggtcctttcctggccttgaatcagctgcctcaagtcttttcccgactctttcctttcaagaggggcctctgtcatgcatattgggctccaaacttctgggctttgtacaatgctttggacaaagtgctgtctgtcatcggtttgaaattgaaatttcttgatcccaacaatattcccaaggcctcaatgacaagtggtttggttcagcagttccaacacacagtccttccctcagtgactcccttggcaaccctcatctgcacactgattgccatattgccctctattttctgtctttggtttaaaccccaagggcccagaggctttctccgatgtctaactctttgtgccttgagctcctttatgtttgggtggcatgttcatgaaaaagccatacttctagcaattctcccaatgagccttttgtctgtgggaaaagcaggagacgcttcgatttttctgattctgaccacaacaggacattattccctctttcctctgctcttcactgcaccagaacttcccattaaaatcttactcatgttactattcaccatatatagtatttcgtcactgaagactttattcagaaaagaaaaacctctttttaattggatggaaactttctacctgcttggcctggggcctctggaagtctgctgtgaatttgtattccctttcacctcctggaaggtgaagtaccccttcatccctttgttactaacctcagtgtattgtgcagtaggcatcacatatgcttggttcaaactgtatgtttcagtattgattgactctgctattggcaagacaaagaaacaatgaataaaggaactgcttagatgtg

SEQ ID NO: 7072 - DNA, 1376 bp, Homo sapiens
  misc_feature (1347)..(1347): n is a, c, g, or t
  misc_feature (1349)..(1349): n is a, c, g, or t
ggcatcgagggatcccggatgtggatcaagttggtgggaagcgtgcggtgccgcagcaatggcggcgctcacaattgccacgggtactggcaattggttttcggctttggcgctcggggtgactcttctcaaatgccttctcatccccacatagtaagggactcgcacggccaggtgctgggcggggaggccccgcggtcggtcagggcgggagagaaaggtgtggatatccctgggtatgaagagaaaactttaggtcgtgtttgtcgctatcctgcctttgctaagctttctgtttcgccagttgttacttgacttagccccagctggctaggttcagacctggcgctgtctgatttggaacaaatcactttaacgtttctgaacctcagggtcctcatccttaataggcagttaagaacctctgcctccaacagccattcagccagtattatcagatgcctgaggtgccaggtaccgttctaactcccgggagatgcggtggtgagcaagacattgctggtccttgccctcgaagttggtgggtggagctagacaaacaggaacttttcagattgtgataaaggaaatagagggttactaagtggctgtgcgctattcctttagaaggtgatgtctgagttgaaattcaaaaaatgaaaaagaataagtgatgtggaaagcagttcaggcataggaaagagtaagttcaaaggccctgtggcaggaaagaagtcagagcattctaggaacagaaagtgccccttgtggctgcagagcattgagggagaggagtggcacagcatggggtgcactggggacagataacacagggtttcgaagaccacagttagactgctgtgtaaaaaatggatgtagggccaagactgaaagcgtggaaaccaagaagcaaccatgaaatggtggtgtgtatacaccattccacagattttgaagtacaccgaaactggcttgctatcactcacagtttgccaatatcacagtggtattatgaggcaacttcagagtggacgttggattacccccctttctttgcatggtttgagtatatcctgtcacatgttgccaaatattttgatcaagaaatgctgaatgtccataatttgaattactccagctcaaggaccttacttttccagagattttccgtcatctttatggatgtactctttgtgtatgctgtccgtgagtgctgtaaatgcattgatggaaaaaaagtgggtaaagaacttacagaaaagccaaaatttattctgtcggtattacttctgtggaacttcgggttattaattgtggaccatattcatttttgtcctttttcttgcncnataaaattataaggtcataaaaaaaaa

SEQ ID NO: 7073 - DNA, 618 bp, Homo sapiens
tcgatccgctcgtgccgttgctaggtggagtgcactggacgactctcagtactgaaactccgctcccagaaaagaaaaacctctttttaattggatggaaactttctacctgcttggcctggggcctctggaagtctgctgtgaatttgtattccctttcacctcctggaaggtgaagtaccccttcatccctttgttactaacctcagtgtattgtgcagtaggcatcacatatgcttggttcaaactgtatgtttcagtattgattgactctgctattggcaagacaaagaaacaatgaataaaggaactgcttagatgtgtgccaagcaattatttcatgggaaattaaccagaacttgaagaaagttgccagtggcatcagccatttgtttcagtagaactgttcagagcaccgttcttccacacttggtcttgcccagcctagcaaccggattgtcaccatggtgagaagccgccaactttttttttttggcgtgtacacaggcagatggtgtactgtccccattctgtacaccttgttccagattttttttgtttgaaattatacagtgacaatactcacaaagccaaggggagtagttaaggtataatttg

SEQ ID NO: 7074 - DNA, 368 bp, Homo sapiens
tgcttggttcaaactgtatgtttcagtattgattgactctgctattggcaagacaaagaaacaatgaataaaggaactgcttagatgtgtgccaagcaattatttcatgggaaattaaccagaacttgaagaaagttgccagtggcatcagccatttgtttcagtagaactgttcagagcaccgttcttccacacttggtcttgcccagcctagcaaccggattgtcaccatggtgagaagccactggccctccataagcactgaaacacatctgaaaaaaactcacctttccctattaaaattgtctgagatcgttcagactgctgtgcttgctcaagccaaacagggaatctgattaaccgcataa

SEQ ID NO: 7075 - DNA, 1661 bp, Homo sapiens
ggcatcgagggatcccggatgtggatcaagttggtgggaagcgtgcggtgccgcagcaatggcggcgctcacaattgccacgggtactggcaattggttttcggctttggcgctcggggtgactcttctcaaatgccttctcatccccacataccattccacagattttgaagtacaccgaaactggcttgctatcactcacagtttgccaatatcacagtggtattatgaggcaacttcagagtggacgttggattacccccctttctttgcatggtttgagtatatcctgtcacatgttgccaaatattttgatcaagaaatgctgaatgtccataatttgaattactccagctcaaggaccttacttttccagagattttccgtcatctttatggatgtactctttgtgtatgctgtccgtgagtgctgtaaatgcattgatggaaaaaaagtgggtaaagaacttacagaaaagccaaaatttattctgtcggtattacttctgtggaacttcgggttattaattgtggaccatattcattttcagtacaatggctttttatttggattaatgctactctccattgcacgattatttcagaaaaggcatatggaaggagcatttctctttgctgttctcctacatttcaagcatatctacctctatgtagcaccagcttatggtgtatatctgctgcgatcctactgtttcactgcaaataaaccagatgggtctattcgatggaagagtttcagctttgttcgtgttatttccctgggactggttgttttcttagtttctgctctttcattgggtcctttcctggccttgaatcagctgcctcaagtcttttcccgactctttcctttcaagaggggcctctgtcatgcatattgggctccaaacttctgggctttgtacaatgctttggacaaagtgctgtctgtcatcggtttgaaattgaaatttcttgatcccaacaatattcccaaggcctcaatgacaagtggtttggttcagcagttccaacacacagtccttccctcagtgactcccttggcaaccctcatctgcacactgattgccatattgccctctattttctgtctttggtttaaaccccaagggcccagaggctttctccgatgtctaactctttgtgccttgagctcctttatgtttgggtggcatgttcatgaaaaagccatacttctagcaattctcccaatgagccttttgtctgtgggaaaagcaggagacgcttcgatttttctgattctgaccacaacaggacattattccctctttcctctgctcttcactgcaccagaacttcccattaaaatcttactcatgttactattcaccatatatagtatttcgtcactgaagactttattcagaaaagaaaaacctctttttaattggatggaaactttctacctgcttggcctggggcctctggaagtctgctgtgaatttgtattccctttcacctcctggaaggtgaagtaccccttcatccctttgttactaacctcagtgtattgtgcagtaggcatcacatatgcttggttcaaactgtatgtttcagtattgattgactctgctattggcaagacaaagaaacaatgaataaaggaactgcttagatgtg

SEQ ID NO: 7076 - DNA, 414 bp, Homo sapiens
acctccgttaggtacgtgaatttagttttcagcaaattattcctttggtttcccagaagcttccttcacattccagctcctcaagtaaatgttaaaagtttaacaaggaaaaggagtgaattgattttgtatatatttttgtttggtgaaatagcagagtgtaggcatagtcttttcagataagtttgctaaaaagtagtttcctgtcacctccctttgaaaagaactgaggtgtgccccatcctcaaacctaccatctttccaatttatttgtttattggggtagtaggtgggaataaatgtttcttagatttttctggcctcccttcctaagccagggtagctcctggcaaatagtccccagacaaaccttaactgggccgccttcctggaacctcattttatacccaaaat

SEQ ID NO: 7077 - DNA, 783 bp, Homo sapiens
caagttgtcctgtgtgtacaagtatctcatggacattgatgtgaacacatgaacaactttctttacctctctgttctcatccccaccccatctgatagggtttggctgtgtccccattcaaatctcagcctgaattgtatctcccagaattcccacaaattgtgggagggaaccagggggaggtaattgaatgatagcagctggtctttcctgtgctattctcgtgatagtgaattagtctcatgagatctgatgggtttatcagggatttccacttttacctcttcctcattttctcttgctgccaccatgtaagaagtgccttttgccttccgccatgattctgaggcctccccagccatgtggaagtgtaagtccaattaaacctcattttctttccagtctcaggtatgtctttattagcagcatgaaaacagactaatgcatcacctcatcattgtaggatttgagcagtttaataaaaatgcgctattttggtcgggcgcggtagcccacgcctgtaatctgagccctttgggaggccgaggcgggtggttcgcaaggtcaggagatcgagaccatcctggctaatgtggtgaaaccctgtctctactaaaaatacaaaaaattagccaggtgtggtggcaggcacctgtagtcccagctactcaggaaggctgaggcagaagaatggcatgaacccaggaggcagagcttgcagtgagccgagatcgcgccactgcactccagcctgagtgacagagcgagactccgcctcaaaaa

SEQ ID NO: 7078 - DNA, 326 bp, Homo sapiens
tcattctgaaggttgccttttcattctgttgatgggttttgttttttgtgtgtttttgctgtgcagaagccttttagtttgacgtagtctcaagtgtctatttttgcttttgttacctgtgcttttggtgtcatgtctaggaaatcattgtcaagaccaaagtcaggaagctttttccctatgctttcttctaagggttttacagttcaggtcttatatatgtttttaattcacttcgagttgatttttgtggatggtgtaagataagggtccaattttattcttttgcctggggatgtccaattttcccagcagttaaaaaaaat

SEQ ID NO: 7079 - DNA, 463 bp, Homo sapiens
attcgcggccgcgtcgacattaggctgaattctttctatctcacaatttaatgtgtgcctttaggaaaatcctagaagacagagttgcctaagaatatttaacttcagattaaggtatttataaagacaaagcagtctcttgacatattctgacatgtgaacctctgctctgagctgtgagtagaaggacctcttctgacagggtcccaaagggcttaagacaggggtctgttccattgtctaatgtgctccagtgtgataagttggaggcacattctgcattgacctgaatgtgccagtgggttggcaatgaggctgcaagcacctccaagcagctgccatagtagagaaatggactctggccatgggaggccttgtcatcttccccaggcccctggaagaattttccatgcagccaagggctcaatactcgtgggaattaatcacttctgggcagtgctgg

SEQ ID NO: 7080 - DNA, 378 bp, Homo sapiens
ttctatggggctcttcacagaggggccaggtacccctgagcacactgccatgaacttgtgccctctgcttctttccagtcagatcactgactattgactaatgcttacactcaagcgtttgcaagaaattcaaattactggtcctacaataaagtcacatcccttgttcatcgtttaaagcctgcaggttgtattagtctgcttgggcttccataacaaagtaccacagactggtggctttgatggcagaaatttatttctcaaagttctccaggctcgaggtccaagatcaaggtgagagcaggtctggtttcttctgaagccttcctccttgtcttgccgacggccaccttcttgctgtgatctcatatggccttt

SEQ ID NO: 7081 - DNA, 1084 bp, Homo sapiens
caaagaactggcagatgcctgggtgtgtgctggcccacttgccaggtgatcaatggtagtctttgctctcagggtgtaagctttggctgtgtctacagcatgcttcagacacagtgtttctccttggacaattgccccccaataatttaggtatgctgccaccaggtggcagtgatatttcagtgttggcaacttgatctcaattcctgtggctctttgtacccagttttggtgatatttgagaaggcatgctctccttccttttaaaatggcaaagaaacgtaaggtgttttggaggtaccgccagctagccaaattagctgggaaacgtgaatttggatcctggttctgtgggcagattccagaaagtgttcacctaatacagatgcagttactgagtacatgtgagatgccagggctggctaggtcatttctggttcattgtcgttaagcaggtaatagaaccaaggctcagagagatcaagtgacttgcctacagttgcccagcagatttcaatccagatctgtggggctgtcctacctcctccttgatcacaccgtgcttttctctgagattgggactccacagccctcccaggacataacccctctgcttctgctgatacagccactctctctcccctctttatttacaaccacctatttgaggtttttctttttcttttccttccttgtttcttttctcttttctctgtctttaactgaaaaaaaaaaaaaatcagtggaacatcaaaattgaggacctttagaaattccaccacctcagcttgaattttttaactctcttttgtttttattattatactttaagttttagggtacgtgtgcacaacgtgcaggtttgttacatatgtatatatgtgccatgttggtgtgctgcacccattaacttgtcatttaacgttaggtatatctcctaatgctatcttgtttttgtcattttctctcctacaccaatatacatttgtctcctgtggctgcggtgcacatactgtcagaatacgttctcctgtatgtaaagaatgccacttccagcctgggcgaaagtgcgagactccgtctc

SEQ ID NO: 7082 - DNA, 446 bp, Homo sapiens
gctcaaaacaaaacaaaacaaaacaaaaaaacactgaagcactccaagcagtgttaggtagcgcattaaggatattcagagaagtgtccgtgtccctttttgtgtaaatatttatttttattgattttcctcttcttaacattgtgtaaataacttctgtttgaacataattttggaatatctgcacaatagaaagaaattagatgtttgcaaatagacagttgagccctagggatatttggggttctcccttttttaaaatatttgtatttcacagagtgaaataacagaccctggagactcctgaaagtgggatgatgggaggcgggtgaaggatgaaatattacctattggagacaatgttcactgttcaggcgactgggaaagctacaacccagattttaccactgtgcattatatccacgtaatacaactgcacttttacc

SEQ ID NO: 7083 - DNA, 2656 bp, Homo sapiens
  misc_feature (1428)..(1428): n is a, c, g, or t
  misc_feature (1615)..(1615): n is a, c, g, or t
  misc_feature (1750)..(1750): n is a, c, g, or t
  misc_feature (1753)..(1753): n is a, c, g, or t
  misc_feature (1796)..(1796): n is a, c, g, or t
ttagtaattgttttataaatttgggagctccagtcttaggtgcataaatgtttaggattgtgatattttcctgttgccaaggctggagtgcagtggcacgatctcagctcactgcaacctccatctcccaggttcaagcgattctcctgcctcagcctccccgagtagctggaattacaggcgtgggccaccacgcccagctaatttttttttttatttttagtggagatggggtttcaccatggtggccagactgatctcgaactcctgacctcaaatgatccacctgcctcagcctcccaaagtgctgggattacaggcatgggccactgtgtccagccaaataaagtcagttttaatgaacataggttcatggtgtgccataggttaagtttttatacagttggtattaatcaacaggaaattataatgcaaactgcatatactcttaaaaacttttctggaactgagtggatcttgaaaataaaaatgattgttagatatttcaaagattattgtaaatttccaaattctgttttttaattctttacttttaatcataaagtataccatctatttgaaaacaggtataccacaatgtacctacttcatagtgttgctatataatgcgaagaacaatgcttaacacatcgtaagtatgcgatcaatgtcaccattgccttgatttgtttagcacctttaggcacaccaaagaatacagaggtatcatttgagttttctcattcagtataactcatagttctcctccttaaatagattatgttgaggaattaatgagcttctgccagctgaaagcttttgacagatagatgtttgtttcctgggcgatggggccatcacggtgcctaagtcagttacactaccatcttctagccttgaacattctgtgatctattctgaaagatttgacaatttctattctctaattttcttgcctagagtgtgacaggtgcacaataacttttcatttccatgctgcattatagggtaatctttttgaagacattttaaatgacaattagagatctatgtgagttaaaattcaccagtgttatcaatgtgaaaataactgaagtgacaataaaaacatacactatcgtgtttgtcttggtatccaatttgtcagttatcctgaagtaaattttttccacagcccacaatgcagttgttacatcagccatctttgcaccaaacccaagtttgatgttatctttggatgtgcaatctgaaaaatcagaagggaacgagaaaagtgaagatgctgaagttttggatgccacaccttctggtaaatctttacttgtcctatatttttttctagtcagcacttagtagcctcatttatctcatttgagtataataaggttttcactagtataaagaatatttcttttttcttttttcttnagacagggtcttgctctgtcacccaggctggagcgcagtgacgcagtcacacacagctcactgcagcctcaaccaccctggactcaggtgatccttccacctcagcctcccaagtagctgggactatgggcctacaccaccatgcccagctaatttttgtattttttgtagagatgggatttcaccntgttgcccaggctggtctcaaacttctgggctcaagcaatgcacccacctcagcactttgggaggccaaggcagatggatcacgaggtcaggagatcgagaccatcctggctaacacggtgaaaccccgtctctnctnaaaatacaaaaaattagccgggcatggtggcgggtgcctgtantcctagctactcgggatgctgaggcaagagaatggtgtgagcccgggaggcagagcttgcagtgagctgagatcgcgccactgcactccagcctgtgtgacagagcaagactccatctcaaaaaaagaaaagagaaatttggatgttcataactatgggtaaccattctctttagagaagtgcaaacaatatatgcaaatgtaaaacttctttattacctgtctctcctactagtctgtaatctctagaagacagagacttttcatgtcttatttattgctgtattgccagtgtctctcacaatgcttgcctacacatagtaggtgcttgatgaacatgtgctgactaaatgaattaaacccaaatgaagcagggctaatttttctacttgccacaagttaacagcttcttgagataggtggctatttacaagtttgtaatttcttgccatttgtagcatatatgctttgagaatgaatattaattccagttatatacaatgctcatattaggaagggagaagaaactgtcagcaagtaatattgagtgccaatcagttatataaaaatctgggccaggtgcggtggctcacgcctgtaatcccagcactttgggggaccaaggcaggcggattatgaggttgagagttcgagaccatcctggccaacatggtgaaaccccgtctctactgaaaaactgcaaaaattagctgggcgtggtagtgcacgcctgcagtcccagctactcaggaggctgaggctggagaatcgcttgaaccagggaggtggaggttgcagtgagccgagatcacgccactgcactccagcctggtgacagagggagactccatctcaaaaaag

SEQ ID NO: 7084 - DNA, 2380 bp, Homo sapiens
ttagtaattgttttataaatttgggagctccagtcttaggtgcataaatgtttaggattgtgatattttcctgttgccaaggctggagtgcagtggcacgatctcagctcactgcaacctccatctcccaggttcaagcgattctcctgcctcagcctccccgagtagctggaattacaggcgtgggccaccacgcccagctaatttttttttttatttttagtggagatggggtttcaccatggtggccagactgatctcgaactcctgacctcaaatgatccacctgcctcagcctcccaaagtgctgggattacaggcatgggccactgtgtccagccaaataaagtcagttttaatgaacataggttcatggtgtgccataggttaagtttttatacagttggtattaatcaacaggaaattataatgcaaactgcatatactcttaaaaacttttctggaactgagtggatcttgaaaataaaaatgattgttagatatttcaaagattattgtaaatttccaaattctgttttttaattctttacttttaatcataaagtataccatctatttgaaaacaggtataccacaatgtacctacttcatagtgttgctatataatgcgaagaacaatgcttaacacatcgtaagtatgcgatcaatgtcaccattgccttgatttgtttagcacctttaggcacaccaaagaatacagaggtatcatttgagttttctcattcagtataactcatagttctcctccttaaatagattatgttgaggaattaatgagcttctgccagctgaaagcttttgacagatagatgtttgtttcctgggcgatggggccatcacggtgcctaagtcagttacactaccatcttctagccttgaacattctgtgatctattctgaaagatttgacaatttctattctctaattttcttgcctagagtgtgacaggtgcacaataacttttcatttccatgctgcattatagggtaatctttttgaagacattttaaatgacaattagagatctatgtgagttaaaattcaccagtgttatcaatgtgaaaataactgaagtgacaataaaaacatacactatcgtgtttgtcttggtatccaatttgtcagttatcctgaagtaaattttttccacagcccacaatgcagttgttacatcagccatctttgcaccaaacccaagtttgatgttatctttggatgtgcaatctgaaaaatcagaagggaacgagaaaagtgaagatgctgaagttttggatgccacaccttctggtattatgaagacagataacacagaagttcttctctctgctgacttcactggagcaatcaaagtgtttgttaataaaagaaaaaatgtatcttaatttgaaatggcatttaaaataaacatatcagtaagtttctatatgtatcaaaactgaaaaaatagtgttccaggctaacatacttttttaatttttattgaaagttgttcaaatataatatattttttgagaggcagtgttaatgatctaggaaaccctgggctgatagagtagaaaggaatatggctagaataacattgccaaacattaggctttatgttttgttatgtttgtgttttcgttgtataattatgaacatgcacaagtttctgcatgaaaagatattaatatattaatcacatgtatgtgccttttggttacatgcattaaatctaacagagttaaattatttcagtggctcttttggcctcttactaggggggatagtcttgtttctagcttaaacaattttttttttgcacaaaatttcatttttaataaaagtggtatcttttgactgagttattgttttgaaaatggtatataggtttccagtaggtcaacaaccatatgtaaatggtttttataaatttctcaatttggggacaagatttttttgtggtctaaattgtgggcttaagattcttttctttatatgtgtacatataatttttttttctttgccacactggagcacaatgtttctatgtaaagaattattttcattctttatccatgagcaccaggctttgctcacttaaaaaaaaattaagccacattaaggagtgagtcttcttttttacaataatgtaaaaattaaactgtttacatttttttaaagcattgtagtttttaaaaattaagctgttttgttttgtgttgttgaatttgaaagcctttgtaaatatcaatataatgtaccaatgaaataacatctggggcaatgaaaccctgatcatgttgttgatggttagcatatgtttctgaaaattaaatatgtattattaaaagttggtctccaacacttgtttaaaca

SEQ ID NO: 7085 - DNA, 1134 bp, Homo sapiens
tccttttactgcccatttattaccgtgcgggttaaaaaacgggaaaagaggccgggcgtggtggctcacccctgtaatcctaacacttcaggaggctgaggcaggcggatcatgagctcgtgccgaattcggcacgagaaagaaaaaatgtatcttaatttgaaatggcatttaaaataaacatatcagtaagtttctatatgtatcaaaactgaaaaaatagtgttccaggctaacatacttttttaatttttattgaaagttgttcaaatataatatattttttgagaggcagtgttaatgatctaggaaaccctgggctgatagagtagaaaggaatatggctagaataacattgccaaacattaggctttatgttttgttatgtttgtgttttcgttgtataattatgaacatgcacaagtttctgcatgaaaagatattaatatattaatcacatgtatgtgccttttggttacatgcattaaatctaacagagttaaattatttcagtggctcttttggcctcttactaggggggatagtcttgtttctagcttaaacaattttttttttgcacaaaatttcatttttaataaaagtggtatcttttgactgagttattgttttgaaaatggtatataggtttccagtaggtcaacaaccatatgtaaatggtttttataaatttctcaatttggggacaagatttttttgtggtctaaattgtgggcttaagattcttttctttatatgtgtacatataatttttttttctttgccacactggagcacaatgtttctatgtaaagaattattttcattctttatccatgagcaccaggctttgctcacttaaaaaaaaattaagccacattaaggagtgagtcttcttttttacaataatgtaaaaattaaactgtttacatttttttaaagcattgtagtttttaaaaattaagctgttttgttttgtgttgttgaatttgaaagcctttgtaaatatcaatataatgtaccaatgaaataacatctggggcaatgaaaccctgatcatgttgttgatggttagcatatgtttctgaaaattaaatatgtattattaaaagttggtctccaacacttgtttaaaca

SEQ ID NO: 7086 - DNA, 429 bp, Homo sapiens
tcaatagcagcagccagatcaaagcaagtttcaggtaaattggcaatgagatgttcccaaaagagatcaggacatttctcccctagttccatttttccattggtctatgccttatgtttaatggggttcttttcacttttgcaagtagtagtttattatcatgcaatacgtaccttgtccacctatatagtatatagaattcgaattgaccctgttctgcaaatgaagaaaccaagactcagaaaattaagtgattggcctaaagtcatggttgtagagccaagattatgaagactctcatctctagagtttttgcttttgtacctttgtttacgcttttaagagggggcttacggctcatcccgccactcccctccctgccccattgtcttgaaccttttaggaaaggaaggaaccttttaggattct

SEQ ID NO: 7087 - DNA, 2617 bp, Homo sapiens
atacctttgagtcttgcagaagagaaactaccaacaggcattaatcctctcactctacacatcatgagaaggacaaaagaatatgtaagtaatgacgcggcacagtcagatgatgaagagaagttacagtctcagccaacagatactgatggtggaaggttaaaacagaaaacgactcaactaaagaagtttcttggaaaatcagtaaagagagcaaagcaccttgctgaggaatatggtgaacgtgctataaataaagttaaaagtgttagagatgaagtgtttcatactgatcaagatgatccttcatcaagtgatgatgaaggaatgccatacacaagaccagttaaattcaaagcagcacacggtttcaaaggaccttatgattttgatcagatcaaagtggtgcaagatcttagtggtgaacatatgggagctgtttggaccatgaaattttctcactgtggccgattacttgcctcagctggacaagacaatgtagtgagaatatgggctttaaaaaatgcttttgactatttcaacaatatgcgaatgaaatacaatactgaaggacgtgtgtccccatcaccctctcaggaaagtctaagttcatcaaaatcggatacagatacaggggtatgcagtggaactgatgaagaccctgatgataaaaacgcaccctttcggcaacggccattttgcaaatataaaggacatactgctgatctccttgatctttcatggtctaaaaactactttcttctttcttcttcaatggataaaacagtcagattatggcacatttctcgaagagaatgcctttgctgttttcaacatatagattttgtcactgccatagcttttcatccaagagatgacaggtattttctaagtgggtctttggatggaaagctccgcctttggaacatacctgacaaaaaagtggctttgtggaatgaagtagatggtcagacaaaattgatcacagctgcaaatttctgtcagaatggcaaatatgcagtgattgggacatatgatggcagatgtattttctatgatacagagcatttgaaataccatacacaaatacatgtccgatctactagagggcgcaacaaggttggaagaaaaattactggcattgagcctttacctggagaaaataagatattggtaacctcaaatgactccagaatcagactatatgatttgagagatttgtcactatccatgaagtataagggttacgtcaatagcagcagccagatcaaagcaagtttcagccatgattttacttacctcgttagtggttcagaagataagtatgtttatatctggagtacctaccatgacctaagcaagtttacttcagtcaggagagatcgtaatgacttctgggaaggtattaaagcccacaatgcagttgttacatcagccatctttgcaccaaacccaagtttgatgttatctttggatgtgcaatctgaaaaatcagaagggaacgagaaaagtgaagatgctgaagttttggatgccacaccttctggtattatgaagacagataacacagaagttcttctctctgctgacttcactggagcaatcaaagtgtttgttaataaaagaaaaaatgtatcttaatttgaaatggcatttaaaataaacatatcagtaagtttctatatgtatcaaaactgaaaaaatagtgttccaggctaacatacttttttaatttttattgaaagttgttcaaatataatatattttttgagaggcagtgttaatgatctaggaaaccctgggctgatagagtagaaaggaatatggctagaataacattgccaaacattaggctttatgttttgttatgtttgtgttttcgttgtataattatgaacatgcacaagtttctgcatgaaaagatattaatatattaatcacatgtatgtgccttttggttacatgcattaaatctaacagagttaaattatttcagtggctcttttggcctcttactaggggggatagtcttgtttctagcttaaacaattttttttttgcacaaaatttcatttttaataaaagtggtatcttttgactgagttattgttttgaaaatggtatataggtttccagtaggtcaacaaccatatgtaaatggtttttataaatttctcaatttggggacaagatttttttgtggtctaaattgtgggcttaagattcttttctttatatgtgtacatataatttttttttctttgccacactggagcacaatgtttctatgtaaagaattattttcattctttatccatgagcaccaggctttgctcacttaaaaaaaaattaagccacattaaggagtgagtcttcttttttacaataatgtaaaaattaaactgtttacatttttttaaagcattgtagtttttaaaaattaagctgttttgttttgtgttgttgaatttgaaagcctttgtaaatatcaatataatgtaccaatgaaataacatctggggcaatgaaaccctgatcatgttgttgatggttagcatatgtttctgaaaattaaatatgtattattaaaagttggtctccaacacttgtttaaaca

SEQ ID NO: 7088 - DNA, 449 bp, Homo sapiens
tacaattcaagatgaaatttggatggggacaaatcatatcagaaagtagtagagttgacagcatggtgaaagatggtgtgtgagacttaaagcttagggaggagtttcatcatagacctagctgatgttgtgtaaggttttttccccctacactgttttgaaaaatgttaaacttatggaagagtggtacaatgaagacccatatacccttcacccaaactcatattcttttctccaaaatgtacgctctctctttctctctatacatgcacacacacacacacacacacacacacacgtgtgcatacttttttactgagctatatgaaattaagttacaaggccaggcacagtggcttatgcctgtaatccgagcactttgggaggccaaggtgggtgaatcacctgaggtcaggagttcgagaccagcctggccaacatggtaaaac

SEQ ID NO: 7089 - DNA, 861 bp, Homo sapiens
agggacctggtgggaggtgattggatcatgggggctgtttccccatgctgttcttgtgatagtgagggagttctcacaagatctgatggttttaaaagtggcagttttccctgcactctctcctgccaccttgtgaagaaggtgcctgcttcccctttgcctttcgtcacaattgtaagttccccgaggttcgtcatgattgtaagtttcctgaggtctccccaaccatgcagaactgtgagtcacttgaaccccttttgtttataaattgcccagtctcaggtagtaccttgatagcagtgtgaaaatggactaatacagtcagggacctaaaagacaggtaaagagatgtggccaggtgaagacggaaaaaggacagtgcattccagacctgtggaaagacgcgaggttggaaagaacatcacaactggggcgactgaagaaattatgttgttaagcacgaaatgcagagagagagctatgtgaatgtgttgagtgtgattttcattaaacaatttttaaagaaagcaaaaaaaaaaaaaaaaaaaaaaaaaaaactttggggggggcttgggccctggaaaagagtttttaaaacctttggtgggggcgcgccgggcacgccagttgtggttacgttgaacagttgggccaagaggggttcccaaagaagagaacccggcggccagagagacaacgggggcgggggtttctcccacccaattaaaaaaggcgccgggggggaaacccagaggtggtcctggaacaaattttcgcaagatgggggggtcccaggaggggcacatacgcggggtctctatcaccggggggtgcccagggagacgtcgatacttcaattac

SEQ ID NO: 7090 - DNA, 318 bp, Homo sapiens
acaggtactccttcaaccttacaaaaagcatctaaaaagccccacagctgacagcactctttttcaacatagttctggaagttctacagagacataatacaagaaaaggaaattaagacaacagatgagaggaaagaaataaaactgtccctttttgctggtgacatgatcatctacgtagaaagccccagggaatcttgagtctgctgctgacatgattgtccaaacagaaaatcccagggaagaggcggagcttgcagtgagctgagattgcaccactgcactccagcctgggcgacagtgtgagactctgtctca

SEQ ID NO: 7091 - DNA, 363 bp, Homo sapiens
ctatattgaagttatttgtaccaaccttttattttaattagattattttctgtctagtaccatacagttttaataattatgttataccatttgtttaatgattctagtattctttttgtatagaatttcccttcacttttttcatatatttaattcccagatagaaattagaatcactataagtttcagaaaaaaatcatattggaattttaatggtaatgtgctgaatttatagattaatttgtgaaaagttaacaacttgaactgatttaatattcccatccagaaacaggtctgttcatttatcaaaagtggaaaaaaatttctttactttcaagtcttgtgtatgttttaatacactcc

SEQ ID NO: 7092 - DNA, 424 bp, Homo sapiens
gcaatagaatgcaggccaattcatgtggagctttgtaagccacagccaagactttggaaaggcactagacatttttaagcatataaaaagatgtgccatgtttttattactggcagctatggaaagaaaagtccatagagaagaaaggatattagggggagaagatagaaagtttttatagtagtccaggtaagtggcttgggccagtatggtagcaatcgttgaacgaggtaatgagaagtggaaagattatgaatggttttgaagttagagctgagaggttttactaatgtgtttgacagtagatgtaagagaaagagattaaattttttgtcttgagcagttgcaagaatggagttttcatatactgagatatggggaagactgaataaggaacagatttttttttgtaggagggggacag

SEQ ID NO: 7093 - DNA, 512 bp, Homo sapiens
attcgcggccgcgtcgactttttttttttgagatggagtcttgctctgttgcccaggctggagtgagattctgtgtctacataaataaaagaaaacaaaaatctgacaaacgtacatatttcttattgtattgatgacatctataagtttttctcttggtctcgatatagtatggttgtgctcactctgtaatttatagactagttttagagaagaagatacaaactgttcttgaaactgagttgacaaatattgttcaattatacaatgtttttatttaattataactgagctacctccacaagactccaagtcagagctttggtgaggaacacccagaaaccaagtcttgctgaatagtgtgaaggaaggcaatatgcggtaagtgagctttcagcttgaaattatctgtcaaatcctaagttcaatgaaaagcatcaaaatgtcaagctcaagatatgaacttgaatcagttaaaacctggaaatgttagtgaatgtttcgcacaccca

SEQ ID NO: 7094 - DNA, 294 bp, Homo sapiens
gttgtcacaactggaaacatgttactggcatctggcaggtagaaaccaaagatactattaaatatttgacaatgcataagacagcctcacaacaatgtggcccaaaatgtcaatagtgccaaggttaggaaacctgaaactacagtaatcaagacaatatacgacgggcgcagtgcctcatgcccgtaatcccagcactttgggaagccgaggcgggcggatcagctgaggtcaagagttcaagaccagcctggccaacatggtggcaggaggctgcagtgagccaagatcaag

SEQ ID NO: 7095 - DNA, 432 bp, Homo sapiens
gcagtgtagaacaggaagcatgcatgcttttgggggcagctagccaccttgtgacagctgtttactaactgcagagcttatgtgctcttggatgggttacttctcttctctaggactcatcttctcaaaagttaagtcaggaaagataatcatatctccctcattggcttattggaagactaagtgagacagttcataaaatgcatcgagcacattattagcacttagtaagatttcaggaagtgtcagcggctattattaatatctaagtctttattttgggattctgacattacaatttactttttaaaaatggccagcattgtttttacttcatttatccaggtacatatgaatgtcttgttttcctgaataagactttagcttttcaagaaatgcacagtgcaaagattgagaaagtttgaaatagag

SEQ ID NO: 7096 - DNA, 403 bp, Homo sapiens
aggggaaggggtccaaaataccagtattgtcaccatgatcgattataggttacctcagaaatttgcctggcttccccattcacattggcattactattttacttcatttagagtcctgtttcttttgttaattacagaataaaatttacatttgtaggtttttccttatccttctctttctaatgcatatcgaaagccctgttcagattttcatgaattttgtaattttggccatacacgatttggtatgtcttaggttgatattttattagctgacacaagttaatatttctttagaaggtgatggaagaaaacagcagtattttttccaatatatttcctctaaaatacattaggaagaacagttttgaagtggtgaatagtttttggagacaaaaattct

SEQ ID NO: 7097 - DNA, 941 bp, Homo sapiens
tgtgagaaggcaagagggagttgagtaattgtcctttccccaggtctacaaagctcctgcgaagtagtttttcttagcaggtgggcctttgttatggagaatgctctgagcaattgcaaaatggttactttcccctctccctgcctaaaatacgaggggatttttttctttgatgttcttgtaagaacctgttcaggctcctggaggtaaaagctatataggtccctcttaagtctggacctccagaagttttaactctcaagctagtccacactcagtcttctgcagttcgtcaaaattaccgttcaggtattgattactgtattgcttactggttcatgtagcttttgcttctggtaatctgatcttttctgtgattctctgtattttcttgtgatttttttccttcaaattttgtggtagctgtttgctctgtgaccccagttctctaatggatctaagaaaggccattgatttcagtttgtttagctgttttcttgctgtgaggatgggaatgatgacttctgaactgaaaatgaagcctggcacccaacaccccttgctttaacaaatccctccaggtgattctgaggcatgtgaatggttgagaaccactcatgcagcgttagtccttcagttcacagataaagtacaaaggggaaactggctggtcactgtggctcacacctgtaatcttagccctttgggagcctgggaggtagatggtgcagtgagctgtgattgcaccactgtacaccagcctgggtgacagaacaagactctgtctcaaaaaacaaaaccagagtgctgggattgcaggcgggatccaccatgcctggccagaacaaatgcctttttaaaccttttaagaacattttttaaatgtctttttctatgtcaaatgtaacgtttatttttttaaacaataaaattgatttgcc

SEQ ID NO: 7098 - DNA, 557 bp, Homo sapiens
gtcccagatctcttaccctctaaccagttcctgcctgggagctgcagtgttagagcatatgcaaagccctaattgggggagagctgttcggtggacagtgaacggaggtgatgtggcaagtataatcactcccttcagctgactgtcacggggcagagccgcccagcccagccctgtgtgtggctctggctcaggttttccaccttgcatcagtgcagtggagttcgtggtcactcagcagtgaatgcatccaaccacgctactaacgcacggcactgctgatttatacttaatttaagcaactgctacttggaaccgaagtccagatttgaacctccgtgctgaaggcatcaaattgccggcaagataacagctccagaggagacttctcccactcccccaggttttacgcaatgaggcagtccacccaaacttaacgtgggctgcaggctgtaacagcaggttgcttttgtgttcattaaactgcatgaatgggtttgaacatgcccaaagccttgctaatgcagacttaattttgtaaaattaactatgccttt

SEQ ID NO: 7099 - DNA, 565 bp, Homo sapiens
atatgggcagtgctgataattggttcatttagtaacagtagcctccggatgagaactagatgagagaagcttattaattgaaatggtttccaaaaaggattatttcacttacaagttgaaacatggtgtgtttcccctactgaatcagtattctagtgaaacatacacaatattgtatgcatgagaaaaatcattttattggcatctggccaacaattgtctaattcctatgctatacaatttatcataattttgctatcagagaaggagtgcatgtaaaattattttgccttatatccttttttaaaaaattactatagtagcagctccttatgtcactctaaattttatttactccttatctgtcattcgatatttcagtagatctttatgtgatagtaaaagaattgtgagccaggctttgtggtgtgcacctgtaatcccagctacttgggaggctgaggtagaaggatcgcttgagtccaggagttcaaggctgcagtgagtcatggttgtggcactgcacagcagtgggcaacagaaggagaccctgctcaaaaaaaaa

SEQ ID NO: 7100 - DNA, 569 bp, Homo sapiens
ttttgggtgccttttttttttttttaacaaaagcaagaaatgcccaccataatagcaatgtatggttctgatttgcctaacatctgacaacttataaagccatcagcaatttattgatatatagctacatgtcccctgatatacccatgaacgactgagggtcacttccttatttgctctactgctgtttctaggctattcttagaactgtaatctgcagggaatttcctatgctctgaaaatgtctaagatctgcccttattaaatgctacattttcatcaaacttaaaaattaggcacaggttcttagttttaaaaaaacaaacaaacattgcaccattaggaacttctgtactttaaatattgccattgtgtttggaaaatcatcttcattgtcttgtctaataattggtttccaagtgactactcaaagagtgaatttatcttcaatgtcaaatattccgacattggacttgatgattttgaatttgtttgcagtgttagatgactccaaacaaacacaaaaactctgtacaggagaaaaactgtctcaacatcagttttctgtt

SEQ ID NO: 7101 - DNA, 478 bp, Homo sapiens
actctctcccattaaactggtgctttttttacgaaattgtatttattctgtaatcgttaagaatttcttatcttttctattataacaccctggctttgcagtgctgagcagtgataatttaacttaaaaatttattgaaactgtgatgtacaaaggtttaacaaaaggatattacttttctagtttattccaaaactggggccagctatggtggctcactcctgtaatcctagcactgagcctgaggcgggtggatcacttgaggtcaggagtttgagaccagcctgaccaacatggtgaaaccccacctctactaaaaatacaaaaattgctgggcatggtggctggcacctataatcccagctactcgggaggctggggcagagaaactcttgaacccgggaggcagaggttgcagtgagccgagactgtgccattgtactccagcctgggcagcaagagtgaaattccatctcaa

SEQ ID NO: 7102 - DNA, 467 bp, Homo sapiens
gcagccgcctactactactaaatttgcggccggtcgactgaacccgggaggcggacgttgtagtatgctgagatcgcgccactgcactctagcctgggttcacgccattctcctgtctcagcctcccaagtagctgggactacaggcgcctgccaccacacctggctaattttttgtacttttagtagagacgaggtttcaccatgttagccaggatggtcttgatctcctgacctcgtgatccgccagcatcagcctcccaaagtgctgggattacaggcgtgagccaccgtgcccggcccataaagtatacttttaagtgttgatatacagacacctgtgaaaccattaccacaatcaaaatagcaaatgtatgcatcaccccaagtttccttgtgccccttcctaatccttcctcacacacttcctctctaccatcccccactcccatctgcttggaaagtttt

SEQ ID NO: 7103 - DNA, 767 bp, Homo sapiens
gttcctctctctgcgccttggctccccttcccagagcccttcctcttggtcttgccaaatcctgcccatcctttgagaaacgcttatgcccatggctgtcttaccccttcctgctttgctgtggtatccattagtctgttctcgcgctgctaataaagacatacaaaagactgggtaatttataaaggaaagaggtttaatggactcacatttccacatggctggggaggcctcacaatcatggtggaagatgaaggaagagcaaagggactttttatgtggcggcaggaaagagagcttgtgcagggaaactcccatttataaaactgtcagatctcatgagacttattcactaccatgggaacagtatgggggaaactgcccccatgattcaattatctccacctggccctgcccttgacacgtgggggttattacaattcaaggtgagatttgggtggggacacagccaaaatatatctggcatatgcaatctgatcaccccttccaaacttctctcttaaaaatgcaacattctgacagcatgtggaggcttggatggaaacacggtaaaaattacaacattgtttctcacacttttgcaccaaagtgatacaaatcgcagagctgaggcaactggtgtttctgcgagaatggaatggaatgtggttgaaattttgtgttgttttttaaatatttgcaactatttgtcattcttccataaaaatcagaattcatggttgtgtacataaaagtaattttctaaa

SEQ ID NO: 7104 - DNA, 398 bp, Homo sapiens
cggacacggtagggtgctccatgccacagggcctttgaacaaacctttcttatccttggaataaatgccttttcttccttttgttcccctgccaaacacatgctattaggaaagattcaaccccatgtcatcacctccacaaagttctctcttaaaaatgcaacattctgacagcatgtggaggcttggatggaaacacggtaaaaattacaacattgtttctcacacttttgcaccaaagtgatacaaatcgcagagctgaggcaactggtgtttctgcgagaatggaatggaatgtggttgaaattttgtgttgttttttaaatatttgcaactatttgtcattcttccataaaaatcagaattcatggttgtgtacataaaagtaattttctaaa

SEQ ID NO: 7105 - DNA, 401 bp, Homo sapiens
tacactgactgtgtctcccacatttagcctaccaccttacctctcaaaacaattgttaccaggtacccaaattgtctttctcccagtcattatcagtgtgtaaagatcatctgagaagtgataaaagggagtctttaaaaactttaagttttccactttgggaggccaaggcgggtggaacatttgaggtcaggagttcaagaccagcctgggcaacatggtgaaactctgtctctactaaaaatacaaaaataagccgggcgtggtggagagcacccaaaatcccagctactcaggaggctgaggcaagagactcgcttgaacctgggaggcagagattacagtgagctgagatcgtgccactgcacttcagcctgggggatagagtgagattccattta

SEQ ID NO: 7106 - DNA, 388 bp, Homo sapiens
gctgtgacagtttctcagaattttcttgttttttgtattcgatctgtttactgactctcgttttgccttttctagaatgtcatataattggaaatgtacagtatgtagctttttcagactggcttttttcacttaacactatgcatttaagattcatctgtgacttgtcctggtttaatggctcattttcttttttggtgggcgggtggagagacagggtctcactctctcacccaggctggagtgcagtggggcaatctaggctcactgtagctagcctccacttccctggctcaagcaagcctctcacctcagcctcccgagtagctgggagactacaggtgctcgccaccatgcccggccagtgttttaaaaaaactttttgtaa

SEQ ID NO: 7107 - DNA, 243 bp, Homo sapiens
cactgtctagggctcaggcgtgggtaagagcatacctagcatttgtgtaagagaagtataaacatacaatatggtccagtactgggttcagcataaatgtgaggttaagagataaagctaggctgggcatggtgacttacacttgtaattccaacactgtgggaggctgaagtgggaggattgcttcagtccaggagtttgaggccagcctgggcaatacaccaagatcctgtctctaaaaaa

SEQ ID NO: 7108 - DNA, 1001 bp, Homo sapiens
tctgttcacccctagcttagccttatgacctgggctgtccttccccagaagctgtctggcccctttgagagacaatgtcttcccctagccacaggttcaaccaagtcatccattggcatctatactccaggtcttaaaattgtggattaagggtggcctcacccttaatctcctctatgctatctcctctaatctccccgctctctgggagataggtcctgttgttatcttcattttacagatgaggaaataggttcagagaggggaaatgtcttgcccaaggtcacacagctggtgtgtgggatgggttcccaggctgttggtttcttcagcctctgccatttccagtgcatcacatattcctgtttgatgggggtcaaagcaaagaagattcttcctgactagagtcaggagatcaggccctgattctgtcattccctggccctctgtcctcagcaattgatgacataaatgttgattgtgtctttgcaatgcacgtggtatcaagggctttacatccttgttccccacggcatccaccatgatcttaagacacatcctagtcctgtctccacttcagaaagaaagcaagaggcacgtgaatgttgagccgtgtgacagagtcacaactagaccccgaggtctgctggattccagagaccaagttctgtgcgggtgtgtgatttgaacaggtttataaaaggcacccaacttttaaaaaatccaaaatgtgtccccaaaagataaaacattctcttgaatttccctcctcagaaacaaacctgtcaccaattttattgtgtcattccacgaattttctatgcgtggaatgtacacgtatacgcgtgtgtacatatatacatctatatccgtttcgctatcagcaactacacagttcttcagtgtaccgttttcacttaatttaactgagaggttcttccctgtcacacacagatgtgcgttgtttccttgaacaatgggatagcattccactgtaaaga

SEQ ID NO: 7109 - DNA, 492 bp, Homo sapiens
gcagccgcctactactactaaatttgcggccggtcgacgaaaagcacagcacaaaagtcccacacctgttcctgataaagactctcacaacccaggaacagaaggggaagtccccagctggaaaaggccatctgtgttaggttccagttgctgctgggataggtcaccgccacctcagtgatttaaaacaacacaagtttaggccaggtatggctcacacctgtcatcccaacactttgggatgctgaggcgggtgaatcacttgaggtcaggagttcacgacaagcctggccaacatggcgaaaccccatctctactaaaaatacaaaaattatccaggtgtggtggcacgtgcctgtaatcccagctacttgggaggctgagaccagagaagtgcctgaacccaggaggtggaggttgcagtgacccaagatcgtgccactgcacttccagcctgggtgacagagcaatactccatctcaaaaaaaaaaa

SEQ ID NO: 7110 - DNA, 427 bp, Homo sapiens
cgattggggaatacctggaacaagatgaggagcagccaaccccatcaggctttgaacccactgtcaaccccagctctggtataagcaagatggagctgctggcctgctttagtgtgagtgctctgccagagggaaagctcctagaacagtgagaaggccctccaggggaattcctcgaatactcagaggcagtagtgtggggtagtagttgaagcacacagctctagagtcagacaggcttggattcatatcttggttctgtgaccagccttgaatgagttatttaacttctctgagcaatatttttctcgtctcatttataaactagggatgataatggtatatgagataatacatgctgtgggcttagcacagtgcatgatacacaaacatgcaataaatattaccttgttattcttttgggctc

SEQ ID NO: 7111 - DNA, 370 bp, Homo sapiens
cagacatcttttggggctgcttcttggagaatgagactctgtgggctgagcgactgtgtggggaggcaagtctacaggctgtgccccccagcaaccaggcttgggtccagcatgtgtgccagggccccaccccagtagtgtggggtagtagttgaagcacacagctctagagtcagacaggcttggattcatatcttggttctgtgaccagccttgaatgagttatttaacttctctgagcaatatttttctcgtctcatttataaactagggatgataatggtatatgagataatacatgctgtgggcttagcacagtgcatgatacacaaacatgcaataaatattaccttgttattcttttgggctc

SEQ ID NO: 7112 - DNA, 3693 bp, Homo sapiens
gagcgggcctaggtctgcgccctggagggaggtgtagaaagaggtacatggagaacaagtttgtcaatccgtctgaacttcagttgccttacctgtaaggcagccgtgtctgtgtttttgtctcgcagaattagagcccattgggaacgatgccaccaccgtcagacattgtcaaagtggccattgagtggccaggtgctaacgcccagctccttgaaatcgaccagaaacggcccctggcatccattatcaaggaagtttgtgatgggtaggttgaaatggacctcgttttcaacagtggcagctccgactgaaagagcactcctacaccttgaggtggtcgttgccaaacccagagtattataccctccgttatgcagatggtcctcagctgtacatcaccgaacagactcgcagtgacattaagaatgggacaatcttacaactggctatctccccgtcccgggctgcacgccagctgatggagaggacccagtcatccaacatggagacccggctggatgccatgaaggagctggccaagctctctgccgacgtgactttcgctactgagttcatcaacatggatggcatcattgtgctgacaaggctcgtggaaagtggaaccaagctcttgtcccactacagtgagatgctggcattcaccctgactgccttcctagagctcatggaccatggcattgtctcctgggacatggtttcaatcacctttattaagcagattgcagggtatgtgagccagcccatggtggacgtgtcaatccttcagaggtccctggccatcctggagagcatggtcttgaacagccagagtctgtaccagaagatagccgaggaaatcaccgtgggacagctcatctcacacctccaggtctccaaccaggagattcagacctacgccattgcactgattaatgcactttttctgaaggctcctgaggacaaacgacaggatatggcaaatgcatttgcacagaagcatctccggtctataatcctgaatcatgtgatccgagggaaccgccccatcaaaactgagatggcccatcagctatatgtccttcaagtcctaacctttaaccttctggaagaaaggatgatgaccaagatggaccccaatgaccaggctcaaagggacatcatatttgaactgaggaggattgcatttgacgcagagtctgatcctagcaatgcccctgggagtgggaccgaaaaacgcaaagccatgtacacaaaggactacaaaatgctgggatttaccaaccacatcaatccagccatggactttacccagactcctcctggaatgctggccttggacaacatgctgtacttggctaaagtccaccaggacacctacatccggattgtcttggagaacagtagccgggaagacaaacatgaatgcccctttggccgcagtgccattgagctcaccaaaatgctctgtgaaatcctgcaggttggggaactaccaaatgaaggacgcaatgactaccacccgatgttctttacccatgaccgagcctttgaagagctctttggaatctgcatccagctgttgaacaagacctggaaggagatgagggcaacagcagaggacttcaacaaggttatgcaagtcgtccgagagcaaatcactcgagctttgccctccaaacccaactctttggatcagttcaagagcaaattgcgtagcctgagttactctgagattctacgactgcgccagtctgagaggatgagtcaggatgacttccagtccccgccaattgtggagctgagggagaagatccagcccgagatccttgagctgatcaagcagcagcgcctgaaccggctctgtgagggcagcagcttccgaaagattgggaaccgccgaaggcaagaacggttctggtactgccggttggcactgaaccacaaggtccttcactatggtgacttggatgacaacccacaaggggaggtgacatttgaatccctgcaggagaaaattcctgttgcagacattaaggccattgtcactgggaaagattgtccccacatgaaagagaaaagtgctctgaaacagaacaaggaggtgttggaattggccttctccatcctgtatgaccctgatgagaccttaaacttcatcgcacctaataaatatgagtactgcatctggattgacggcctcagtgcccttctggggaaggacatgtccagtgagctgaccaagagtgacctggacaccctgctgagcatggagatgaagctgcggctcctggacctggagaacatccagattcccgaagccccaccccccatccccaaggagcccagcagctatgactttgtctatcactatggctgagcctggagccagaaacgacggtacccaggagaagggattttgggcccaggagaaacacttacattctggtgccttgtcttttgcttgtacagaatctgtagtgattttggtggccagtaaatgccagccatttctcaaacccacctcggaccacccagagtttcctcttggtccctgtctactaagagtcatgaaggcagggtgctctgcccactccatcaccatgaagcctgggattgggccacgaggaacaaacagcagatgcccttgccttccagtccaagaaactgcttcttgaaatggatttaacaacagccactcaccttttcctcctgagcctgctctctgatcagctggatccccacgtgagcaacagctggcccaggaaaggctgcctgcagaggacaggtgtgttgggcgtgttgagagccttgaagtgactacctgtatcttagatctgagtacaagcctgaggcttttgcttttgtcttttttgatgagggctcactccagcttcatatggtgccaagacgttgctgcttctgaggttggctctaacatctctggtctttagagccaccagatctctctggcccatacagatatcagagcagacggaaatttctccctgcaagcgctcagtctcatcccagcaagtcaaagacctcctggccaagtcctgccctcttaagtctccaggaacgctgcagggaaaacccagctgaggcctgggcctagactgtggtgaggtcactagattctactgctcttcccccacattaataccttttccttcctcagagagaaatctcccctaacctgaattgcagccccctccagtttgctttcctttggccttccagaccccaggaagttggccttcccttcctagtgctatggtttctgccattggccatgatttcagggagctggctgaggccggctgaggccacacctgtgccagtggggcttccctggtgctgcagcacttgtaaaccacacacacagcctctctccctggacatacgttagcacattggcattcagtattggtggcctggcatggtaggtactacccaatgaagagtgtactatatattttcattactataggccatacttatacagacgtgtatatatatttatataagatctacctatcttaggatggaaccttggggaaaaataaaattgaggggaagtaaaaagtatgtaacacttccagttgtgagccaagattgtaaccagagagcagccaggagcttcctgtcagtaaccatgttttcaataaatactctttcatgtacaaactg

SEQ ID NO: 7113 - DNA, 2752 bp, Homo sapiens
gagcgggcctaggtctgcgccctggagggaggtgtagaaagaggtacatggagaacaagtttgtcaatccgtctgaacttcagttgccttacctgtaaggcagccgtgtctgtgtttttgtctcgcagaattagagcccattgggaacgatgccaccaccgtcagacattgtcaaagtggccattgagtggccaggtgctaacgcccagctccttgaaatcgaccagaaacggcccctggcatccattatcaaggaagtttgtgatgggtaggttgaaatggacctcgttttcaacagtggcagctccgactgaaagagcactcctacaccttgaggtggtcgttgccaaacccagagtattataccctccgttatgcagatggtcctcagctgtacatcaccgaacagactcgcagtgacattaagaatgggacaatcttacaactggctatctccccgtcccgggctgcacgccagctgatggagaggacccagtcatccaacatggagacccggctggatgccatgaaggagctggccaagctctctgccgacgtgactttcgctactgagttcatcaacatggatggcatcattgtgctgacaaggctcgtggaaagtggaaccaagctcttgtcccactacagtgagatgctggcattcaccctgactgccttcctagagctcatggaccatggcattgtctcctgggacatggtttcaatcacctttattaagcagattgcagggtatgtgagccagcccatggtggacgtgtcaatccttcagaggtccctggccatcctggagagcatggtcttgaacagccagagtctgtaccagaagatagccgaggaaatcaccgtgggacagctcatctcacacctccaggtctccaaccaggagattcagacctacgccattgcactgattaatgcactttttctgaaggctcctgaggacaaacgacaggatatggcaaatgcatttgcacagaagcatctccggtctataatcctgaatcatgtgatccgagggaaccgccccatcaaaactgagatggcccatcagctatatgtccttcaagtcctaacctttaaccttctggaagaaaggatgatgaccaagatggaccccaatgaccaggctcaaagggacatcatatttgaactgaggaggattgcatttgacgcagagtctgatcctagcaatgcccctgggagtgggaccgaaaaacgcaaagccatgtacacaaaggactacaaaatgctgggatttaccaaccacatcaatccagccatggactttacccagactcctcctggaatgctggccttggacaacatgctgtacttggctaaagtccaccaggacacctacatccggattgtcttggagaacagtagccgggaagacaaacatgaatgcccctttggccgcagtgccattgagctcaccaaaatgctctgtgaaatcctgcaggttggggaactaccaaatgaaggacgcaatgactaccacccgatgttctttacccatgaccgagcctttgaagagctctttggaatctgcatccagctgttgaacaagacctggaaggagatgagggcaacagcagaggacttcaacaaggttatgcaagtcgtccgagagcaaatcactcgagctttgccctccaaacccaactctttggatcagttcaagagcaaattgcgtagcctgagttactctgagattctacgactgcgccagtctgagaggatgagtcaggatgacttccagtccccgccaattgtggagctgagggagaagatccagcccgagatccttgagctgatcaagcagcagcgcctgaaccggctctgtgagggcagcagcttccgaaagattgggaaccgccgaaggcaagaacggttctggtactgccggttggcactgaaccacaaggtccttcactatggtgacttggatgacaacccacaaggggaggtgacatttgaatccctgcaggagaaaattcctgttgcagacattaaggccattgtcactgggaaagattgtccccacatgaaagagaaaagtgctctgaaacagaacaaggaggtgttggaattggccttctccatcctgtatgaccctgatgagaccttaaacttcatcgcacctaataaatatgagtactgcatctggattgacggcctcagtgcccttctggggaaggacatgtccagtgagctgaccaagagtgacctggacaccctgctgagcatggagatgaagctgcggctcctggacctggagaacatccagattcccgaagccccaccccccatccccaaggagcccagcagctatgactttgtctatcactatggctgagcctggagccagaaacgacggtacccaggagaagggattttgggcccaggagaaacacttacattctggtgccttgtcttttgcttgtacagaatctgtagtgattttggtggccagtaaatgccagccatttctcaaacccacctcggaccacccagagtttcctcttggtccctgtctactaagagtcatgaaggcagggtgctctgcccactccatcaccatgaagcctgggattgggccacgaggaacaaacagcagatgcccttgccttccagtccaagaaactgcttcttgaaatggatttaacaacagccagagcttcctgtcagtaaccatgttttcaataaatactctttcatgtacaaactg

SEQ ID NO: 7114 - DNA, 1942 bp, Homo sapiens
agtcgggtaccgagtgggtcagtgtcttccagtccccgccaattgtggagctgagggagaagatccagcccgagatccttgagctgatcaagcagcagcgcctgaaccggctctgtgagggcagcagcttccgaaagattgggaaccgccgaaggcaagaacggttctggtactgccggttggcactgaaccacaaggtccttcactatggtgacttggatgacaacccacaaggggaggtgacatttgaatccctgcaggagaaaattcctgttgcagacattaaggccattgtcactgggaaagattgtccccacatgaaagagaaaagtgctctgaaacagaacaaggaggtgttggaattggccttctccatcctgtatgaccctgatgagaccttaaacttcatcgcacctaataaatatgagtactgcatctggattgacggcctcagtgcccttctggggaaggacatgtccagtgagctgaccaagagtgacctggacaccctgctgagcatggagatgaagctgcggctcctggacctggagaacatccagattcccgaagccccaccccccatccccaaggagcccagcagctatgactttgtctatcactatggctgagcctggagccagaaacgacggtacccaggagaagggattttgggcccaggagaaacacttacattctggtgccttgtcttttgcttgtacagaatctgtagtgattttggtggccagtaaatgccagccatttctcaaacccacctcggaccacccagagtttcctcttggtccctgtctactaagagtcatgaaggcagggtgctctgcccactccatcaccatgaagcctgggattgggccacgaggaacaaacagcagatgcccttgccttccagtccaagaaactgcttcttgaaatggatttaacaacagccactcaccttttcctcctgagcctgctctctgatcagctggatccccacgtgagcaacagctggcccaggaaaggctgcctgcagaggacaggtgtgttgggcgtgttgagagccttgaagtgactacctgtatcttagatctgagtacaagcctgaggcttttgcttttgtcttttttgatgagggctcactccagcttcatatggtgccaagacgttgctgcttctgaggttggctctaacatctctggtctttagagccaccagatctctctggcccatacagatatcagagcagacggaaatttctccctgcaagcgctcagtctcatcccagcaagtcaaagacctcctggccaagtcctgccctcttaagtctccaggaacgctgcagggaaaacccagctgaggcctgggcctagactgtggtgaggtcactagattctactgctcttcccccacattaataccttttccttcctcagagagaaatctcccctaacctgaattgcagccccctccagtttgctttcctttggccttccagaccccaggaagttggccttcccttcctagtgctatggtttctgccattggccatgatttcagggagctggctgaggccggctgaggccacacctgtgccagtggggcttccctggtgctgcagcacttgtaaaccacacacacagcctctctccctggacatacgttagcacattggcattcagtattggtggcctggcatggtaggtactacccaatgaagagtgtactatatattttcattactataggccatacttatacagacgtgtatatatatttatataagatctacctatcttaggatggaaccttggggaaaaataaaattgaggggaagtaaaaagtatgtaacacttccagttgtgagccaagattgtaaccagagagcagccaggagcttcctgtcagtaaccatgttttcaataaatactctttcatgtacaaactg

SEQ ID NO: 7115 - DNA, 1299 bp, Homo sapiens
gagcgggcctaggtctgcgccctggagggaggtgtagaaagaggtacatggagaacaagtttgtcaatccgtctgaacttcagttgccttacctgtaaggcagccgtgtctgtgtttttgtctcgcagaattagagcccattgggaacgatgccaccaccgtcagacattgtcaaagtggccattgagtggccaggtgctaacgcccagctccttgaaatcgaccagaaacggcccctggcatccattatcaaggaagtttgtgatgggtggtcgttgccaaacccagagtattataccctccgttatgcagatggtcctcagctgtacatcaccgaacagactcgcagtgacattaagaatgggacaatcttacaactggctatctccccgtcccgggctgcacgccagctgatggagaggacccagtcatccaacatggagacccggctggatgccatgaaggagctggccaagctctctgccgacgtgactttcgctactgagttcatcaacatggatggcatcattgtgctgacaaggctcgtggaaagtggaaccaagctcttgtcccactacagtgagatgctggcattcaccctgactgccttcctagagctcatggaccatggcattgtctcctgggacatggtttcaatcacctttattaagcagattgcagggtatgtgagccagcccatggtggacgtgtcaatccttcagaggtccctggccatcctggagagcatggtcttgaacagccagagtctgtaccagaagatagccgaggaaatcaccgtgggacagctcatctcacacctccaggtctccaaccaggagattcagacctacgccattgcactgattaatgcactttttctgaaggctcctgaggacaaacgacaggatatggcaaatgcatttgcacagaagcatctccggtctataatcctgaatgtgagttcctggaacatgctgtattttattactattaacaacaattattactgttattgttaatatattattattgaaattattaatgagtgaggaggacacacagaggaaccttatcaataggtaaatacctcttgaactgaatagctttttcccgcgatcttctgtgagcagagttgcctctaggcagccatctcaccagcaattgcagtgcgtccagggagggaccaaggccagctctactgtttgttgccctgcaactccagaatttttatccagagggaatatgttaaaataggcacaaagggggaaaataactcatccaactgacactgattaaaaa

SEQ ID NO: 7116 - DNA, 274 bp, Homo sapiens
atgtacacaaaggactacaaaatgctgggatttaccgtaagtacctcagagcatagacggtggtaggccctctcccctgatgggaagtcaatggtcccacccagacagagctctgacaaccagccccatggtggccctggaatagatgacagttaggaagctggtggagctttaatgcttgctttgctttgttgatggtgagtctgtgagtttatgtgcaaagtttggccctgtgaaacgaatccatctgtaggggggttgcggtcagctagag

SEQ ID NO: 7117 - DNA, 3625 bp, Homo sapiens
gagcgggcctaggtctgcgccctggagggaggtgtagaaagaggtacatggagaacaagtttgtcaatccgtctgaacttcagttgccttacctgtaaggcagccgtgtctgtgtttttgtctcgcagaattagagcccattgggaacgatgccaccaccgtcagacattgtcaaagtggccattgagtggccaggtgctaacgcccagctccttgaaatcgaccagaaacggcccctggcatccattatcaaggaagtttgtgatgggtggtcgttgccaaacccagagtattataccctccgttatgcagatggtcctcagctgtacatcaccgaacagactcgcagtgacattaagaatgggacaatcttacaactggctatctccccgtcccgggctgcacgccagctgatggagaggacccagtcatccaacatggagacccggctggatgccatgaaggagctggccaagctctctgccgacgtgactttcgctactgagttcatcaacatggatggcatcattgtgctgacaaggctcgtggaaagtggaaccaagctcttgtcccactacagtgagatgctggcattcaccctgactgccttcctagagctcatggaccatggcattgtctcctgggacatggtttcaatcacctttattaagcagattgcagggtatgtgagccagcccatggtggacgtgtcaatccttcagaggtccctggccatcctggagagcatggtcttgaacagccagagtctgtaccagaagatagccgaggaaatcaccgtgggacagctcatctcacacctccaggtctccaaccaggagattcagacctacgccattgcactgattaatgcactttttctgaaggctcctgaggacaaacgacaggatatggcaaatgcatttgcacagaagcatctccggtctataatcctgaatcatgtgatccgagggaaccgccccatcaaaactgagatggcccatcagctatatgtccttcaagtcctaacctttaaccttctggaagaaaggatgatgaccaagatggaccccaatgaccaggctcaaagggacatcatatttgaactgaggaggattgcatttgacgcagagtctgatcctagcaatgcccctgggagtgggaccgaaaaacgcaaagccatgtacacaaaggactacaaaatgctgggatttaccaaccacatcaatccagccatggactttacccagactcctcctggaatgctggccttggacaacatgctgtacttggctaaagtccaccaggacacctacatccggattgtcttggagaacagtagccgggaagacaaacatgaatgcccctttggccgcagtgccattgagctcaccaaaatgctctgtgaaatcctgcaggttggggaactaccaaatgaaggacgcaatgactaccacccgatgttctttacccatgaccgagcctttgaagagctctttggaatctgcatccagctgttgaacaagacctggaaggagatgagggcaacagcagaggacttcaacaaggttatgcaagtcgtccgagagcaaatcactcgagctttgccctccaaacccaactctttggatcagttcaagagcaaattgcgtagcctgagttactctgagattctacgactgcgccagtctgagaggatgagtcaggatgacttccagtccccgccaattgtggagctgagggagaagatccagcccgagatccttgagctgatcaagcagcagcgcctgaaccggctctgtgagggcagcagcttccgaaagattgggaaccgccgaaggcaagaacggttctggtactgccggttggcactgaaccacaaggtccttcactatggtgacttggatgacaacccacaaggggaggtgacatttgaatccctgcaggagaaaattcctgttgcagacattaaggccattgtcactgggaaagattgtccccacatgaaagagaaaagtgctctgaaacagaacaaggaggtgttggaattggccttctccatcctgtatgaccctgatgagaccttaaacttcatcgcacctaataaatatgagtactgcatctggattgacggcctcagtgcccttctggggaaggacatgtccagtgagctgaccaagagtgacctggacaccctgctgagcatggagatgaagctgcggctcctggacctggagaacatccagattcccgaagccccaccccccatccccaaggagcccagcagctatgactttgtctatcactatggctgagcctggagccagaaacgacggtacccaggagaagggattttgggcccaggagaaacacttacattctggtgccttgtcttttgcttgtacagaatctgtagtgattttggtggccagtaaatgccagccatttctcaaacccacctcggaccacccagagtttcctcttggtccctgtctactaagagtcatgaaggcagggtgctctgcccactccatcaccatgaagcctgggattgggccacgaggaacaaacagcagatgcccttgccttccagtccaagaaactgcttcttgaaatggatttaacaacagccactcaccttttcctcctgagcctgctctctgatcagctggatccccacgtgagcaacagctggcccaggaaaggctgcctgcagaggacaggtgtgttgggcgtgttgagagccttgaagtgactacctgtatcttagatctgagtacaagcctgaggcttttgcttttgtcttttttgatgagggctcactccagcttcatatggtgccaagacgttgctgcttctgaggttggctctaacatctctggtctttagagccaccagatctctctggcccatacagatatcagagcagacggaaatttctccctgcaagcgctcagtctcatcccagcaagtcaaagacctcctggccaagtcctgccctcttaagtctccaggaacgctgcagggaaaacccagctgaggcctgggcctagactgtggtgaggtcactagattctactgctcttcccccacattaataccttttccttcctcagagagaaatctcccctaacctgaattgcagccccctccagtttgctttcctttggccttccagaccccaggaagttggccttcccttcctagtgctatggtttctgccattggccatgatttcagggagctggctgaggccggctgaggccacacctgtgccagtggggcttccctggtgctgcagcacttgtaaaccacacacacagcctctctccctggacatacgttagcacattggcattcagtattggtggcctggcatggtaggtactacccaatgaagagtgtactatatattttcattactataggccatacttatacagacgtgtatatatatttatataagatctacctatcttaggatggaaccttggggaaaaataaaattgaggggaagtaaaaagtatgtaacacttccagttgtgagccaagattgtaaccagagagcagccaggagcttcctgtcagtaaccatgttttcaataaatactctttcatgtacaaactg

SEQ ID NO: 7118 - DNA, 2648 bp, Homo sapiens
  misc_feature (2611)..(2612): n is a, c, g, or t
gagcgggcctaggtctgcgccctggagggaggtgtagaaagaggtacatggagaacaagtttgtcaatccgtctgaacttcagttgccttacctgtaaggcagccgtgtctgtgtttttgtctcgcagaattagagcccattgggaacgatgccaccaccgtcagacattgtcaaagtggccattgagtggccaggtgctaacgcccagctccttgaaatcgaccagaaacggcccctggcatccattatcaaggaagtttgtgatgggtaggttgaaatggacctcgttttcaacagtggcagctccgactgaaagagcactcctacaccttgaggtggtcgttgccaaacccagagtattataccctccgttatgcagatggtcctcagctgtacatcaccgaacagactcgcagtgacattaagaatgggacaatcttacaactggctatctccccgtcccgggctgcacgccagctgatggagaggacccagtcatccaacatggagacccggctggatgccatgaaggagctggccaagctctctgccgacgtgactttcgctactgagttcatcaacatggatggcatcattgtgctgacaaggctcgtggaaagtggaaccaagctcttgtcccactacagtgagatgctggcattcaccctgactgccttcctagagctcatggaccatggcattgtctcctgggacatggtttcaatcacctttattaagcagattgcagggtatgtgagccagcccatggtggacgtgtcaatccttcagaggtccctggccatcctggagagcatggtcttgaacagccagagtctgtaccagaagatagccgaggaaatcaccgtgggacagctcatctcacacctccaggtctccaaccaggagattcagacctacgccattgcactgattaatgcactttttctgaaggctcctgaggacaaacgacaggatatggcaaatgcatttgcacagaagcatctccggtctataatcctgaatcatgtgatccgagggaaccgccccatcaaaactgagatggcccatcagctatatgtccttcaagtcctaacctttaaccttctggaagaaaggatgatgaccaagatggaccccaatgaccaggctcaaagggacatcatatttgaactgaggaggattgcatttgacgcagagtctgatcctagcaatgcccctgggagtgggaccgaaaaacgcaaagccatgtacacaaaggactacaaaatgctgggatttaccaaccacatcaatccagccatggactttacccagactcctcctggaatgctggccttggacaacatgctgtacttggctaaagtccaccaggacacctacatccggattgtcttggagaacagtagccgggaagacaaacatgaatgcccctttggccgcagtgccattgagctcaccaaaatgctctgtgaaatcctgcaggttggggaactaccaaatgaaggacgcaatgactaccacccgatgttctttacccatgaccgagcctttgaagagctctttggaatctgcatccagctgttgaacaagacctggaaggagatgagggcaacagcagaggacttcaacaaggttatgcaagtcgtccgagagcaaatcactcgagctttgccctccaaacccaactctttggatcagttcaagagcaaattgcgtagcctgagttactctgagattctacgactgcgccagtctgagaggatgagtcaggatgacttccagtccccgccaattgtggagctgagggagaagatccagcccgagatccttgagctgatcaagcagcagcgcctgaaccggctctgtgagggcagcagcttccgaaagattgggaaccgccgaaggcaagaacggttctggtactgccggttggcactgaaccacaaggtccttcactatggtgacttggatgacaacccacaaggggaggtgacatttgaatccctgcaggagaaaattcctgttgcagacattaaggccattgtcactgggaaagattgtccccacatgaaagagaaaagtgctctgaaacagaacaaggaggtgttggaattggccttctccatcctgtatgaccctgatgagaccttaaacttcatcgcacctaataaatatgagtactgcatctggattgacggcctcagtgcccttctggggaaggacatgtccagtgagctgaccaagagtgacctggacaccctgctgagcatggagatgaagctgcggctcctggacctggagaacatccagattcccgaagccccaccccccatccccaaggagcccagcagctatgactttgtctatcactatggctgagcctggagccagaaacgacggtacccaggagaagggattttgggcccaggagaaacacttacattctggtgccttgtcttttgcttgtacagaatctgtagtgattttggtggccagtaaatgccagccatttctcaaacccacctcggaccacccagagtttcctcttggtccctgtctactaagagtcatggcccccagccgtatctttgtcttaaaaagtaatctctnngcttggtaggccaagaatttaaaatataaaaaattt

SEQ ID NO: 7119 - DNA, 1723 bp, Homo sapiens
gagcgggcctaggtctgcgccctggagggaggtgtagaaagaggtacatggagaacaagtttgtcaatccgtctgaacttcagttgccttacctgtaaggcagccgtgtctgtgtttttgtctcgcagaattagagcccattgggaacgatgccaccaccgtcagacattgtcaaagtggccattgagtggccaggtgctaacgcccagctccttgaaatcgaccagaaacggcccctggcatccattatcaaggaagtttgtgatgggtggtcgttgccaaacccagagtattataccctccgttatgcagatggtcctcagctgtacatcaccgaacagactcgcagtgacattaagaatgggacaatcttacaactggctatctccccgtcccgggctgcacgccagctgatggagaggacccagtcatccaacatggagacccggctggatgccatgaaggagctggccaagctctctgccgacgtgactttcgctactgagttcatcaacatggatggcatcattgtgctgacaaggctcgtggaaagtggaaccaagctcttgtcccactacagtgagatgctggcattcaccctgactgccttcctagagctcatggaccatggcattgtctcctgggacatggtttcaatcacctttattaagcagattgcagggtatgtgagccagcccatggtggacgtgtcaatccttcagaggtccctggccatcctggagagcatggtcttgaacagccagagtctgtaccagaagatagccgaggaaatcaccgtgggacagctcatctcacacctccaggtctccaaccaggagattcagacctacgccattgcactgattaatgcactttttctgaaggctcctgaggacaaacgacaggatatggcaaatgcatttgcacagaagcatctccggtctataatcctgaatcatgtgatccgagggaaccgccccatcaaaactgagatggcccatcagctatatgtccttcaagtcctaacctttaaccttctggaagaaaggatgatgaccaagatggaccccaatgaccaggctcaaagggacatcatatttgaactgaggaggattgcatttgacgcagagtctgatcctagcaatgcccctgggagtgggaccgaaaaacgcaaagccatgtacacaaaggactacaaaatgctgggatttaccaaccacatcaatccagccatggactttacccagactcctcctggaatgctggccttggacaacatgctgtacttggctaaagtccaccaggacacctacatccggattgtcttggagaacagtagccgggaagacaaacatgaatgcccctttggccgcagtgccattgagctcaccaaaatgctctgtgaaatcctgcaggttggggaactaccaaatgaaggacgcaatgactaccacccgatgttctttacccatgaccgagcctttgaagagctctttggaatctgcatccagctgttgaacaagacctggaaggagatgagggcaacagcagaggacttcaacaaggtcagtgtctccgggctgctctgaggcccacgggaggagaccatcacacgacagcctttgacagctggctggcacctggagaatccctgagctggaaaagcagcttggtctgcagaactgagtcacaagactgaggcactggggagcctcagccccat

SEQ ID NO: 7120 - DNA, 361 bp, Homo sapiens
cctgggatagatcatttcttaacatctcccacacctctgtgtaacaaaattactattgatgatagccatgaaatgaaactaataatattagcttgtgaacatttaatcaaattttttatgtataatcatgccagtaaaaacttaaaaaataaatgtcaatccattgccttaagcatttattaacccttccattactaactcttgctcattcacgcacattttacttgaaaaaagacaactagtctgggcactgtggctcacaccagtaatcccagttctttgggaggccaaggaaggatgatcacttgagtccaggagtttgagaccagcctaggcaatagagtgagacttcatttctacc

SEQ ID NO: 7121 - DNA, 423 bp, Homo sapiens
tttttttttttaattctgggctgcccccttcttctttctgcaagggtctgaggcctattgttggatccaggcacagccttctaaggtaaactattttattttgcttttgatctcacatcttctgatttcatgacttgtttttcagttttcattttcaagttttcccttctgtgtccttctatttttttacaaacgggctgggatcctgctccatataaaaagggaggaagaaaaggatcctccttaatcacctgaggctggcctttgctttaccaccaaagtctttaaattacttggtggcatggtgatatgtggagaaacaagcctatagttggagttcctgggtttaaaacctggctatgatttgaatgtgtcctcttcaaaagtgcagcactgccaatatgatagtattgaggtcgacgg

SEQ ID NO: 7122 - DNA, 1077 bp, Homo sapiens
tgatcctagtttttagtgtcaagttatagtaacctcataaaatgaattggagatgttaacatttattcaagtacataaaactggagttacctagttcttaaattttggggcgaactgtcctggtaaaatatccagacctggtgctttcttttttaaccagtggtttaaattctttaataatctattcagggtttatatttattcttagctcacattaacaatttatatttttctatgaatttttctatttcaccttagttttcaaatttattggcacgaagttgttcttaatagtcttttattttaatttccacctaatttaattatgtcttttttcattactaatacttctattcctgatctaattacgtctttttttcattactaatacttctattcctaatatttctcttcatctttttttccctctttatcacaaattactgcatacctatcattaacaagctgttaagccaaaataagcaagaaaccattagtctggggttgtttctgtactaggaacccttacataaataagcaaaccaaaacttaacttagaggcattccttgtgactgattaattttgaatggagcttcagccaatcgcagataaccaactagcaaattcgttatattaactagggactttctattgaaccatatccaaataaggcaaatgcctagctataaccaatcaagtaatttctttactttgcctccacattcagcctatgaaagccccctgcccatactgctggaacggagctctcagaatctcttgtggatttgagtgttgcctgattcatgaattgttatttgctcaaataaactgttatatttattttgtctaaagtttttcttttaacaaagtcaagtgggagaaggcaaggatcatcagtagccataggactaacaagagagagagatattcaagggacactttagagatgaaaatcagagacaggcttggttgtcaatgaaacgtgttcagagaagactgatgacaatgacaattttttttaactttgttgactacatgagtggtagcttcctaaggtatagagagggtaggtaggc

SEQ ID NO: 7123 - DNA, 3848 bp, Homo sapiens
tatatcatgtaagctagtcacacctatttgaattcacttttctttgtttcttgatttcttatggctattattgcaacaatcaaacaaattttgaataccttttgtgagctagcactgtggaaatatgagggaagtttattgtgttcttactttaaatagtttgcagttttattgtgtatacaaatgtatgcatgtgaaatatacagattttaaaaaagcagatcattaaagattaggtcataaggtgtagtctgtacatggaggaagagctaagttgattcagaataacatggttagatttcgaagctagcctggatttgaatcttggatccaccactgactagctatgtaagcttagtcaagcaactcaacggaggaggcgaggagcgccgggtaccgggccgggggagccgcgggctctcggggaagagacggatgatgaacaagctttacatcgggaacctgagccccgccgtcaccgccgacgacctccggcagctctttggggacaggaagctgcccctggcgggacaggtcctgctgaagtccggctacgccttcgtggactaccccgaccagaactgggccatccgcgccatcgagaccctctcgggtaaagtggaattgcatgggaaaatcatggaagttgattactcagtctctaaaaagctaaggagcaggaaaattcagattcgaaacatccctcctcacctgcagtgggaggtgttggatggacttttggctcaatatgggacagtggagaatgtggaacaagtcaacacagacacagaaaccgccgttgtcaacgtcacatatgcaacaagagaagaagcaaaaatagccatggagaagctaagcgggcatcagtttgagaactactccttcaagatttcctacatcccggatgaagaggtgagctccccttcgccccctcagcgagcccagcgtggggaccactcttcccgggagcaaggccacgcccctgggggcacttctcaggccagacagattgatttcccgctgcggatcctggtccccacccagtttgttggtgccatcatcggaaaggagggcttgaccataaagaacatcactaagcagacccagtcccgggtagatatccatagaaaagagaactctggagctgcagagaagcctgtcaccatccatgccaccccagaggggacttctgaagcatgccgcatgattcttgaaatcatgcagaaagaggcagatgagaccaaactagccgaagagattcctctgaaaatcttggcacacaatggcttggttggaagactgattggaaaagaaggcagaaatttgaagaaaattgaacatgaaacagggaccaagataacaatctcatctttgcaggatttgagcatatacaacccggaaagaaccatcactgtgaagggcacagttgaggcctgtgccagtgctgagatagagattatgaagaagctgcgtgaggcctttgaaaatgatatgctggctgttaacacccactccggatacttctccagcctgtacccccatcaccagtttggcccgttcccgcatcatcactcttatccagagcaggagattgtgaatctcttcatcccaacccaggctgtgggcgccatcatcgggaagaagggggcacacatcaaacagctggcgagattcgccggagcctctatcaagattgcccctgcggaaggcccagacgtcagcgaaaggatggtcatcatcaccgggccaccggaagcccagttcaaggcccagggacggatctttgggaaactgaaagaggaaaacttctttaaccccaaagaagaagtgaagctggaagcgcatatcagagtgccctcttccacagctggccgggtgattggcaaaggtggcaagaccgtgaacgaactgcagaacttaaccagtgcagaagtcatcgtgcctcgtgaccaaacgccagatgaaaatgaggaagtgatcgtcagaattatcgggcacttctttgctagccagactgcacagcgcaagatcagggaaattgtacaacaggtgaagcagcaggagcagaaataccctcagggagtcgcctcacagcgcagcaagtgaggctcccacaggcaccagcaaaacaacggatgaatgtagcccttccaacacctgacagaatgagaccaaacgcagccagccagatcgggagcaaaccaaagaccatctgaggaatgagaagtctgcggaggcggccagggactctgccgaggccctgagaaccccaggggccgaggaggggcggggaaggtcagccaggtttgccagaaccaccgagccccgcctcccgccccccagggcttctgcaggcttcagccatccacttcaccatccactcggatctctcctgaactcccacgacgctatcccttttagttgaactaacataggtgaacgtgttcaaagccaagcaaaatgcacaccctttttctgtggcaaatcgtctctgtacatgtgtgtacatattagaaagggaagatgttaagatatgtggcctgtgggttacacagggtgcctgcagcggtaatatattttagaaataatatatcaaataactcaactaactccaatttttaatcaattattaatttttttttctttttaaagagaaagcaggcttttctagactttaaagaataaagtctttgggaggtctcacggtgtagagaggagctttgaggccacccgcacaaaattcacccagagggaaatctcgtcggaaggacactcacggcagttctggatcacctgtgtatgtcaacagaagggataccgtctccttgaagaggaaactctgtcactcctcatgcctgtctagctcatacacccatttctctttgcttcacaggttttaaactggttttttgcatactgctatataattctctgtctctctctgtttatctctcccctccctcccctccccttcttctccatctccattcttttgaatttcctcatccctccatctcaatcccgtatctacgcacccccccccccccaggcaaagcagtgctctgagtatcacatcacacaaaaggaacaaaagcgaaacacacaaaccagcctcaacttacacttggttactcaaaagaacaagagtcaatggtacttgtcctagcgttttggaagaggaaaacaggaacccaccaaaccaaccaatcaaccaaacaaagaaaaaattccacaatgaaagaatgtattttgtctttttgcattttggtgtataagccatcaatattcagcaaaatgattcctttctttaaaaaaaaaaaatgtggaggaaagtagaaatttaccaaggttgttggcccagggcgttaaattcacagatttttttaacgagaaaaacacacagaagaagctacctcaggtgtttttacctcagcaccttgctcttgtgtttcccttagagattttgtaaagctgatagttggagcatttttttatttttttaataaaaatgagttggaaaaaaaataagatatcaactgccagcctggagaaggtgacagtccaagtgtgcaacagctgttctgaattgtcttccgctagccaagaacctatatggccttcttttggacaaaccttgaaaatgtttatttaaaaaaaaaaaagatgacaaagaaaaacagagagagagaatattggagatgtcctgaattttaatagggtacgcgccattagggctttttgcgctaaaggatgaacatgtactggtttatgtggacaagccattataccaccagactgcaatgccagtttcctctactgcaaacagtgttctgtgacaaaaaaaaaaa

SEQ ID NO: 7124 - DNA, 3996 bp, Homo sapiens
tatatcatgtaagctagtcacacctatttgaattcacttttctttgtttcttgatttcttatggctattattgcaacaatcaaacaaattttgaataccttttgtgagctagcactgtggaaatatgagggaagtttattgtgttcttactttaaatagtttgcagttttattgtgtatacaaatgtatgcatgtgaaatatacagattttaaaaaagcagatcattaaagattaggtcataaggtgtagtctgtacatggaggaagagctaagttgattcagaataacatggttagatttcgaagctagcctggatttgaatcttggatccaccactgactagctatgtaagcttagtcaagcaactcaacggaggaggcgaggagcgccgggtaccgggccgggggagccgcgggctctcggggaagagacggatgatgaacaagctttacatcgggaacctgagccccgccgtcaccgccgacgacctccggcagctctttggggacaggaagctgcccctggcgggacaggtcctgctgaagtccggctacgccttcgtggactaccccgaccagaactgggccatccgcgccatcgagaccctctcgggtaaagtggaattgcatgggaaaatcatggaagttgattactcagtctctaaaaagctaaggagcaggaaaattcagattcgaaacatccctcctcacctgcagtgggaggtgttggatggacttttggctcaatatgggacagtggagaatgtggaacaagtttttgccttttccctagtcaacacagacacagaaaccgccgttgtcaacgtcacatatgcaacaagagaagaagcaaaaatagccatggagaagctaagcgggcatcagtttgagaactactccttcaagatttcctacatcccggatgaagaggtgagctccccttcgccccctcagcgagcccagcgtggggaccactcttcccgggagcaaggccacgcccctgggggcacttctcaggccagacagattgatttcccgctgcggatcctggtccccacccagtttgttggtgccatcatcggaaaggagggcttgaccataaagaacatcactaagcagacccagtcccgggtagatatccatagaaaagagaactctggagctgcagagaagcctgtcaccatccatgccaccccagaggggacttctgaagcatgccgcatgattcttgaaatcatgcagaaagaggcagatgagaccaaactagccgaagagattcctctgaaaatcttggcacacaatggcttggttggaagactgattggaaaagaaggcagaaatttgaagaaaattgaacatgaaacagggaccaagataacaatctcatctttgcaggatttgagcatatacaacccggaaagaaccatcactgtgaagggcacagttgaggcctgtgccagtgctgagatagagattatgaagaagctgcgtgaggcctttgaaaatgatatgctggctgttaaccaacaagccaatctgatcccaggggttgaacctcagcgcacttggcatcttttcaacaggactgtccgtgctatctccaccagcagggccccgcggagctccccccgctgccccctaccaccccttcactacccactccggatacttctccagcctgtacccccatcaccagtttggcccgttcccgcatcatcactcttatccagagcaggagattgtgaatctcttcatcccaacccaggctgtgggcgccatcatcgggaagaagggggcacacatcaaacagctggcgagattcgccggagcctctatcaagattgcccctgcggaaggcccagacgtcagcgaaaggatggtcatcatcaccgggccaccggaagcccagttcaaggcccagggacggatctttgggaaactgaaagaggaaaacttctttaaccccaaagaagaagtgaagctggaagcgcatatcagagtgccctcttccacagctggccgggtgattggcaaaggtggcaagaccgtgaacgaactgcagaacttaaccagtgcagaagtcatcgtgcctcgtgaccaaacgccagatgaaaatgaggaagtgatcgtcagaattatcgggcacttctttgctagccagactgcacagcgcaagatcagggaaattgtacaacaggtgaagcagcaggagcagaaataccctcagggagtcgcctcacagcgcagcaagtgaggctcccacaggcaccagcaaaacaacggatgaatgtagcccttccaacacctgacagaatgagaccaaacgcagccagccagatcgggagcaaaccaaagaccatctgaggaatgagaagtctgcggaggcggccagggactctgccgaggccctgagaaccccaggggccgaggaggggcggggaaggtcagccaggtttgccagaaccaccgagccccgcctcccgccccccagggcttctgcaggcttcagccatccacttcaccatccactcggatctctcctgaactcccacgacgctatcccttttagttgaactaacataggtgaacgtgttcaaagccaagcaaaatgcacaccctttttctgtggcaaatcgtctctgtacatgtgtgtacatattagaaagggaagatgttaagatatgtggcctgtgggttacacagggtgcctgcagcggtaatatattttagaaataatatatcaaataactcaactaactccaatttttaatcaattattaatttttttttctttttaaagagaaagcaggcttttctagactttaaagaataaagtctttgggaggtctcacggtgtagagaggagctttgaggccacccgcacaaaattcacccagagggaaatctcgtcggaaggacactcacggcagttctggatcacctgtgtatgtcaacagaagggataccgtctccttgaagaggaaactctgtcactcctcatgcctgtctagctcatacacccatttctctttgcttcacaggttttaaactggttttttgcatactgctatataattctctgtctctctctgtttatctctcccctccctcccctccccttcttctccatctccattcttttgaatttcctcatccctccatctcaatcccgtatctacgcacccccccccccccaggcaaagcagtgctctgagtatcacatcacacaaaaggaacaaaagcgaaacacacaaaccagcctcaacttacacttggttactcaaaagaacaagagtcaatggtacttgtcctagcgttttggaagaggaaaacaggaacccaccaaaccaaccaatcaaccaaacaaagaaaaaattccacaatgaaagaatgtattttgtctttttgcattttggtgtataagccatcaatattcagcaaaatgattcctttctttaaaaaaaaaaaatgtggaggaaagtagaaatttaccaaggttgttggcccagggcgttaaattcacagatttttttaacgagaaaaacacacagaagaagctacctcaggtgtttttacctcagcaccttgctcttgtgtttcccttagagattttgtaaagctgatagttggagcatttttttatttttttaataaaaatgagttggaaaaaaaataagatatcaactgccagcctggagaaggtgacagtccaagtgtgcaacagctgttctgaattgtcttccgctagccaagaacctatatggccttcttttggacaaaccttgaaaatgtttatttaaaaaaaaaaaagatgacaaagaaaaacagagagagagaatattggagatgtcctgaattttaatagggtacgcgccattagggctttttgcgctaaaggatgaacatgtactggtttatgtggacaagccattataccaccagactgcaatgccagtttcctctactgcaaacagtgttctgtgacaaaaaaaaaaa

SEQ ID NO: 7125 - DNA, 3087 bp, Homo sapiens
ggaggataaggctagtagagccgtgttatcggacgagcccctcagcgagcccagcgtggggaccactcttcccgggagcaaggccacgcccctgggggcacttctcaggccagacagattgatttcccgctgcggatcctggtccccacccagtttgttggtgccatcatcggaaaggagggcttgaccataaagaacatcactaagcagacccagtcccgggtagatatccatagaaaagagaactctggagctgcagagaagcctgtcaccatccatgccaccccagaggggacttctgaagcatgccgcatgattcttgaaatcatgcagaaagaggcagatgagaccaaactagccgaagagattcctctgaaaatcttggcacacaatggcttggttggaagactgattggaaaagaaggcagaaatttgaagaaaattgaacatgaaacagggaccaagataacaatctcatctttgcaggatttgagcatatacaacccggaaagaaccatcactgtgaagggcacagttgaggcctgtgccagtgctgagatagagattatgaagaagctgcgtgaggcctttgaaaatgatatgctggctgttaaccaacaagccaatctgatcccaggggttgaacctcagcgcacttggcatcttttcaacaggactgtccgtgctatctccaccagcagggccccgcggagctccccccgctgccccctaccaccccttcactacccactccggatacttctccagcctgtacccccatcaccagtttggcccgttcccgcatcatcactcttatccagagcaggagattgtgaatctcttcatcccaacccaggctgtgggcgccatcatcgggaagaagggggcacacatcaaacagctggcgagattcgccggagcctctatcaagattgcccctgcggaaggcccagacgtcagcgaaaggatggtcatcatcaccgggccaccggaagcccagttcaaggcccagggacggatctttgggaaactgaaagaggaaaacttctttaaccccaaagaagaagtgaagctggaagcgcatatcagagtgccctcttccacagctggccgggtgattggcaaaggtggcaagaccgtgaacgaactgcagaacttaaccagtgcagaagtcatcgtgcctcgtgaccaaacgccagatgaaaatgaggaagtgatcgtcagaattatcgggcacttctttgctagccagactgcacagcgcaagatcagggaaattgtacaacaggtgaagcagcaggagcagaaataccctcagggagtcgcctcacagcgcagcaagtgaggctcccacaggcaccagcaaaacaacggatgaatgtagcccttccaacacctgacagaatgagaccaaacgcagccagccagatcgggagcaaaccaaagaccatctgaggaatgagaagtctgcggaggcggccagggactctgccgaggccctgagaaccccaggggccgaggaggggcggggaaggtcagccaggtttgccagaaccaccgagccccgcctcccgccccccagggcttctgcaggcttcagccatccacttcaccatccactcggatctctcctgaactcccacgacgctatcccttttagttgaactaacataggtgaacgtgttcaaagccaagcaaaatgcacaccctttttctgtggcaaatcgtctctgtacatgtgtgtacatattagaaagggaagatgttaagatatgtggcctgtgggttacacagggtgcctgcagcggtaatatattttagaaataatatatcaaataactcaactaactccaatttttaatcaattattaatttttttttctttttaaagagaaagcaggcttttctagactttaaagaataaagtctttgggaggtctcacggtgtagagaggagctttgaggccacccgcacaaaattcacccagagggaaatctcgtcggaaggacactcacggcagttctggatcacctgtgtatgtcaacagaagggataccgtctccttgaagaggaaactctgtcactcctcatgcctgtctagctcatacacccatttctctttgcttcacaggttttaaactggttttttgcatactgctatataattctctgtctctctctgtttatctctcccctccctcccctccccttcttctccatctccattcttttgaatttcctcatccctccatctcaatcccgtatctacgcacccccccccccccaggcaaagcagtgctctgagtatcacatcacacaaaaggaacaaaagcgaaacacacaaaccagcctcaacttacacttggttactcaaaagaacaagagtcaatggtacttgtcctagcgttttggaagaggaaaacaggaacccaccaaaccaaccaatcaaccaaacaaagaaaaaattccacaatgaaagaatgtattttgtctttttgcattttggtgtataagccatcaatattcagcaaaatgattcctttctttaaaaaaaaaaaatgtggaggaaagtagaaatttaccaaggttgttggcccagggcgttaaattcacagatttttttaacgagaaaaacacacagaagaagctacctcaggtgtttttacctcagcaccttgctcttgtgtttcccttagagattttgtaaagctgatagttggagcatttttttatttttttaataaaaatgagttggaaaaaaaataagatatcaactgccagcctggagaaggtgacagtccaagtgtgcaacagctgttctgaattgtcttccgctagccaagaacctatatggccttcttttggacaaaccttgaaaatgtttatttaaaaaaaaaaaagatgacaaagaaaaacagagagagagaatattggagatgtcctgaattttaatagggtacgcgccattagggctttttgcgctaaaggatgaacatgtactggtttatgtggacaagccattataccaccagactgcaatgccagtttcctctactgcaaacagtgttctgtgacaaaaaaaaaaa

SEQ ID NO: 7126 - DNA, 1249 bp, Homo sapiens
tatatcatgtaagctagtcacacctatttgaattcacttttctttgtttcttgatttcttatggctattattgcaacaatcaaacaaattttgaataccttttgtgagctagcactgtggaaatatgagggaagtttattgtgttcttactttaaatagtttgcagttttattgtgtatacaaatgtatgcatgtgaaatatacagattttaaaaaagcagatcattaaagattaggtcataaggtgtagtctgtacatggaggaagagctaagttgattcagaataacatggttagatttcgaagctagcctggatttgaatcttggatccaccactgactagctatgtaagcttagtcaagcaactcaacggaggaggcgaggagcgccgggtaccgggccgggggagccgcgggctctcggggaagagacggatgatgaacaagctttacatcgggaacctgagccccgccgtcaccgccgacgacctccggcagctctttggggacaggaagctgcccctggcgggacaggtcctgctgaagtccggctacgccttcgtggactaccccgaccagaactgggccatccgcgccatcgagaccctctcgggtaaagtggaattgcatgggaaaatcatggaagttgattactcagtctctaaaaagctaaggagcaggaaaattcagattcgaaacatccctcctcacctgcagtgggaggtgttggatggacttttggctcaatatgggacagtggagaatgtggaacaagtttttgccttttccctagtcaacacagacacagaaaccgccgttgtcaacgtcacatatgcaacaagagaagaagcaaaaatagccatggagaagctaagcgggcatcagtttgagaactactccttcaagatttcctacatcccggatgaagaggtgagctccccttcgccccctcagcgagcccagcgtggggaccactcttcccgggagcaaggccacgcccctgggggcacttctcaggccagacagattgatttcccgctgcggatcctggtccccacccagtttgttggtgccatcatcggaaaggagggcttgaccataaagaacatcactaagcagacccagtcccgggtagatatccatagaaaagagaactctggagctgcagagaagcctgtcaccatccatgccaccccagaggggacttctgaagcatgcgataacgggaagcatgagaagagaatgaacg

SEQ ID NO: 7127 - DNA, 861 bp, Homo sapiens
tatatcatgtaagctagtcacacctatttgaattcacttttctttgtttcttgatttcttatggctattattgcaacaatcaaacaaattttgaataccttttgtgagctagcactgtggaaatatgagggaagtttattgtgttcttactttaaatagtttgcagttttattgtgtatacaaatgtatgcatgtgaaatatacagattttaaaaaagcagatcattaaagattaggtcataaggtgtagtctgtacatggaggaagagctaagttgattcagaataacatggttagatttcgaagctagcctggatttgaatcttggatccaccactgactagctatgtaagcttagtcaagcaactcaacggaggaggcgaggagcgccgggtaccgggccgggggagccgcgggctctcggggaagagacggatgatgaacaagctttacatcgggaacctgagccccgccgtcaccgccgacgacctccggcagctctttggggacaggaagctgcccctggcgggacaggtcctgctgaagtccggctacgccttcgtggactaccccgaccagaactgggccatccgcgccatcgagaccctctcgggtaaagtggaattgcatgggaaaatcatggaagttgattactcagtctctaaaaagctaaggtaaatatactttgcttagttttttttttgcgattggccttacgtataagtaaaaaacgtacacacagctttaaaaaacgtgctcttggtagtttttaaaggggcttttgtttgttttgttagtggagatacatagtttagaaagctactttttttttttttactttcattatataaggtgtttact

SEQ ID NO: 7128 - DNA, 493 bp, Homo sapiens
aacttgtttgtgatttttttattttttgggcattttatttttcccgttgaaaacaaaatttctcttttcttctcatgggtcagtttgcaggatttgagcatatacaacccggaaagaaccatcactgtgaagggcacagttgaggcctgtgccagtgctgagatagagattatgaagaagctgcgtgaggcctttgaaaatgatatgctggctgttaacgtaagtccctaatgctttcttctccgctggttttcactaggctaaaaatacttgccattcagctaatgaggaagtgccttaggataggtatgcagagtttttcctgacttcctaggataaaagcattaaaataatcaggaaaccaactagtaaattatgataagtgcgctggacaacatcacgtgaagacattaaaattataactttgaagactgaaataaggaaaagcttatgatatagtgtttattaagaaaagcaagaataaaaaaaaaaa

SEQ ID NO: 7129 - DNA, 3978 bp, Homo sapiens
tatatcatgtaagctagtcacacctatttgaattcacttttctttgtttcttgatttcttatggctattattgcaacaatcaaacaaattttgaataccttttgtgagctagcactgtggaaatatgagggaagtttattgtgttcttactttaaatagtttgcagttttattgtgtatacaaatgtatgcatgtgaaatatacagattttaaaaaagcagatcattaaagattaggtcataaggtgtagtctgtacatggaggaagagctaagttgattcagaataacatggttagatttcgaagctagcctggatttgaatcttggatccaccactgactagctatgtaagcttagtcaagcaactcaacggaggaggcgaggagcgccgggtaccgggccgggggagccgcgggctctcggggaagagacggatgatgaacaagctttacatcgggaacctgagccccgccgtcaccgccgacgacctccggcagctctttggggacaggaagctgcccctggcgggacaggtcctgctgaagtccggctacgccttcgtggactaccccgaccagaactgggccatccgcgccatcgagaccctctcgggtaaagtggaattgcatgggaaaatcatggaagttgattactcagtctctaaaaagctaaggagcaggaaaattcagattcgaaacatccctcctcacctgcagtgggaggtgttggatggacttttggctcaatatgggacagtggagaatgtggaacaagtcaacacagacacagaaaccgccgttgtcaacgtcacatatgcaacaagagaagaagcaaaaatagccatggagaagctaagcgggcatcagtttgagaactactccttcaagatttcctacatcccggatgaagaggtgagctccccttcgccccctcagcgagcccagcgtggggaccactcttcccgggagcaaggccacgcccctgggggcacttctcaggccagacagattgatttcccgctgcggatcctggtccccacccagtttgttggtgccatcatcggaaaggagggcttgaccataaagaacatcactaagcagacccagtcccgggtagatatccatagaaaagagaactctggagctgcagagaagcctgtcaccatccatgccaccccagaggggacttctgaagcatgccgcatgattcttgaaatcatgcagaaagaggcagatgagaccaaactagccgaagagattcctctgaaaatcttggcacacaatggcttggttggaagactgattggaaaagaaggcagaaatttgaagaaaattgaacatgaaacagggaccaagataacaatctcatctttgcaggatttgagcatatacaacccggaaagaaccatcactgtgaagggcacagttgaggcctgtgccagtgctgagatagagattatgaagaagctgcgtgaggcctttgaaaatgatatgctggctgttaaccaacaagccaatctgatcccaggggttgaacctcagcgcacttggcatcttttcaacaggactgtccgtgctatctccaccagcagggccccgcggagctccccccgctgccccctaccaccccttcactacccactccggatacttctccagcctgtacccccatcaccagtttggcccgttcccgcatcatcactcttatccagagcaggagattgtgaatctcttcatcccaacccaggctgtgggcgccatcatcgggaagaagggggcacacatcaaacagctggcgagattcgccggagcctctatcaagattgcccctgcggaaggcccagacgtcagcgaaaggatggtcatcatcaccgggccaccggaagcccagttcaaggcccagggacggatctttgggaaactgaaagaggaaaacttctttaaccccaaagaagaagtgaagctggaagcgcatatcagagtgccctcttccacagctggccgggtgattggcaaaggtggcaagaccgtgaacgaactgcagaacttaaccagtgcagaagtcatcgtgcctcgtgaccaaacgccagatgaaaatgaggaagtgatcgtcagaattatcgggcacttctttgctagccagactgcacagcgcaagatcagggaaattgtacaacaggtgaagcagcaggagcagaaataccctcagggagtcgcctcacagcgcagcaagtgaggctcccacaggcaccagcaaaacaacggatgaatgtagcccttccaacacctgacagaatgagaccaaacgcagccagccagatcgggagcaaaccaaagaccatctgaggaatgagaagtctgcggaggcggccagggactctgccgaggccctgagaaccccaggggccgaggaggggcggggaaggtcagccaggtttgccagaaccaccgagccccgcctcccgccccccagggcttctgcaggcttcagccatccacttcaccatccactcggatctctcctgaactcccacgacgctatcccttttagttgaactaacataggtgaacgtgttcaaagccaagcaaaatgcacaccctttttctgtggcaaatcgtctctgtacatgtgtgtacatattagaaagggaagatgttaagatatgtggcctgtgggttacacagggtgcctgcagcggtaatatattttagaaataatatatcaaataactcaactaactccaatttttaatcaattattaatttttttttctttttaaagagaaagcaggcttttctagactttaaagaataaagtctttgggaggtctcacggtgtagagaggagctttgaggccacccgcacaaaattcacccagagggaaatctcgtcggaaggacactcacggcagttctggatcacctgtgtatgtcaacagaagggataccgtctccttgaagaggaaactctgtcactcctcatgcctgtctagctcatacacccatttctctttgcttcacaggttttaaactggttttttgcatactgctatataattctctgtctctctctgtttatctctcccctccctcccctccccttcttctccatctccattcttttgaatttcctcatccctccatctcaatcccgtatctacgcacccccccccccccaggcaaagcagtgctctgagtatcacatcacacaaaaggaacaaaagcgaaacacacaaaccagcctcaacttacacttggttactcaaaagaacaagagtcaatggtacttgtcctagcgttttggaagaggaaaacaggaacccaccaaaccaaccaatcaaccaaacaaagaaaaaattccacaatgaaagaatgtattttgtctttttgcattttggtgtataagccatcaatattcagcaaaatgattcctttctttaaaaaaaaaaaatgtggaggaaagtagaaatttaccaaggttgttggcccagggcgttaaattcacagatttttttaacgagaaaaacacacagaagaagctacctcaggtgtttttacctcagcaccttgctcttgtgtttcccttagagattttgtaaagctgatagttggagcatttttttatttttttaataaaaatgagttggaaaaaaaataagatatcaactgccagcctggagaaggtgacagtccaagtgtgcaacagctgttctgaattgtcttccgctagccaagaacctatatggccttcttttggacaaaccttgaaaatgtttatttaaaaaaaaaaaagatgacaaagaaaaacagagagagagaatattggagatgtcctgaattttaatagggtacgcgccattagggctttttgcgctaaaggatgaacatgtactggtttatgtggacaagccattataccaccagactgcaatgccagtttcctctactgcaaacagtgttctgtgacaaaaaaaaaaa

SEQ ID NO: 7130 - DNA, 1776 bp, Homo sapiens
tatatcatgtaagctagtcacacctatttgaattcacttttctttgtttcttgatttcttatggctattattgcaacaatcaaacaaattttgaataccttttgtgagctagcactgtggaaatatgagggaagtttattgtgttcttactttaaatagtttgcagttttattgtgtatacaaatgtatgcatgtgaaatatacagattttaaaaaagcagatcattaaagattaggtcataaggtgtagtctgtacatggaggaagagctaagttgattcagaataacatggttagatttcgaagctagcctggatttgaatcttggatccaccactgactagctatgtaagcttagtcaagcaactcaacggaggaggcgaggagcgccgggtaccgggccgggggagccgcgggctctcggggaagagacggatgatgaacaagctttacatcgggaacctgagccccgccgtcaccgccgacgacctccggcagctctttggggacaggaagctgcccctggcgggacaggtcctgctgaagtccggctacgccttcgtggactaccccgaccagaactgggccatccgcgccatcgagaccctctcgggtaaagtggaattgcatgggaaaatcatggaagttgattactcagtctctaaaaagctaaggagcaggaaaattcagattcgaaacatccctcctcacctgcagtgggaggtgttggatggacttttggctcaatatgggacagtggagaatgtggaacaagtcaacacagacacagaaaccgccgttgtcaacgtcacatatgcaacaagagaagaagcaaaaatagccatggagaagctaagcgggcatcagtttgagaactactccttcaagatttcctacatcccggatgaagaggtgagctccccttcgccccctcagcgagcccagcgtggggaccactcttcccgggagcaaggccacgcccctgggggcacttctcaggccagacagattgatttcccgctgcggatcctggtccccacccagtttgttggtgccatcatcggaaaggagggcttgaccataaagaacatcactaagcagacccagtcccgggtagatatccatagaaaagagaactctggagctgcagagaagcctgtcaccatccatgccaccccagaggggacttctgaagcatgccgcatgattcttgaaatcatgcagaaagaggcagatgagaccaaactagccgaagagattcctctgaaaatcttggcacacaatggcttggttggaagactgattggaaaagaaggcagaaatttgaagaaaattgaacatgaaacagggaccaagataacaatctcatctttgcaggatttgagcatatacaacccggaaagaaccatcactgtgaagggcacagttgaggcctgtgccagtgctgagatagagattatgaagaagctgcgtgaggcctttgaaaatgatatgctggctgttaacgtaagtccctaatgctttcttctccgctggttttcactaggctaaaaatacttgccattcagctaatgaggaagtgccttaggataggtatgcagagtttttcctgacttcctaggataaaagcattaaaataatcaggaaaccaactagtaaattatgataagtgcgctggacaacatcacgtgaagacattaaaattataactttgaagactgaaataaggaaaagcttatgatatagtgtttattaagaaaagcaagaataaaaaaa

SEQ ID NO: 7131 - DNA, 972 bp, Homo sapiens
tatatcatgtaagctagtcacacctatttgaattcacttttctttgtttcttgatttcttatggctattattgcaacaatcaaacaaattttgaataccttttgtgagctagcactgtggaaatatgagggaagtttattgtgttcttactttaaatagtttgcagttttattgtgtatacaaatgtatgcatgtgaaatatacagattttaaaaaagcagatcattaaagattaggtcataaggtgtagtctgtacatggaggaagagctaagttgattcagaataacatggttagatttcgaagctagcctggatttgaatcttggatccaccactgactagctatgtaagcttagtcaagcaactcaacggaggaggcgaggagcgccgggtaccgggccgggggagccgcgggctctcggggaagagacggatgatgaacaagctttacatcgggaacctgagccccgccgtcaccgccgacgacctccggcagctctttggggacaggaagctgcccctggcgggacaggtcctgctgaagtccggctacgccttcgtggactaccccgaccagaactgggccatccgcgccatcgagaccctctcgggtaaagtggaattgcatgggaaaatcatggaagttgattactcagtctctaaaaagctaaggagcaggaaaattcagattcgaaacatccctcctcacctgcagtgggaggtgttggatggacttttggctcaatatgggacagtggagaatgtggaacaaggtaataagtgaggaagccttttgggttttggagagagatattatctgttatttcttataggttaggtcaactccagggagaaatagtaagttcatatttctttgaaataagcttcctagagtatatgtatttacatctatgtaagatgtatcttacatagatgtgagagatatctgtctctttctatgtatgtctat

SEQ ID NO: 7132 - DNA, 214 bp, Homo sapiens
gaatctcttcatcccaacccaggctgtgggcgccatcatcgggaagaagggggcacacatcaaacagctggcgagattcgccggagcctctatcaaggtgaggctgctcctgacggccctgtggcccttctaccacctcctctcatcccacggcccttgttccctctcagtcccaggcagcgccacaccatgcagagacagagtcccacagaga

SEQ ID NO: 7133 - DNA, 361 bp, Homo sapiens
gctgaggcaggagaattgcttgaactcaggaggcggagattgcagtgggccaagatcgcgccattgcactccagcctgggcaacaagagtgaaactctgtctcaaaaaaatacataaataaaacaaaatatactctatgaacacctactttgctgtcgtcgtagacaagcgctgtccaatagaattttctgggtcatttttttcctttcttttaaacatttcaaatgtttgtacaaagtatagactttggatttagtagaacaaaaaaatgtgttttgctaaacatttttgtttttatgagcaagtttctaatttataagaattgaaaagattttttaaatttcttttgagatttttgtaa

SEQ ID NO: 7134 - DNA, 243 bp, Homo sapiens
attcctaaaaaaagaacttcaggtttagatagtttccctggagaattctatataacatttaaggaggaaataatattaatcctacacggactctttcagaaaacataggaggtaaaaacaaaacacttcctgatttatgagacaggcataatcccaacagcaaaacctgacagatattacaggaaaataaaagtataggccaatattcctcatggttctaggcacaataatctttaacaaaat

SEQ ID NO: 7135 - DNA, 512 bp, Homo sapiens
atctttgacagcatttggtgtgttcacctttttgaattttagccattctaaacagcttatctgcccctactgtggaatgatgtgacagacatagaataacacttacagtgattctagttcaaaatgaggcaacatggaagggataaagaagtcactgacccaaaatagtttggaaatggagctgggcaaaatccagcagaagtttcttaattaggatcgacagcctgggaccggcccgccgtcctgtgggtctttgcctctgggctgtctgctgtgcatttcttggaaccattattatttatctttttttctcgcacttttttgggtatggcttctatcgcactccaaatgtttttgagattcatccatgttgttctgtgtgtcaccagtttgttcctttagccattccatggaatgagtgtatcacagtttattgatccattcttgtattgacagatacttgaatgtttccagttttttgtattatgaataaaactgctatgaacattatt

SEQ ID NO: 7136 - DNA, 395 bp, Homo sapiens
agtatcttcactatgcaacaccagacagccatattatgaagaaattaagtggaaattagcagaaatatccattcatttgctgtactatttgtatgccatagttttagaagtttcaatagcacacacttttttgggtatggcttctatcgcactccaaatgtttttgagattcatccatgttgttctgtgtgtcaccagtttgttcctttagccattccatggaatgagtgtatggaacaatgccaccgtgaatggaatagtttggggaaagcttggccaaacacaaccctgatttcagagcaggaacatggtttggatagatcttcagttccgcttgaattattctgttactgcgctgtcattttcagaagatttccattccttggggtaccgag

SEQ ID NO: 7137 - DNA, 401 bp, Homo sapiens
tacattcctctagaaaagtttttcctgaccccttaactcttagctgggagaacccccagtcaattggctccgcagatctctctgcttatctgtgagagtacttagctccttgcaaatatctacatttcctgttccttattcactgttatatccataaagccttacacagtgcctggcccatgtttcctgagttgaaccttgccttctcagtgctgttaaacaagcacatcacctctaaagtcaaaatcccaagagtccttcaggcctatttctgagtgggagagaggattatcagaatattagcctttggctggaggtggtggttcatgcctataatgccagcagaggcaggaggatcatttgagcccagccaaggcaacattagtgagaccccgtctctt

SEQ ID NO: 7138 - DNA, 282 bp, Homo sapiens
gtggcattacgtcataggccaaaatattagtaatttttcaattagtacaaaaaaatgcaggagagttcaaaattattgaagacagtgagagtcagagggggcagcaattttttttttaaatagtttgaaaaaaaggaagaggctgggtgtggtggctcatgccagtaatctcagcactttgggaggctgaggcgggagggtcacttgagcccaggaaattgaggatgtgttgagccatgattgcaatattgcactccagccggggtaacagaatgagaccct

SEQ ID NO: 7139 - DNA, 505 bp, Homo sapiens
tccccagctcaggtttcgtcacctacgcaccctcctgaaaggcttaacactcaagccgcatgctggagttgaaatccctcagcattgccttgcaaggctgccctcttccttgttcccccatgtgggaaaagagaagcaaccgtttcagaactatggtggatgctttttgcagatgagtggacctggggtgcattctgtatcctcgaatagaaataagctaactggccaggcgcggtggctcatgcctgtaatcccagcactttgggaggccaaggcgggtggatcacctgaggttgggagttcgagaccagcctggccaacatggagaaaccccatctctactaaaaatacaaaattagccaggtgtggtgtcgggcgcctgtaatcccacctactcgggaggctgaggcaggagaatcgcttgaacccgggagacggaggttgcagtgagctgagatcatgccattgcactccaggctgggtgacaagggcgagactccatctc

SEQ ID NO: 7140 - DNA, 198 bp, Homo sapiens
caattcaaaaggaacaaataattatttcagtgtagactgtcacagaatctagggcatcatcaaactttgatccctttgggctttttacttggaaagaatgcagtttctctttttttttaaccttagctttattctccaaacattttaaaatttaattcatgggctattattttgttcataagctaagtggcttaccca

SEQ ID NO: 7141 - DNA, 658 bp, Homo sapiens
taaattttttcttcattagcccttgtttgtatacaagtcactgttcaatgttagacaccaaggaactatttaaaacaaacaagagaccttaggccagttttaccactaaccagcaaatcttctgctatcttttggttgaatttccttgattataaaatgagaaaaatcgggctatatgacctggatggttcttaaaactctagtattctattaaatataactaattaccatcaaattgcattgtatttgttcccggtttggaattgaaacgtactaattgctctctactcagtttctcactgagctaactttaaatgttcctttgaagcattgtactatgataattttgttcttcctgttgctagtggcagttgtgccaggaaaatttgactctgtctcaagaattaacccattgtaaacgctgtgtggttcctttcctctcactctcttaatatcagctaggctttatcatactttatttggaaagcttgagaaagcagccatttccctgtagagctacagcttaatttgacaatttgtaaaccatttgttctttctactttttgtaaggttatttccttgggaaactatttgacataaaataactattttgctgaattttgtaaaataaattatttgccaaaacagtttttcttca

SEQ ID NO: 7142 - DNA, 298 bp, Homo sapiens
ataaggccagagctgtgcttaattagtcctggaggcacaagaaaaaatgttaaatttattccattgattccaagcaaaagatacttaaacttatccaggggctagggcattagaagagaggcagttttagagaactctttctccttatgtaccctaatgtttgatattttgttatttaatagttattgaacatttgttgcatatcagacactgtgctgtgttctgcatgcatttcctgttctttgattttcctacacgtgaggaaactgagagttagagaagttaactaacttgccaa

SEQ ID NO: 7143 - DNA, 485 bp, Homo sapiens
ggatgtggctgaaatgagattgtcagcaaattacaacttcaagcctaggactgcagtgttatggattgcacctcatccttggttattgaagatatattcaaaatttatgaaaaatagaaaaaccttattacttctgaatttttccacgttagactttccttatacttttaagatagtgaaagtgttattatataagatcatggaaagtttgtctttccagacctattttatgttaggattttacaatattaaattcataagataatagtagagactagaaaacaaatccttactgataatgaatttcctaagtagtaaatacaaatgaatatttatttgtaaacctgggtgattaagtaatagctgttcagtgatattgatggaaggaaattaatattatttaatccaaaggccaggcgtagtgactcacacctgtaatcccagcgctttgagaggccgaggcagatagatcgtttaagctcagg

SEQ ID NO: 7144 - DNA, 403 bp, Homo sapiens
gattttctttttccttttgctctctgaaatgacagtttactacatggtattgctgctgtcatttttctgtcattatagggaaatgccatatatttgtagcactttcgtaaagtgttgaagtaggccaggcatggtggctcacgcctgtaattccatcactttgggaggcagaggtgggtggatcatctgaggtcaggacttcaagaccagcctgatcaacatggtgaaaccctatctctaccaaaaatacaaaaattagcctggcgtggtggcgggcacccgtagtcccagctaccaggaggctaaggcaaggagaatcgcatgaacccgggaggtggaggttgcagtgggctgagattgcgccaccgcactccagcctgggcaacagagctagaatgcatct

SEQ ID NO: 7145 - DNA, 418 bp, Homo sapiens
tacacattgtatatataaatagtaggctaagcttatagcactttttaaaacttattattatgggaaaaaatttaaatatatacaaaaataatagaaagaatggacctctgtgtatccatccccctaggtcaagtattatcaatttacagccatcttttgaatctattctcccaccccactatcctcatggcttagtttgaaacaatacccagacgttatagcatttatctgtaaacgtttcggtatccatttcctaaatccactaaaccattattatacattaaaaaactaacaataattccttaatttcatcaaatattcattattcaaatgtacttgattgtctcatgtttttttgaaacaacatgtttgaatcaagatctaaataaataaaacacattgtaattggttgatatat

SEQ ID NO: 7146 - DNA, 288 bp, Homo sapiens
aattaattaataagagtgaatgacaggtgcttttttagagaaggtcttgagatgacatttgaggtgaggcccaaatgaagtgaggaggaaggccatggaaaaatctgggaaaagagctttccagttagagcagcaaatagaccatgaggagaaccacccttgctaggacaggggttagagcagagtgaacaaagtaaaaagcagtaaaggatgagatccagtagtgggcatgggctggattgtgtagaaccctgtggagcttaatagaaagtgtggggctttacaaaa

SEQ ID NO: 7147 - DNA, 914 bp, Homo sapiens
  misc_feature (49)..(49): n is a, c, g, or t
  misc_feature (56)..(56): n is a, c, g, or t
  misc_feature (66)..(66): n is a, c, g, or t
  misc_feature (70)..(70): n is a, c, g, or t
  misc_feature (81)..(81): n is a, c, g, or t
tccgctatctcaattacagctcccctcttcccttctgacaaacaacccnagcaagncgagcgtaanattnacttgcaattnaaagtgccaatgaactggctgtgcagaaagcaaaggcagaaatcaccaggctcataaaagaagagctgatccggctgcaaaattcataccaaccaacaaataaaggaagatacaaagtcttatagacatccggaaaaaagatttttacctgtgctggtctatgatgtatgtggcagttgctgtctgcagtttacaatgtattgtaaatgaagattttttaaattctatcttgctgattttttttaaatataagaaactggtacttggtaaagaaatctgtccgtaagtacccccacaatcagtcaaactatatttaaagccagcctgttttcagagtatgatgtcctttaatgtaaactcaaatatcaatattttaaatgtccggataatattctagaggtttaaaaaatggaaatatttgaactttctattgaagacaataaagtacacaagtcgttaaggggctattcactttatcctgtactttcaatgaaattgtgatcatttcctaagaaaaggtaaaattcactatcatattttgtgtccccaccttgatgttacatgactctggaacaatatgaactggatttaagaatgttataatagaagtcttacaaaatggaaaaaaaaaatccacataaaagtccccccaaagctcatggagacgacgtcttaacatcacgaccgtcgtcaatcgtagtgatcatttctgtactgaaaaaccgcctcatcgtaggaaggatgggccgatgaccaggaccaagagagagggacataacgataccatgtgctccagagggccaacatcctctacgagacgggccgggcctgcc

SEQ ID NO: 7148 - DNA, 419 bp, Homo sapiens
gcggacgcgtgggcattttgtaagacttctattataacattcttaaatccagttcatattgttccagagtcatgtaacatcaaggtggggacacaaaatatgaactggatttaagaatgttataatagaagtcttacaaaatgggttgagagtttttgtttcaatttttatcatcataaatgggcaaaaagtagttggactaatttcggtttttatacaagtaaagatttaatagtataaggatttttttgcatttctttacactgagtgtaaaactctacaaagagttatagtatttactactttgaggtttccctcacaacttctggctccatacctagcccctcttttataatcttccttaaaagaaagagtgtagcctataaatactaaatatgataccttttccttctagaaag

SEQ ID NO: 7149 - DNA, 2269 bp, Homo sapiens
tttgtaatgttttctttttctcaggtcatgcgcatcgtggataatgttcgtcctgatcgacagacggttatgttttcagctactttccccagagctatggaggctttggctcgcaggatcctcagtaaacctattgaagtacaagttggaggcaggagtgtggtttgctcagatgtggagcaacaagtgattgtgattgaagaagaaaagaaattcttgaagttacttgagcttctaggccattatcaagagtcaggatctgtcattatatttgtggataagcaggaacatgctgatggtcttcttaaggatttaatgagagcatcttatccttgcatgtctcttcatggaggcattgatcaatatgacagagatagcatcataaatgactttaagaatgggacctgcaaacttcttgtggctacctctgttgctgcccgaggtctagatgtgaaacatctgattcttgtagtaaattatagctgccccaaccattatgaggattatgtacacagagcagggcggactggaagagcaggaaacaagggttatgcttatacttttatcacagaggatcaagctcgctatgctggtgacataattaaagctcttgaattgtcagggactgcagtacctcctgatttagagaaactgtggagtgatttcaaagatcagcagaaagctgaggggaaaataattaaaaagagtagtgggttctctggtaagggattcaagtttgatgaaacagaacaagctttggctaatgagaggaagaagttacaaaaagcagctcttggtctacaagattcagatgatgaggatgctgcagttgatattgatgagcaaattgaaagcatgtttaattcaaagaagagagtaaaggatatggctgctcctggaacatcaagtgttcctgctccaactgcaggaaatgctgagaaattagaaattgctaagagattggctcttagaatcaatgcccagaagaatttgggcatcgagtctcaggtagatgtgatgcagcaggccaccaatgcaattcttaggggtggcaccattctggctcccactgtttctgcaaaaaccattgcagaacaacttgctgaaaagatcaatgccaagctcaattatgtgccgttagagaaacaagaagaagagagacaggatggtggacagaatgaatcttttaagagatatgaagaagaattagagatcaatgacttcccacagactgctaggtggaaagttacctctaaggaagctctgcagagaatcagtgaatactctgaagccgcaattacaatcagaggaacctacttccctcctggcaaagaacccaaggaaggcgagcggaagatttacttggcaattgaaagtgccaatgaactggctgtgcagaaagcaaaggcagaaatcaccaggctcataaaagaagagctgatccggctgcaaaattcataccaaccaacaaataaaggaagatacaaagtcttatagacatccggaaaaaagatttttacctgtgctggtctatgatgtatgtggcagttgctgtctgcagtttacaatgtattgtaaatgaagattttttaaattctatcttgctgattttttttaaatataagaaactggtacttggtaaagaaatctgtccgtaagtacccccacaatcagtcaaactatatttaaagccagcctgttttcagagtatgatgtcctttaatgtaaactcaaatatcaatattttaaatgtccggataatattctagaggtttaaaaaatggaaatatttgaactttctattgaagacaataaagtacacaagtcgttaaggggctattcactttatcctgtactttcaatgaaattgtgatcatttcctaagaaaaggtaaaattcactatcatattttgtgtccccaccttgatgttacatgactctggaacaatatgaactggatttaagaatgttataatagaagtcttacaaaatgggttgagagtttttgtttcaatttttatcatcataaatgggcaaaaagtagttggactaatttcggtttttatacaagtaaagatttaatagtataaggatttttttgcatttctttacactgagtgtaaaactctacaaagagttatagtatttactactttgaggtttccctcacaacttctggctccatacctagcccctcttttataatcttccttaaaagaaagagtgtagcctataaatactaaatatgataccttttccttctagaaag

SEQ ID NO: 7150 - DNA, 1815 bp, Homo sapiens
ccagaggtccctggcaggtggaaatcaggacaaccggtacaggtgaggattatgtacacagagcagggcggactggaagagcaggaaacaagggttatgcttatacttttatcacagaggatcaagctcgctatgctggtgacataattaaagctcttgaattgtcagggactgcagtacctcctgatttagagaaactgtggagtgatttcaaagatcagcagaaagctgaggggaaaataattaaaaagagtagtgggttctctggtaagggattcaagtttgatgaaacagaacaagctttggctaatgagaggaagaagttacaaaaagcagctcttggtctacaagattcagatgatgaggatgctgcagttgatattgatgagcaaattgaaagcatgtttaattcaaagaagagagtaaaggatatggctgctcctggaacatcaagtgttcctgctccaactgcaggaaatgctgagaaattagaaattgctaagagattggctcttagaatcaatgcccagaagaatttgggcatcgagtctcaggtagatgtgatgcagcaggccaccaatgcaattcttaggggtggcaccattctggctcccactgtttctgcaaaaaccattgcagaacaacttgctgaaaagatcaatgccaagctcaattatgtgccgttagagaaacaagaagaagagagacaggatggtggacagaatgaatcttttaagagatatgaagaagaattagagatcaatgacttcccacagactgctaggtggaaagttacctctaaggaagctctgcagagaatcagtgaatactctgaagccgcaattacaatcagaggaacctacttccctcctggcaaagaacccaaggaaggcgagcggaagatttacttggcaattgaaagtgccaatgaactggctgtgcagaaagcaaaggcagaaatcaccaggctcataaaagaagagctgatccggctgcaaaattcataccaaccaacaaataaaggaagatacaaagtcttatagacatccggaaaaaagatttttacctgtgctggtctatgatgtatgtggcagttgctgtctgcagtttacaatgtattgtaaatgaagattttttaaattctatcttgctgattttttttaaatataagaaactggtacttggtaaagaaatctgtccgtaagtacccccacaatcagtcaaactatatttaaagccagcctgttttcagagtatgatgtcctttaatgtaaactcaaatatcaatattttaaatgtccggataatattctagaggtttaaaaaatggaaatatttgaactttctattgaagacaataaagtacacaagtcgttaaggggctattcactttatcctgtactttcaatgaaattgtgatcatttcctaagaaaaggtaaaattcactatcatattttgtgtccccaccttgatgttacatgactctggaacaatatgaactggatttaagaatgttataatagaagtcttacaaaatgggttgagagtttttgtttcaatttttatcatcataaatgggcaaaaagtagttggactaatttcggtttttatacaagtaaagatttaatagtataaggatttttttgcatttctttacactgagtgtaaaactctacaaagagttatagtatttactactttgaggtttccctcacaacttctggctccatacctagcccctcttttataatcttccttaaaagaaagagtgtagcctataaatactaaatatgataccttttccttctagaaag

SEQ ID NO: 7151 - DNA, 3157 bp, Homo sapiens
tttgtaatgttttctttttctcaggtcatgcgcatcgtggataatgttcgtcctgatcgacagacggttatgttttcagctactttccccagagctatggaggctttggctcgcaggatcctcagtaaacctattgaagtacaagttggaggcaggagtgtggtttgctcagatgtggagcaacaagtgattgtgattgaagaagaaaagaaattcttgaagttacttgagcttctaggccattatcaagagtcaggatctgtcattatatttgtggataagcaggaacatgctgatggtcttcttaaggatttaatgagagcatcttatccttgcatgtctcttcatggaggcattgatcaatatgacagagatagcatcataaatgactttaagaatgggacctgcaaacttcttgtggctacctctgttgctgcccgaggtctagatgtgaaacatctgattcttgtagtaaattatagctgccccaaccattatgaggattatgtacacagagcagggcggactggaagagcaggaaacaagggttatgcttatacttttatcacagaggatcaagctcgctatgctggtgacataattaaagctcttgaattgtcagggactgcagtacctcctgatttagagaaactgtggagtgatttcaaagatcagcagaaagctgaggggaaaataattaaaaagagtagtgggttctctggtaagggattcaagtttgatgaaacagaacaagctttggctaatgagaggaagaagttacaaaaagcagctcttggtctacaagattcagatgatgaggatgctgcagttgatattgatgagcaaattgaaagcatgtttaattcaaagaagagagtaaaggatatggctgctcctggaacatcaagtgttcctgctccaactgcaggaaatgctgagaaattagaaattgctaagagattggctcttagaatcaatgcccagaagaatttgggcatcgagtctcaggtattaagtaatttgttccaagtctcagtcaatacttttaagaagttctttgattttacttttcaggaattatgttgaacacaagtaaacaagttgtcctagacattgagtttgtgagaatttaacattctcaatacagaattttttgataattgcatttggatgatttctcagtgctattgactgaggactttgggcctattctggaatttctaactgtctctaaaggtagttttatagggtagtattctgatgagtcttaacaaaatcttaaagatgtattaataattctctttttctttctttatctgcttttattgggcacacaactccctggatatacaaacacccagttacatgactcaaatcaatatggtcttaaacagtggagaaatgtgatttttaaatatttcacgttatctttttcttggaagcttacttgttattttgaagcttttgaggcagtcattaactataacgtttgtaatgttgggttgggtcatagagatgaaggagctcagtgatggtagtagtacaaacattcaaattcggaggagactcctaggaattagagtatgcaaatgattttcgaaatatttactgtgtctgacatcaagagttagctaattatcaactacatctctatgatctagtagaatatttaatagagttgaatgttctccagttttcttatccactaggaggtacattaaactacattataaatatatattgctaaatcacacatatcaatgagactatgcattagaaaggtttatttattaaacttgcatacaaagttagtagcttttcagagaataatttgtggtgtggtccctactcttgtctctgccctcatttgagatttaactaagtcttctttaactacaggatgtgatgcagcaggccaccaatgcaattcttaggggtggcaccattctggctcccactgtttctgcaaaaaccattgcagaacaacttgctgaaaagatcaatgccaagctcaattatgtgccgttagagaaacaagaagaagagagacaggatggtggacagaatgaatcttttaagagatatgaagaagaattagagatcaatgacttcccacagactgctaggtggaaagttacctctaaggaagctctgcagagaatcagtgaatactctgaagccgcaattacaatcagaggaacctacttccctcctggcaaagaacccaaggaaggcgagcggaagatttacttggcaattgaaagtgccaatgaactggctgtgcagaaagcaaaggcagaaatcaccaggctcataaaagaagagctgatccggctgcaaaattcataccaaccaacaaataaaggaagatacaaagtcttatagacatccggaaaaaagatttttacctgtgctggtctatgatgtatgtggcagttgctgtctgcagtttacaatgtattgtaaatgaagattttttaaattctatcttgctgattttttttaaatataagaaactggtacttggtaaagaaatctgtccgtaagtacccccacaatcagtcaaactatatttaaagccagcctgttttcagagtatgatgtcctttaatgtaaactcaaatatcaatattttaaatgtccggataatattctagaggtttaaaaaatggaaatatttgaactttctattgaagacaataaagtacacaagtcgttaaggggctattcactttatcctgtactttcaatgaaattgtgatcatttcctaagaaaaggtaaaattcactatcatattttgtgtccccaccttgatgttacatgactctggaacaatatgaactggatttaagaatgttataatagaagtcttacaaaatgggttgagagtttttgtttcaatttttatcatcataaatgggcaaaaagtagttggactaatttcggtttttatacaagtaaagatttaatagtataaggatttttttgcatttctttacactgagtgtaaaactctacaaagagttatagtatttactactttgaggtttccctcacaacttctggctccatacctagcccctcttttataatcttccttaaaagaaagagtgtagcctataaatactaaatatgataccttttccttctagaaag

SEQ ID NO: 7152 - DNA, 2205 bp, Homo sapiens
tttgtaatgttttctttttctcaggtcatgcgcatcgtggataatgttcgtcctgatcgacagacggttatgttttcagctactttccccagagctatggaggctttggctcgcaggatcctcagtaaacctattgaagtacaagttggaggcaggagtgtggtttgctcagatgtggagcaacaagtgattgtgattgaagaagaaaagaaattcttgaagttacttgagcttctaggccattatcaagagtcaggatctgtcattatatttgtggataagcaggaacatgctgatggtcttcttaaggatttaatgagagcatcttatccttgcatgtctcttcatggaggcattgatcaatatgacagagatagcatcataaatgactttaagaatgggacctgcaaacttcttgtggctacctctgttgctgcccgaggtctagatgtgaaacatctgattcttgtagtaaattatagctgccccaaccattatgaggattatgtacacagagcagggcggactggaagagcaggaaacaagggttatgcttatacttttatcacagaggatcaagctcgctatgctggtgacataattaaagctcttgaattgtcagggactgcagtacctcctgatttagagaaactgtggagtgatttcaaagatcagcagaaagctgaggggaaaataattaaaaagagtagtgggttctctggtaagggattcaagtttgatgaaacagaacaagctttggctaatgagaggaagaagttacaaaaagcagctcttggtctacaagattcagatgatgaggatgctgcagttgatattgatgagcaaattgaaagcatgtttaattcaaagaagagagtaaaggatatggctgctcctggaacatcaagtgttcctgctccaactgcaggaaatgctgagaaattagaaattgctaagagattggctcttagaatcaatgcccagaagaatttgggcatcgagtctcaggtagatgtgatgcagcaggccaccaatgcaattcttaggggtggcaccattctggctcccactgtttctgcaaaaaccattgcagaacaacttgctgaaaagatcaatgccaagctcaattatgtgccgttagagaaacaagaagaagagagacaggatggtggacagaatgaatcttttaagagatatgaagaagaattagagatcaatgacttcccacagactgctaggtggaaagttacctctaaggaagctctgcagagaatcagtgaatactctgaagccgcaattacaatcagaggaacctacttccctcctggcaaagaacccaaggaaggcgagcggaagatttacttggcaattgaaagtgccaatgaactggctgtgcagaaagcaaaggcagaaatcaccaggctcataaaagaagagctgatccggctgcaaaattcataccaaccaacaaataaaggaagatacaaagtcttatagacatccggaaaaaagatttttacctgtgctggtctatgatgtatgtggcagttgctgtctgcagtttacaatgtattgtaaatgaagattttttaaattctatcttgctgattttttttaaatataagaaactggtacttggtaaagaaatctgtccgtaagtacccccacaatcagtcaaactatatttaaagccagcctgttttcagagtatgatgtcctttaatgtaaactcaaatatcaatattttaaatgtccggataatattctagaggtttaaaaaatggaaatatttgaactttctattgaagacaataaagtacacaagtcgttaaggggctattcactttatcctgtactttcaatgaaattgtgatcatttcctaagaaaaggtaaaattcactatcatattttgtgtccccaccttgatgttacatgactctggaacaatatgaactggatttaagaatgttataatagaagtcttacaaaatggaaaaaaaaaatccacataaaagtccccccaaagctcatggagacgacgtcttaacatcacgaccgtcgtcaatcgtagtgatcatttctgtactgaaaaaccgcctcatcgtaggaaggatgggccgatgaccaggaccaagagagagggacataacgataccatgtgctccagagggccaacatcctctacgagacgggccgggcctgcc

SEQ ID NO: 7153 - DNA, 978 bp, Homo sapiens
  misc_feature (49)..(49): n is a, c, g, or t
  misc_feature (56)..(56): n is a, c, g, or t
  misc_feature (66)..(66): n is a, c, g, or t
  misc_feature (70)..(70): n is a, c, g, or t
  misc_feature (81)..(81): n is a, c, g, or t
tccgctatctcaattacagctcccctcttcccttctgacaaacaacccnagcaagncgagcgtaanattnacttgcaattnaaagtgccaatgaactggctgtgcagaaagcaaaggcagaaatcaccaggctcataaaagaagagctgatccggctgcaaaattcataccaaccaacaaataaaggaagatacaaagtcttatagacatccggaaaaaagatttttacctgtgctggtctatgatgtatgtggcagttgctgtctgcagtttacaatgtattgtaaatgaagattttttaaattctatcttgctgattttttttaaatataagaaactggtacttggtaaagaaatctgtccgtaagtacccccacaatcagtcaaactatatttaaagccagcctgttttcagagtatgatgtcctttaatgtaaactcaaatatcaatattttaaatgtccggataatattctagaggtttaaaaaatggaaatatttgaactttctattgaagacaataaagtacacaagtcgttaaggggctattcactttatcctgtactttcaatgaaattgtgatcatttcctaagaaaaggtaaaattcactatcatattttgtgtccccaccttgatgttacatgactctggaacaatatgaactggatttaagaatgttataatagaagtcttacaaaatgggttgagagtttttgtttcaatttttatcatcataaatgggcaaaaagtagttggactaatttcggtttttatacaagtaaagatttaatagtataaggatttttttgcatttctttacactgagtgtaaaactctacaaagagttatagtatttactactttgaggtttccctcacaacttctggctccatacctagcccctcttttataatcttccttaaaagaaagagtgtagcctataaatactaaatatgataccttttccttctagaaag

SEQ ID NO: 7154 - DNA, 913 bp, Homo sapiens
tttgtaatgttttctttttctcaggtcatgcgcatcgtggataatgttcgtcctgatcgacagacggttatgttttcagctactttccccagagctatggaggctttggctcgcaggatcctcagtaaacctattgaagtacaagttggaggcaggagtgtggtttgctcagatgtggagcaacaagtgattgtgattgaagaagaaaagaaattcttgaagttacttgagcttctaggccattatcaagagtcaggatctgtcattatatttgtggataagcaggaacatgctgatggtcttcttaaggatttaatgagagcatcttatccttgcatgtctcttcatggaggcattgatcaatatgacagagatagcatcataaatgactttaagaatgggacctgcaaacttcttgtggctacctctgttgctgcccgaggtctagatgtgaaacatctgattcttgtagtaaattatagctgccccaaccattatgaggattatgtacacagagcagggcggactggaagagcaggaaacaagggttatgcttatacttttatcacagaggatcaagctcgctatgctggtgacataattaaagctcttgaattgtcagggactgcagtacctcctgatttagagaaactgtggagtgatttcaaagatcagcagaaagctgaggggaaaataattaaaaagagtagtgggttctctggtaagggattcaagtttgatgaaacagaacaagctttggctaatgagaggaagaagttacaaaaagcagctcttggtctacaagattcagatgatgaggatgctgcagttgatattgatgagccaattgaaagcatgtttaattcaaagacctgagctaaggagacctgagcagccggagaccgagcagccg

SEQ ID NO: 7155 - DNA, 488 bp, Homo sapiens
ttttttttttttttttttggcaggcttactccaggtgcaatgtggaaaatagagacaggggaacatttaagcgcagtttaggagcaatgagtggagcagaaccaggatggaagaagtaagcatgaggagaagcaggcagaagtcaggggtgtttggaggtgctgatggggggcagaaaggagcctaggagaaagaagagtattaggcttggtgggggtggtcatgcatcctaaaataattttgaggtcttcacagggggatattgaagtggctgttagagagatagggtttgaagtcaggagagagacataggttaagacataggtttgggttcatgttacagagacccaggacgacagtgatttatacaaaagaaagtgttagttctctgtcgtgtaattacactgaggcaggcagttcaggtgtcctgtgctggctgcagggattcaagctccttccatctcctggctcagccaaccctggcatgc

SEQ ID NO: 7156 - DNA, 404 bp, Homo sapiens
ccccgcaaaggatttttaaatctcttcatcaggacatgcttgatatctggattgggatagcttctggctggtcacccatttgatttggaatgctgctacctgttagggcagggatgggcgatgccatgctcggccccaaggtgccatgggtttgagtgacccacccaagccctccctctgccggcacccagactcctgctaggagtgaaggatggcagcaattttaggactcaacagagaaagggaggttgggcaggactaaagatagagagaccaatgaagagggtctctggcagaacccatcctggagatgcagcaggaagcaagacctcccatgatctaaggtgccaagcccagcgcatgctccgttgtcccttcagacttcacttataacacacaaactc

SEQ ID NO: 7157 - DNA, 873 bp, Homo sapiens
ggagcaggaggctgacaaggaggtagatgaagaaggggaagaaagtggggaggaagaggaggaggaaaaagaaggtgatggtgaggaagaggatggagatgaagaggaagctgagtctgctacaggcaagcgggcagctgaagatgatgaggatgatgatgtcgataccaagaagcagaagaccgacaaggatgactagacagcaaaaaaggaaaagttaaactaaaaaaaaaaggccgccatgacctattcaccctccatttcctgtctcagaatctaaacgtagtcaccttccagtattgaggcccgcccccccaccatgggcagtgccacccacagatgacacacactctccaccacccaacctaaaccgtaagaatttgcaacaggggaggaaaaaacaaccaaaacttccaaggccctgctttttttcttttttcttttttttgaggcagagtcttgctctgtcacccaggctggagtgcagtggtgcgatctcggctcactgcaagttcctcctcccgggttcatgccattctcctgcctcagcctcccgagtagctgggactacaggcgcccgccacgacacccggctgattttttgtatttttagcagagatggggtttcacagtgttagccagtatggtctcgatctcctgacctcgtgatccacccacctcggcctcccaaagtgctgggattacaggcgtgagccatcgcgcccggcctgctttttttcttaaaagtactttaaaaaaagaaatttgcttgtatttttaatttacattttatatttttgtacatattgttagggtcagccacctttaatgatctcggatgaccaaaccagccttcggaccgttctccgtcct

SEQ ID NO: 7158 - DNA, 712 bp, Homo sapiens
tgggagtggcagggtagatggggatactacattttaggacacagcttttcatgagtatatatgccagtgtgaaatctctgaagactttagaaaaattactaatagtgaatttttactcccatacattgggaagaggggagtgattccaaaatcaacttttagaaaccagccatataactgtatccatgtatttcatgctatgatttaagcctcatactccctatggtatgtaaaactcatactcatatgtaagcctcatactccctatggtagtaaaacttaaggccagcaggtaaagattatttctgcatatagatgggattctgtttctttgctgaatttgaatgaataacaccttacatggcataaatatagagtaggattgcccaggtatgaaccccaatttcactaaaatagtaacatgaataatgtgagcaagattacctcttcaaatctcagttttcaccttgatataatagaaataacaacagtgacttttctgaaaagttgctgggcagagtaaaggtggtaatcctttcaaggatctcaatatgatacctgataggcagctaagcactagagagtaactgctattattattactgttgttattattatgtttgcataatactgacatgtttctacttaaattctatcgctgagtgtatttggtatctctaataaaagaaagcattttgaaataaaaagaaaa

SEQ ID NO: 7159 - DNA, 464 bp, Homo sapiens
gaccacatcacagctgcaagttttgctttgttcattgaaggtgattttttagttttaaaatatatatatctcataatatacaatgttgatggtatatcaatccatcaagcattttattagaaagactttataatattattaatttttctttagttttcagtagataaattttcagtctcatcatgggagttagaaaataccagcatcacttaattgtaaagagaaaatgtgaaagtattttccaatccaatgtttcaagtgcctcacttattgtgaatctcaaatatcatcttgagatggtttaatggcagtttggccaagtgatttctaagagattttattaatttatgcattaacaatagtattcaactttcttaggcattataacctaacccgatcatttgattggaataactgaatcattcattgattggaataaaataaagaaaacaaaatgcatctca

SEQ ID NO: 7160 - DNA, 513 bp, Homo sapiens
gaccacatcacagctgcaagttttgctttgttcattgaaggtgattttttagttttaaaatatatatatctcataatatacaatgttgatggtatatcaatccatcaagcattttattagaaagactttataatattattaatttttctttagttttcagtagataaagtagtttcagtagataaagactttataatattattaatttttcttttagttttcagtctcatcatgggagttagaaaataccagcatcacttaattgtaaagagaaaatgtgaaagtattttccaatccaatgtttcaagtgcctcacttattgtgaatctcaaatatcatcttgagatggtttaatggcagtttggccaagtgatttctaagagattttattaatttatgcattaacaatagtattcaactttcttaggcattataacctaacccgatcatttgattggaataactgaatcattcattgattggaataaaataaagaaaacaaaatgcatctca

SEQ ID NO: 7161 - DNA, 617 bp, Homo sapiens
aatgttactctacaatagacagatgtggtagttgccactttaaccaagagctcgaatttagcataatgaattgtggataacttaacatcatgtacttcctgtagtgatacaatgtgaagtacacagtattatctatgacttatcgtcatcaaaaatgtttaacctggctgggtgcagtggctcaggcctgtaatcctagcactttaggagactaaggtgggagagttgttgaggccagtagttggagaccagtctggcaacatagcaagaccctgtctctacacacatagaattagccaggtgtggtggcatgtgcctgtagtccaagtgacttgggaggttgaggcagaagggtcgattgagcccaggagttcgagactgcagtgagctatgatcgtgctactgcactccagcctgggtgacagagcaagaccctgtctcaaaaaaaaaaaaaaaagaaaaagaaagaagtgtaacccaaatctaatcaagctgagtgtagaactaacttcaagtttacgggaatttagtgagtaggggaaaatgttaaacaataccttaagataagtacagaaatgggacataccagtgtagattctttaaatagctttggtcat

SEQ ID NO: 7162 - DNA, 337 bp, Homo sapiens
ctttctcttttagccaagtaattagaattgtcagttttatttattagatttaacccacacagtcaaagagttcagtcaaagggaaacaaaaatagtgatggttcaaccttgtcagtgaatgaataatttaaattaaaatattttcttattgttttatatgtatatccaattatttaagaattaatgcaaattataattaaaactcataccttgatagtgatgtaataaattgatacaaacttctaggagaccagtctgaaaatatgcattaaaaagcatcatgttcttttactgcattacttttcttctgtgattttagcctaaagaagtaattcag

SEQ ID NO: 7163 - DNA, 299 bp, Homo sapiens
taaagagcatttcaggagaggaaagaaactataaaggcctgaaggttcttaaccttagcatctttaagagatagaaagggccgggtgtggtggctcacacctgtaatcccagcactttgggaggccgaggcaggtggattgtgaggtcaggagttcaagaccagcctggccaagatgatgaaaccccgtctctactaaaacctacaaaaattagctggccgcggtggcaggctcctataatcccagctactcaggaggctgaggcaggagaatcacttgaacccaggtggcccaggttg

SEQ ID NO: 7164 - DNA, 369 bp, Homo sapiens
tccaaggtggtcctgttgactttgccatcagcacccttcgacccctgccagcagttccccacctacttagaatcatggtgacacagaccacagcctgaggccaccatggggagcggtctggggatgcagccaaggctgccgcagcctctccctacagggttgggcacaggtgggctgctcttgcaggtgaccacccggttttcctggggaacatctttgaaaacgcgatagtgctgacctgtcccgtgcggtttctaacgcaggcactttaaaaagaaggcccaggctcgatcccgtctttctagttttgtttcacaatgtgaaaattactgctattctttgtaagtgtgcagatgctatgtactcatg

SEQ ID NO: 7165 - DNA, 298 bp, Homo sapiens
ttaaattttctgaaattctctaccatttaaacagtaagtttgaactaccttgaatggaattgataaatactgaatcaactgtaacaatgaatgaaatgaagcttctttctgtttcattagaacttctaaaaacaagattgtatgaaaaaatatagggttatttaataggctttcacagaatattggtaatttcaaattatctaattggttagatagggtcaggattagggtctgaaactatgtattggttgggaaacaatttgtttattttcatactatatattaaagataaaaccat

SEQ ID NO: 7166 - DNA, 515 bp, Homo sapiens
aatcaagatgtaataaagatggaactcagtattgtcactacttagtatctctggcatctgactaattatgttctttacagtcagagtttagggtagtttatgaccaattatgagaccccatcaggactttttttccatattgatgtctgtgtttgcttgatcaacagatttttttaataaaattattttctatgtcttcagcatttttagcgataacagaaaggctgatttacaagagtttatcatacatactgtattggtaagcaattaagtcaaggagacctgagtttaaatacagttctttacttagctgcttacatgaccttagccaaattacttaacctccctgagctgtaattttctcatttgtaaaatgaggatgacaacagtactttagtagaattaagttaaatgtgtagtatttaacaaaataaggtgtatacctagtctgtgctgattagtaaaaaaataacacagcctttcagagtggtagatctttaaaaaaaaaaaaaacc

SEQ ID NO: 7167 - DNA, 502 bp, Homo sapiens
attgcagcttggattctggcacaaacatgggatctctgaatggaagcaatgaattctggttttactggtgctgaggttatgctaatcagttttggggttttcagtctgtgtgagagatctctgattctaggtctctccaactgcttagccctgaatcttcttccaacctttgggaaaccacaggtccttcagggggtcatggtggagtagacacctaggatacaatttaggcatggccccactttcaaaaagggtcccaaatatgagattccagctgtatcaccaatgatatcacccattgaaactcaggcagaatgaagagaacacattcaccatcagttacatgctggcagaagtcaaccctgaatcaatgctttataattcctgtactgatcttgtgagtagaacaacagtattgcatggcatttttgtggttgtaagcatacatttataaaatacacagattttaaagccataaaaaaaaagtcgacgccgccgcgaa

SEQ ID NO: 7168 - DNA, 441 bp, Homo sapiens
gccagcttgtggcatttctgtcagaaacccagctggcatgaaagtgggtttttcatccagcctggagtagccccctgcattcagaaattctttgcctgactacagaagtctaaatcaggactcactttcccccgagctagaggaggaggaatgtgaagccttggaaagagtcggcaccattctgggagtcagattagtacaccccaagaaagggagagtggctgggccagctgcgacacagtccccaaccgctacccgttcctccaccgcccaccaagcccagagcagcctccctcagccagaagacagctcggaggatggaagactgttcaacttgtggcttaagcacattattaaaaccaaagaggaaaattctttgaagagatggggtggagctgaatttaagagaaataataaaaaccatgaccaggtttttctgtg

SEQ ID NO: 7169 - DNA, 326 bp, Homo sapiens
ctctgtgtttaaaaatgtcctacaaatctcaaagaattaatcacttaggagtgtcatctaactctgattttatgacagcccagagttgttcattttacttcagggcatttgagaaatcatccatttatcctctttcaggttttggaaaatatatcttgcgactgccacagattgcatatcctagaaagtgagcttattctggctgaagggaaagaatgtttcagcaagagtggaaattgtaatgggccactcatgaataaaccctacatgggacctgagacccctggcatgaagagtactagcagtttatttaccagagattgact

SEQ ID NO: 7170 - DNA, 413 bp, Homo sapiens
tgccgagaggggcagacaatgaatccttcccgtgtcttaaggacaagcagctgaggccaccccccccctccagctccccctttctgttcccgccaagcttgggaaacacctgctggggaaatcaaaccacagacccatctgctcctctccaccctgttgccacccgggccccaattaggcccagagctgcactggcccggaaagggcctctctcctggttagggctgggcaggggcagggcaggggcagagctggggcactgggacactgggacataggtcagagacccatgcttgaatctccagctccttcgcaggctcacggtacaagttgggggaaatgttacacatctaaggagcctcagtttcttcctctgtaaatggggtaaaaatgcctacctcaaggggctattg

SEQ ID NO: 7171 - DNA, 517 bp, Homo sapiens
aactttttacttctcgtgagggaatatgattgaatcaaagatcactcccatgatgatacacattctgaaagggacttcatgtgtccccttgtgttggaggcacaacacttttcatgtggatgaaaagctaatagaggatgttgaaggggaaaaggtgtggccctgtaccaatggaactgcctgggccattggcctccagttgcttcccagccagtgagaccctcagcaggagttgggagggaagaaaacaaaatcaggacatgtatacccctggctcttcccaggaggaggttgccttgtgctgctgatgtttcacaaccaaaggtcactgctgatctcatagcaataactacagaacacttcccttctaggttccagcaaatgctggctaccctcaccctgcctggcctacatgtggttacagatttcccacaattactatttgtaggatcctgactccctatacttctcatctgttttaaataaaccctctttaaattactctaaaaaaaaaaaa

SEQ ID NO: 7172 - DNA, 552 bp, Homo sapiens
tattggaaggacgctcaaaaagggcttaattttggccgtatacactgatcattcctgggggaaagaccaccattgcatgacaccttaatttacatttccccttccaacaagctgtttctggtacctggactgttgagtgagggctccctctaggggctctgagccaacatccctgtatacaggcgttttcaggcctgagccagaatgcatgtttaggcctaagaaagttgcctcctagggatggaggaggcgtcttaaatctatctttacggcccggcagggtggctcacgcctgtaatcccagcactttgggaggctgaggtgggcggatcacgaggtcaggagattgagaccatcctggctaacacgatgaaaccccatctctactaaaaatacaaaaaattagccgggcgtggtggcaggtgcctgtagtcccagctactcaggagactgaggcaggagaatggcgtgaacccaggaggcggagcttgcagtgagccgagatagcgccactgctacccagcctgggcgacagagtgagactccgtctca

SEQ ID NO: 7173 - DNA, 180 bp, Homo sapiens
caggtgacaggtggggccacaaacctcaaggcaggagtgcgggaggaagcacagcacctgggaccactggcagacccgtcccctgcctcggagatgcctgtccctcccgctgagatcaccgcccgcctgccctagcactgacgcactgaccacgttgctgtcctcagggcaacctgtctc

SEQ ID NO: 7174 - DNA, 394 bp, Homo sapiens
tgctgtgttgaaactggttagccttgcctgttgtatgagagtcgtgattgccactccagaataggactttttccttatttattagtgcctatttgaaatgtctaacatgcgaccgggcatggtggtggctcgtgcctgtaattgcagaactttgggaggccatggcgggtggatcagttgagcgtaggagttggagaccagcctggccaacatagcaaaaccccgtctctactaaaaatacaaaaaattagccaggtgtggtggtgcatgcctataatcccagctacttgggaggctgaggcataagaattgcttgaacccgggaggtggaggttgcagtgagccaggattgcaccactgcgctccagcctgggcaatggagtgagactgtctc

SEQ ID NO: 7175 - DNA, 585 bp, Homo sapiens
ttccaaatgactttggtctgattttatttttctgtgcgtgccacgtctggtttggcattgaggttatactaggcatacggtgtgagttttgaactctccatcttttcccaagttctagaacacagaaattatatgttccttaaaggtttggtagaattagcctataaaactatttacacctggttgctattggttgtttacttatattggacgaatttctgcaagccaattttaataactggtattttactatagtaagcttcattcagcttttcaaacttagtgcactaaagctgcacctgttcttgtgatacacgagctcctgcatagttataattatgccttatttcattcctagtgttttatgtgccttccatcttttcttctagatcagttttgttcactattatttcttttctagtaacttttcagaaagaaaggaaggaaggaggaagggaaaaatatataaaagctctactaacgcacccattttaaaaactagatacttcattaaaactgataggctgtcttttaaaaatcattctgtccagcaattttattattaatgaagactatgttgcttca

SEQ ID NO: 7176 - DNA, 1047 bp, Homo sapiens
caaatgtataatggtctgacacaatctgatgataccaccatctcatcgtagatctgttgtgaccagaaacctcatgtctatgaacaaagactccttttctcccctatctagttgcttcagtggcccctgccagtctttctttttcattcttcttctgagcttgcaggggtgacccttttatgagataccttaatcctttgcatgtctgaatacattgattctggctgtacttgaatcttgctatgtggaaaaccagattttctctttcaaatggcttgtactcccctcagtcattgtgtgttgatctcgagttgaactctgaggggccatcttacttcatgtccttggaaaaaacttcactgtagctgccatataagagcaaaatgctaatctcccattgcatttagccagcatcaccacctcttgaaaacacctttggcttccccacctcctggattaggacaggagcaccttcagtgtgcctcttcagcactgctgagtaaccctcatatcactcttaactgcctctttggtagtttattgattgttcatttccccactaaacttggagctttcagagggcagatgctctcttatttccagatcctactgtctagcgtagtgcctggcacctactcacactattcatttaaccagtttctgttgagcatccactgacacgtagccgaggctagtcactcagctacatgtcaggaataaaggcaaataaggttcttgccctcttggaagtcgaatttcgttcgaggtgagggaggatataaaaagacaaaatagtactcatgataaaacctacaaggaaatagacaatagaatgaggtagagaataattgggatggtctgttgggcatgtacttcaggtgatcggaaaggtctctaaggaagtgccatttagacacaccataaaggcctggtgcagtggctcacactgttaatcccagcactttggaaggccaaggcaagaggattgcttgaggccaggagtttgagaccagcctcgccaacacagcgagatccccatctctattt

SEQ ID NO: 7177 - DNA, 2437 bp, Homo sapiens
  misc_feature (360)..(360): n is a, c, g, or t
  misc_feature (1202)..(1202): n is a, c, g, or t
gcaggtaaaagaaacagggcattgccagcccccataaggccatgtcccctgacaatcatagccctgtatcttccaccaaaggtagaaattatgttaagttttatggtagccaattccttactttccttacacatttaccacctaagtatgtcaccctaaatgatataaattagttgtgcttgttatttaacttcatgtagatgaaattgtagtgtatgtagtttgtgttttgggcttcatttgctcatagttacgtttgtgagatttcatgaagctaaagtttgttcattttccttgttgtattttattgtgaaagttcacccactgtatttattcatcctgttgtttttgttatgatanataatgctgctgtgaacattattgtacctgttctttggtgccttgtgcatatatttctattgggaacacaccaaatagtgaaattgttgtagatgtaatgccatgtatgagagttcctgttgttttgtatactctccaaacttagaactgtcagtctctttaattttagccattctggcatgttcacaggagtatcacattgtgggtttaatttgcatttccctgattacttattactaataatcttttcatatgcttattttcttttagaacgtgcctatgcaagtctcttgtccatttttcaactgttttctatttcttatgaatttgtaggagttctttgcagcttctggctatgcatccttcattaattttgtgtgttgcaaatatattcttccattttgtgacttgtctttttagtctcaaaacagaatcttttgatgagaagaatttcttaattttgatgtaacctcatttatcactcttttccttcatggttggcacttgttgtgtcttgtttgacaatgttgcctatcccaaagtcatgaagattttctcttatgttaacttctaaaagttgtatcatttgtcttttatatttatatctacataatgcacctggaattgagttatatgaatgctgtgaatttgggaggggcgtgtttcctttttttcccacatggatatccaatcaactcagccacatttactgggggaagacatctttttttctaatgcgctgtagtgttaggtttttcaaaacttaggtgtctgtatatgtgtgggtctgtttatgagtctgtctattcttttccactggtctgtttcctacacttgtgccnatgccacactgtcttacttatagctctataagtcttggtattgttaaggaaaaatatttgtaacatttgttaaaaatggcagagaagactttattcaaggaggggaacattgtgataggtagagggactgctgcaacgaggtcttgctgtggtgaggagagagattgggctggagtccaacttctacaaggacaagaggggatttatagtcaagcagcagggtggggtcagtggatggaagaggaaacatcagagacaggggtattcttgctagaccaactcaacagaattcttgctgaaggcaggccagggtgataagatatcaagagttaggggtgaggacagataccaagggtggagaattttcactaaaactagtaggattcttgcttaaactggattctataagacagaaaaggaagcccaaggtcagggtctagtggaagagaaggctccggggagcccgacctgagtttgatctaggagagtctttgtcaatatcctgtagaatatgaccttcacctcattttcttttcctcaagtgtatctggactgtatttggccttttgggcttccaggtgacttttagagtaagtttatcaagatctacaaaaatagctactgagattttgatttgaatagtatttcttcctgataatttctgagtaaaattcattttaaggaagtaggaggggcagtggcctgatgaaaagcaaaaatgaagaaaagaataaggaaagacacagttttgccatcaccagccagtgtttagtgatcttaaaatagctgcttttgtttttgagcatcatttgttgggtatggagttgcagaagttgggttgagggacactggcttctagaatcaaatattggcctccatagagtgtttctgtacagtgagttgggaggatgggcaggggccactgaggactgtggcgtgtccccacgttagagtgtatctcacacagagcctgtcctgaaaatatagttatttttaaaaagtgtttccccctccttttcattggccattttctcttttactactctttacctagcaaagggtgggcatgagaaacctggtcagtggaagagaaagccattttgcaacagtggttataggggtgggagagtaaaatttcctggttcctggggaagctaagcccattggtaggaccagacttttgtatgtgtgtttcttcctttagtcatctactaaggttaataaataccttaaaa

SEQ ID NO: 7178 - DNA, 451 bp, Homo sapiens
gttagtaaactgtggagccaacattcaaataccagggaactcttgattacaaaatccatgttcttaaccactatactatattgcttgtaaaaatcagaactccttaggggtcatgttttatacctaaagaattaattttattatggtttatttgaaaaaaataaatgagaaacctgataaggaaaaagtatgagtgggaaattaccatactagataataaaatgcagtatgaggctacattgttcttcttctttatttatttttattttttttgagacagggtgtggctatgttgcccaggctggtctcgaactcctgggctcaagtgatccgcctgccttggcctcccaaagtgctgggattacaggcgtgagccaccgtgcccagcccaaggctgtgttgtttaaaacacattaaatactggcataggagagagttgagtggaatggga

SEQ ID NO: 7179 - DNA, 452 bp, Homo sapiens
ttttttttttttttttgagacggagcttcactcttgttgcctaggctggagtgcaatggtgtgatctaggctcactgcaacctccacctcccaaactcaagcaattcaccttcctcagccttctgagtagctgacgggggaggatggcttgagcctgggaggtagaggctgcagtcaggcaagataatgccgctgcactccagtctgggcaacacagccagacattatctaaaaaaaaaagtgttattgtaaaatttgcccaataatatagtcaatacaatataactcataccatgaagcaactgctaaaattgctactgcaatcttaggctatattagtaaaagcatacatacaagtaacatgagctaatattgccactgtaatctataaagtttagatgacaatcctagaataaaatttcaattatgaacatctagattgtaagaatatg

SEQ ID NO: 7180 - DNA, 2717 bp, Homo sapiens
  misc_feature (59)..(59): n is a, c, g, or t
  misc_feature (78)..(78): n is a, c, g, or t
  misc_feature (512)..(512): n is a, c, g, or t
  misc_feature (872)..(872): n is a, c, g, or t
  misc_feature (1424)..(1424): n is a, c, g, or t
gtcatcccctcttctcctcaggaactgctcaaacctgtgccccaaagatgagggcccangaggacctcgagggccggncacagcatgaaaccaccagggacccctcgaccccgctacccacagagcctaagtttgacatgttgtacaagatcgaggacgtgccaccttggtacctgtgcatcctgctgggcttccagcactacctgacatgcttcagtggtaccatcgccgtgcccttcctgctggctgaggcgctgtgtgtgggccacgaccagcacatggttagtcagctcatcggcaccatcttcacgtgcgtgggcatcaccactctcatccagaccaccgtgggcatccggctgccgctgttccaggccagtgcctttgcatttctggttccagccaaagccatactggctctggagagatggaaatgccccccggaagaggagatctacggtaactggagtctgcccctgaacacctctcatatttggcacccacggatacgggangtccagggtgcaatcatggtgtccagcgtggtggaggtggtgattggcctgctggggctgcctggggccctgctcaactacattgggcctctcacagtcacccccactgtctccctcattggcctttctgtcttccaagctgctggcgaccgagctggctcccactggggcatctcagcttgctccattctcctgatcatcctcttctcccagtacctgcgcaacctcaccttcctgctgcctgtctaccgctggggcaagggcctcactctcctccgcatccagatcttcaaaatgtttcctatcatgctggccatcatgaccgtgtggctgctctgctatgtcctgaccttgacagangtgctgcccacagacccaaaagcctatggcttccaggcacgaaccgatgcccgtggtgacatcatggctattgcaccctggatccgcatcccctacccctgtcagtggggcctgcccacggtgactgcggctgctgtcctgggaatgttcagcgccactctggcaggcatcattgagtccatcggagattactacgcctgtgcccgcctggctggtgcaccaccccctccagtacatgctatcaacaggggcatcttcaccgaaggcatttgctgcatcatcgcggggctattgggcacgggcaacgggtccacctcgtccagtcccaacattggcgtcctgggaattaccaaggtgggcagccggcgcgtggtgcagtatggtgcggctatcatgctggtcctgggcaccatcggcaagttcacggccctcttcgcctcgctccctgaccccatcctggggggcatgttctgcactctctttggcatgattacagctgtggggctgtccaacctgcaatttgtggacatgaactcctctcgcaacctcttngtgctgggattttccatgttcttcgggctcacgctgcccaattacctgagtccaaccctggcgccatcaatacaggcattcttgaagtggatcagattctgattgtgctgctgaccacggagatgtttgtgggcgggtgccttgctttcatacttgacaacacagtgccagggagcccagaggagcgtggtctgatacagtggaaagctggggctcatgccaacagtgacatgtcttccagcctcaagagctacgatttccccattgggatgggcatagtaaaaagaattacctttctgaaatacattcctatctgcccagtcttcaaaggattttcttcaagttcaaaagatcagattgcaattccagaagacactccagaaaatacagaaactgcatctgtgtgcaccaaggtctgaaaaatgacttccaggaaaggaagcatggtatataacaggaaaagaaaactacatggggaaccagaagacctaagcctgaaatcccagccctgcccctaactaacttctgtgtaaactcagataagtcacctttctctgggattcaaatttttgcatcagttaaaaaaaaaggggtgggggggaatgggccaaagtctgagtcttagagacttgtaccaatgttatgctatgtctctaaatctttactctcctaagtagacttgtcagcatctaggaagaacagctagaaattttcctctgtgatattttagactgcaagttgaaaaaaataaaaagaaatgagggcaggttccagggcctgaaatgtaggtatgctgcaaggcttttacattgaatttgaccctacatcacttcaagactaatgcataatattaaacatcatgttgaagaaataattttagtttcgtaatttatacatagcagtttctttggacaggatatattctcccttcccccaagggaaataatgtatctacattttaaaagtgtgaagtttaagaaaaaaaagcagcattccttttctctttttttgagacatggactcgctctgttgcttagactggagggcagcggaacaatcacagctcactgcagcatcggcctcctgggctcaagtgatcctctggcctctgcctcccaagtacctgggaccacaggcctgtgccaccacacccagctaactttaaactttttgtagaaacagggtctccctttgttgcccaggctggtctcgaactcctgggccaaagtaatcttcccactttggcctcccaaagtgctgggattacaagcatgagccaccacatccaggcac

SEQ ID NO: 7181 - DNA, 2297 bp, Homo sapiens
  misc_feature (59)..(59): n is a, c, g, or t
  misc_feature (78)..(78): n is a, c, g, or t
  misc_feature (512)..(512): n is a, c, g, or t
  misc_feature (872)..(872): n is a, c, g, or t
  misc_feature (1424)..(1424): n is a, c, g, or t
gtcatcccctcttctcctcaggaactgctcaaacctgtgccccaaagatgagggcccangaggacctcgagggccggncacagcatgaaaccaccagggacccctcgaccccgctacccacagagcctaagtttgacatgttgtacaagatcgaggacgtgccaccttggtacctgtgcatcctgctgggcttccagcactacctgacatgcttcagtggtaccatcgccgtgcccttcctgctggctgaggcgctgtgtgtgggccacgaccagcacatggttagtcagctcatcggcaccatcttcacgtgcgtgggcatcaccactctcatccagaccaccgtgggcatccggctgccgctgttccaggccagtgcctttgcatttctggttccagccaaagccatactggctctggagagatggaaatgccccccggaagaggagatctacggtaactggagtctgcccctgaacacctctcatatttggcacccacggatacgggangtccagggtgcaatcatggtgtccagcgtggtggaggtggtgattggcctgctggggctgcctggggccctgctcaactacattgggcctctcacagtcacccccactgtctccctcattggcctttctgtcttccaagctgctggcgaccgagctggctcccactggggcatctcagcttgctccattctcctgatcatcctcttctcccagtacctgcgcaacctcaccttcctgctgcctgtctaccgctggggcaagggcctcactctcctccgcatccagatcttcaaaatgtttcctatcatgctggccatcatgaccgtgtggctgctctgctatgtcctgaccttgacagangtgctgcccacagacccaaaagcctatggcttccaggcacgaaccgatgcccgtggtgacatcatggctattgcaccctggatccgcatcccctacccctgtcagtggggcctgcccacggtgactgcggctgctgtcctgggaatgttcagcgccactctggcaggcatcattgagtccatcggagattactacgcctgtgcccgcctggctggtgcaccaccccctccagtacatgctatcaacaggggcatcttcaccgaaggcatttgctgcatcatcgcggggctattgggcacgggcaacgggtccacctcgtccagtcccaacattggcgtcctgggaattaccaaggtgggcagccggcgcgtggtgcagtatggtgcggctatcatgctggtcctgggcaccatcggcaagttcacggccctcttcgcctcgctccctgaccccatcctggggggcatgttctgcactctctttggcatgattacagctgtggggctgtccaacctgcaatttgtggacatgaactcctctcgcaacctcttngtgctgggattttccatgttcttcgggctcacgctgcccaattacctgagtccaaccctggcgccatcaatacaggcattcttgaagtggatcagattctgattgtgctgctgaccacggagatgtttgtgggcgggtgccttgctttcatacttgacaacacagtgccagggagcccagaggagcgtggtctgatacagtggaaagctggggctcatgccaacagtgacatgtcttccagcctcaagagctacgatttccccattgggatgggcatagtaaaaagaattacctttctgaaatacattcctatctgcccagtcttcaaaggattttcttcaagttcaaaagatcagattgcaattccagaagacactccagaaaatacagaaactgcatctgtgtgcaccaaggtctgaaaaatgacttccaggaaaggaagcatggtatataacaggaaaagaaaactacatggggaaccagaagacctaagcctgaaatcccagccctgcccctaactaacttctgtgtaaactcagataagtcacctttctctgggattcaaatttttgcatcagttaaaaaaaaaggggtgggggggaatgggccaaagtctgagtcttagagacttgtaccaatgttatgctatgtctctaaatctttactctcctaagtagacttgtcagcatctaggaagaacagctagaaattttcctctgtgatattttagactgcaagttgaaaaaaataaaaagaaatgagggcaggttccagggcctgaaatgtaggtatgctgcaaggcttttacattgaatttgaccctacatcacttcaagactaatgcataatattaaacatcatgttgaagaaata

SEQ ID NO: 7182 - DNA, 400 bp, Homo sapiens
cctgctctgagcctcatctccccagctgcaaaatgaagagttatacccacctggagagcgttggggaggaaaaagtaaaatgctgtccaaagccattctacccaggcaccaagctaaggcctttccagggatgactctttctcacttggtatagagtcagataaactaagataagtaaaataagcaagtaagatacagtcagctcttcaccagacatttgcagaggttgatattgttttcttttttgacttgttttattttcattttatttttgagacggagttttgcccttgtcgcccaggctggagtgcaatggtgcggtctcggctcactgcaacctctgcctcctgggttcaaatgattctcctgcttcagcctccaagtagctgggattacaggc

SEQ ID NO: 7183 - DNA, 379 bp, Homo sapiens
gctttcttttggctaatgataaccttccagcaccacgagtttggactgtgctaatgtcttctagtactgtttagaagttgaggtaaaaagaaaacggtaattgaaagagacagttgttgtttacattggggaggttggtattccaccccctgtgctttttcattagctgtattgtattcttattatgtgttttaccgggtaattgtaattcttggctttggattttgtcccttttttaggctgcggggcgggggggtcggttattttataagcaaagaagtacagccagtatgattctgaagcaactaggtcacagtagaaaaaagttggagagtgaaatctcaagcaagccaaaaagtgatagatgagttaaaaaaaa

SEQ ID NO: 7184 - DNA, 480 bp, Homo sapiens
acacatatataagcatcagataaatattttaatattatttgtacattatatatctatcagtgattgtaatttgggatcacttttctttcttccaatttcatagtctccttgaaagctgaaaatacgaaaatacaatttgaattaatttccaggtgctgctataacaatgtgggtgtcataaaacaataaaaaatggctcacgcctgtaatcccagcactttgggaggccgaggcaagcagatcacaaggtcaggagttcaagaccagcctggccaagatggtgaaaccccgtctctactaaaaatacaaaaaaaaatagccaggtgtggttgcgggcacctgtagtcccaggtactcaggaggctaaggcagagaattgcttgaacctgggaggtgaaggttgcagtaagcagagatggtgccattgcactccagcctgggtgacagagctagactctgtctcaaaaacaaacaaacaaa

SEQ ID NO: 7185 - DNA, 475 bp, Homo sapiens
agcacagcaatgggtttcaaaattctgatttcccaggcccactgacattgttcaagggtagattccagtgcacagctgtaagaagaagacaacagccttttgataaagaaatgccaagaaattcagtgtggaatctataatggaaacacttggcttctagggcagtaagtccacagtatgtcatttgcagttgaaatgtggagccagcatttatgtgaagcctcttggtcctcatctcaactattgtccactgtattttttattcataatattcccccttctttcataattctgaccccctctctctttaatttagctactgattttatttgtggaagttgtaccttttactcacttggctagcatttatttaataaagggatctggatggggcacacgtagcatccactactgacatggccacagtactgcctctctgagttataaaccaatgctctttcttgatttgcctacc

SEQ ID NO: 7186 - DNA, 404 bp, Homo sapiens
atcacctgaggtcaggggttcgagaccagcctggccaacatggtgaaaccccatctctactaaaaaatacaaaaattagctgggcgtggtggcagctgcctgtaatcccagctactcaggaggctgaggtgggagaatggcttgaacccaggaggcagaggttgcagtgagccgagatcgcgccactgtactccagcctgggtgacagagtaagactctatctatctatctatctatctatctatctatctatctatacacacacacacacacacacacacacacacacacaccctgtatgattaatgatagaaaggggaaggggacttaatgaagagtccacttctcaggggccatgactgttggcaggtttctttccttttgctgtcaatttatttggagaa

SEQ ID NO: 7187 - DNA, 408 bp, Homo sapiens
gaatttaataagtataaacataaacacaaggaataatagttgcactttttcagtctgtacattatgttcccggctggtgcatgcaccaccctgtgaaatacataatcccaagtgctggacttgttataggatgtcaagtgtttggcttatggtttcatttactttcttaccaatgaatgtctcaccatacactgactcttcaatgtaagactcctttgagtgcccctctggagcagagtggaagaagacaaaagataattcaatacacatttcgcataaaaaccaaatatatattttaaattccaagagaatttgaactgttgaaaacttacagtgcttaaggctgatggaaacctcgaacagtgtttgaattaaagtttcagtgataataaagttgatattatacat

SEQ ID NO: 7188 - DNA, 245 bp, Homo sapiens
tatctcccaatataactatttcccactacagtgatcttaatccagccactctcttgctgggacttttcgacaaaatccctcatgactatgttgtaatgattgactgacttgttacccccagggcagacctacaatagatgccactggataaagccaaaatagaatggtatacaggtggatcttatttaagaggagaggatggaaattttagagcaggatatgctgtggtttccttatggaggtaa

SEQ ID NO: 7189 - DNA, 497 bp, Homo sapiens
gtagtatatcaagatagcatcaaaatgataggctaggtaatacaggcaataagtagcaaaggcagaagcaggaagccaaggtcttggtgaggctgaccgatgggcaccctctcccagggcaggcggcttcccgctcccaccagggcccggtgggtcctgggttttctgcaaacatggaggaccactttctgataggacattttcctttcttctttctgttttctttcccttgttttctttcttcctttctgtattttactgaagatatttcatttattgtatattttatatacatgtgcaagactttctataggatatagtcttaaaaagtgaaattgtttggccatagttggcagcaggtgagcctcacctgacaagcatacaggagccagatgaacagcacatgcttacccttttaactgtgcacttctgtatccctggtatcccgtgagcttgaaactctggaccagatttctttggagatgtctgtgctacca

SEQ ID NO: 7190 - DNA, 302 bp, Homo sapiens
ggagctgggtcaaccctccctgaataaatgccattgtctttccttggaagatagcaccaaggaggtcttcatgcgtaacgtgtgaccaggtcctctccagccacagcagactgtttctgctcgtggaaggtgccttaagtaactgctcaccccccttcttgtctctgcaataggtctatgagatcttgaagagaacgacgtgtacaaaggccaagtacagcatgggcatcacgagcctgctggccaatggtgtgtacgcggctgcatacccactgcacgatgtaagtaaccttgacacacga

SEQ ID NO: 7191 - DNA, 3950 bp, Homo sapiens
cggctcggtacccatccccactgtgtgctcgagttctgaaactgaagatgccgacgaagaagatgtaccacattaatgagacccgtggcctcctgaaaaaaatcaactctgtgctccagaaaatcacagatcccatccagcccaaagtggctgagcacaggccccagaccatgaagagactctcctatcccttctcccgggagaagcagcatctatttgacttgtctgataaggattcctttttcgacagcaaaacccggagcacgattgtctatgagatcttgaagagaacgacgtgtacaaaggccaagtacagcatgggcatcacgagcctgctggccaatggtgtgtacgcggctgcatacccactgcacgatggagactacaacggtgaaaacgtcgagttcaacgacagaaaactcctgtacgaagagtgggcacgctatggagttttctataagtaccagcccatcgacctggtcaggaagtattttggggagaagatcggcctgtacttcgcctggctgggcgtgtacacccagatgctcatccctgcctccatcgtgggaatcattgtcttcctgtacggatgcgccaccatggatgaaaacatccccagcatggagatgtgtgaccagagacacaatatcaccatgtgcccgctttgcgacaagacctgcagctactggaagatgagctcagcctgcgccacggcccgcgccagccacctcttcgacaaccccgccacggtcttcttctctgtcttcatggccctctgggctgccaccttcatggagcactggaagcggaaacagatgcgactcaactaccgctgggacctcacgggctttgaagaggaagaggaggctgtcaaggatcatcctagagctgaatacgaagccagagtcttggagaagtctctgaagaaagagtccagaaacaaagagactgacaaagtgaagctgacatggagagatcggttcccagcctacctcactaacttggtctccatcatcttcatgattgcagtgacgtttgccatcgtcctcggcgtcatcatctacaggatctccatggccgccgccttggccatgaactcctccccctccgtgcggtccaacatccgggtcacagtcacagccaccgcggtcatcatcaacctagtggtcatcatcctcctggacgaggtgtatggctgcatagcccgatggctcaccaagatcgaggtcccaaagacggagaaaagctttgaggagaggctgatcttcaaggctttcctgctgaagtttgtgaattcctacacccccatcttttacgtggcgttcttcaaaggccggtttgttggacgcccgggcgactacgtgtacattttccgttccttccgaatggaagagtgtgcgccagggggctgcctgatggagctatgcatccagctcagcatcatcatgctggggaaacagctgatccagaacaacctgttcgagatcggcatcccgaagatgaagaagctcatccgctacctgaagctgaagcagcagagcccccctgaccacgaggagtgtgtgaagaggaaacagcggtacgaggtggattacaacctggagcccttcgcgggcctcaccccagagtacatggaaatgatcatccagtttggcttcgtcaccctgtttgtcgcctccttccccctggccccactgtttgcgctgctgaacaacatcatcgagatccgcctggacgccaaaaagtttgtcactgagctccgaaggccggtagctgtcagagccaaagacatcggaatctggtacaatatcctcagaggcattgggaagcttgctgtcatcatcaatgccttcgtgatctccttcacgtctgacttcatcccgcgcctggtgtacctctacatgtacagtaagaacgggaccatgcacggcttcgtcaaccacaccctctcctccttcaacgtcagtgacttccagaacggcacggcccccaatgaccccctggacctgggctacgaggtgcagatctgcaggtataaagactaccgagagccgccgtggtcggaaaacaagtacgacatctccaaggacttctgggccgtcctggcagcccggctggcgtttgtcatcgtcttccagaacctggtcatgttcatgagcgactttgtggactgggtcatcccggacatccccaaggacatcagccagcagatccacaaggagaaggtgctcatggtggagctgttcatgcgggaggagcaagacaagcagcagctgctggaaacctggatggagaaggagcggcagaaggacgagccgccgtgcaaccaccacaacaccaaagcctgcccagacagcctcggcagcccagcccccagccatgcctaccacgggggcgtcctgtagctatgccagcggggctgggcaggccagccgggcatcctgaccgatgggcaccctctcccagggcaggcggcttcccgctcccaccagggcccggtgggtcctgggttttctgcaaacatggaggaccactttctgataggacattttcctttcttctttctgttttctttcccttgtttttgcacaaagccattatgcagggaatattttttaatctgtagtattcaagatgaatcaaaatgatggctggtaatacggcaataaggtagcaaaggcaggtgctttgcagaaagaatgcttggaaacttgagtctccctagaggtgaaaagtgagcagaggcccctagaaaccctcctctgaatcctcctaattccttaagatagatgcaaaatggtaagccgaggcatcgcgcaaaagctggtgcgatgcttcagggaaaatggaaaacccacgcaagaataatgattgattccggttccaaaaggtgtcacctacctgtttcagaaaagttagactttccatcgccttttccttccatcagttgagtggctgagagagaagtgcctcatccctgagccacacagggggcgtgggagcatcccagttatccctggaaagctagaaggggacagaggtgtccctgattaagcaggaaacagcacccttggcgtccccagcaggctccccactgtcagccacacacctgcccccatcacaccaagccgacctcagagttgttcatcttccttatgggacaaaaccggttgaccagaaaatgggcagagagagatgacctcggaagcatttccacagatggtgtcagggtttcaagaagtcttagggcttccaggggtcccctggaagctttagaatatttatgggtttttttttcaaatatcaattatatggtagattgaggattttttttctgtagctcaaaggtggagggagtttattagttaaccaaatatcgttgagaggaatttaaaatactgttactaccaaagatttttattaataaaggcttatattttggtaacacttctctatatttttactcacaggaatgtcactgttggacaattattttaaaagtgtataaaaccaagtctcataaatgatatgagtgatctaaatttgcagcaatgatactaaacaactctctgaaatttctcaagcaccaagagaaacatcattttagcaaaggccaggaggaaaaatagaaataaatttgtcttgaagatctcattgatgtgatgttacattccctttaatctgccaactgtggtcaaagttcataggtgtcgtacatttccattatttgctaaaatcatgcaatctgatgcttctcttttctcttgtacagtaagtagtttgaagtgggttttgtatataaatactgtattaaaaattaggcaattaccaaaaatccttttatggaaaccatttttttaaaaagtgaatgtacacaaatccacagaggactgtggctggacattcatctaaataaatttgaatatacgacacttttctcacttgaatgc

SEQ ID NO: 7192 - DNA, 3441 bp, Homo sapiens
  misc_feature (155)..(155): n is a, c, g, or t
ccaacaagctcaaagaagaccatgaacccgcacgacatcgtgcaggacgccaacccaaattctcaccctgcctaccagcagtacaccagcaagtccaccctggagcctgggcccacctggcgtggtggcgcccaggcctctccggctcccaagcnttcagtggcgcccgcgacaacgagaagactctcctgctcagctctgatgatgaattctaggtgcgggctgcagtggcggaagtgctggcgccatagccacggtcaggctgtgccccacctccagcctcaccaccaggccaggaggcagctggcacagtgctcacgccgcctttatttattggaccagaaacactcacatgtcgcttccagaggaacgggggacagccaggctcgcccatgggccttcaggaagtctctgaagaaagagtccagaaacaaagagactgacaaagtgaagctgacatggagagatcggttcccagcctacctcactaacttggtctccatcatcttcatgattgcagtgacgtttgccatcgtcctcggcgtcatcatctacaggatctccatggccgccgccttggccatgaactcctccccctccgtgcggtccaacatccgggtcacagtcacagccaccgcggtcatcatcaacctagtggtcatcatcctcctggacgaggtgtatggctgcatagcccgatggctcaccaagatcgaggtcccaaagacggagaaaagctttgaggagaggctgatcttcaaggctttcctgctgaagtttgtgaattcctacacccccatcttttacgtggcgttcttcaaaggccggtttgttggacgcccgggcgactacgtgtacattttccgttccttccgaatggaagagtgtgcgccagggggctgcctgatggagctatgcatccagctcagcatcatcatgctggggaaacagctgatccagaacaacctgttcgagatcggcatcccgaagatgaagaagctcatccgctacctgaagctgaagcagcagagcccccctgaccacgaggagtgtgtgaagaggaaacagcggtacgaggtggattacaacctggagcccttcgcgggcctcaccccagagtacatggaaatgatcatccagtttggcttcgtcaccctgtttgtcgcctccttccccctggccccactgtttgcgctgctgaacaacatcatcgagatccgcctggacgccaaaaagtttgtcactgagctccgaaggccggtagctgtcagagccaaagacatcggaatctggtacaatatcctcagaggcattgggaagcttgctgtcatcatcaatgccttcgtgatctccttcacgtctgacttcatcccgcgcctggtgtacctctacatgtacagtaagaacgggaccatgcacggcttcgtcaaccacaccctctcctccttcaacgtcagtgacttccagaacggcacggcccccaatgaccccctggacctgggctacgaggtgcagatctgcaggtataaagactaccgagagccgccgtggtcggaaaacaagtacgacatctccaaggacttctgggccgtcctggcagcccggctggcgtttgtcatcgtcttccagaacctggtcatgttcatgagcgactttgtggactgggtcatcccggacatccccaaggacatcagccagcagatccacaaggagaaggtgctcatggtggagctgttcatgcgggaggagcaagacaagcagcagctgctggaaacctggatggagaaggagcggcagaaggacgagccgccgtgcaaccaccacaacaccaaagcctgcccagacagcctcggcagcccagcccccagccatgcctaccacgggggcgtcctgtagctatgccagcggggctgggcaggccagccgggcatcctgaccgatgggcaccctctcccagggcaggcggcttcccgctcccaccagggcccggtgggtcctgggttttctgcaaacatggaggaccactttctgataggacattttcctttcttctttctgttttctttcccttgtttttgcacaaagccattatgcagggaatattttttaatctgtagtattcaagatgaatcaaaatgatggctggtaatacggcaataaggtagcaaaggcaggtgctttgcagaaagaatgcttggaaacttgagtctccctagaggtgaaaagtgagcagaggcccctagaaaccctcctctgaatcctcctaattccttaagatagatgcaaaatggtaagccgaggcatcgcgcaaaagctggtgcgatgcttcagggaaaatggaaaacccacgcaagaataatgattgattccggttccaaaaggtgtcacctacctgtttcagaaaagttagactttccatcgccttttccttccatcagttgagtggctgagagagaagtgcctcatccctgagccacacagggggcgtgggagcatcccagttatccctggaaagctagaaggggacagaggtgtccctgattaagcaggaaacagcacccttggcgtccccagcaggctccccactgtcagccacacacctgcccccatcacaccaagccgacctcagagttgttcatcttccttatgggacaaaaccggttgaccagaaaatgggcagagagagatgacctcggaagcatttccacagatggtgtcagggtttcaagaagtcttagggcttccaggggtcccctggaagctttagaatatttatgggtttttttttcaaatatcaattatatggtagattgaggattttttttctgtagctcaaaggtggagggagtttattagttaaccaaatatcgttgagaggaatttaaaatactgttactaccaaagatttttattaataaaggcttatattttggtaacacttctctatatttttactcacaggaatgtcactgttggacaattattttaaaagtgtataaaaccaagtctcataaatgatatgagtgatctaaatttgcagcaatgatactaaacaactctctgaaatttctcaagcaccaagagaaacatcattttagcaaaggccaggaggaaaaatagaaataaatttgtcttgaagatctcattgatgtgatgttacattccctttaatctgccaactgtggtcaaagttcataggtgtcgtacatttccattatttgctaaaatcatgcaatctgatgcttctcttttctcttgtacagtaagtagtttgaagtgggttttgtatataaatactgtattaaaaattaggcaattaccaaaaatccttttatggaaaccatttttttaaaaagtgaatgtacacaaatccacagaggactgtggctggacattcatctaaataaatttgaatatacgacacttttctcacttgaatgc

SEQ ID NO: 7193 - DNA, 1413 bp, Homo sapiens
cctgtgtctcgcttactgtgcggctatatccgctgattgcagcgactttgcacaaagccattatgcagggaatattttttaatctgtagtattcaagatgaatcaaaatgatggctggtaatacggcaataaggtagcaaaggcaggtgctttgcagaaagaatgcttggaaacttgagtctccctagaggtgaaaagtgagcagaggcccctagaaaccctcctctgaatcctcctaattccttaagatagatgcaaaatggtaagccgaggcatcgcgcaaaagctggtgcgatgcttcagggaaaatggaaaacccacgcaagaataatgattgattccggttccaaaaggtgtcacctacctgtttcagaaaagttagactttccatcgccttttccttccatcagttgagtggctgagagagaagtgcctcatccctgagccacacagggggcgtgggagcatcccagttatccctggaaagctagaaggggacagaggtgtccctgattaagcaggaaacagcacccttggcgtccccagcaggctccccactgtcagccacacacctgcccccatcacaccaagccgacctcagagttgttcatcttccttatgggacaaaaccggttgaccagaaaatgggcagagagagatgacctcggaagcatttccacagatggtgtcagggtttcaagaagtcttagggcttccaggggtcccctggaagctttagaatatttatgggtttttttttcaaatatcaattatatggtagattgaggattttttttctgtagctcaaaggtggagggagtttattagttaaccaaatatcgttgagaggaatttaaaatactgttactaccaaagatttttattaataaaggcttatattttggtaacacttctctatatttttactcacaggaatgtcactgttggacaattattttaaaagtgtataaaaccaagtctcataaatgatatgagtgatctaaatttgcagcaatgatactaaacaactctctgaaatttctcaagcaccaagagaaacatcattttagcaaaggccaggaggaaaaatagaaataaatttgtcttgaagatctcattgatgtgatgttacattccctttaatctgccaactgtggtcaaagttcataggtgtcgtacatttccattatttgctaaaatcatgcaatctgatgcttctcttttctcttgtacagtaagtagtttgaagtgggttttgtatataaatactgtattaaaaattaggcaattaccaaaaatccttttatggaaaccatttttttaaaaagtgaatgtacacaaatccacagaggactgtggctggacattcatctaaataaatttgaatatacgacacttttctcacttgaatgc

SEQ ID NO: 7194 - DNA, 3897 bp, Homo sapiens
cggctcggtacccatccccactgtgtgctcgagttctgaaactgaagatgccgacgaagaagatgtaccacattaatgagacccgtggcctcctgaaaaaaatcaactctgtgctccagaaaatcacagatcccatccagcccaaagtggctgagcacaggccccagaccatgaagagactctcctatcccttctcccgggagaagcagcatctatttgacttgtctgataaggattcctttttcgacagcaaaacccggagcacgattgtctatgagatcttgaagagaacgacgtgtacaaaggccaagtacagcatgggcatcacgagcctgctggccaatggtgtgtacgcggctgcatacccactgcacgatggagactacaacggtgaaaacgtcgagttcaacgacagaaaactcctgtacgaagagtgggcacgctatggagttttctataagtaccagcccatcgacctggtcaggaagtattttggggagaagatcggcctgtacttcgcctggctgggcgtgtacacccagatgctcatccctgcctccatcgtgggaatcattgtcttcctgtacggatgcgccaccatggatgaaaacatccccagcatggagatgtgtgaccagagacacaatatcaccatgtgcccgctttgcgacaagacctgcagctactggaagatgagctcagcctgcgccacggcccgcgccagccacctcttcgacaaccccgccacggtcttcttctctgtcttcatggccctctgggctgccaccttcatggagcactggaagcggaaacagatgcgactcaactaccgctgggacctcacgggctttgaagaggaagaggaggctgtcaaggatcatcctagagctgaatacgaagccagagtcttggagaagtctctgaagaaagagtccagaaacaaagagactgacaaagtgaagctgacatggagagatcggttcccagcctacctcactaacttggtctccatcatcttcatgattgcagtgacgtttgccatcgtcctcggcgtcatcatctacaggatctccatggccgccgccttggccatgaactcctccccctccgtgcggtccaacatccgggtcacagtcacagccaccgcggtcatcatcaacctagtggtcatcatcctcctggacgaggtgtatggctgcatagcccgatggctcaccaagatcgaggtcccaaagacggagaaaagctttgaggagaggctgatcttcaaggctttcctgctgaagtttgtgaattcctacacccccatcttttacgtggcgttcttcaaaggccggtttgttggacgcccgggcgactacgtgtacattttccgttccttccgaatggaagagtgtgcgccagggggctgcctgatggagctatgcatccagctcagcatcatcatgctggggaaacagctgatccagaacaacctgttcgagatcggcatcccgaagatgaagaagctcatccgctacctgaagctgaagcagcagagcccccctgaccacgaggagtgtgtgaagaggaaacagcggtacgaggtggattacaacctggagcccttcgcgggcctcaccccagagtacatggaaatgatcatccagtttggcttcgtcaccctgtttgtcgcctccttccccctggccccactgtttgcgctgctgaacaacatcatcgagatccgcctggacgccaaaaagtttgtcactgagctccgaaggccggtagctgtcagagccaaagacatcggaatctggtacaatatcctcagaggcattgggaagcttgctgtcatcatcaatgccttcgtgatctccttcacgtctgacttcatcccgcgcctggtgtacctctacatgtacagtaagaacgggaccatgcacggcttcgtcaaccacaccctctcctccttcaacgtcagtgacttccagaacggcacggcccccaatgaccccctggacctgggctacgaggtgcagatctgcaggtataaagactaccgagagccgccgtggtcggaaaacaagtacgacatctccaaggacttctgggccgtcctggcagcccggctggcgtttgtcatcgtcttccagaacctggtcatgttcatgagcgactttgtggactgggtcatcccggacatccccaaggacatcagccagcagatccacaaggagaaggtgctcatggtggagctgttcatgcgggaggagcaagacaagcagcagctgctggaaacctggatggagaaggagcggcagaaggacgagccgccgtgcaaccaccacaacaccaaagcctgcccagacagcctcggcagcccagcccccagccatgcctaccacgggggcgtcctgtagctatgccagcggggctgggcaggccagccgggcatcctgaccgatgggcaccctctcccagggcaggcggcttcccgctcccaccagggcccggtgggtcctgggttttctgcaaacatggaggaccactttctgataggacattttcctttcttctttctgttttctttcccttgtttttgcacaaagccattatgcagggaatattttttaatctgtagtattcaagatgaatcaaaatgatggctggtaatacggcaataaggtagcaaaggcaggtgctttgcagaaagaatgcttggaaacttgagtctccctagaggtgaaaagtgagcagaggcccctagaaaccctcctctgaatcctcctaattccttaagatagatgcaaaatggtaagccgaggcatcgcgcaaaagctggtgcgatgcttcagggaaaatggaaaacccacgcaagaataatgattgattccggttccaaaaggtgtcacctacctgtttcagaaaagttagactttccatcgccttttccttccatcagttgagtggctgagagagaagtgcctcatccctgagccacacagggggcgtgggagcatcccagttatccctggaaagctagaaggggacagaggtgtccctgattaagcaggaaacagcacccttggcgtccccagcaggctccccactgtcagccacacacctgcccccatcacaccaagccgacctcagagttgttcatcttccttatgggacaaaaccggttgaccagaaaatgggcagagagagatgacctcggaagcatttccacagatggtgtcagggtttcaagaagtcttagggcttccaggggtcccctggaagctttagaatatttatgggtttttttttcaaatatcaattatatggtagattgaggattttttttctgtagctcaaaggtggagggagtttattagttaaccaaatatcgttgagaggaatttaaaatactgttactaccaaagatttttattaataaaggcttatattttggtaacacttctctatatttttactcacaggaatgtcactgttggacaattattttaaaagtgtataaaaccaagtctcataaatgatatgagtgatctaaatttgcagcaatgcaaaggccaggaggaaaaatagaaataaatttgtcttgaagatctcattgatgtgatgttacattccctttaatctgccaactgtggtcaaagttcataggtgtcgtacatttccattatttgctaaaatcatgcaatctgatgcttctcttttctcttgtacagtaagtagtttgaagtgggttttgtatataaatactgtattaaaaattaggcaattaccaaaaatccttttatggaaaccatttttttaaaaagtgaatgtacacaaatccacagaggactgtggctggacattcatctaaataaatttgaatatacgacacttttctcacttgaatgc

SEQ ID NO: 7195 - DNA, 418 bp, Homo sapiens
  misc_feature (410)..(410): n is a, c, g, or t
tccatgccccctggaacgtgctgtgcagagaggccgagtttctgaaactgaagatgccgacgaagaagatgtaccacattaatgagacccgtggcctcctgaaaaaaatcaactctgtgctccagaaaatcacagatcccatccagcccaaagtggctgagcacaggccccagaccatgaagagactctcctatcccttctcccgggagaagcagcatctatttgacttgtctgataaggattcctttttcgacagcaaaacccggagcacgattgtctatgagatcttgaagagaacgacgtgtacaaaggccaagtacagcatggggcaaggcgagggaagaaagaaggactccgcccttctaagtaaaaggcggaaatgtgggaagtatggcatcacgagcctgcgnacctatga

SEQ ID NO: 7196 - DNA, 3812 bp, Homo sapiens
cggctcggtacccatccccactgtgtgctcgagttctgaaactgaagatgccgacgaagaagatgtaccacattaatgagacccgtggcctcctgaaaaaaatcaactctgtgctccagaaaatcacagatcccatccagcccaaagtggctgagcacaggccccagaccatgaagagactctcctatcccttctcccgggagaagcagcatctatttgacttgtctgataaggattcctttttcgacagcaaaacccggagcacgattgtctatgagatcttgaagagaacgacgtgtacaaaggccaagtacagcatgggcatcacgagcctgctggccaatggtgtgtacgcggctgcatacccactgcacgatggagactacaacggtgaaaacgtcgagttcaacgacagaaaactcctgtacgaagagtgggcacgctatggagttttctataagtaccagcccatcgacctggtcaggaagtattttggggagaagatcggcctgtacttcgcctggctgggcgtgtacacccagatgctcatccctgcctccatcgtgggaatcattgtcttcctgtacggatgcgccaccatggatgaaaacatccccagcatggagatgtgtgaccagagacacaatatcaccatgtgcccgctttgcgacaagacctgcagctactggaagatgagctcagcctgcgccacggcccgcgccagccacctcttcgacaaccccgccacggtcttcttctctgtcttcatggccctctgggctgccaccttcatggagcactggaagcggaaacagatgcgactcaactaccgctgggacctcacgggctttgaagaggaagaggaggctgtcaaggatcatcctagagctgaatacgaagccagagtcttggagaagtctctgaagaaagagtccagaaacaaagagactgacaaagtgaagctgacatggagagatcggttcccagcctacctcactaacttggtctccatcatcttcatgattgcagtgacgtttgccatcgtcctcggcgtcatcatctacaggatctccatggccgccgccttggccatgaactcctccccctccgtgcggtccaacatccgggtcacagtcacagccaccgcggtcatcatcaacctagtggtcatcatcctcctggacgaggtgtatggctgcatagcccgatggctcaccaagatcgaggtcccaaagacggagaaaagctttgaggagaggctgatcttcaaggctttcctgctgaagtttgtgaattcctacacccccatcttttacgtggcgttcttcaaaggccggtttgttggacgcccgggcgactacgtgtacattttccgttccttccgaatggaagagtgtgcgccagggggctgcctgatggagctatgcatccagctcagcatcatcatgctggggaaacagctgatccagaacaacctgttcgagatcggcatcccgaagatgaagaagctcatccgctacctgaagctgaagcagcagagcccccctgaccacgaggagtgtgtgaagaggaaacagcggtacgaggtggattacaacctggagcccttcgcgggcctcaccccagagtacatggaaatgatcatccagtttggcttcgtcaccctgtttgtcgcctccttccccctggccccactgtttgcgctgctgaacaacatcatcgagatccgcctggacgccaaaaagtttgtcactgagctccgaaggccggtagctgtcagagccaaagacatcggaatctggtacaatatcctcagaggcattgggaagcttgctgtcatcatcaatgccttcgtgatctccttcacgtctgacttcatcccgcgcctggtgtacctctacatgtacagtaagaacgggaccatgcacggcttcgtcaaccacaccctctcctccttcaacgtcagtgacttccagaacggcacggcccccaatgaccccctggacctgggctacgaggtgcagatctgcaggtataaagactaccgagagccgccgtggtcggaaaacaagtacgacatctccaaggacttctgggccgtcctggcagcccggctggcgtttgtcatcgtcttccagaacctggtcatgttcatgagcgactttgtggactgggtcatcccggacatccccaaggacatcagccagcagatccacaaggagaaggtgctcatggtggagctgttcatgcgggaggagcaagacaagcagcagctgctggaaacctggatggagaaggagcggcagaaggacgagccgccgtgcaaccaccacaacaccaaagcctgcccagacagcctgaccgatgggcaccctctcccagggcaggcggcttcccgctcccaccagggcccggtgggtcctgggttttctgcaaacatggaggaccactttctgataggacattttcctttcttctttctgttttctttcccttgtttttgcacaaagccattatgcagggaatattttttaatctgtagtattcaagatgaatcaaaatgatggctggtaatacggcaataaggtagcaaaggcaggtgctttgcagaaagaatgcttggaaacttgagtctccctagaggtgaaaagtgagcagaggcccctagaaaccctcctctgaatcctcctaattccttaagatagatgcaaaatggtaagccgaggcatcgcgcaaaagctggtgcgatgcttcagggaaaatggaaaacccacgcaagaataatgattgattccggttccaaaaggtgtcacctacctgtttcagaagtgcctcatccctgagccacacagggggcgtgggagcatcccagttatccctggaaagctagaaggggacagaggtgtccctgattaagcaggaaacagcacccttggcgtccccagcaggctccccactgtcagccacacacctgcccccatcacaccaagccgacctcagagttgttcatcttccttatgggacaaaaccggttgaccagaaaatgggcagagagagatgacctcggaagcatttccacagatggtgtcagggtttcaagaagtcttagggcttccaggggtcccctggaagctttagaatatttatgggtttttttttcaaatatcaattatatggtagattgaggattttttttctgtagctcaaaggtggagggagtttattagttaaccaaatatcgttgagaggaatttaaaatactgttactaccaaagatttttattaataaaggcttatattttggtaacacttctctatatttttactcacaggaatgtcactgttggacaattattttaaaagtgtataaaaccaagtctcataaatgatatgagtgatctaaatttgcagcaatgatactaaacaactctctgaaatttctcaagcaccaagagaaacatcattttagcaaaggccaggaggaaaaatagaaataaatttgtcttgaagatctcattgatgtgatgttacattccctttaatctgccaactgtggtcaaagttcataggtgtcgtacatttccattatttgctaaaatcatgcaatctgatgcttctcttttctcttgtacagtaagtagtttgaagtgggttttgtatataaatactgtattaaaaattaggcaattaccaaaaatccttttatggaaaccatttttttaaaaagtgaatgtacacaaatccacagaggactgtggctggacattcatctaaataaatttgaatatacgacacttttctcacttgaatgc

SEQ ID NO: 7197 - DNA, 607 bp, Homo sapiens
gcaaaattatgtgatatgctacaaataatgttacaaataatagaagtttgtacataaccatctctctatgggtttggggcaaaagagtcttcttcattatcaatccttaattactcatttgaataatttttgcttctggttcctacaaccttgggctggatgattttgaagaaactaatccctgagggaagaatgcttctatcaggggcatagtcatggttctgatcaactggcctaagagtacaccctatgtggggcttcacgtactgctacactcacaggcagaattggggattgtttttctggccagagtgattgatcctgattacaagaggacaaatggggtttcttctacataaagggagagttttgtcaagaacccagggagattcgtttgagacattttttagtacttcccttgtcttaatattctgctgttgggaaaactctggggaacccaacaaagacaaggaaggaaggaaggtttgggctatccttctaggtaaagaacccagtctagcgaggtcctgacaaaggctaagggtaacttgaataggtgctagaagaacagagttatacaatattagctacataatttgcagaaccc

SEQ ID NO: 7198 - DNA, 1198 bp, Homo sapiens
attgcactccagcctgggagacaagtgcaaaactccatctcaaaaaaaaaaaaaaatggatggaaatatgtcatgtcagaggtaaattgtgacttgagtaagttttatgttgagcaactctttttgtttacattttctatgttgcccaaataaagtcttattttcataaatcactgctttacataacaacttttcctgcagccctgggtatggtggcacacagttgtagtcccaggtacactggatgctgaggcaaaaggatcatttgaacccagaacttcaaggtcaacctgggcaacatagcaagatcctatctgtagcaaaaatttttttaatgataattctcatgcaaaattcagtttgcactgttttaaaaaatgaaacacttataagagcatggtcataaggcaattctgacttggtgtcaagccatttaaacttagatataacctaggatttaggatccttgctattgtttacatagtaagtccacatttaatatcagtagattattggaaactgcaactatcagcaaaatggtgaacaatgaaacaaattttaccataggccaattgatacaacaagatataagttcctactgcatatttctggtcacaatattatcactgtacttctaaatggagactaaaacacttataacattcaacactgaaataagtgtgaggtatacatacatttttaaaaagattgataaaaacaagtaagatgattatttacccaattattccagttcagagtctcgggtggcaagaacctattcttactcagcatgcaatgcaggaataaaccctgcacaggatgctattccatggcagggcacaaccacattcactcacattgggacacacagtggggaaatgccaattaaccagacatgcacatcttggggatgtgagaggaagcaggagttcctggagaaaacccatgcaggcatggggagaacatgcagaccctacacagatggtagccctgtccaggaatcaatatttattctcatctacattatagcaaaacaacattgaataaaacaactttatttgaggacctgttttacttgtacatctttgggaaaatctttcaacttttattactcataatgttctcaataaaagtgtgttaagaatacatatttcaggaggttttttgagacaatcaaatgtgcaccagccatgcagaa

SEQ ID NO: 7199 - DNA, 454 bp, Homo sapiens
gttttgaaactcaaaaccttgtatttttgttaatctagttacctgccaaatcaaacaggaatccaaagtttcataaccctgctgtgttctctggttactagaaataagcatatttttgatgttttaacaaccttttaaaataataatttctaataatgaaatagaatatttctattttaagtagctattgggtatatctttacataactagatgattatattaaatgggttttttagatgaatgatgtgcatgggcacacattatggaggcctgaccaacatggcgaaaccctgtctctgctaaatatacaaaaattagccaggcgtggtggtatgcacctgtaatcccagctactcaggaggctgaggcaggagaactgcttgaacctggcaagcagaggttgcagtgagccgagatcgtgcacactgcactccagcgctggcacacattaaa

SEQ ID NO: 7200 - DNA, 2306 bp, Homo sapiens
gttttgaaactcaaaaccttgtatttttgttaatctagttacctgccaaatcaaacaggaatccaaagtttcataaccctgctgtgttctctggttactagaaataagcatatttttgatgttttaacaaccttttaaaataataatttctaataatgaaatagaatatttctattttaagtagctattgggtatatctttacataactagatgattatattaaatgggttttttagatgaatgatgtgcatgggtagatatttttaaaatgaaatatgttttttccttttttacttaaatttctttttagaacatactgttatgaacattaacatttattcaagtccttgggacaattcttcttcagttacccagtaaaattttcatgatctctgcaaaacatagattagaaatataaaataacataaattttagaatacagtgagatgacttacacaatttgataattttttatataatattttatgattaaccagttaactgaaacctaaaaacctgtattaactgattaatattgcagcaaaatgtcagttcatgttattgtatcaatcacttatggatacatgattatgctgtcgtgatatgatttctaacaattgtcttgtcatttttagcttttactattataattttaattaaaatatattaaagtcactatgtcataacagactttatattgtgccatgcagtcctattgctcttttgtttcaaatatcatatagtctaaagcaatgattctcattaaatacatgcatcaaaatcaactgcagttattacatgctaactcaaacttacaaaatcaagctctctgtgatcctggttaatacatctaagtacttgagccgataatccaagtactttggggggtcgaggtgagaggatagcatgtggccagaagttcaagaccagcctgggcaacatagcgagactccatctccacaaaaaagtgttaaaaattagccagacatggtggtgcatgtcttagttctaactactcaggaggctgagaaaggaagattactttagcccaggagctcaaaggtgcagtgagctgtgactgcactccagcccgtctaaaaaaaaaaaaaaaggaaagaaaagaaaaaaagaaataaaaaggtatacacattttttttctgaagtggatggaaatatgtcatgtcagaggtaaattgtgacttgagtaagttttatgttgagcaactctttttgtttacattttctatgttgcccaaataaagtcttattttcataaatcactgctttacataacaacttttcctgcagccctgggtatggtggcacacagttgtagtcccaggtacactggatgctgaggcaaaaggatcatttgaacccagaacttcaaggtcaacctgggcaacatagcaagatcctatctgtagcaaaaatttttttaatgataattctcatgcaaaattcagtttgcactgttttaaaaaatgaaacacttataagagcatggtcataaggcaattctgacttggtgtcaagccatttaaacttagatataacctaggatttaggatccttgctattgtttacatagtaagtccacatttaatatcagtagattattggaaactgcaactatcagcaaaatggtgaacaatgaaacaaattttaccataggccaattgatacaacaagatataagttcctactgcatatttctggtcacaatattatcactgtacttctaaatggagactaaaacacttataacattcaacactgaaataagtgtgaggtatacatacatttttaaaaagattgataaaaacaagtaagatgattatttacccaattattccagttcagagtctcgggtggcaagaacctattcttactcagcatgcaatgcaggaataaaccctgcacaggatgctattccatggcagggcacaaccacattcactcacattgggacacacagtggggaaatgccaattaaccagacatgcacatcttggggatgtgagaggaagcaggagttcctggagaaaacccatgcaggcatggggagaacatgcagaccctacacagatggtagccctgtccaggaatcaatatttattctcatctacattatagcaaaacaacattgaataaaacaactttatttgaggacctgttttacttgtacatctttgggaaaatctttcaacttttattactcataatgttctcaataaaagtgtgttaagaatacatatttcaggaggttttttgagacaatcaaatgtgcaccagccatgcagaa

SEQ ID NO: 7201 - DNA, 336 bp, Homo sapiens
actcttctttaatatttaatataagtcagtcctccataggcattccttacttgatttgagaacacacacagttagtgttatatgaataaggagacagtgcattttggtttgcctgggatgatctagtttacctctgtggtaaatcagttaaaactgttcattattttagcacttctttctattccccaaactgacctgttgtggataacaaattgcatggtgaccctagatttgaaaatttggaggcactctgaaagaaagcaattgaaatatggttagaggcattgggaatagcccctatgaagaaatgacaaaaggaattggctttatttgttg

SEQ ID NO: 7202 - DNA, 472 bp, Homo sapiens
caagaatactactgtcactcccttcccccaaatgaggaggagatcactctcttaccaagtcttccccatctttggagtgctctcaccgttaaaaagtgattcaagtttaactgaagcataacgtttctaaaatttttacccactggtgactttggcgtcacacagagcaagcatatccttttttgctcggagggcattcattttattatttcttcatttgacaagtcatgttgaacggtgatcatgtggcaggcctttctcaaggaactgcgcaatagtggtcaacagacaagcaaaatccctgtagtaggaacttatgttccagagattcttcaaatacctgaacataatcaccttggctccttaaatctcctctgctgcaggctaaacatcaaacaatttcttcagtgatgtttgaggattcttgtttactcttctctttcaaataggggaaactgaggttccctccaca

SEQ ID NO: 7203 - DNA, 392 bp, Homo sapiens
cagggtggcacccttattaccagatttccacccagcaattcacacccatgcactcagcccccatatgggcatggtgaggaggtacagaataaaaccggtttcccagtgggttacccccaaatgacctacccaggaagacatttctccaagaagaaaattctgtgttctatccttcttattccagccagaagagatgttgtacagcccggtgacacctcgtgggacaaagcaaccagaaacagaattctagtatgaagtctctaatattaaaaaagaaaatattgcctgtaatcccagcactttgggaagctgaggtgggaggattcctgccttgagttcaaggccaggagttgaagaccagcctgggcaacatagtgaaactccaccactac

SEQ ID NO: 7204 - DNA, 477 bp, Homo sapiens
gctcttttacagcatctcagcactaaagccacactaagctgctataaaatccaaagtggtccctgaccatggagagacactgtggacactgggtttcaccgcgtgtgttccaagggggtatccagtctaaagcaaatggggttttgccagactttaacttataggcaagaggaaaaatacacaaatcatcctctcaaaccagatgttccaggactcaccacaaagctcccttacagaggtctgcagtgaaaccaacccctcgctctcacataatcatcccaccaaactcctgccagcttctagggttaaggataaagacccttttccccttgaaagcagcgaggctgagctgcagtagtaaatgggagcacagagcagagatcacacatgcactggcagcctgtggcccaggtgcgccctggaggcatgttttgtttggctcacacaatgttttagaagttggaacatttcacttag

SEQ ID NO: 7205 - DNA, 561 bp, Homo sapiens
tgtaagagattttggtcgtgtagttagggaacctccactggcctctaaggatcactttgggaatatttggggccacctggttatttcaaagaattagacttgtagaataatgacattgaggtgatttcattggacagtaattcctcgtcaatccttataagctacttgggaagcttggctgaagaaagaaaattagaaatactaaagactgaattttagctcacaaaattgctcagagaaacggtgggccaatggagaagaaagcgccctgttgcagtcattctcctaagttcttttggcatcaggctcattaaagatctcccaggggagacactaacatacactctgctgagctgctggccgcccttttggggaaagtttctcctgaaccacggaattgatcagtgagcggcccgttgtgaaatctgatagagatggacagaggggctccccagctatcttatttagaaccatgcccttacaaacaaccttggcacttacaggttctccactgaagagaattaagcagtagtagagatgtatttacttgatggaataata

SEQ ID NO: 7206 - DNA, 386 bp, Homo sapiens
catctcaaaatattaacacttaaaccacccccaccatgccaccccagttgtccgcctcctcctacaaaatataaaaaatgattctgagggctgggcacagtggcttacgcctataatcccagcactttgggagactgtggcaggcggatcacgaggtcaggagttcaagaccagcctggccaatatggtgaaattccctctctactaaaaatacaaaaactagctgggcacagtggcacgcacctgtagtctcagcttcttgggaggctgaggaagaagaattgcttgaacctgggaggcggaggttgcagtgagctgagatggtgccactgcactccagcctgggcgacagagcgagactctgtctcaaaaaaaaaaaaaaaaag

SEQ ID NO: 7207 - DNA, 3678 bp, Homo sapiens
gacgggctggggaggtggtgccaggctggttgctagctgccgccgctgctcaccccggccgtccggccgcttcattgtcaccgggcctcggggcagtgttgggggtggcggggcgccaggtcgccgacccgaggtttcggcgcgactggttccgcatcccctccccgccggccgaatctgcaggccccgcgcgccaggcaggcttcgcggctgcgcccccggcccgcgcaggacctgccttgtccaccatgaaaggcacccgggccatcggcagcgtcccggagcgcagcccagcaggtgtggacctgagtctgacaggtctccctccgcctgtgtcccggcgtcctggcagtgccgccaccaccaagcccatcgtccgctctgtctccgtggtcacaggcagcgagcagaagaggaaggtgctggaggccacagggcctgggggctcccaggccatcaacaaccttagaagatccaacagcaccacgcaggtcagccagcctcggagcggctcccccaggccaacggagcccacagacttcctgatgctcttcgagggcagccccagtgggaaaaagaggcctgccagcctgagcacagcccccagcgagaagggagccacctggaacgtcctggatgaccagccccggggcttcaccttgccatccaatgcccggagttccagtgcccttgactcaccagcgggcccgcggaggaaagaatgcaccgtggccctggcccccaacttcactgctaacaacaggagcaacaagggagcagtgggcaactgcgtcaccaccatggtgcacaaccgctacaccccctcggagagggcgcctccgctcaagagctccaaccagactgccccctccctcaacaacatcatcaaggcagccacctgtgagggcagtgagagcagcggctttgggaagctgccgaagaatgtctccagtgccacccactcagcccggaacaatactgggggcagcacgggcttgcccaggcggaaggaggtgacggaggaggaggctgagaggtttatccaccaggtgaaccaggccgctgtcaccatccagcgctggtaccggcaccaggtgcagcggcgcggagcaggagctgcccgcctggagcacttgcttcaggccaagcgggaggagcagcggcagcggtcaggcgaggggaccctcttggacctgcaccagcagaaagaggcagccaggaggaaggcccgggaggagaaggcacgccaagccaggcgagcagccattcaggagctgcaacagaaacgagccctgagagcccagaaggcgagcactgccgagcgtgggccacctgagaatcccagggagaccagagtgccaggaatgcggcagcctgctcaggagctgtcccccacgccaggcggcactgcccaccaggccctcaaggccaacaatgctggtggtggcctccctgctgcaggccccggagaccgctgcctgcccacctccgactcatccccagaaccacagcagcctccagaggacaggacgcaggacgttcttgcccaggatgcagctggggacaacctggagatgatggccccgagcagggggagcgccaagtccagggggccactggaggagctgctgcacacactgcagctgctggagaaggagccggacgcgctgccccgccccaggacccatcacaggggcagatacgcctgggccagcgaggaggatgacgccagctctctgacagctgacaacttggagaaatttggaaaactcagtgcgttccccgaacctcctgaggatgggacgctgctatcggaggccaagctacaaagcatcatgagcttcttggacgagatggagaagtctgggcaggaccagctggactcccagcaggaggggtgggtgccggaggcggggccggggcccctggagctggggtccgaggtgagcacgtctgtgatgcggctgaagctggaggtggaggagaagaagcaggccatgctgctgctgcagagagcgctggcgcagcagcgagacctcacggcccggcgggtcaaggagacagagaaggcgctgagccggcagctgcagcggcagagggagcactacgaggccaccatccagcggcacttggccttcattgaccagctgattgaggacaagaaggtcctgagtgaaaagtgcgaggctgtggtggccgagctgaagcaggaggaccagagatgcaccgagcgtgtggcccaggcacaggcgcagcacgagctggagattaaaaaactcaaagaattaatgagcgccaccgagaaagcccgccgggagaagtggatcagtgagaaaaccaagaagatcaaggaggtcactgtccgaggtctggagcccgagatccagaagctgattgcaaggcacaagcaggaagtgcggaggctcaagagcctgcacgaggcggagctgctgcagtcggatgagcgggcctcgcagcgctgcctgcgccaggccgaggagctgcgggagcagctggagcgggagaaggaggcgctgggccagcaggagcgcgaacgtgctcggcagcggttccagcagcacctggagcaggagcagtgggcgctgcagcagcaacggcagcggctgtacagtgaggtggctgaggagagggagcggctgggccagcaggcagccaggcagcgggcggagctggaagagctgaggcagcagctggaggagagcagctctgcactgacccgagccctgagggctgagtttgagaagggcagggaggagcaggagcgccggcaccagatggagctgaataccctgaagcagcagctggagctggagaggcaggcgtgggaggccggccgcaccaggaaggaggaggcgtggctgctgaaccgggaacaggagctgagggaagaaatccggaaaggccgggacaaggagattgagctggtcattcaccggctggaggccgacatggcgctggccaaggaggagagtgagaaggctgccgagagccgcatcaagcgcttacgggacaagtacgaggccgagctctccgagctggagcagtcggagcggaagcttcaggagcggtgctcggagctgaagggccagcttggggaggccgagggcgagaatctgcgtctgcagggccttgtgcggcagaaggagcgggcgctggaggatgcgcaggcggtgaacgagcagctttctagcgagcgcagcaacctggcccaggtgatccgccaggagttcgaggaccggctggcagcctctgaggaggagacgcggcaggccaaggccgagctggccacgctgcaggcccgccagcagctggagctggaggaggtgcaccggagggtgaagacagccctcgcgaggaaggaggaggccgtgagcagcctccggacacaacatgaggctgcggtgaagcgggccgaccacctggaggagctgctggagcagcacaggaggcccacgccaagtaccaagtgaccagggatgccgggaacactgtcgaagaacggaaggcagaggacagaggctggacgtgggcccagaggcccacagggacgcccacctgccccccacagaggctggtggttgagatgcccacggctaagcacctgtggctgcattttaacagtaaaggaggccgttgttttcagcgccttgagtgact

SEQ ID NO: 7208 - DNA, 4118 bp, Homo sapiens
gacgggctggggaggtggtgccaggctggttgctagctgccgccgctgctcaccccggccgtccggccgcttcattgtcaccgggcctcggggcagtgttgggggtggcggggcgccaggtcgccgacccgaggtttcggcgcgactggttccgcatcccctccccgccggccgaatctgcaggccccgcgcgccaggcaggcttcgcggctgcgcccccggcccgcgcaggacctgccttgtccaccatgaaaggcacccgggccatcggcagcgtcccggagcgcagcccagcaggtgtggacctgagtctgacaggtctccctccgcctgtgtcccggcgtcctggcagtgccgccaccaccaagcccatcgtccgctctgtctccgtggtcacaggcagcgagcagaagaggaaggtgctggaggccacagggcctgggggctcccaggccatcaacaaccttagaagatccaacagcaccacgcaggtcagccagcctcggagcggctcccccaggccaacggagcccacagacttcctgatgctcttcgagggcagccccagtgggaaaaagaggcctgccagcctgagcacagcccccagcgagaagggagccacctggaacgtcctggatgaccagccccggggcttcaccttgccatccaatgcccggagttccagtgcccttgactcaccagcgggcccgcggaggaaagaatgcaccgtggccctggcccccaacttcactgctaacaacaggagcaacaagggagcagtgggcaactgcgtcaccaccatggtgcacaaccgctacaccccctcggagagggcgcctccgctcaagagctccaaccagactgccccctccctcaacaacatcatcaaggcagccacctgtgagggcagtgagagcagcggctttgggaagctgccgaagaatgtctccagtgccacccactcagcccggaacaatactgggggcagcacgggcttgcccaggcggaaggaggtgacggaggaggaggctgagaggtttatccaccaggtgaaccaggccgctgtcaccatccagcgctggtaccggcaccaggtgcagcggcgcggagcaggagctgcccgcctggagcacttgcttcaggccaagcgggaggagcagcggcagcggtcaggcgaggggaccctcttggacctgcaccagcagaaagaggcagccaggaggaaggcccgggaggagaaggcacgccaagccaggcgagcagccattcaggagctgcaacagaaacgagccctgagagcccagaaggcgagcactgccgagcgtgggccacctgagaatcccagggagaccagagtgccaggaatgcggcagcctgctcaggagctgtcccccacgccaggcggcactgcccaccaggccctcaaggccaacaatgctggtggcctccctgctgcaggccccggagaccgctgcctgcccacctccgactcatccccagaaccacagcagcctccagaggacaggacgcaggacgttcttgcccaggatgcagctggggacaacctggagatgatggccccgagcagggggagcgccaagtccagggggccactggaggagctgctgcacacactgcagctgctggagaaggagccggacgcgctgccccgccccaggacccatcacaggggcagatacgcctgggccagcgaggtgaccacggaggatgacgccagctctctgacagctgacaacttggagaaatttggaaaactcagtgcgttccccgaacctcctgaggatgggacgctgctatcggaggccaagctacaaagcatcatgagcttcttggacgagatggagaagtctgggcaggagctgtcccccacgccaggcggcactgcccaccaggccctcaaggccaacaatgctggtggtggcctccctgctgcaggccccggagaccgctgcctgcccacctccgactcatccccagaaccacagcagcctccagaggacaggacgcaggacgttcttgcccaggatgcagctggggacaacctggagatgatggccccgagcagggggagcgccaagtccagggggccactggaggagctgctgcacacactgcagctgctggagaaggagccggacgcgctgccccgccccaggacccatcacaggggcagatacgcctgggccagcgaggaggatgacgccagctctctgacagctgacaacttggagaaatttggaaaactcagtgcgttccccgaacctcctgaggatgggacgctgctatcggaggccaagctacaaagcatcatgagcttcttggacgagatggagaagtctgggcaggaccactggggtccgaggtgagcacgtctgtgatgcggctgaagctggaggtggaggagaagaagcaggccatgctgctgctgcagagagcgctggcgcagcagcgagacctcacggcccggcgggtcaaggagacagagaaggcgctgagccggcagctgcagcggcagagggagcactacgaggccaccatccagcggcacttggccttcattgaccagctgattgaggacaagaaggtcctgagtgaaaagtgcgaggctgtggtggccgagctgaagcaggaggaccagagatgcaccgagcgtgtggcccaggcacaggcgcagcacgagctggagattaaaaaactcaaagaattaatgagcgccaccgagaaagcccgccgggagaagtggatcagtgagaaaaccaagaagatcaaggaggtcactgtccgaggtctggagcccgagatccagaagctgattgcaaggcacaagcaggaagtgcggaggctcaagagcctgcacgaggcggagctgctgcagtcggatgagcgggcctcgcagcgctgcctgcgccaggccgaggagctgcgggagcagctggagcgggagaaggaggcgctgggccagcaggagcgcgaacgtgctcggcagcggttccagcagcacctggagcaggagcagtgggcgctgcagcagcaacggcagcggctgtacagtgaggtggctgaggagagggagcggctgggccagcaggcagccaggcagcgggcggagctggaagagctgaggcagcagctggaggagagcagctctgcactgacccgagccctgagggctgagtttgagaagggcagggaggagcaggagcgccggcaccagatggagctgaataccctgaagcagcagctggagctggagaggcaggcgtgggaggccggccgcaccaggaaggaggaggcgtggctgctgaaccgggaacaggagctgagggaagaaatccggaaaggccgggacaaggagattgagctggtcattcaccggctggaggccgacatggcgctggccaaggaggagagtgagaaggctgccgagagccgcatcaagcgcttacgggacaagtacgaggccgagctctccgagctggagcagtcggagcggaagcttcaggagcggtgctcggagctgaagggccagcttggggaggccgagggcgagaatctgcgtctgcagggccttgtgcggcagaaggagcgggcgctggaggatgcgcaggcggtgaacgagcagctttctagcgagcgcagcaacctggcccaggtgatccgccaggagttcgaggaccggctggcagcctctgaggaggagacgcggcaggccaaggccgagctggccacgctgcaggcccgccagcagctggagctggaggaggtgcaccggagggtgaagacagccctcgcgaggaaggaggaggccgtgagcagcctccggacacaacatgaggctgcggtgaagcgggccgaccacctggaggagctgctggagcagcacaggaggcccacgccaagtaccaagtgaccagggatgccgggaacactgtcgaagaacggaaggcagaggacagaggctggacgtgggcccagaggcccacagggacgcccacctgccccccacagaggctggtggttgagatgcccacggctaagcacctgtggctgcattttaacagtaaaggaggccgttgttttcagcgccttgagtgact

SEQ ID NO: 7209 - DNA, 3069 bp, Homo sapiens
ggcacgaggcgggctgggaggtgttccagccctttaagatgttgcgcgtggtgagctggaacatcaatgggattcggagacccctgcaaggggtggcaaatcaggaacccagcaactgtgccgccgtggccgtggggcgcattttggacgagctggatgcggatatcgtctgtctccaggaaaccaaagtgaccagggatgcactgacagagcccctggctatcgttgagggttataactcctatttcagcttcagccgcaaccgtagcggctattctggtgtagccaccttctgtaaggacaatgctaccccagtggctgctgaagaaggcctgagtggcctgtttgccacccagaatggggatgttggttgctatggaaacatggatgagtttacccaagaggaactccgggctctggatagtgagggcagggccctcctcacacagcataagatccgcacatgggaaggtaaggagaagaccttgaccctaatcaacgtgtactgcccccatgcggaccctgggaggcctgagcggctagtctttaagatgcgcttctatcgtttgctgcaaatccgagcagaagccctcctggcggcaggcagccatgtgatcattctgggtgacctgaatacagcccaccgccccattgaccactgggatgcagtcaacctggaatgctttgaagaggacccagggcgcaagtggatggacagcttgctcagtaacttggggtgccagtctgcctctcatgtagggcccttcatcgatagctaccgctgcttccaaccaaagcaggagggggccttcacctgctggtcagcagtcactggcgcccgccatctcaactatggctcccggcttgactatgtgctgggggacaggaccctggtcatagacacctttcaggcctctttcctgctgcctgaggtgatgggctctgaccactgccctgtgggtgcagtcttgagtgtgtcctctgtgcctgcaaaacagtgcccacctctgtgcacccgcttcctccctgagtttgcaggcacccagctcaagatccttcgcttcctagttcctctcgaacaaagtcctgtgttggagcagtcgacgctgcagcacaacaatcaaacccgggtacagacatgccaaaacaaagcccaagtgcgctcaaccaggcctcagcccagtcaggttggctctagcagaggccagaaaaacctgaagagctactttcagccctcccctagctgtccccaagcctctcctgacatagagctgcctagcctaccactgatgagcgccctcatgaccccgaagactccagaagagaaggcagtggccaaagtggtgaaggggcaggccaagacttcagaagccaaagatgagaaggagttacggacctcattctggaagtctgtgctggcggggcccttgcgcacacccctctgtgggggccacagggagccatgtgtgatgcgtactgtgaagaagccaggacccaacttgggccgccgcttctacatgtgtgccaggccccggggtcctcccactgacccctcctcccggtgcaacttcttcctctggagcaggcccagctgaaccaatggaggcctggggacatctggcatggtcacccctgcacatgatctgaggccagctccccttccctgagctgcctcctgcttctccctcaaagtctcctacccttctcttcctcttttaagccctctcttcctcgctttccttcctacctagctccttgttggtgagcttcttgtgccttaatcctgtgacccagccccttacaccactttccaccttcctgtccgaagtacacggacactagctgccccaggaagttgtgtgattttaaatcacttctgtctttgctggaaagtgtatttgtgcataaataaagtctgtgtatttgtttaaaaaaaaaaaaaaaaaaactcgaactagtttctctctctctcgcagcgctgcctgcgccaggccgaggagctgcgggagcagctggagcgggagaaggaggcgctgggccagcaggagcgcgaacgtgctcggcagcggcagcgggcggagctggaagagctgaggcagcagctggaggagagcagctctgcactgacccgagccctgagggctgagtttgagaagggcagggaggagcaggagcgccggcaccagatggagctgaataccctgaagcagcagctggagctggagaggcaggcgtgggaggccggccgcaccaggaaggaggaggcgtggctgctgaaccgggaacaggagctgagggaagaaatccggaaaggccgggacaaggagattgagctggtcattcaccggctggaggccgacatggcgctggccaaggaggagagtgagaaggctgccgagagccgcatcaagcgcttacgggacaagtacgaggccgagctctccgagctggagcagtcggagcggaagcttcaggagcggtgctcggagctgaagggccagcttggggaggccgagggcgagaatctgcgtctgcagggccttgtgcggcagaaggagcgggcgctggaggatgcgcaggcggtgaacgagcagctttctagcgagcgcagcaacctggcccaggtgatccgccaggagttcgaggaccggctggcagcctctgaggaggagacgcggcaggccaaggccgagctggccacgctgcaggcccgccagcagctggagctggaggaggtgcaccggagggtgaagacagccctcgcgaggaaggaggaggccgtgagcagcctccggacacaacatgaggctgcggtgaagcgggccgaccacctggaggagctgctggagcagcacaggaggcccacgccaagtaccaagtgaccagggatgccgggaacactgtcgaagaacggaaggcagaggacagaggctggacgtgggcccagaggcccacagggacgcccacctgccccccacagaggctggtggttgagatgcccacggctaagcacctgtggctgcattttaacagtaaaggaggccgttgttttcagcgccttgagtgact

SEQ ID NO: 7210 - DNA, 803 bp, Homo sapiens
ggtctggcccagaatcccaggggtttgagtttctgggacaggtggaatcaaagcctaggattgctcgtgggccccgtctctgggtgcagcatccttcttgaccctgggtccccgcggacagtcagggtggtcctcactggcggtcctcagggcctgggtgtcaggaaacgcctgctgggtccatcccaggctggagagtctcaggaggacgttctgtgggggcagagctgtctcccccacgccagaactgttggccacctgcgacgtagggctcatcctctgtagagcagagaaatggcaggttcaaggtcctggtggggtttcactttccctgctggccctgagattccacgaactctaggggactccagggcgttgtggggaaacctctggtctgggtctggattccgtcttccagatgtaaacgccacatggcaccggcttctttggcaggagcagcggcagcggtcaggcgaggggaccctcttggacctgcaccagcagaaagaggcagccaggaggaaggcccgggaggagaaggcacgccaagccaggcgagcagccattcaggtgctgaccgcgcagggaccactgagcagcaccgtggcccaggcctgaccgtgcggggctgctgctggggctccctgggccccgggacacttagcctcagggcagcttggctgtggagcctggggtcgtcctctcccagggacagtgctcagcgatgctcccactgcaggccgctgccccgagctgcctccacgagcccatatgtgtggatagttcagccctctggagccctg

SEQ ID NO: 7211 - DNA, 3641 bp, Homo sapiens
gacgggctggggaggtggtgccaggctggttgctagctgccgccgctgctcaccccggccgtccggccgcttcattgtcaccgggcctcggggcagtgttgggggtggcggggcgccaggtcgccgacccgaggtttcggcgcgactggttccgcatcccctccccgccggccgaatctgcaggccccgcgcgccaggcaggcttcgcggctgcgcccccggcccgcgcaggacctgccttgtccaccatgaaaggcacccgggccatcggcagcgtcccggagcgcagcccagcaggtgtggacctgagtctgacaggtctccctccgcctgtgtcccggcgtcctggcagtgccgccaccaccaagcccatcgtccgctctgtctccgtggtcacaggcagcgagcagaagaggaaggtgctggaggccacagggcctgggggctcccaggccatcaacaaccttagaagatccaacagcaccacgcaggtcagccagcctcggagcggctcccccaggccaacggagcccacagacttcctgatgctcttcgagggcagccccagtgggaaaaagaggcctgccagcctgagcacagcccccagcgagaagggagccacctggaacgtcctggatgaccagccccggggcttcaccttgccatccaatgcccggagttccagtgcccttgactcaccagcgggcccgcggaggaaagaatgcaccgtggccctggcccccaacttcactgctaacaacaggagcaacaagggagcagtgggcaactgcgtcaccaccatggtgcacaaccgctacaccccctcggagagggcgcctccgctcaagagctccaaccagactgccccctccctcaacaacatcatcaaggcagccacctgtgagggcagtgagagcagcggctttgggaagctgccgaagaatgtctccagtgccacccactcagcccggaacaatactgggggcagcacgggcttgcccaggcggaaggaggtgacggaggaggaggctgagaggtttatccaccaggtgaaccaggccgctgtcaccatccagcgctggtaccggcaccaggtgcagcggcgcggagcaggagctgcccgcctggagcacttgcttcaggccaagcgggaggagcagcggcagcggtcaggcgaggggaccctcttggacctgcaccagcagaaagaggcagccaggaggaaggcccgggaggagaaggcacgccaagccaggcgagcagccattcaggagctgcaacagaaacgagccctgagagcccagaaggcgagcactgccgagcgtgggccacctgagaatcccagggagaccagagtgccaggaatgcggcagcctgctcaggagctgtcccccacgccaggcggcactgcccaccaggccctcaaggccaacaatgctggtggtggcctccctgctgcaggccccggagaccgctgcctgcccacctccgactcatccccagaaccacagcagcctccagaggacaggacgcaggacgttcttgcccaggatgcagctggggacaacctggagatgatggccccgagcagggggagcgccaagtccagggggccactggaggagctgctgcacacactgcagctgctggagaaggagccggacgcgctgccccgccccaggacccatcacaggggcagatacgcctgggccagcgaggaggatgacgccagctctctgacagctgacaacttggagaaatttggaaaactcagtgcgttccccgaacctcctgaggatgggacgctgctatcggaggccaagctacaaagcatcatgagcttcttggacgagatggagaagtctgggcaggaccagctggactcccagcaggaggggtgggtgccggaggcggggccggggcccctggagctggggtccgaggtgagcacgtctgtgatgcggctgaagctggaggtggaggagaagaagcaggccatgctgctgctgcagagagcgctggcgcagcagcgagacctcacggcccggcgggtcaaggagacagagaaggcgctgagccggcagctgcagcggcagagggagcactacgaggccaccatccagcggcacttggccttcattgaccagctgattgaggacaagaaggtcctgagtgaaaagtgcgaggctgtggtggccgagctgaagcaggaggaccagagatgcaccgagcgtgtggcccaggcacaggcgcagcacgagctggagattaaaaaactcaaagaattaatgagcgccaccgagaaagcccgccgggagaagtggatcagtgagaaaaccaagaagatcaaggaggtcactgtccgaggtctggagcccgagatccagaagctgattgcaaggcacaagcaggaagtgcggaggctcaagagcctgcacgaggcggagctgctgcagtcggatgagcgggcctcgcagcgctgcctgcgccaggccgaggagctgcgggagcagctggagcgggagaaggaggcgctgggccagcaggagcgcgaacgtgctcggcagcggcagcgggcggagctggaagagctgaggcagcagctggaggagagcagctctgcactgacccgagccctgagggctgagtttgagaagggcagggaggagcaggagcgccggcaccagatggagctgaataccctgaagcagcagctggagctggagaggcaggcgtgggaggccggccgcaccaggaaggaggaggcgtggctgctgaaccgggaacaggagctgagggaagaaatccggaaaggccgggacaaggagattgagctggtcattcaccggctggaggccgacatggcgctggccaaggaggagagtgagaaggctgccgagagccgcatcaagcgcttacgggacaagtacgaggccgagctctccgagctggagcagtcggagcggaagcttcaggagcggtgctcggagctgaagggccagcttggggaggccgagggcgagaatctgcgtctgcagggccttgtgcggcagaaggagcgggcgctggaggatgcgcaggcggtgaacgagcagctttctagcgagcgcagcaacctggcccaggtgatccgccaggagttcgaggaccggctggcagcctctgaggaggagacgcggcaggccaaggccgagctggccacgctgcaggcccgccagcagctggagctggaggaggtgcaccggagggtgaagacagccctcgcgaggaaggaggaggccgtgagcagcctccggacacaacatgaggtgagtccctgtggccagccctgctggacctcggggctgggagcaggcctgaccctgtgggtgtgctgcaggctgcggtgaagcgggccgaccacctggaggagctgctggagcagcacaggaggcccacgccaagtaccaagtgaccagggatgccgggaacactgtcgaagaacggaaggcagaggacagaggctggacgtgggcccagaggcccacagggacgcccacctgccccccacagaggctggtggttgagatgcccacggctaagcacctgtggctgcattttaacagtaaaggaggccgttgttttcagcgccttgagtgact

SEQ ID NO: 7212 - DNA, 3848 bp, Homo sapiens
gacgggctggggaggtggtgccaggctggttgctagctgccgccgctgctcaccccggccgtccggccgcttcattgtcaccgggcctcggggcagtgttgggggtggcggggcgccaggtcgccgacccgaggtttcggcgcgactggttccgcatcccctccccgccggccgaatctgcaggccccgcgcgccaggcaggcttcgcggctgcgcccccggcccgcgcaggacctgccttgtccaccatgaaaggcacccgggccatcggcagcgtcccggagcgcagcccagcaggtgtggacctgagtctgacaggtctccctccgcctgtgtcccggcgtcctggcagtgccgccaccaccaagcccatcgtccgctctgtctccgtggtcacaggcagcgagcagaagaggaaggtgctggaggccacagggcctgggggctcccaggccatcaacaaccttagaagatccaacagcaccacgcaggtcagccagcctcggagcggctcccccaggccaacggagcccacagacttcctgatgctcttcgagggcagccccagtgggaaaaagaggcctgccagcctgagcacagcccccagcgagaagggagccacctggaacgtcctggatgaccagccccggggcttcaccttgccatccaatgcccggagttccagtgcccttgactcaccagcgggcccgcggaggaaagaatgcaccgtggccctggcccccaacttcactgctaacaacaggagcaacaagggagcagtgggcaactgcgtcaccaccatggtgcacaaccgctacaccccctcggagagggcgcctccgctcaagagctccaaccagactgccccctccctcaacaacatcatcaaggcagccacctgtgagggcagtgagagcagcggctttgggaagctgccgaagaatgtctccagtgccacccactcagcccggaacaatactgggggcagcacgggcttgcccaggcggaaggaggtgacggaggaggaggctgagaggtttatccaccaggtgaaccaggccgctgtcaccatccagcgctggtaccggcaccaggtgcagcggcgcggagcaggagctgcccgcctggagcacttgcttcaggccaagcgggaggagcagcggcagcggtcaggcgaggggaccctcttggacctgcaccagcagaaagaggcagccaggaggaaggcccgggaggagaaggcacgccaagccaggcgagcagccattcaggtgctgaccgcgcagggaccactgagcagcaccgtggcccaggcctgaccgtgcggggctgctgctggggctccctgggccccgggacacttagcctcagggcagcttggctgtggagcctggggtcgtcctctcccagggacagtgctcagcgatgctcccactgcagggagctgcaacagaaacgagccctgagagcccagaaggcgagcactgccgagcgtgggccacctgagaatcccagggagaccagagtgccaggaatgcggcagcctgctcaggagctgtcccccacgccaggcggcactgcccaccaggccctcaaggccaacaatgctggtggtggcctccctgctgcaggccccggagaccgctgcctgcccacctccgactcatccccagaaccacagcagcctccagaggacaggacgcaggacgttcttgcccaggatgcagctggggacaacctggagatgatggccccgagcagggggagcgccaagtccagggggccactggaggagctgctgcacacactgcagctgctggagaaggagccggacgcgctgccccgccccaggacccatcacaggggcagatacgcctgggccagcgaggaggatgacgccagctctctgacagctgacaacttggagaaatttggaaaactcagtgcgttccccgaacctcctgaggatgggacgctgctatcggaggccaagctacaaagcatcatgagcttcttggacgagatggagaagtctgggcaggaccagctggactcccagcaggaggggtgggtgccggaggcggggccggggcccctggagctggggtccgaggtgagcacgtctgtgatgcggctgaagctggaggtggaggagaagaagcaggccatgctgctgctgcagagagcgctggcgcagcagcgagacctcacggcccggcgggtcaaggagacagagaaggcgctgagccggcagctgcagcggcagagggagcactacgaggccaccatccagcggcacttggccttcattgaccagctgattgaggacaagaaggtcctgagtgaaaagtgcgaggctgtggtggccgagctgaagcaggaggaccagagatgcaccgagcgtgtggcccaggcacaggcgcagcacgagctggagattaaaaaactcaaagaattaatgagcgccaccgagaaagcccgccgggagaagtggatcagtgagaaaaccaagaagatcaaggaggtcactgtccgaggtctggagcccgagatccagaagctgattgcaaggcacaagcaggaagtgcggaggctcaagagcctgcacgaggcggagctgctgcagtcggatgagcgggcctcgcagcgctgcctgcgccaggccgaggagctgcgggagcagctggagcgggagaaggaggcgctgggccagcaggagcgcgaacgtgctcggcagcggttccagcagcacctggagcaggagcagtgggcgctgcagcagcaacggcagcggctgtacagtgaggtggctgaggagagggagcggctgggccagcaggcagccaggcagcgggcggagctggaagagctgaggcagcagctggaggagagcagctctgcactgacccgagccctgagggctgagtttgagaagggcagggaggagcaggagcgccggcaccagatggagctgaataccctgaagcagcagctggagctggagaggcaggcgtgggaggccggccgcaccaggaaggaggaggcgtggctgctgaaccgggaacaggagctgagggaagaaatccggaaaggccgggacaaggagattgagctggtcattcaccggctggaggccgacatggcgctggccaaggaggagagtgagaaggctgccgagagccgcatcaagcgcttacgggacaagtacgaggccgagctctccgagctggagcagtcggagcggaagcttcaggagcggtgctcggagctgaagggccagcttggggaggccgagggcgagaatctgcgtctgcagggccttgtgcggcagaaggagcgggcgctggaggatgcgcaggcggtgaacgagcagctttctagcgagcgcagcaacctggcccaggtgatccgccaggagttcgaggaccggctggcagcctctgaggaggagacgcggcaggccaaggccgagctggccacgctgcaggcccgccagcagctggagctggaggaggtgcaccggagggtgaagacagccctcgcgaggaaggaggaggccgtgagcagcctccggacacaacatgaggctgcggtgaagcgggccgaccacctggaggagctgctggagcagcacaggaggcccacgccaagtaccaagtgaccagggatgccgggaacactgtcgaagaacggaaggcagaggacagaggctggacgtgggcccagaggcccacagggacgcccacctgccccccacagaggctggtggttgagatgcccacggctaagcacctgtggctgcattttaacagtaaaggaggccgttgttttcagcgccttgagtgact

SEQ ID NO: 7213 - DNA, 1304 bp, Homo sapiens
aaaaacgtagcttagtagaggcgtgttgcacaagcaggaagtgcggaggctcaagagcctgcacgaggcggagctgctgcagtcggatgagcgggcctcgcagcgctgcctgcgccaggccgaggagctgcgggagcagctggagcgggagaaggaggcgctgggccagcaggagcgcgaacgtgctcggcagcggttccagcagcacctggagcaggagcagtgggcgctgcagcagcaacggcagcggctgtacagtgaggtggctgaggagagggagcggctgggccagcaggcagccaggcagcgggcggagctggaagagctgaggcagcagctggaggagagcagctctgcactgacccgagccctgagggctgagtttgagaagggcagggaggagcaggagcgccggcaccagatggagctgaataccctgaagcagcagctggagctggagaggcaggcgtgggaggccggccgcaccaggaaggaggaggcgtggctgctgaaccgggaacaggagctgagggaagaaatccggaaaggccgggacaaggagattgagctggtcattcaccggctggaggccgacatggcgctggccaaggaggagagtgagaaggctgccgagagccgcatcaagcgcttacgggacaagtacgaggccgagctctccgagctggagcagtcggagcggaagcttcaggagcggtgctcggagctgaagggccagcttggggaggccgagggcgagaatctgcgtctgcagggccttgtgcggcagaaggagcgggcgctggaggatgcgcaggcggtgaacgagcagctttctagcgagcgcagcaacctggcccaggtgatccgccaggagttcgaggaccggctggcagcctctgaggaggagacgcggcaggccaaggccgagctggccacgctgcaggcccgccagcagctggagctggaggaggtgcaccggagggtgaagacagccctcgcgaggaaggaggaggccgtgagcagcctccggacacaacatgaggctgcggtgaagcgggccgaccacctggaggagctgctggagcagcacaggaggcccacgccaagtaccaagtgaccagggatgccgggaacactgtcgaagaacggaaggcagaggacagaggctggacgtgggcccagaggcccacagggacgcccacctgccccccacagaggctggtggttgagatgcccacggctaagcacctgtggctgcattttaacagtaaaggaggccgttgttttcagcgccttgagtgact

SEQ ID NO: 7214 - DNA, 282 bp, Homo sapiens
ggctgctctcagctaccagcagccttgctgcatctgtctccctgctcttttgcaggacgttcttgcccaggatgcagctggggacaacctggagatgatggccccgagcagggggagcgccaagtccagggggccactggaggagctgctgcacacactgcagctgctggagaaggagccggacgcgctgccccgccccaggacccatcacaggggcagatacgcctgggccagcgaggtgaccacggtgtgcgcccgccctgcacagtctgtccacccacg

SEQ ID NO: 7215 - DNA, 267 bp, Homo sapiens
gcctctcctaggaggccgttatccttactctagaactacatggctgggtacggaaaggagagagcaaacactcactaagccctgcttttcccagaaaagatgtcagggcagcccatagggggacatagggtgacaaattagcagcagtgggtgagggataaggtcagagtgcaggagggcacagagagcagagcccggcacaaggctagtgccagccccatgccatgggcgccatggcctgctgcacgggcgggctcaccgtttcca

SEQ ID NO: 7216 - DNA, 397 bp, Homo sapiens
ttttaattttctctgaatgtttatatttacttctaccaataatctgggaataagaatgagtaagcagccgggtctattattccagcagctcacccgctctttcagagtatgggtggttcagagacctgaaaatgaaatgtcggttattttacactactaagtgagactcaagaattatgctggctccaggttaaaaggacttctgactcaaaatctgcctcttgagttcatggttcaccacttccagcctggaacttggtgctgattgagacttggaaagaagacaagctccacccaaactgggaagtttcctatcaagtgctcctgaccactgagacagccatgtgaacagctgaatgggggtggactcactatactcgagtcaaggaactggtga

SEQ ID NO: 7217 - DNA, 196 bp, Homo sapiens
cacattattgacagtttcagatattataagctgtatcccagggccctctgacttcaaagtctgggtaattttctcttttcggttcatgaaacagatctgtagtttatcccatttagcaccgtaattgtaagaactattcatgagaccagtagaacctacagaaacaagtcctgagctttgcccttctaagtagtaa

SEQ ID NO: 7218 - DNA, 442 bp, Homo sapiens
aactgtgagaaataaattgctcttgcttataagtcatgtagtttatggtattttgttataccagcccaaacagactaagatagactattagtctaagaaattatttctcatatgcacattaaatccctcttcctgcaaatgaagtccacatctttgtatcataacctaatgttccagttaagtttaggcatcactgaactacaaataaccccttcaggtccttttttttttttcttttttttgagaggaagtctcgctctgtcgcccaggctggagtacagtggcgcgatctcggctcactgcaacctccgcctccagggttcaagcaattctcctgtctcagtctcctgagtagctgtagtcacaggtgcacgtgaccatgcccagctgctttttgtatttttagtatggacggggtttcaccatattggtcaggctggtc

SEQ ID NO: 7219 - DNA, 403 bp, Homo sapiens
gctgggattacaggcgtgagccacagagcctggccttctgttgctagcatttaatagtgaaaggttgcatgctttctgccagagaccaggaacaagccaaatatgtctgctgtcactattcttattcaacatagtgttggaagttctagctaatccagtaagctgagaaaaggaaataaaagacgtgtagattggaaaggaagaaataaaatcctatttgcagatgacatgattgtccgtgtagaaaatcccaagggatctacagaaaacttggagaactaataactgaattccccagggtcacaagatacaagggatacaaggtaaacatgcagaaatccattttatttctatatgccattaatgagtacctagacacaaattaaaaatacattaccattta

SEQ ID NO: 7220 - DNA, 307 bp, Homo sapiens
gagtgaaatctccgagtgctaatgggaaagtaaaatggtgcagctgttctgaaaaaaaaaaaaaaaaagtttggcagtttcttaaaaagttaaacacgtgcctaccatgtgacgcagccattgaacccccaggttatcctagagatacgaaaacgtaagctcacataaaaacctgtatgcgatcgctcatagcagctttgcttggaattgtcaaaacctggaaacaagccaggtcttcaacaagtatgtggataaacaaactgcaatatatccataccatggaatgctactagccaaaaaaaaaaaa

SEQ ID NO: 7221 - DNA, 390 bp, Homo sapiens
ggacagaaaagggagagagggaagtttgctttttttctcctgcatacccttttataccagttgagttttgtcccatgtgtgcatactattaaaaaaccatgatacttgaccaggtgcagtggctcacgctggtaatcccagcactttgggaggccgaggcgggtggatcacctgaggttgggagttcgagaccagcctgaccaacatggagaaaccttgtctctactaaaaatacaaaattagccacgcatggtggtgccttcctgtaatcccagctactcgggaggctgaggcaggagaattgcttgaacccaggaggcggaggttgcagtgagccaagaacgcgctattgcactctagcctgggcaacaagagcaaaattctgcctca

SEQ ID NO: 7222 - DNA, 1165 bp, Homo sapiens
tcctcttaggcagaaatgttaattgacaatcaaaggagtaacaggtgcatacctgaattcacaagcctttggggcccatcttgaatacttctgcagatccaggcctggtttaggttatgccttctttcatccatgctcacctgagagttccagtgttttccttgttcttgtttctgcattcagagttctaaaatttgactctggctggtcattttatcacttctctctcttagagtagactatagatctatatctgaacatttagcttctaattgatttgtattgataataggtgaaaaagaagttaattagcctggaaatgactacaccataagatcagactttggttaaaaatttaaccacattaattttgataatcttttacattcatttaatattagctttgttttatgttaaatttgcaaactttcacatttttatcaatgttcttgagagggaggcaaagaaattctcaatttatgatgcaaaatggaacttcaggtcaattatttgacctctgtgatttagatcacacatcttataagtgggggagcaactgctcagtctgattcctggtatttttttctgttataaagcacactcttaaaaagaaagaattcaaagttgcttccaaaagtacaatataagaaaaataattttaggaaaggtcaaaaatgattagaagaaggaagtgagaattctgttaatttagtctggctttgagctttctgtttgttagccaagacataaagggaaaactttggctcatagaatacttatctgattaaagaaagcacatgaatttgcatggagtacagactttttttggcattgaattctgtgaagaatatattatatgatcttactaggggatatctgtaacaatgaattataccttcactgctaattttgtaaaagatataaaagtaaacttcaaatgagcatttttcttactcttcttaaccattatcacatgaactcattgccaaggttttaggtatgatgatatcagatgaaaaggtacaagatatatgcttaagtgaagcatttacactaggttttagtgttgatgcaatgtatcttttttcattattttacttttaacctattagtctttatgtttaaagtgattttcttattataagtatgtagttgggtcttactt

SEQ ID NO: 7223 - DNA, 244 bp, Homo sapiens
gacctgtttaacattacggtagacatccatgggtcacctccccagcacacatgtcgcctctccaaacagtttcctaatttcctgatagaaccctccctcaattttcaactgcttctagctcctcatgagggagtcctcactgaattaaacccatcaggatattaaaccccctcgccccagtaattcgctctgaaatgaactgataactccatcatagctaatgaaattggaggggacatttgct

SEQ ID NO: 7224 - DNA, 1814 bp, Homo sapiens
aatctgtgcctggccggagtccagggtaaattagtagcatggtgttagatgttagaaacagaactgttatttgcagtgttaggtctaggatcccagttctagtaggacagccctgcaagacaatcaaccagaagcctccaggagcttctacctatggcttattcacaactgggcaagaaaacatcattggtaagaactgctgagtgtgcccttagaaagccctagtagctccagctgtgactatatcaactgtgtgccaagtgtgactttgtacagttttatgtttccactctcctgtatgtgtagccactcgatgcctaacctaccttccacaagccagccccgcatccctgctcccgcagtgtaagtgcagagcctgcctcactggtaagggaaaaccttggcttgggaggccagccctggcccttgaaggggttggctgtgcccagcccacctggctgcagtgggcagctcatgtctgtatctccaaagtgatgtttgtttgcaaaacaccggctgaactgagctggtgttgccaactcttggcagcactgggccaaaccgaccacataccatgagctcccaaatggcgtgtgctcactgtgagacgtcctgccacaccccacaggagacggaggcagtgggcatttggaaccaattctattcagacttcgtcaaagccaaagtcagtctggtgttgtcagttgacacatctccagagttcatgacagctcaacctctccccttgtacagaagccatttttgtaaaaccacactgacctaaattcagctgccaaacacagtctttcctattgatccgctcggcttatgttgaaaatttcaatgtcatgattacctggttggtttgggtttttgttttgttattttccattagaaatataaagatgtcaagaagcttttaaaggtcaacacaaaaaaccaaggccaggagtgaggggctctttcttaccgtaaataaggggaaaaggcagttagctcaaggacttgtgacggatccactttggtgttcaaggacctgcttatgccctcagtgccaatcggctcttggtgagatgactgtactcctaaggaaaatagccacttctgcagtctattatgcttttataactgtttaaaggtacttttctattgtcatttttaaaaaataaagtgcttattccagctgtcacaccattgcttgacaaattcttttttagcaagaccaactacatgtatcccacactgcagacaagacgccagcagatttcattcccattgtcaggcttcggcagagctaagcaagcattggccattgagcttaggcacaaagagattaaaggaggaagcagataccggggaaagccagagagtaagtctgcaaacgcacaaccacagtggctggtgacccacaatgacaccagaggcagagggacctcaagggaggcccctcatctacctcagcctacaaagcttgactcaggattatctgaattatattaaaatgtcacttgggttttctgctgacttaaatatatcttacgccaggcatggtggctcacacctgtaatcccaacactgggaaactgaggcaggaggcttgcttgatcccaggagtttgagaccagcctggacaacacagcaagaccctcaattttaacattagccaggagtactagcacctgtggtcctagctactcaggggaccacagaggaaagacaacttgagcccaagaggtcgaggctgcagtgagccatgactgctccactgcactgaagcctcggcaacagggcaagaccctgactccaaaaccata

SEQ ID NO: 7225 - DNA, 360 bp, Homo sapiens
cttgaaggatgctgtgatagtaaatggatttatacatggaacgtgcttgaaataatgcctgacagtttgtaaagacaaggtctcactctgttacccaggctggagtccggtggtataatcatacctcactgcagcctcaaactcctgggctaaagtgatcctcccacctcagcctcctgaatagctagaactacagaaagtgctcccggtgcctgtggtccatagagtggagtgagtctctaagcaaatctggagggactctgggagctgaagattcagaatatctccacttattcttgccatagcctttgctgctcaactgttgggtgccatgatggtatgagctgttcccttcctcag

SEQ ID NO: 7226 - DNA, 381 bp, Homo sapiens
ctaactgtttgggaggcggaggtggtaggttcacttgagctaggagtttgagaccagcctgggcaaaatagcaagaccctgtctctacataaaaaaagaaaagaaaaacattagctgggtgtggtggtgtgctcctgtagtccgagctatttgggaggctgaggtgggagaatcacttgagcctgggcgattgaggctgcagtgagctgtgccactgcactccagcctgggcaacagagcaagagcctggagattttaaattttgtaaaaggccagtgaagttttatatttttctcagcaaaaattatgccagcaagattggaaacaaacagaagactcaaggtatcaaacatatttaaaaaggggtctcaattgactgaa

SEQ ID NO: 7227 - DNA, 447 bp, Homo sapiens
caactcaggaaacagttaacccagaaataatacttagagaagaaaaaaattttatttaaaccattaataccttcagctttcatgacacaaaaaataattctattttctataaaagacccaccatcccccaaaagaaaagaaagttttatggataataagtagctttggaaaaattcagtctgggcacggtggcttttgcctgtaatcccagtactttgggaggctgaggcgggtggatcaggaattcaagaccagcctggctaatatggtgaaacttcctctctactaaaaatacaaatattagctgggcgtggtggtgtgcaccagtaatcccagctactcgggaggctgaggcaggagaatcatttgaacccgggaggcagaggttgcagtgagccaagatcatgccactgtactccagcctgggcgacagagtgagactgtctc

SEQ ID NO: 7228 - DNA, 443 bp, Homo sapiens
tttttttttgctcttgtcacccaggctgcagtgcaatggcatgatcttggctcactgaaacctgtctcctggttcaagcaattctcctgcctcagcctcctgagtagctgggattacaggtgtgcaccaccaagcccagctaatttttttgtatttttagtagagacgggtttcaccatgttggtcaggctggtctcaaactcctgacctcaagtgatccacccacctcggcctcccaaagtgctgggattacagatgtgagccaccgcacccagccttatgcaacattttaaataattttgtaaatgaaatatagttttgactgcaacccatcacaagaggtcaagtgtgaaactttccacttgtggcatcatgccacaactatatgccaaccagttggaaaacctaaaagaaatggataaattggcctttggtctttcaga

SEQ ID NO: 7229 - DNA, 365 bp, Homo sapiens
aagtaagactcctctgtggttttaatgagaaatgtttagtcagtctagtgttttctttttgttatgttagagtgagggtcttttttatgttagagtgagggtcttctgcaaccttctacatcctaattagaagtcatccttggataaattgctttttaaagcccaaactggaaaataaatctgggcctacatatttagaattttagaaagttcagaaataaagttaggaaaggtaaatgaaagtaaacataagttagtgaagtaaaggtaaatttcatgttacctttcagttctcaattcagttctttgatgatctacttgataggagttgaaggctgcagcaagcaatgattgtaccactgcac

SEQ ID NO: 7230 - DNA, 540 bp, Homo sapiens
tataaaacaaagtcttgctttgtcactcacgctggagtgcaattgctcaatcagagctcactgcagcctcgacctcctgggctcaagtgatccttccacctcagcttccctggtagctgggactatagaagcatgccaccacgaccacctaattttcttctgcacagagatggagtctcgctatgttgcccagactggtcttgaactcctgggctcaggtgatcctcccgcctcggcctcccaaaagtgctgggattacaggcatgagccaccatgcctggctggctattgttgtaagccactaagttttgagggatgttttcttacacagcaaaaccaacccatacagagctctatcttagactcacctctactcttttcctgtatgctctcctcaggtgactcctatggtttttaaataccatctttacactcacaactcttacattaatgaaaactgttctgaactacaagttcatactcccaatttgccagtgccatttaagtcccacaggcctctcaaagtcttgtctttaagtt

SEQ ID NO: 7231 - DNA, 88 bp, Homo sapiens
gatggcaggtatgtgagcctaggagttgtgtcaataccagctgggcgtcccttccctgtccctctctccccagcccacactcccagtc

SEQ ID NO: 7232 - DNA, 1046 bp, Homo sapiens
gtcatgtgccacataatgacttttcagtgaatgacagaccatatatacgatagtggtcctgtaagattataatacagctactgtaccttttctatgtttagatacacaaatacctactgttatgttacagttacctacagaattcagtacagtaacatgctgtacaggtttgtagcctaggagcaatagggctatatcatgtagcctaggtgtgtagtagactatatactgtctaggttgtgtaaatatatgatgtttacagaatgaaatcacctaatgatgcatttctcagaacatatcatcatcgttaagtgacacatgaatgtacatgttattaatacctcatacaatgtaaatgctatgtaaatagttgttatactgtattgttgagggaccaatgtcaagaaaaacagttgacacattcagtacagtcacaagcatccattttttgaaaatattttcgatttgcagtcggttcaatccatggatacagagctcacagatacggagggccaactgtattgctcttttctctgtttggtcttcattttctttttctttttctttttgcttcaagactaaaactttggcaatttctatataaaataaagctttttcaggccttagttccctcatttataactgatgcctgtgtatctttcttctgttaaagtctgtattctaattgaaatttgacttatttttaaagttgtcagaatttatgtgtcccaaatcggtgacatttcctttgatactcctgcttttgccaggaatgatttggcaacctccgagaatcttggtcaaattcttctgtgtgtcataaggatgagaaatcattactctttaagagtgatttgagcctgggcaacatggcaaaacctcatctctataaaaattagccctgggcttggtgactgtgctcccagctactccagaagctgaggtagagaggattgcttgagcccaggaggtcgaggctgctgtgactgtgaccgcacactgcactccagcctgggcaactgagcaagactcgtctcaaaaaaaaa

SEQ ID NO: 7233 - DNA, 478 bp, Homo sapiens
tattcacagctacattcaaacagaatccaaaacccacatcagaactgacttgatgtcttgtatggtggagctgaaagcaagctgtctgctctaagcaatggtcttcatttgggaattaatgttcactgatcaactgcagcagtttatatctgtcatgttttaatccactgcatgaggaagtgctaataagtgtattaaatatttccaagcatagctacaaaattatatgtttgcttaacacctttctatgatagaggaagtatatactatggttgtcttcttgtagtatgtcttttaattttgttcaatgtgttatcaactgttttaaggaatggggattgaaattcgtgtgcaaactgatatgtatataactcctgaggcaacagaagtgcccggtcatatggtgtaaaaatgtaaatacaggaaaatttcatttttctaataaagataatttctgccaattgatatgaaaatgaga

SEQ ID NO: 7234 - DNA, 336 bp, Homo sapiens
tttttttgcagctattgtaaaagcggttgagttcttgatttgattctcagcttggatgttgttggtgtatagccaactactgatttgtgtacattgattttgtatcctgaaactttactgaatttgtttgtcatatctaggagctttttggataggtctttagggttttctaggtatacaatcatatcattggcaaacagcaacagttttacttcctctttactgattgggatgccctttatttccttctcttgctacggattgctctaggctaggacttccagtactatgttgaatagaacgtggctgaaagtgggcatcctttcttggtgcaac

SEQ ID NO: 7235 - DNA, 458 bp, Homo sapiens
ttttttttttggctcatgcctgtaattccagcactctgggagcccaaggcaggaggatcacttgaggacacgagtgtgaggccagcgtggacagcacagttgagtccccatctccacaaataagttagctgggcatggtcagaggactcgggaggctgaggcaggaggatcgtttgagctcaggaggttaaggctgcagtgagctatgatcgtgccactgcactctagcctgggtgacagtgagatcctttgccttaaaaaaaaagtatgccttttagtattattagaagaaaaccaagtagaagcgactttcctaacttgcaaacgttaaacagctgcactttgtaatgtacagaaaagtttactctatttaggagcttctaggccggtaagcaggacaagatacaaattaagtgcaagagtttgctatttcatagtggccctccgtgctacagaag

SEQ ID NO: 7236 - DNA, 877 bp, Homo sapiens
gaaaaaaaacccaaaaagtgaaaaaagccagtttaggaggtcccagacgggctggttccactgacacacctttctgggagagagccagggcctgtggcaggcggagatgcctgctgctctttttgggggggccatcgctgtgtgctctgtgaatggtggttacttatgaaggttacagggatgtgtgtgtgtgtgaacttgtatgacactacaccaggaaagggcaaattttactgtatgtaaatttaaaaataatttttaaaaagttataaaaaataaagcaaatcacaaacaaaatagcctaaatacaaaagaaaaaaaaatgagacattccggaagataactctatccaactataccattatgaaaattataagtcactttaggccgggcacggtggctcatgtctgtaatcccagcactttgggaggctgaggtgggcggaatcacgtcaggattttgagaccagcctggccaacatggcaaaaccccgtctctactaaaaatataaaaattagccatgtgtggtggcgggcacttgtaatctcagctacttgggaggctgacacaggagaattgcttgaacctgggaggtggaggttgcagtgagctgagatcgcaccactgcactctagcctgggcaacagagcaagactcggtctcaaaaaaaaaacaaaacaaattttataaatcactttaactaaaactctaaattagatcagattataatattcttagtcaaaatacccttttatgaacatgcaccaaacatcaagtagcggtcagggtcagtgaggacgccgtctgtggcggagctggaagtcggctgagatgttcaaacatcccacaacatttagcaaggcttcagacagaggca

SEQ ID NO: 7237 - DNA, 2375 bp, Homo sapiens
ccacctccctctcatggctagtaggagagactggtgcttgccccgcccggtggactaactcgcttaattttaaataaaaagtcgaggacacggcggtcgttttcccgaagacatgggccctcccatgggccatttgctccctggaggccctcgcgtcttgctgagcccggggagttaggatgacgcgagcggtgagggaacccggaacaattccttcacagaacaattgaggcgaggcctttgggagtactttgtggaacgaaccccggcgggccctgccagacgcacagggatggcggcggaggcggccgatttggggctgggggccgccgtccccgtggagctgaggcgggagcgacgcatggtgtgcgtggagtacccgggagtggtgcgtgatgtggctaagatgctgccgactctgggcggcgaggaaggcgtctcccggatctacgcagaccccaccaagaggctggagctgtacttccggcccaaggacccatactgccacccagtgtgcgccaaccgcttcagtaccagcagcctgctgctccgcatcaggaagagaacgaggcggcagaaaggggtgctgggcactgaggcccactccgaggtcacatttgacatggagatccttggcatcatctccaccatttacaaatttcaggggatgtctgacttccagtacttggctgtgcatacggaagcaggcggcaagcatacgtcaatgtatgacaaggtgctcatgctccggcccgagaaggaggcctttttccaccaggagctgccgctctacatccccccacccatcttctcccggctggacgccccggtggactacttctaccgaccagagacccagcaccgggaaggctacaacaatccccccatctcaggtgagaatctgattggcctgagcagagcccggcgcccccacaatgccatctttgtcaactttgaggatgaggaggtgcccaagcagccactggaggctgcagcccagacgtggaggagagtctgcactaaccccgtggaccggaaggtggaggaggagctgaggaagctgtttgacatccgtcccatctggtcccgaaatgctgtcaaggccaacatcagcgtccacccagacaagctcaaggtcttgcttcccttcatagcctattacatgataacaggcccctggcgcagcctatggattcgatttgggtatgacccccgaaaaaacccagatgccaagatttatcaagtcctcgatttccgaatccgttgtggaatgaaacacggttacgcccccagtgacttgccggtcaaagcaaagcgcagcacctacaactacagcctccccatcaccgtcaagaagacatccagccagcttgtcaccatgcatgacctgaagcagggcctgggcccgtcggggacgagtggtgctcggaaaccagcttccagcaagtacaagctcaaggactctgtctacatcttccgggaaggggccttgccaccctatcggcagatgttctaccagttatgcgacttgaatgtggaagagttgcagaagatcattcaccgcaatgacggggcagagaattcctgcacagaacgggatgggtggtgcctccccaagaccagcgacgagctcagggacaccatgtccctcatgatccggcagaccatccgctccaagaggcctgctctcttttccagctcagccaaggctgatggcggaaaagagcagctgacgtacgagtctggggaagacgaggaggatgaggaggaggaggaagaggaggaggaggacttcaagccatccgacggcagtgaaaacgaaatggagacagagattctggactacgtgtgacagggcccaaggctgggcctccctgacccggccagactggtgtctggcctaatgagggagccggggctccccattgccacccacagtgcccggaatggccctaggaggccctctgaggagagctagagtcccagcaaagggtgcagctgaccctagcactggctgtgacatgctgcttggtgctgcctctggtcctgaggggttagggacatccccaaagggtataccctggctctgccacccatgaaccagcccagcatccagccagtgagtgggcacccaatgcctctcaggatgagaccagtaaatgccggaggtggagctgggcagctgtggagccccaggccacaggccagtctcgcttggctctcatgactgtggtggtggagatagcgtggggagcctcgcccatggtctcacgtggcaagaagtgcctttagctctggatcccaaccgtttggcacagctttggccacagccaggcccctctggaattgtccttattaaaccagtttcccgagaa

SEQ ID NO: 7238 - DNA, 1108 bp, Homo sapiens
ccacctccctctcatggctagtaggagagactggtgcttgccccgcccggtggactaactcgcttaattttaaataaaaagtcgaggacacggcggtcgttttcccgaagacatgggccctcccatgggccatttgctccctggaggccctcgcgtcttgctgagcccggggagttaggatgacgcgagcggtgagggaacccggaacaattccttcacagaacaattgaggcgaggcctttgggagtactttgtggaacgaaccccggcgggccctgccagacgcacagggatggcggcggaggcggccgatttggggctgggggccgccgtccccgtggagctgaggcgggagcgacgcatggtgtgcgtggagtacccgggagtggtgcgtgatgtggctaagatgctgccgactctgggcggcgaggaaggcgtctcccggatctacgcagaccccaccaagaggctggagctgtacttccggcccaaggacccatactgccacccagtgtgcgccaaccgcttcagtaccagcagcctgctgctccgcatcaggaagagaacgaggcggcagaaaggggtgctgggcactgaggcccactccgaggtcacatttgacatggagatccttggcatcatctccaccatttacaaatttcaggggatgtctgacttccagtacttggctgtgcatacggaagcaggcggcaagcatacgtcaatgtatgacaaggtgctcatgctccggcccgagaaggaggcctttttccaccaggagctgccgctctacatccccccacccatcttctcccggctggacgccccggtggactacttctaccgaccagagacccagcaccggtaaggcccccctccatgcagcctcggttctctatcctgaaaatgggatggtccgggcacggaggctcacacactgggcgtggtggtgcacacctgtaattccagctactcgggaggctgaggctggagaatcacttgaacccaggaggcggaggttgcagtgagccaagatcgcgtcactgcactccagcccgggtgacagagtgagactttgtctcccaaaaaaaaaaaaaaaaaaaaaaag

SEQ ID NO: 7239 - DNA, 3193 bp, Homo sapiens
ccacctccctctcatggctagtaggagagactggtgcttgccccgcccggtggactaactcgcttaattttaaataaaaagtcgaggacacggcggtcgttttcccgaagacatgggccctcccatgggccatttgctccctggaggccctcgcgtcttgctgagcccggggagttaggatgacgcgagcggtgagggaacccggaacaattccttcacagaacaattgaggcgaggcctttgggagtactttgtggaacgaaccccggcgggccctgccagacgcacagggatggcggcggaggcggccgatttggggctgggggccgccgtccccgtggagctgaggcgggagcgacgcatggtgtgcgtggagtacccgggagtggtgcgtgatgtggctaagatgctgccgactctgggcggcgaggaaggcgtctcccggatctacgcagaccccaccaagaggctggagctgtacttccggcccaaggacccatactgccacccagtgtgcgccaaccgcttcagtaccagcagcctgctgctccgcatcaggaagagaacgaggcggcagaaaggggtgctgggcactgaggcccactccgaggtcacatttgacatggagatccttggcatcatctccaccatttacaaatttcaggggatgtctgacttccagtacttggctgtgcatacggaagcaggcggcaagcatacgtcaatgtatgacaaggtgctcatgctccggcccgagaaggaggcctttttccaccaggagctgccgctctacatccccccacccatcttctcccggctggacgccccggtggactacttctaccgaccagagacccagcaccgggaaggctacaacaatccccccatctcaggtgagaatctgattggcctgagcagagcccggcgcccccacaatgccatctttgtcaactttgaggatgaggaggtgcccaagcagccactggaggctgcagcccagacgtggaggagagtctgcactaaccccgtggaccggaaggtggaggaggagctgaggaagctgtttgacatccgtcccatctggtcccgaaatgctgtcaaggccaacatcagcgtccacccagacaagctcaaggtcttgcttcccttcatagcctattacatgataacaggcccctggcgcagcctatggattcgatttgggtatgacccccgaaaaaacccagatgccaagatttatcaagtcctcgatttccgaatccgttgtggaatgaaacacggttacgcccccagtgacttgccggtcaaagcaaagcgcagcacctacaactacagcctccccatcaccgtcaagaagacatccagccagcttgtcaccatgcatgacctgaagcagggcctgggcccgtcggggacgagtggtgctcggaaaccagcttccagcaagtacaagctcaaggactctgtctacatcttccgggaaggggccttgccaccctatcggcagatgttctaccagttatgcgacttgaatgtggaagagttgcagaagatcattcaccgcaatgacggggcagagaattcctgcacagaacgggatgggtggtgcctccccaagaccagcgacgagctcagggacaccatgtccctcatgatccggcagaccatccgctccaagaggcctgctctcttttccagctcagccaaggctgatggcggaaaagagcagctgacgtacgagtctggggaagacgaggaggatgaggaggaggaggaagaggaggaggaggacttcaagccatccgacggcagtgaaaacgaaatggagacagagattctggactacgtgtgacagggcccaaggctgggcctccctgacccggccagactggtgtctggcctaatgagggagccggggctccccattgccacccacagtgcccggaatggccctaggaggccctctgaggagagctagagtcccagcaaagggtgcagctgaccctagcactggctgtgacatgctgcttggtgctgcctctggtcctgaggggttagggacatccccaaagggtataccctggctctgccacccatgaaccagcccagcatccagccagtgagtgggcacccaatgcctctcaggatgagaccagtaaatgccggaggtggagctgggcagctgtggagccccaggccacaggccagtctcgcttggctctcatgactgtggtggtggagatagcgtggggagcctcgcccatggtctcacgtggcaagaagtgcctttagctctggatcccaaccgtttggcacagctttggccacagccaggcccctctggaattgtccttattaaaccagtttcccgagaaaaaaaaaaaaaaaaaaaaaaaaaaaaaaaaaaaaaaaaaaaaaaaaacaaaaaaaaaaaaaaaaaaaaaaaaaaaaaaaaaaaaaaaaaaaaaaaaaaaaaaaaaaaaaaaaggaggggggggggggcggcgagaaaagaaaacaaaaaaaaagggggggggggggggggcgaaaacaagaaggcagaccaactcgcaagtctggggctgaacgacaaaagaccaggacgtgcgagacacaagcggggggggtgggcgcccaacacaacaaacaaaggcggggggggggaagcacaccgatgcgtgacaaaacaccccagaagaagcaaggcgtcagcagaacagcgagtagctatcaatcaaaaacggcaggagggaggcagcgagaataaaaaatccccaggggcgcgtgggggtgggacaagcaacaagcgaggagcaaagggccagccagaacaacgcaaggagacagcaagagaaaacaaaacaagcgagaacggagagaaaaagaacgccaacacagcaggagccgaagccggcaccaacggccacgcgacagaacccagacaccacagagcagacgagggcagacgagaccacaacccacgaaaccagcgagacagacacgaccaagagccagagacaagacaaacacaagagacgaggaggacacagaaacgagggccaggcgagagacacgcaaagagcgagagaagagcagagacacagcaaggacgacgcagacacgggagaatcagtcagactaacaaacaaaaaccaagaacaaaaaccggaacagtcggcaggatgcaaccagg

SEQ ID NO: 7240 - DNA, 3048 bp, Homo sapiens
ccacctccctctcatggctagtaggagagactggtgcttgccccgcccggtggactaactcgcttaattttaaataaaaagtcgaggacacggcggtcgttttcccgaagacatgggccctcccatgggccatttgctccctggaggccctcgcgtcttgctgagcccggggagttaggatgacgcgagcggtgagggaacccggaacaattccttcacagaacaattgaggcgaggcctttgggagtactttgtggaacgaaccccggcgggccctgccagacgcacagggatggcggcggaggcggccgatttggggctgggggccgccgtccccgtggagctgaggcgggagcgacgcatggtgtgcgtggagtacccgggagtggtgcgtgatgtggctaagatgctgccgactctgggcggcgaggaaggcgtctcccggatctacgcagaccccaccaagaggctggagctgtacttccggcccaaggacccatactgccacccagtgtgcgccaaccgcttcagtaccagcagcctgctgctccgcatcaggaagagaacgaggcggcagaaaggggtgctgggcactgaggcccactccgaggtcacatttgacatggagatccttggcatcatctccaccatttacaaatttcaggggatgtctgacttccagtacttggctgtgcatacggaagcaggcggcaagcatacgtcaatgtatgacaaggtgctcatgctccggcccgagaaggaggcctttttccaccaggagctgccgctctacatccccccacccatcttctcccggctggacgccccggtggactacttctaccgaccagagacccagcaccgggaaggctacaacaatccccccatctcaggtgagaatctgattggcctgagcagagcccggcgcccccacaatgccatctttgtcaactttgaggatgaggaggtgcccaagcagccactggaggctgcagcccagacgtggaggagagtctgcactaaccccgtggaccggaaggtggaggaggagctgaggaagctgtttgacatccgtcccatctggtcccgaaatgctgtcaaggccaacatcagcgtccacccagacaagctcaaggtcttgcttcccttcatagcctattacatgataacaggcccctggcgcagcctatggattcgatttgggtatgacccccgaaaaaacccagatgccaagatttatcaagtcctcgatttccgaatccgttgtggaatgaaacacggttacgcccccagtgacttgccggtcaaagcaaagcgcagcacctacaactacagcctccccatcaccgtcaagaagacatccagccagcttgtcaccatgcatgacctgaagcagggcctgggcccgtcggggacgagtggtgctcggaaaccagcttccagcaagtacaagctcaaggactctgtctacatcttccgggaaggggccttgccaccctatcggcagatgttctaccagttatgcgacttgaatgtggaagagttgcagaagatcattcaccgcaatgacggggcagagaattcctgcacagaacgggatgggtggtgcctccccaagaccagcgacgagctcagggacaccatgtccctcatgatccggcagaccatccgctccaagaggcctgctctcttttccagctcagccaaggctgatggcggaaaagagcagctgacgtacgagtctggggaagacgaggaggatgaggaggaggaggaagaggaggaggaggacttcaagccatccgacggcagtgaaaacgaaatggagacagagattctggactacgtgtgacagggcccaaggctgggcctccctgacccggccagactggtgtctggcctaatgagggagccggggctccccattgccacccacagtgcccggaatggccctaggaggccctctgaggagagctagagtcccagcaaagggtgcagctgaccctagcactggctgtgacatgctgcttggtgctgcctctggtcctgaggggttagggacatccccaaagggtataccctggctctgccacccatgaaccagcccagcatccagccagtgagtgggcacccaatgcctctcaggatgagaccagtaaatgccggaggtggagctgggcagctgtggagccccaggccacaggccagtctcgcttggctctcatgactgtggtggtggagatagcgtggggagcctcgcccatggtctcacgtggcaagaagtgcctttagctctggatcccaaccgtttggcacagctttggccacagccaggcccctctggaattgtccttattaaaccagtttcccgagaaaaaaaaaaaaaaaaaaaaaaaaaaaaaaaaaaaaaaaaaaaaaggggggggggtaaaatttcccccggggggccccaaccattagacgcgattctcaagtttttttgttccaaaagggggccccctttggtggggagccgctaatttataataagcataagagccaggggcgccgcgcttttaaacaacggtctggtgcagtggggaaaaaagcgtgctaagcgtgtgcacactcttgctgggaagaagaaccccttactttgctgtggggggggacacaaatatttgggcaccaaatctccactgaccagagagaattataaagcgcctcaagggggaaattttaacaacttttcagagggtgttgttgagtgggtgtttaacacacgagcgggaaaatagggcctggggggcatgaaaagagttggggcacgaaagcggaatttggattttgcggaaaaattttttttaccgcgcgggttcctgtgttataaaaaccgggacaaacaagagcagccagcacgcacaagacacacagagccaacacatcacagaggcgcagcaagaagcaagacgatcaacaaacacagagagaaaaacaaccagaagtcgaacaagcgcacgacacgagacgtaagtgagacaaaaacataatacaacagaaagagagaga

SEQ ID NO: 7241 - DNA, 1054 bp, Homo sapiens
ttaccgaggattcgtagcatttcagcagcgtaagaagataccagccagcttgtcaccatgcatgacctgaagcagggcctgggcccgtcggggacgagtggtgctcggaaaccagcttccagcaagtacaagctcaaggactctgtctacatcttccgggaaggggccttgccaccctatcggcagatgttctaccagttatgcgacttgaatgtggaagagttgcagaagatcattcaccgcaatgacggggcagagaattcctgcacagaacgggatgggtggtgcctccccaagaccagcgacgagctcagggacaccatgtccctcatgatccggcagaccatccgctccaagaggcctgctctcttttccagctcagccaaggctgatggcggaaaagagcagctgacgtacgagtctggggaagacgaggaggatgaggaggaggaggaagaggaggaggaggacttcaagccatccgacggcagtgaaaacgaaatggagacagagattctggactacgtgtgacagggcccaaggctgggcctccctgacccggccagactggtgtctggcctaatgagggagccggggctccccattgccacccacagtgcccggaatggccctaggaggccctctgaggagagctagagtcccagcaaagggtgcagctgaccctagcactggctgtgacatgctgcttggtgctgcctctggtcctgaggggttagggacatccccaaagggtataccctggctctgccacccatgaaccagcccagcatccagccagtgagtgggcacccaatgcctctcaggatgagaccagtaaatgccggaggtggagctgggcagctgtggagccccaggccacaggccagtctcgcttggctctcatgactgtggtggtggagatagcgtggggagcctcgcccatggtctcacgtggcaagaagtgcctttagctctggatcccaaccgtttggcacagctttggccacagccaggcccctctggaattgtccttattaaaccagtttcccgagaa

SEQ ID NO: 7242 - DNA, 2396 bp, Homo sapiens
ccacctccctctcatggctagtaggagagactggtgcttgccccgcccggtggactaactcgcttaattttaaataaaaagtcgaggacacggcggtcgttttcccgaagacatgggccctcccatgggccatttgctccctggaggccctcgcgtcttgctgagcccggggagttaggatgacgcgagcggtgagggaacccggaacaattccttcacagaacaattgaggcgaggcctttgggagtactttgtggaacgaaccccggcgggccctgccagacgcacagggatggcggcggaggcggccgatttggggctgggggccgccgtccccgtggagctgaggcgggagcgacgcatggtgtgcgtggagtacccgggagtggtgcgtgatgtggctaagatgctgccgactctgggcggcgaggaaggcgtctcccggatctacgcagaccccaccaagaggctggagctgtacttccggcccaaggacccatactgccacccagtgtgcgccaaccgcttcagtaccagcagcctgctgctccgcatcaggaagagaacgaggcggcagaaaggggtgctgggcactgaggcccactccgaggtcacatttgacatggagatccttggcatcatctccaccatttacaaatttcaggggatgtctgacttccagtacttggctgtgcatacggaagcaggcggcaagcatacgtcaatgtatgacaaggtgctcatgctccggcccgagaaggaggcctttttccaccaggagctgccgctctacatccccccacccatcttctcccggctggacgccccggtggactacttctaccgaccagagacccagcaccgggaaggctacaacaatccccccatctcaggtgagaatctgattggcctgagcagagcccggcgcccccacaatgccatctttgtcaactttgaggatgaggaggtgcccaagcagccactggaggctgcagcccagacgtggaggagagtctgcactaaccccgtggaccggaaggtggaggaggagctgaggaagctgtttgacatccgtcccatctggtcccgaaatgctgtcaaggccaacatcagcgtccacccagacaagctcaaggtcttgcttcccttcatagcctattacatgataacaggcccctggcgcagcctatggattcgatttgggtatgacccccgaaaaaacccagatgccaagatttatcaagtcctcgatttccgaatccgttgtggaatgaaacacggttacgcccccagtgacttgccggtcaaagcaaagcgcagcacctacaactacagcctccccatcaccgtcaagaagacatccagccagcttgtcaccatgcatgacctgaagcagggcctgggcccgtcggggacgagtggtgctcggaaaccagcttccagcaagtacaagctcaaggtcagccttcagacactgagggactctgtctacatcttccgggaaggggccttgccaccctatcggcagatgttctaccagttatgcgacttgaatgtggaagagttgcagaagatcattcaccgcaatgacggggcagagaattcctgcacagaacgggatgggtggtgcctccccaagaccagcgacgagctcagggacaccatgtccctcatgatccggcagaccatccgctccaagaggcctgctctcttttccagctcagccaaggctgatggcggaaaagagcagctgacgtacgagtctggggaagacgaggaggatgaggaggaggaggaagaggaggaggaggacttcaagccatccgacggcagtgaaaacgaaatggagacagagattctggactacgtgtgacagggcccaaggctgggcctccctgacccggccagactggtgtctggcctaatgagggagccggggctccccattgccacccacagtgcccggaatggccctaggaggccctctgaggagagctagagtcccagcaaagggtgcagctgaccctagcactggctgtgacatgctgcttggtgctgcctctggtcctgaggggttagggacatccccaaagggtataccctggctctgccacccatgaaccagcccagcatccagccagtgagtgggcacccaatgcctctcaggatgagaccagtaaatgccggaggtggagctgggcagctgtggagccccaggccacaggccagtctcgcttggctctcatgactgtggtggtggagatagcgtggggagcctcgcccatggtctcacgtggcaagaagtgcctttagctctggatcccaaccgtttggcacagctttggccacagccaggcccctctggaattgtccttattaaaccagtttcccgagaa

SEQ ID NO: 7243 - DNA, 1069 bp, Homo sapiens
cctccgtggccttccagcctgtctgcccaacctgctcctggtgaccagccagctccctggagagaccccatgggagcctacatggagtctgcaacactggcagccccagggctctggctcaccttccctgtctctctccccctttgtcaccaggactctgtctacatcttccgggaaggggccttgccaccctatcggcagatgttctaccagttatgcgacttgaatgtggaagagttgcagaagatcattcaccgcaatgacggggcagagaattcctgcacagaacgggatgggtggtgcctccccaagaccagcgacgagctcagggacaccatgtccctcatgatccggcagaccatccgctccaagaggcctgctctcttttccagctcagccaaggctgatggcggaaaagagcagctgacgtacgagtctggggaagacgaggaggatgaggaggaggaggaagaggaggaggaggacttcaagccatccgacggcagtgaaaacgaaatggagacagagattctggactacgtgtgacagggcccaaggctgggcctccctgacccggccagactggtgtctggcctaatgagggagccggggctccccattgccacccacagtgcccggaatggccctaggaggccctctgaggagagctagagtcccagcaaagggtgcagctgaccctagcactggctgtgacatgctgcttggtgctgcctctggtcctgaggggttagggacatccccaaagggtataccctggctctgccacccatgaaccagcccagcatccagccagtgagtgggcacccaatgcctctcaggatgagaccagtaaatgccggaggtggagctgggcagctgtggagccccaggccacaggccagtctcgcttggctctcatgactgtggtggtggagatagcgtggggagcctcgcccatggtctcacgtggcaagaagtgcctttagctctggatcccaaccgtttggcacagctttggccacagccaggcccctctggaattgtccttattaaaccagtttcccgagaa

SEQ ID NO: 7244 - DNA, 2076 bp, Homo sapiens
ccacctccctctcatggctagtaggagagactggtgcttgccccgcccggtggactaactcgcttaattttaaataaaaagtcgaggacacggcggtcgttttcccgaagacatgggccctcccatgggccatttgctccctggaggccctcgcgtcttgctgagcccggggagttaggatgacgcgagcggtgagggaacccggaacaattccttcacagaacaattgaggcgaggcctttgggagtactttgtggaacgaaccccggcgggccctgccagacgcacagggatggcggcggaggcggccgatttggggctgggggccgccgtccccgtggagctgaggcgggagcgacgcatggtgtgcgtggagtacccgggagtggtgcgtgatgtggctaagatgctgccgactctgggcggcgaggaaggcgtctcccggatctacgcagaccccaccaagaggctggagctgtacttccggcccaaggacccatactgccacccagtgtgcgccaaccgcttcagtaccagcagcctgctgctccgcatcaggaagagaacgaggcggcagaaaggggtgctgggcactgaggcccactccgaggtcacatttgacatggagatccttggcatcatctccaccatttacaaatttcaggggatgtctgacttccagtacttggctgtgcatacggaagcaggcggcaagcatacgtcaatgtatgacaaggtgctcatgctccggcccgagaaggaggcctttttccaccaggagctgccgctctacatccccccacccatcttctcccggctggacgccccggtggactacttctaccgaccagagacccagcaccgggaaggctacaacaatccccccatctcaggtgagaatctgattggcctgagcagagcccggcgcccccacaatgccatctttgtcaactttgaggatgaggaggtgcccaagcagccactggaggctgcagcccagacgtggaggagagtctgcactaaccccgtggaccggaaggtggaggaggagctgaggaagctgtttgacatccgtcccatctggtcccgaaatgctgtcaaggccaacatcagcgtccacccagacaagctcaaggtcttgcttcccttcatagcctattacatgataacaggcccctggcgcagcctatggattcgatttgggtatgacccccgaaaaaacccagatgccaagatttatcaagtcctcgatttccgaatccgttgtggaatgaaacacggttacgcccccagtgacttgccggtcaaagcaaagcgcagcacctacaactacagcctccccatcaccgtcaagaagacatccagccagcttgtcaccatgcatgacctgaagcagggcctgggcccgtcggggacgagtggtgctcggaaaccagcttccagcaagtacaagctcaaggtcagccttcagacactgagggtgagaactcgggtgcaaagccccagggctgtgtgtgttggggacatctggcgaagaggtggtgacaagtctcagggaagtctggcaccagcagctgcatgtggttgtccttctcgagccctttgggagcctgggcccccactgagccacgtgaccactccgggaatgatcggaattgggcacacacaggaggacagagccagagcaggccatgtgggctgcagctgtggcaggagcctcactggctcacgtttccgtcagtgcggttgcccagcgggggttggcggtttccagagctgttcccacattcaggctcccgcaagccgctccacagccctgggggaggccgagaagggggcatcccgcacggtggaatcacctgctgagggagtgggtggcagagatgagtgcagcagagacgggtgatgcgagggacttgctgtcccccagtgtctggggccctgcctattttctaggttttttagacctttgctgccttcccagtgaggggcgatcatgcacagcctgtgcggccttccttctcgaggcctctcctaggaggccgttatccttactctagaactacatggctgggt

SEQ ID NO: 7245 - DNA, 319 bp, Homo sapiens
ggccagcttcatgtgtgtgaggcggtccagggagcacacaggtttagggccccagctgggaacacacagcttgtgtttccagttcctctctgtagacttcgctcacggggctgcctttgatctcagtacagctctgcctctggcaaaaaccaacactggcatctcttagcagagacccgccctgggactttatgtcccaaccctctccccacccccaggttgcagaagatcattcaccgcaatgacggggcagagaattcctgcacagaacgggatgggtggtgcctccccaagaccagcgacgagctcagggacacca

SEQ ID NO: 7246 - DNA, 472 bp, Homo sapiens
gtagtcctagtctttgaaccctcagagcccaggttccaaacatgattgaagccatcttgaatccatcaaaccaacccatctgccagatgagtaccactgagtttcctaaatgacttgagaaatggaagaaatgcccagtgtagccctgtacaaattgtgaattgtgactttttttttttttaaagttgttttaagacactagattttagggtcatttgttaactggaaaactgttttggatttagatgacaaatactaaatcattaggcccaatttgagaattaaaggggtgattaaagcagaaagagtatctatgccttatttttttttcaaaaattaaaaaataagactttttggaggaatactttacatataaaatctatgctttttaagtgtacaatccaataatttttatgacttaattgtgcaattaacatcagaatctaattttagaacgtttctctcccctaca

SEQ ID NO: 7247 - DNA, 395 bp, Homo sapiens
gaaatgataacactttataatagattatacttcttaaagaattgggataaacatgaaaggtcatagtgactatactatagtgttttattaatttataggatcatcttttcggatagtcacaaatactacccaggccaggccaggcagttgacataattgaatgagtgtcatacaacaggaaatggtatatcctgtagtaaataagggagtttttgtcccattaaaatcagggaatcatcaaccactgcttagtttaatgaaatgaatcttgccacatgggagcgtgggccacatggtaaaagggcccatgtggtttttcaataaaactggaatattagagtttcggatggagttgttatctcaaacacagagctaataaaataaaaatgtagcaa

SEQ ID NO: 7248 - DNA, 794 bp, Homo sapiens
gtgatgtgggagtgaggagggaggtatgacacaggaccccggaaagtgctactccaggtagcagtcccaagtctgtgtctttaatgtgtaccagaaacttctgcccatttgcagctgatgtacccatctaatagtatccaaagtaggtgcaaggtagctgttctaataatgcacatgcattctctagttagcactccatcattattttgaaatacttgcaatggattggaatcccatggtcattagttttggtgaaaatatgttatcttttgggaaaaaaacacattttccccccaaatttcaatattttgaccatgaaagaaaagagctattatatttttaaatataattctaacactttatacattttaagtagtagttaagatggttttaaattttatcacttccttgtataaggttccaagttgatgatgacttcaagaagtgaagagatcatcattaaaaaaaaaacttggccaggtgtggtggctcacacctgtaatcccagcactttgggaggccgaggttgatggatcacctgaggtcaggagttcaacaccagcctggccaacatggcgaaaccctgtctctactaaaaatacaaaaatctgttggttgtggtgatgtgcacccgtaattccagctacttgtgaggctgaggcacaagaattgcttgaaccttgacagaggttgcagtgagccaagatcatgtcagggcactctcgcctgggcaacaagagcggctgtctcagaaaaaaaacaaacaaacaaacaaaaaaaaacccaacaaaaaa

SEQ ID NO: 7249 - DNA, 980 bp, Homo sapiens
tatggtttcccaagcaagaaatgacactttcactgtcagtctttctaggagtctggcagaatccaggaccgggattacccttatttatgaagcgaccttagactaacagtggctctctgggtctccagacaattggccagggactctaaaaaccagaaacaaagttgagagaactccatgctggtggagaaaaacagctggcctttatcaccagaatgtgccccatagaagcagcaaagcagcaagcgacgttcttaaacaagggcctgtgggcctcgtcaagatctggaggaatcatctacgactcactgctgagtgagagggctaggcagtgtctttaaggtcctgccagctttaacattgtatgctttttcttttgttcaatctctcaccacaactggaagtgttgcctcaactacacaggagaaagtttgcagtaacttagagaaaacattattttaatcaccagtgtatgttctcctgctccctggacaaatccatcagcagcggcaacactgaccaggtccagattggggccgctgcggtggatgtgaatccattgaaactaggggtctccagtgctcctgactcctcacagctctgttcctatgacaaggatggtcagcaaagccagcaaccttgaagggggaccttcttctaatctcctccctgcctgctgagagagtgtacagaagcagccacttgtcagctgcgatgaatccaatgataattacataaatcattaacaatacttgatatttgcccatcacatttctcatttcaaagtgctcataaaattgtatctcatgggtggcactgccggcacaacagaattccaaggaaggattacgggctaagtaaataaagcctggaggctgctttaaagcctaggagtctgttattaaccctttcctcctttttgtttaactttttctcatggaaatgttcaaacataccaaaaatagagaaaatactataat

SEQ ID NO: 7250 - DNA, 1078 bp, Homo sapiens
aagacaacctaataaatggaagaatatactgtattcatagatcagaggagccactattgttaagatgccaagtcttcccatttttatctatggataaagtgcaatcccaatcaaaatattagcaaaccttttttgtggagtttgacaagctgatcttgaaattcatatggaagtgcaaaggacttacaaaacaattgataaagaacaaagttggaagtctaaaactttctgataccgagctatgttaaaattacagtaatgagatagtctggtgttggcataaagataggcaaatagattaatgtggcagaatagtaagtcctacaaacaacccacaaattatttatatgaacaactgatttttgacaaagatgcaaaaaggcaattcagtggacaaaatatagtctttcagcaaatatgctggaaaaattgggtgttcttatgcaacaagaaagtaagccttgattcagatctcacatgatatatagaagttaacttaaaatactcatagacctaaatgagaaacctaaaactataaaactttttgaagaaaacttttgacctttgttaggtaaatatttgtcagatacctaccaaaattactgcctttgaaagagagaaaaaggatatatgtgatttgatacaaactaaaaacatttcctcttcaaactcgtttataaagaaatatgaaaatacagatgacagactgaaagaaaatagttgcaaatcatatatctgatacagtactttggtgggtttattttagaaatttaaacatatacccatcatatgacccagatattttacttttagatatctacccaagagaaaacaaaacatatatctatacaaagacttgtacgggaatgttcatagaagttttatttgtaacaacaacaacaacaaaaaacctgggactaactcatattttcatcaacaactgaaaagataaacaaattgtggtatattcatactatgaaatatcacttagcaataaaaagaatgaactattatacacacaacaaaatggattaatctcaaaataattatttcaagtgaaggaatccagattcaaaaa

SEQ ID NO: 7251 - DNA, 820 bp, Homo sapiens
atttgcttataaatatttataatataaacactcaattgctatctgttttttaggttctcctctctctcccagaacagtggtaacaggaactcttgggggcttctccctgttcttgcagatgtggcaggatgtgttcctggggggctcccatgccagtccacaccctctgtggtgtaagcagggattggtaattaatgagatgctaaaccctccagaagtgagcgctcatgtcccagaaacacatcttccacctcagcagccagtgggaaaactagactttgtgtctgcatatttgttcttaaacacactcttctgcagtctaactctgctgaccactttccagtttgctcatatcagaatttcttcggttctaagatgcatattttccttttgtaatcctgacttgttagaaattagaatatgtcttgcagtcaataaaatcctatgacaacatttttttttcttaatggttccctaaaactcctgtagttgatggtgtcttgccttaggtttaatgaaagagattttaatatatggcgtggttatgtggagttgtatctctatcagtattaatgggctcgggatgatttatattcaactgaacccccaaattcaacattttgtgttgaatatttattttatcagttattctttatcctgtactcattttggatacttactaaagtattgtatgtatttgttataataaaatggcttgccgtgtttgaacacactgtgtatctgacaatgttctaagacctaatttgatcttcatgacaactgcataaaatagttactattattctcaattcacaaatga

SEQ ID NO: 7252 - DNA, 457 bp, Homo sapiens
  misc_feature (457)..(457): n is a, c, g, or t
aggtggtgggaggattgcttgagcccaggagatcgaggttgcagcaacagagcaaggccctgcttcaaaagaaaaaaaaaaaacattttctgtcaagaatactacacctcaggaggcagagattgtacctgtatgggtgatactaagtttgatcaagtttggataagatggtgaccaccagaatgctttactgtaatgttaaatctttgcctttgttatctgtagggtgatactttgagaccatgtaaatagccggttcctccacaacctttctttcaactgagtcaacaattgtattaggagtgacaaaatgatgattttctaattctattatgcattccttattagctgcattcttctgtaagtagcccctgctcgtattttagatgatcactatggagtcatggaacactaatattttttaaataaattcaattaaattaacctaaaaaaaaan

SEQ ID NO: 7253 - DNA, 1471 bp, Homo sapiens
aacacctgtggaaaaccagagtcatatggctctatgtcctattttactatattgggaacaaactcaggaatacagtctccagcctggaccataaagccccctgatcagaagtggggagctgtgtcttcccacacattgaaactagtctagtttcaaggggtgagagcatgtctgcaccatttctggtaggctctccctcatggatgcagttcctgagtggattctgtgccctggtgctttctacattaagtagtctctttttaatttgggggatcctcagagtagtgatgggggtgttgggagggatgaaggtcttgtaatttctgactgtcagttgccctaaaatgaactaatgtagatgctctgagcctcccaatgttgttatactgtgcccttgtgggtagcctgttgcagtagttattctggtgtgaacctggaaattccctctgccactgtcctggatgcaaagttgtaaattctgtgggtgaaacccagtcatgaggagctcttccatatgctctttctaggccagagaggcagtctttagcagatggcagacctttacaaagacatcatatgtatccattccaattcatacaggctttcagctgaatggggactttgcagtgatatctcagcttcagtcagcaaatcttccaccaacgcagtgggcagggccttttgttctgaccctcagggccctctcaggaccacccctctcagtcaccctcttctcccttcccctttcagaaggcccccacctgcagtgtattgtattctaggttcctctccctcaccccaggtccctcctcccctctgcccctgatgtaaactcagacatggcttggggtgagttctccttgagctgatactcttgatgcccttatcttttgggtgtccccaatacttgagaatcatctgtagtgttctccttaaccctattgagacactttttccatggacaaaagcatccattcctatgacattaagcctcacttccattaataaacccaactattcaccaccaggagcagctttggcttgggcagtaagtacccatggagagagccaagtgaaccttgggtccagcaccacagacagttccaagactgtacctacttggcagtctgtgtggcctatttttatctgatatgaacaaagacagatttaggttttatgaagttggaaactcatataatttggggagtcctctttaatacaaactgaaaaatttttaattaaaattaggtataaaaataagggtttttttgaatgagaaaagttgacaactatgataaacattatgaaatccagaaaaacaacatcatctttgtattaattactctctgatgctttttgcctacttgttttggttgcttactctttgataatctctttattagctgataacatttatatcattttctgttcataaaatttgaatataatttagtcacatagttaatcaaaa

SEQ ID NO: 7254 - DNA, 910 bp, Homo sapiens
ctgtcttcttagggttctgcctaaaactattttttttcccttcacaacttaaatcctaatcgttttcttatctcagtgttttcagaaacatatctgcttcagactgggaaattatattttactatggcttttatacattacactcccttacttatgaaggaaaccttgaaaattggcacagctaacttcagagtagtaattacacaataggaatagttagacattttatacttttttcccagaatattttatgtataaattttggaagaaattaatcagatgttaaaattggaaaccaggcttaagatggggcttagtattatttaaaattagttgctaggttatataggcttattctcattaagtttgaagatggtatataaagttatatcacttctgttttggcaccaaaaaaaggtagacttatatatcacaaaatttatacaatataaactgtattatttaaccaaaataatgtaacttaaaataagtcaaacattttaaaatgaaattgatatcttattttgatttacagttagaatcttgaggtgttgcgtatgagaaatgaatttattttacttatttatagaaatgaggtcttgctcagtcaaccaggctggagtgctgtggcaccatcttagctcattgcaacctagaattcctggcctcaaacaatcctcctgcctcagcctcccaagtagctgggattacaggtgtgagccaccatgcctgactcagaaacttatttattttctttcagttttcaaattttaaacaatgacttacttaatattatgaatagataccagtcatctcatttaataatttgtcttaataaatgtgatgggtttgaatattaagaagatgaaccattagccaggaattctaattttatgttgctaagagattt

SEQ ID NO: 7255 - DNA, 463 bp, Homo sapiens
gagccaatcagtggtgttcaaattggatggactgtatatttaaacaatatattatttaagcaaagaattaagcactgtaagtatattatttagaggaagcaaatttttaaaaatcccttaaaattatatattaaagactaaattggaaatatagttttagaagaagaaagtggggtaaatgggctaggtgcagtggctcacgcctgtaatcccagcactttgggaggccaaggcgggcggatcacgaggtcaggagaccaagaccatcctggctaacacggtgaaaccctgtctctactaaaaatacaaaaaattagccgggcgtggtggctggcgcctgtagtcccagctattcaggaggctggcggaggagaatggcgtgaacccgggaggcggagcttgcagtgagccgagatagcgccactgcactccagcctgggtgagggagtgagactccgtctca

SEQ ID NO: 7256 - DNA, 211 bp, Homo sapiens
tgaaaagagaaaagcaggtttcaattctcttcttttaagaagagagtatatgtcccaacatttcaaaggccatataagatcctatttttatatcctcctgagctgtgggagctaaaacttaattggttctctaactggtaaatcctttgacagacaatatagcctggaattcagagtcctaatacgtttttttctttgtggttcaacagag

SEQ ID NO: 7257 - DNA, 536 bp, Homo sapiens
ctacagcatgtgatgtgtgctttatgatctaagcactttcagagcctttcaaaaactcagggtctgtgtgtctgggcactgtgaacttgaaagaaagccttcaccctgtccctgataaccttgtgttgtcctcagatgagcccatgtctaaagctcccatggccaaagacagttaccagcttctcacctagccggtcacctctgtctaacttggtatgatcactgacaactttggccaattaatgaagaggtggcctcaaattgttcaggaactcgaaaagcacatgtctgaaggggctaattgtagtgataggaaactataaaagtaaggatgttggattagaagttagctgatcatcaggagatcaagaccagcttggccaacatggtaaaactccatctctactaaacatacaaaaattagctgggtgtggtggtgtgcacctgtagtcccagctactcaggaggctgaggcaggagaatggcttgaacctagaaggtggaggttgcagtgagccgagatctcaccactgcac

SEQ ID NO: 7258 - DNA, 305 bp, Homo sapiens
aggctgaagatggcccagatgctgatttctttaaggagaaatagtactgtatgcttgggttggttggatctcgaagagaattcattgtaaaataaaaatttgtcagccgggcgcggtggctcacgcctttaaaaacaatacaaaaattagccgggcatggtggcgtgcgtctatagtactaggtactccagaggctgaggcaggagaatcgcttgaacctgggaggcagaggttgtggtgacccaagatcttgccactgcactccagcctgagcaacaaagcgagactctgtctctaaataaata

SEQ ID NO: 7259 - DNA, 266 bp, Homo sapiens
tagaattattatagcatttttattagttgaattagtcacaaaccattctagatttaaggacagagtacacagactcctaagatatcaatagaagaagtgccaaaatgatgttcatccttccttttgtggaaacactggcttccattcttctcttaatcctctccttatggagccacaccaggcagatgaagctacatggtatttattccagggatcccagcacagaagcccatgtaaaacctataaaagctataatttcatttcta

SEQ ID NO: 7260 - DNA, 422 bp, Homo sapiens
tagaattattatagcatttttattagttgaattagtcacaaaccattctagatttaaggacagagtacacagactcctaagatatcaatagaagaagtgccaaaatgatgttcatccttccttttgtggaaacactggcttccattcttctcttaatcctctccttatggagccacaccaggcagatgaagctacatggtatttattccagggatcccagcacagaagcccatacttcgttgcggcaaggacttttagtagtgtgctggtatttttccatccatctggccattcatttcttctaattttacgggacagcaaactgaagcaagcttctctctgtgtcctgaagaagatgaagtatgccaaaaaggacataatctctcatttttataaacatgcctgatatgagtgatgatatt

SEQ ID NO: 7261 - DNA, 1177 bp, Homo sapiens
ctccaaagaacgatttgaccaatagcatttcttctctgggggttgtatttcaaagcatgcaactctccagggaaccagaactaaattgcttaaaatgaagtcattcctcagattaacttcctcagataaagtgtcagcggtctgcagaaacgaagaagacaaaactgagattatcactcataattctcttacttactatgtcagtgaaacaatgagtttgcatttttgcaatcctagaacattcttcattagccctgggtcatgacctcttccagttaattctctttcacacctttaggaaagatttaagatgaaccttcaataggatattaacataactcatagccaataccacagctgcctttcaaattaatgaggttaattgttctccagcaaacatgagtttgtctttggcattttaaatgcttcccattgatctgacattttgctgtttcaagttttaaagggctcaaatcaaagactattgataactgagcaaagagcgaagatccagaaatacgaaaacattgtctttttttttccatgaaaaacaatcatagccttttgaattcaatcgaagtttctacattagccatctaagacttatttaattatttctgttctcagtcaagctaattcaagtgaatgaacagtattgacttttaaaatcttttttaaatttttttaaatctttagtttattaagtttgtagacaagctctggggccatgaccacttacgtaaatgtttcagtttaaaaacaaaagattcaggcctctaatttgagccaaatccaggtgatcttgtttgaaatttttgatgaatttgaaaagatgaaagtggaacttttaacattcatgttccccaaatttttcactgggaagggatgctaattgcctacttaagatataagttcaagaataacattttcatagaaaattcagaaaactgcttgacacagcagtgacatagttagatgtggctcagatgccttccaaacctgagggtccccaaagatttctttaccagttgtttttaactatggaatcttaatcttgttcattcccctgccaaaacaaatttaaaagcataaacctgctggaattaattgggcaggattcaccatagtttatatcaccccagaatgtttatgtgtatatgtttatgtatagtatata

SEQ ID NO: 7262 - DNA, 392 bp, Homo sapiens
aagagagctttgcatgtcatgttaaggaacttgaatttatcttgtaggaaatggggagccatcaaaggttttaaacaagggaatggtgtaatcaaatttgtgttttagctagatctctctggcagcagtgtggaggttggctaatctggaatattgtaagagagaggcaaagggaataggcaagaccaatggccccagaggagagattgtgatgtctgaactaggacaggcgtagtaatagtagggatggaaagttgggagagagccaccgtgcccggcccagcagcattatttttaatagccaaaaaagataaatgtccatcaactgatgattggataaacaaggtgtagtacatccatacaatatattattatttgtcaataaaaaggaa

SEQ ID NO: 7263 - DNA, 87 bp, Homo sapiens
ttcataagcttttattcagatatattccacagctattttaaatatgtatagcacagtggttttgagtgaccatttgcctgttaccat

SEQ ID NO: 7264 - DNA, 814 bp, Homo sapiens
acgttgacacttcagcatgtattcaacaaatgtttatcaaaggcatgctgcttgcagagcatttgccaggacttagggatatagtggtagcagaaggcagataaagttccagttcactcacaggagttcatattctgatggaggagacagaaaataagctatagcatatctgtgctttgtgaatttgtcattgctgcctattcccgttgccttttttttacatctgtatttctgctttctctagtacttcaactctgctaagaagttgctgggaagtggcaaatttgatgtggggcatggcttggagctggcctttaactctctgcagatcattttgagcttgctttggagatgcaaaaccaccgtaccatggctcctgtggattgggtctgttttggagaagctttggttttccaagctccacctggattagatagagcacatctttggccctggactgatctgggatccccagttctgtctcccagggcctgatgtagatctggccttcctctggaagtggatgtgggagccttgatgcccactgactcatctgtattacttgttgccctaaaactcagaactaaaagagatcttaaagatcatctaactaccttattttgcaggtgagaaacatgctaggactatgtgagtgactgggttcagggttccacagctagtaggggtggagtaacgggtgtgtccagtcagtgcagtggttcatgcctataattttaacactttgggaggccaaggcaggaggattgcctgaggccaggagtttgagaccagcctgggcaacaaagtgagacct

SEQ ID NO: 7265 - DNA, 340 bp, Homo sapiens
tatcaaaagtacatggattatcacgatgcatattgggtggggaggaatgattaagtaatgggggccgggctcggtggctcacacctgtaatcccagcactttaggaggccgaggcgggcggatcatctgagctgaggagttccataccagcccgggcaacatggggagacccggtctctacaaaaaatacaaaaattagccaggtacagtagtgtgcgcctgtagtcccagctacttgggaggttgagtcaggagaaacacaagcccaggtggcagaggtttcagtgagctgagatcacaccattgcactctagcctgggcgatggagcaagactgtctc

SEQ ID NO: 7266 - DNA, 368 bp, Homo sapiens
aagacaatctcagtctgttgcccaggctggagtgcagtagtgcaaacacagctcactgcatcctccgctgcccgggttcaagtttttctgcctcagcctctggagtagctgggactacaggcatgcaccaccacaccacacccagctaatttttgtatttttagtagagacggagtttagccgtgttagctaggctggtgtcgaactcctgacctcaggtgatccgcccacctcagcttcccaaagtgctgggataacaggcgtgagccacctcacctggcccaacacctttcggtcagtcttcctgcaggccctggagcttgcttattctaaacaacaagagttctgtagggacatgctattttaaa

SEQ ID NO: 7267 - DNA, 622 bp, Homo sapiens
ggagacacacttgccctctagacctgtactctctgggcccattagaacctttgagaatcacattcttcccttttcttgaagattaacgtgcgtttgcaactggatagctctattgtaccttcccgtagaatcccagaagtctaacagcctgccttcatttttgtcctgtctctttctctattcagttcaagctggcagcatttctggtgagatggttaattggttccattcagacctatactaatctctttatcacatggttgtccagccacaccctagtgttctttcaagaacatactttctcattttttgcaatgcggacaggctgagaattttccaaatctttaagtactggttcttttttgcttaacagttccttcaatttatctttctcctctaatattttactataagcagcaaggagaaaacagactccacttgcatcactttgtgtagaaatatcacctgaatattctgcactgcctcactcacaatttctatactccacaaaacactagaacgcaatttgggcaagtcctttgcaaggattccagtttcccattacccattcctcatttctgtctgagacttaaccacaatcaccttaaaattaaaaacaaaa

SEQ ID NO: 7268 - DNA, 463 bp, Homo sapiens
gggaagatttttcatgtgacacctgtgagggaatgtgcatgtccttcctcagccttcagctttctggagtagataagggattactaaaccactgtttcatgtcagtatctggccttatttattaaatcagcaaaacaacacaaaacatgtcattagacactaagcttaaaaatgacatttcaggccaggcacggtggctcaacctgtaacccagcactttgggaggatgaggtgggcggatcccctgagcctaggagttggagaccagcctgaccaacatggtgaaacctcgtctctactaaaaatacaaaaattagctgggaatggtgacgtgtgcctgtaatcccagctacttggaatgctgaggcaggagaatcgcttgaacccgggaggcagaggttgcagggagctgtaatcatgccactgctctctagcctgggcaacagagtgagactccgtctcc

SEQ ID NO: 7269 - DNA, 344 bp, Homo sapiens
aacagctaactttttttagttacggcgtctgagggccagggaaactcatttttaaagaccctcatttcttctgaacttggacagggcttttctaccaagtttctggtgatctgtttattggcaaattgggcctgttttaccattcctcgggcctgtgagtttgtgtgtatttgggtttccgggtggacgtgcactttgtaatatattcgtagtaagtatgcatacacagtgcacaaaccttttccctttcaaagttcttgggcacatgtgttccccatcccagactcccacagccctggagacttcccacaccctggggaagcgtgcaggtttggaagcagtgg

SEQ ID NO: 7270 - DNA, 617 bp, Homo sapiens
gaaccataaaattttataaaggataagtcagacttcatcaagtcttggacttttgttcctagaaagactttatttacaaaatgaaagacaagacgcagactgggagaaaatatttgtaatatgtatctgacatggacttatatcagattatagaataaagaactctgagaactcagtaataagacaaactacccaaatttttaaaaatggaaacaggttttaataaacatttcactaataaaaatatacaaatggctaatcaacacatgaaaatatgctcaatatcatcactcgtgatggaaacgcaagttaaaactgtaagaagatataccatacattcactaggatggttaaaattaaaacatctggcaataccaagtgttaaggaagttggccagaaccctcatatgttgctagtgagagtgtgaaagtggtacaaccactttggaaaatagtggcagtttcttatgacattaaatttgtacttgtcatatgacccagtaattccaggtatttataggcatctacccaagagaaataaaagcatatgtctaaacaaagacttgcacctgaatattcataaagcttttgtgataggctgagtaatgcctccctca

SEQ ID NO: 7271 - DNA, 575 bp, Homo sapiens
gaaccataaaattttataaaggataagtcagacttcatcaagtcttggacttttgttcctagaaagactttatttacaaaatgaaagacaagacgcagactgggagaaaatatttgtaatatgtatctgacatggacttatatcagattatagaataaagaactctgagaactcagtaataagacaaactacccaaatttttaaaaatggaaacaggttttaataaacatttcactaataaaaatatacaaatggctaatcaacacatgaaaatatgctcaatatcatcactcgtgatggaaacgcaagttaaaactgtaagaagatataccatacattcactaggatggttaaaattaaaacatctggcaataccaagtgttaaggtagatgcctataaatacctggaattactgggtcatatgacaagtacaaatttaatgtcataagaaactgccactattttccaaagtggttgtaccactttcacactctcactagcaacatatgagggttctggccaacttccttgtcgattcggccgtgaatttagtagtactagtcgaccctggaat

SEQ ID NO: 7272 - DNA, 573 bp, Homo sapiens
aattaatagaattctagaatctaattaaaatggttcaactctacattttactttaggataatatcaggaccatcacagaatgtctgagatgtggatttaccctatctgtagctcacttcttcaaccattcttttagcaaggctagttatcttcagtgacaaccccttgctgccctctactatctcctccctcagatggactactctgattaagcttgagctagaataagcatgttatcccgggatttcatatggaatattttatacatgagtgagccattatgagttgtttgaaaatttattatgttgagggagggtaaccgctgtaacaaccatcaccaaatctaatcgactgaatacatttgacgtttatttcttgttcacctgacagttcagtgttacctaaatttacatgaagacccagaggcccacgctccttcatttggggctccaccgacctccaaggtttcagggccctctgccccgccttctgcacccacaggggaagagagtggaggatgcacacgcccaggcctggaagtgacgcatgtggcttccccgtccacagacttca

SEQ ID NO: 7273 - DNA, 1105 bp, Homo sapiens
agtcctgagtcttctcagaattagataaccacatccatgtttctacaactaactgttgcacctgctacctgaaggatgaccaaaccagagcttctctgtgtacagactgctgactttaagagtttattctctaaggtgatctagagtttcctgtcatttgactctgttccctgtatttattgctttcttccttttctctgaaatgctattcctttaccttctcttacctttttaaaccctaaaagcaagaaagaactttacttataggaagaaagagctagaggaaggaagtgatgtttggagggtaaataaatggaagtttgggcagctttaacgttccaggctttgagctaggcattgagcgttaactcttacaataacctggggagaatagacagtcatttctttttgtagataagaacagagaatcagaggacagttcattatttcgtacaaaacaaaaagtgcattaagactagtaatgttttaaaaaatcatttgctgtcttttaaactcacagcatagaacggcacttcccaaactccaatgtgcatgggaattgcttgggatcctgtcaaatgtaggttctgattcagcaagtccagcacagatgggtccccaggacactgcatttccgtcacactcccaggtgattctgctgctgctgattcagggagcacactttgaataccaaggacatggactgtgcatttgcctagcattttttttttttgaagcctacaagagggaaaaatatttagatcaaggaaatcagaaggtttctggctctaatcagcccatcacaaaaatgagatgagtatttccctgttgtcataaccccttagggtgaggagtgtatccttggtgacagaccaaaatcaaatcatttttacaaatatttatggagtatggtttgagaggatgaagaagaaaagcatgtggaaacatggggcaaattgggactttttatatctctcatttaaataaagacttgttggctgggcactcacgcccataatcccagcactttgaaaggccaaggcaggaggatcacttgagtgggaggagtttgagaccagcctgggcaatgtggtgaaatgtcatt

SEQ ID NO: 7274 - DNA, 327 bp, Homo sapiens
tgttatttaatattttgctcctaacttgagctgtaaacccacatcttccaagggcccaaactcacatccacccacaaggtcacgttacttttgtcccaactcagaggtgaattaatagaaaaaataactatgttagctgccgtcctgagattcactcccccatcattctgttggtggtgcacttttgaaagtgcctgtcttgctaggccttggggctacaaaggggaaggaggcgggcagggtttatgcagaaggttgacttcagctaaactggagtggagggccatttagtcacttcgttctttcttttcctggctgtgcagaagc

SEQ ID NO: 7275 - DNA, 1205 bp, Homo sapiens
gactgctgagacgcataagaaatcttagctggaatgccttctcagaatcttgattttcaaagtgatggattgggagatcccaagccatgaataaagggtgctcatcacagatggaacaatggcgagagcacacctggacaggggaggggcaggagttctgattcctgacacaggtttcctggttgaatgttctgttgtagaagaatgcaactgagttttctaaacagatcttcttcttgacatccttgctgaacgaaagtgaccggccctctttaagactcagtgtgcttacctctgaaatggagctgtcaatcacatctgcctcacaggcttgttctgaggatgaagtgagaaaatgcccacgaggtgctggttgcagcagctggtgcatagagcttaaaaaggatgcagtcccaaaacatagaaggatttactccagatccaagcaatgagtcaggaacagaaagcctgatgccctcacctggaactctccctcctccctggatgaggaccttccccagaattgcagggcacccacacaagaccaagcaagttcagagaaaattgaaacctgactttagagcctctgggatgttcactacacctcattgaacctgtttggttcacagtagagctccaactaccgtctacttcctgcaactggcctgctgccaactccccagatctcttgtggagctgccggaagagacagcctgccacagaagaaagcagccctcctctttcatggcctcccacatcttgaaacaaacacaagcaaacaaaaaaaagcttgagtcccagcctgattcaccaggtttggttcccaattgttgaaattcccttcccagggctctcagaaccagggttggctggaggggtgaaagaggctggccctgagcccagtaataggacaccaagggggagctaaaagctgggatctggggtgaagatggggtcttccaagctgggaggcagacaccaggccagagcaaccggcctgccccagctcaggcctcttaacccatgcagggcaagagtataaacagaggccacggaccacatgcctcagtatttaaacttataaatcaagctaacataacatgaaatcaaatatgttctatcctcctagcttgacaaatactttcataacgagatggaatgccaggttcagatttagaattttcacactccttaaagttccaagt

SEQ ID NO: 7276 - DNA, 535 bp, Homo sapiens
gaattacgaatgccttttgtttccctggccaaattgtgccctggagttccaggagaacaatgtgtagagcatgagatattttggcttatttgttgctgacttctaattttttttatttttttgagacagaatctcgctgtgttagctaggctggagtgcagtggcgcaatctcggctcactgcaacctccgcctactgggttccagcgattctcttgtctcagcctcccgagtagctgggactgcaggcgtgtgccacccactctgataattttttgtatttttagtagagacggggtttcaccgtgttagccaggatggtctccatctcctgacctcatgatctgcccgcctacgcctcccaaagtgctgggattacaggcatcagccacagcacctggcctatgtattttcaatttaacacaatcaagctcacagtgccaatcagaggtgttttttttttttttatttttatttttagagagtctcacagtgtcatccaggctggagtgcagtggtgcgatttcagctcactg

SEQ ID NO: 7277 - DNA, 197 bp, Homo sapiens
aaacattgagtagataatcaagtggtaagaaattataatcgagtaagttaaaatgaacatgatgttgtaggcggatgacctttatgcatttatttattttattaaatgtatatatgcatttttttcctgaagaggatattcatttctttaatcacattatgcaaatagttcatgacgccaaaatgaaccaatgcatt

SEQ ID NO: 7278 - DNA, 144 bp, Homo sapiens
tgccgaaagcctcaggcaggcaggttgcagtggccttggggcccctgaaacagccccccaggaagagaggctgacccccgctatgacccccactacctccaccgccattcatctgtgcataggggaaggacgtttgagattttc

SEQ ID NO: 7279 - DNA, 951 bp, Homo sapiens
gcatccactaggggttttggaatggatcccctgtgagtaaaggggaactacgaggtaaccttttcctgaaagctgtgaaatcagtctgccaagataaataattataactgataataggcttatcagtgtgaccacagtaaataattccattattatatacatcataccacagcgtagttgctcacttacctgtctcttaagggaacctgcatctaattatcttttaacttttagggctgacatatacttgacctataattgttgaattagccaactcacaccaaactgttttctctttccccgagttcatctggactgtgacataccacagaaatgtgttctgagtttttcttaccaatctaaggcctcacacagggatgaaagtaatttgaaataattatcaggaacattattgtactttatcacatttttatgaaaatacttcagattcctcaaacagtaatattattgattctgtacacattatccaaacccattcttagaaaatacaaaattgcaacattcaatagaacatctttttagtaaacattggatattggttcctacttttattccactggtgggaaaggcttatgtgttcctatgtagtttatgtccaaaccgactgtaagtggttcttctgtcagcactttaaagaatgatggagggcctggcatggcggctcacacctgtaacaccagcactttgggaggccaaggcgggcagatcccttgagaccaggagtttgagaccagcctcgccaacatgatgaagccctgtctctactgaaaatacaaaaaattagctggatgtggtggtgtgtgcctgtaatcccagttgttcggtaggctgaggcatgagaattgcttgaaccagggaggcggagattgcggtgagtggagatggtgccattccactccagcttgggcaacagagcaagactctgtctgg

SEQ ID NO: 7280 - DNA, 482 bp, Homo sapiens
gaaaaaaaaaacaaaaatagccaggtgtggtggcatgtgcctgtagtcacagctgcttgggaggctgacgtgggagaattgcttgagcccagaagttcaaggttgcagtgaactgtgatcatgccactacactccaggctgggcaacacagcaagaccctgtctcaaaaattaaataaaacagtcgattacatccaatgttaccagtgtttgtgaaaaaaccttaagaattttccttataaaaacagacggttgaatagtataccaaaaggaactagatgaactgtcaaaaggagaaataaagaccctttctcacaaggacagagaggtcacagtaagattcatcctaaaagagtaatactaatagctagtatttattgaatatttactttgtgccagtcattattctaagtgctttgcatgtattagctagtttattattcaaaacgttcttgttgaggaaactaagcttcagagagatta

SEQ ID NO: 7281 - DNA, 693 bp, Homo sapiens
cagtgattatattgctaactctcattgcatgatacctttaataaaatgaacaatataagagttaagggcaatgggataaagctacttaatgtgtctcctccactgatcaaaaatattccatatagtcttggtgaggaattccccaggatataaatggctatttacactgtaatgaattataccatatatgatattcactcagtaatgttaataatgaactggctaataattgacaagatgcagtgcctgccagtttatgacattaacttggtttgaaactaacatatgacatagtaccagtgcagtcagagctgcccttaggcatgatgaacatgtggcccgtttttgcctggtgttttggcagcaaagcaggaagcaattttgtgtgggtcattgttctgtcaatttgtggaaaaaattacttcagtctcatataaatatagaatgggtccataaacccttcaactcatttccatggcaaaactcacttttttttttatacatgtccttcagtctcttaattttgtcaggtggagcttgatcttaattttaacctattatcttttatttttgtttgtttttggtgaaggataagagtggtgtttcttttgccctttctggtacaaacagagggacactaagcattaacttaataatcacatttaagacttgaacacatgctacccttcacca

SEQ ID NO: 7282 - DNA, 160 bp, Homo sapiens
ctaagctccagggcccctggagctctggatgtcactggacttagaagcaaatgggagaaggcaaaagaactcttccccttcttcagtcatcttcttttaagaggcctatgtctgcttacatctcattatcctgtgtgtagtcacatggccacacctcact

SEQ ID NO: 7283 - DNA, 308 bp, Homo sapiens
tctttctctcaggcctttcaacgccagctcctgattctaaaaagtactgatcgagcagtaaaagactgaggaatattgtaaatttatacaagtcagtaaactggaagcgagaaaaaaccctgaaggaaggaagaaaccatcttctccagattccttgtagccagccaatactgctcttccagcagatgcgttctgtttcactcttctcctggtctgatgcatgaccttgtgggagacacatttaaacggcttccacttagcaggcctattatttatccgagttttccagctgcggcagtgcccaagtt

SEQ ID NO: 7284 - DNA, 381 bp, Homo sapiens
ctttttttttccctttgacagtgaatattttatcacacagtgctttcctttcttctttctatctcatctctgccctgctatgggtgggtaagggtgtgtgtgtgtagataagaaccaagacacaggagccaggagagatgcacctgcctaaaatcagtctttgatttgctgtttcaacacaagtatgtgaaagtatttttctttgattatgactgctgaattaaaaagaaggcttcattacataattcaacagcccagattttcattaacaacctgaattaaagagaaaaagacagcatcgcccattaaatatcaaataaagatgaaggaggaaatgtaagattttacttgtgaccactagttttttggaaaatgtctaaa

SEQ ID NO: 7285 - DNA, 311 bp, Homo sapiens
gacggtgtgggggtgggaagtggtgcagagactgaagagggtcaacctgggcatgggggacacagggactgctgagaacgtgcgtgtcatctttgctctgatggggtggacatagcagaaaatctaactctgtctgtagccccatacagaatgccagggtgagcacagtggctggtgcctttaatcccagcactttggaaagttgaggcaggaggatcgcttgagcccaggagttcgagtctgaagtgagctgtgattgcaccactgcacttcagcctgggcaacagagtgagcccctgtctcaaataaag

SEQ ID NO: 7286 - DNA, 412 bp, Homo sapiens
cctgagcctccctgggaagaggcgcattcttctctctgctctctgagctttccgttgcttccctgcccatctgtgctctcagcagcaccagcaaagttggcctcaaacttgaacaaagctgcaggctccagcgtctttctgggagctccgcgggggcagcaggcaggccccagcctctgaactcagctggcttgagaagctcagcccaacccttccagcacccagccggccctccgtctcctgagggacgcccctgcccccgacctggaggccctcagtctgggctggggaatggcgcgctgaggtccctccagagccccttgtcccagcctggagctgcagccgcgcaaggcccaggcccccatggcccacccggtgcagtccgagtttccttcagcacaggagccaggct

SEQ ID NO: 7287 - DNA, 1472 bp, Homo sapiens
cctcttaagaaaacttagcctaccatgacaagtagccccagtctccaaagacagtaccttctaatactgaaaacccacagaagaggctccagggactgcaggaacctgagtgttcaaaccattacagaagagagatgcagaaaatggaaaccattttctccttgaagaaaaggcacagtccaacaagtcacttagaaaatggatgcttgtcagatttgttttctatcctgtagcgtaaagattgtttaaagtttaccattacattctaagagaccccgattgagctggagttgggtagaaggccaggtttatctgaaaagatcgacatacacagaaagctccagtgttctcctgatctacaggccccaccaaatcccagcagcagccttttcttcctcaggctgacttggaatgttctgatatgacaggctacaaaagccagaggggattccagctcctcaccagacccaaggctgccttgggaaaggcccaggccagtgttcctagacaccaggatctcttttccccctcagattttgtaaagggagacttcatggccacaggagcattatcttagattatgcaggacccgggagtgctggcaatgtccctggtcactatgaataattccaaagcctgaactcatttctctccccaagaaaacttactgcatcctacaccagaaaggcaaaaccttcctgttaatctaagagtgatgagatttaaaaaaaaaaaaaatcccacagttttattcttctcccctcccccggcctcaagccaagaaccaaaccagcctaccaagaagatccgactgactggtatgggccagtgccctcttttcactcacagtcctcaggggcaacaactctccccggtgcattaggtcctagaaaccaaattataggctgcctcataaatagagcttggctatttaatcaactgcccctgagctggcaaacagtcctgagtcctgcacacaaatgaggatttttttacatgccattactctgccattttccttagagctggggtgtaatgggaaacctggagcccagtgaaaatctggaagctagaatggatttctctccaaagaaagccctcatcccctttcttcaatggctgtgaaatatggaaagcgccaaaaatctccttccctacacgtgggcaagctgttttgaaaacagtcaccatttttctctagcaataaggtaaagtgcacaaaaatctatccacctgggttggaggagataatgtggaatttctctacttttttttttttttaattcactagggttctcttccacttttacttttagagccccacaccacgatcccaggaaatgttgggctgagggaacttttttagaaactggcccatcagctttccctaggggcagtggcaacgggaaagcgggggaggggaggagctgggcacgtggctggcccgagcagcgagaccccggctgggggca

SEQ ID NO: 7288 - DNA, 468 bp, Homo sapiens
ttaactttaaactcagcagccttttttgaaggtgtcgctgtggaagccaagatcatgtctgggattgaccctaaggttgatggaaggtttctgagcatagttcagcatcatcccaccagggggcagtaggaagctgtgtgcacaaaccatttcatcttgaccaaagtcaaatccgaaccatacaacttttctgtccttgaaccggagcttcattaaaacccttgggcaacatttcaaactttaaaactgtagaaacttttagtgaatatggaagcattgttaagcgtaggttggattttctcttcataaccaatacaggattcaattttgctgggagcatgtcatcatttattttcttgtctgaaatggctgtttttcactggtttcaagatctgaaatatgaatgcattatttacaattatgtaatacccttaccctgagctgtaaaataaaaattaaaaaaacttg

SEQ ID NO: 7289 - DNA, 411 bp, Homo sapiens
gtgcttatggtggtagagaacgtgatgggaatggtggtcgtggcgatgatgatgtcctcatagttgtaaaacaaaatttgtggttattacactatctctagtctggaaaagagacttttatttataagtcttaagcagattgctgactacccagattatgaaatgaactatcccctctcttagccaggtcggaccttggtatttagtactttacctcagttaccttactcattactatttctgaaaaactgacatcttttttcctcgtttaatttctttaaggttaggagaattactctctaagtgtaacgatcaattcatatgagaattttctttatttctgaaccatattaacagttttcctcagttgtttccaaactctgccagttgttcttttgcaggtacttctct

SEQ ID NO: 7290 - DNA, 1034 bp, Homo sapiens
  misc_feature (1000)..(1000): n is a, c, g, or t
atctcttgactttgtgatccatcagcctcggcctcccaaagtgctgggattacaggcgtgagccaccacgcccggccaggtttggcattcttaataacacttggcagatgactaggactctgaggctcagagaggtgaagtaacctgttgggacacacagccatgtgagccaggaccagctctctccctagcttgatgagcctcatttgagtggagaggggagtgcagttggaggagtcctgggggaaggtcagtggaggtggggtggggctgggattgtgggccatctggagaattctgctttgattttcaaggaagttctgagccctggagggattttgagcctggcttccttgagctcctgacagcctgagggggtttattgtgaatatttgtgtttctcatcagtgaaccctttttaaaaacaggcttggaagaggtagtctggtgaaggtacagaaagatttgggggccaggtgcaacagctcatgcctgtagtcctagtactttgagaggctgaggtgggaggatcacttgaccccagaagtttgagactaggagatcccatcgctacgaaaaataaaaaattaagtggtcatggtattgcacaccgtggtgttagctacttgggagcctgaggtgggaggatcgcttgaacctgggaggttgaggctgcagtgagccatgactgtgccactgtcctgcagcctggctgacagagtgagtccctgtctcccccaaaaaagagaaaagttgggggaaatgagtttgaaatttctcggttattgcctttttctgtgcccgggcccccaaatctttctgtaccttcaccagactacctcttccaagccggtttttaaaaagggttcactgatgagaaacacaaatattcacaataaaccccctcaggcggtcaggagctcaaggaagccaggctcaaaatccctccagggctcagaacttccttgaaaatcaaagcagaattctccagatggccaanaatcccaggcccaaccccccccaaagagagaggg

SEQ ID NO: 7291 - DNA, 1164 bp, Homo sapiens
atctcttgactttgtgatccatcagcctcggcctcccaaagtgctgggattacaggcgtgagccaccacgcccggccaggtttggcattcttaataacacttggcagatgactaggactctgaggctcagagaggtgaagtaacctgttgggacacacagccatgtgagccaggaccagctctctccctagcttgatgagcctcatttgagtggagaggggagtgcagttggaggagtcctgggggaaggtcagtggaggtggggtggggctgggattgtgggccatctggagaattctgctttgattttcaaggaagttctgagccctggagggattttgagcctggcttccttgagctcctgacagcctgagggggtttattgtgaatatttgtgtttctcatcagtgaaccctttttaaaaacaggcttggaagaggtagtctggtgaaggtacagaaagatttgggggccaggtgcaacagctcatgcctgtagtcctagtactttgagaggctgaggtgggaggatcacttgaccccagaagtttgagactaggagatcccatcgctacgaaaaataaaaaattaagtggtcatggtattgcacaccgtggtgttagctacttgggagcctgaggtgggaggatcgcttgaacctgggaggttgaggctgcagtgagccatgactgtgccactgtcctgcagcctggctgacagagtgagtccctgtctcccccaaaaaagagaaaagttgggggaaatgagtttgaaatttctcggttattgcctttttctgtgcccgggccccctcttccccccaggagaataatggtaataaagtatggtgctttgatgtgccagatgcctttcattcactttgtatgcattatcttatttaatcctcacaacccttttgggaagagcctaatagttccaactgaatgactgagtcacagagaggctaagaaacttgcccaaggtcacacagctggcaggtgccagcacctggattcagacctagtagtctggctccagagcccacacactgaacgacaatgctgtgttgacgttggccaatgccaagcatgccctttgtgatggagaattgccaggtggcactattaggctcttcgtcgacgcggccgcgaatttagtagtagta

SEQ ID NO: 7292 - DNA, 434 bp, Homo sapiens
tattacattttctccatttactctgtaatgagatatcgcatacctttggtgcccttctacaagttccagtatctcctcttccttccccactttcctttcacctgatgaccatattgtttcagtaagatacgcaattagaagagaatttcagccaggcacggtgactcacacctgtaatcccgtactttgggaggtggaggtgggtggatcatgaggtcaggagattgagaccatcctggctaacacggtgaaaccctatctctactaaaaatacaaaaaaaatagccgggcatggtggcgggcgcctgtagtcccagctacttgggaggctgaggcaggagaatggcatgaacccgagaggcagagcttgcagtgagccgagatcatgccactgcactccagcctgggagatggagcaagactccatctcaaaa

SEQ ID NO: 7293 - DNA, 435 bp, Homo sapiens
attttgtctcttcattaacactttcaaagcatgtatgcttataatttttaaagaagtatctaatatagtctgtacaaaaaaaaaacaagtaactaagtttatgtaaatgctagagtccacttttctaaatcttggatataagttggtatgaaagcacacagttgggcactaaagccccttttagagaaagaggacatgaagcaggagatagttaatagctaagtgtggttgtagtataaagcaagaagcagggtgtttcttgtattaagctgtaagcaggaacctcatgattaaggtctttatcacagaacaaataaaaattacatttaatttacacatgtatatcctgtttgtgataaaaatacatttctgaaaagtatactttacgtcagatttgggtttctattgactaaaatgtgttcatcgggaatggga

SEQ ID NO: 7294 - DNA, 366 bp, Homo sapiens
caaaacagcatccctcattccgtcagagaaacgcgagcccctgccaaggtaccagtgataaggagcttggtggtccctgcctgggagatgcttgcagctcagtcagggggacacagaggtgggtaggtggtgaggacagagggtgatgggcacacagggtgaggagggaagcagtgagagtgcaggaggacacgggtggcccatcggcctcagaggggaagcagggtgttgaagctggatttttttcttttcctttttttttttttttttgagatagggtcttactcggtcacccaggctggagcacagtggcatgatcaaagctcacggcaaccttcacttcttgggttaaagtgatcttccacc

SEQ ID NO: 7295 - DNA, 530 bp, Homo sapiens
gtggaggccggcctctccttagcagtgaaaatgcaaatggatttctttagaaatgtcaacagacacttgacacttatcctttaaggtactccccaacgtgtctcctgactgggccaaatttagtttctcccaaattgctcagaaatggaatgtttgcttttttttttttagcactctgggcttttctacaaactcataaaagttggtgattctaaccaagggatcacaagaaagtggggtgctactttttatgaattaaattcagtacccccattattctctgttttaggttgaagatcttttgatgtcagggacttatgcatttgctccctctccatcacacacagcctggcacacagtaggtgcttcacacaatcttgttaaaaggagcagactctatctggtcaaaatcattcttggaagttcttttctatttgtttgttaaaaggaaaaatggccagagttgagactgtgaaagttcattcctgatttcagaccaaaaaaaataaagctgaacctgagagaaaaac

SEQ ID NO: 7296 - DNA, 659 bp, Homo sapiens
cctgcattctgcacaataggcacgttatcttctctagactgaattcatatccaccttcttaacaaatcaagatatgctaggccagccaagactcctggtggccctggaccccacaatcagctgcttagacccctgtggctacattttgggaaaagagccatgcttattaggccttatttttcctccagaattgacccaggctgattccaaagccctctgggactgtttatacccagggcatgaggcaatggagcccctcctggacaggaagccctgccacaccaagagaagtctcaagaagcagaaatgcctcactcagttctcagctctcttgcagatgaagtcaaagcaggagtagaggaagtcctctacactgacctgctttcagcaactaagtaattttttgctcagctcaaggtccaaaaagggacagggaaactgtctttgtcagaccaggtggcttcaaaggactgaaaggcagacccctttctttgcagacgagtccctcttcctgtaggagaaaaggcaaaactagcttctccaaattctccatgctgcattgtcagtcacaaacacacaaaaaacaccagccctggacaagagaatggaagaagagttaggagatgcccttgatggggtttcattcgatgcaaaaggat

SEQ ID NO: 7297 - DNA, 468 bp, Homo sapiens
atagctgacataggcaaaggcataagggctataataggaagtaacttaatgtgttgtctgcccgggcagagataggaagaaatctgacttataccctaatcatacaaaatacataacaaaaagttagttagttcttccaatctagtatgtgaatatctttttattaagagaattctccagagccagctatcaatgaaaatctaccttccttgaaaactgcatatgtctcaggctttcaaaaatagatagtcctttaagaataatgttcacctaaaacctggaagagagaaagaattattgaaagttttataccatgactactgaataaccaacatgttaaaaaaaaatccaaaaggaaattttaaaactcttgagagaaatgaaaatggaaagtcaacatgccagaacttacaaaatgcagcaaaagcaaatctaagagggaagttcatagcaatcgatggccatatt

SEQ ID NO: 7298 - DNA, 648 bp, Homo sapiens
tctgctaatcacagagtcatcttcacagtgtgaaccctgaatacagatgacccgggttcaaatcacacttctgcttcttttgccaccttggatacagtatcttctcttgatctcagtttcctcatctgcaaaatggacataacggataacaacagcaccaaactccaggattgaatgagttaatacagatgtggagatatttcaggcttggttccaggccactgcaataaagtgaggattgcagtagagcaagtcatacaaattattttggtttcccagtgcacacaaaagttgtatttatactatactgtactgtagtctatgaagtgtgcagtagcattatgtctaaaacaacaatgtacatatcttaattaaaaaatacttttttgtattttttaattaaagccatgctggcttatgctcctagcactttgggaggctggggcgggcagattgcttgaggccaggagttccaaaccagcttgggcaacatagcgagattcaccccctaccaaaaaaagtgaaaacattagccgggaatggtgcatgtgcatctatagtcctagtcacttgggaaactgaggccagaagttcaaggctgcagggagctatgaacagaacttgacagagcgagaccttgtttctaaa

SEQ ID NO: 7299 - DNA, 1309 bp, Homo sapiens
ctgtcaggcgtggatgcgaacatctgtggcatgttttcctcatctgaattccttacccagaaactcagatttttggtccctgactttcaagaatatcttaaggatatttaagtttccttaatctttgagatgagactgctggaaccagcaacgttagccttgccagttagagatgattacagagggcactgaagcatagatttaaaaaaaaggggttcagctgttttggagctgacagggtgacctcctcaaccattctgctttcgccgaagcaaggaacttgtccccagacctagaccctctaaaactcctgctattggctggaccatgacaaactaggatgctcaaatttcataaggatgattgccttaaattgtaaaattggtagacaaataaaggggaccattgcaataataaaacgaataacctacagatatggtctagcagcaccaaactgaccatttcagtaggaaaacaagtaatctggagtaaaagatggatacggtactttggtgttctgtacacaataattttagcaaagaatttaatggccatcatgcatttttgaaacaatccactaaccataaagcaatatatgtgtatcataatcagttaactttataaaaagttgtgctactaaatgtgactaattcacctcccaccccccattggcatgcatttatttttatttatttgtttttatttgtggctctggaatagagtaactttcacttattagtaatgcttaagcttttttccttatttaataccttttttgtttttagttaccccatggcttctaaaaaaataagatccaacttctgaattgccatgttagttaatggtggctaaacagatagcaaagggaatataatataattgttcattgagggctaaaaaagaggaatgctctgaatatttactgtcttcctcctctttaaaaaataatcaatgactttcctcttccattgttcagaatcagaaatgttctttcgtatttgcttctcttctacaagagattatatttggcttattaaaatataaaccatgtccaaatgattgtatttttatctttaacaaattatgcctgggatttgttttttacagaaataaggctaaaggcttctgcttcagtaggggtgacatgtttactcctgtaaaatgattttaatgttactcctgtcaaaatgattttattgcaagtaataagtcttgtgggatcagaacaagcttattgtaaacacatgtttttttcccagtgatctacatcatgccaaatgtctgacaactcaaatgttgatgacagcga

SEQ ID NO: 7300 - DNA, 467 bp, Homo sapiens
ctaaaagcacagcacagaaaatcctctccaacacttcccttttgtcttcttgataatagtcattctaacgggtatgattacagtagctttgtagtgggttttctgtgctgtgctttttaatttcatgtatgtaaaaaacattgggtattttgaatgtttttcttttctcaccttatcctagaacttgaggctgggcgcggtggctcatccctgtaatctcagcactttgggaggccaaattgggcagatcacttgaggtcaggagttcgagaccagcctggccaacatggtgaaaccccatttctactaaaaatacaaaaattagccaggcgtggtggtgcacgcctgtagtcccagccaatcagtaggctgaggcacgagaatcgcttgaacccaggaggccaaggctgcagtgagccacgattgcaccactgcactctaacctgagcaacacagactccatctca

SEQ ID NO: 7301 - DNA, 2045 bp, Homo sapiens
ctcttaggtgatgctgcagccaagatggcgcccgcggcggccgtggcggcctgagcgtgatgctccgggttctcggcggcggctgtggccttggccggggccttgggtctctcccggtcgtgagcgatcagcgcctctccgccggccgggctagccgggacagagaggagacggccacgaagagaggaggcagtgagcaacaggacgagaccgcggcgtctccagcctcggtaccatggccgggatcatcaagaaacaaatcttgaagcacctctccagatttaccaaaaatttatctcctgacaagataaatctaagtacccttaaaggagaaggtgaactgaagaatttggagttggatgaagaagtactccagaatatgttggatttgccaacatggcttgctatcaacaaagttttttgtaataaagcgtccattaggatcccatggacaaaactgaaaacacatcccatctgtttgtccctggataaagtaataatggaaatgagtacatgtgaagaaccaagaagccctaatggcccatcaccaattgcaactgcttcaggacaaagtgaatacggctttgctgaaaaagtagttgagggaatttctgtttctgtaaattctatagtcatcagaattggagcaaaagccttcaatgcatcatttgaactttctcagcttcggatctatagtgtaaatgcacactgggaacatggagatttgagatttactcgtattcaggatccacagagaggagaggttttgacttttaaagaaataaattggcagatgataagaatagaggcagatgccacccaaagttcacatcttgaaattatgtgtgctcctgttcgattaataaccaaccaatcaaaaatcagagtcacacttaaaagaaggttaaaggactgcaatgtcatagcaacaaagttagttctaatattggatgacttattatgggttttgactgattcccagttgaaagctatggtacaatatgcaaagtctcttagtgaagcaatagaaaaatcaacagaacaaaggaagagtatggctcctgaacctacacagagctctacagtagtcgcatctgcccagcaagtgaagacaacgcaaacttcaaatgctcctgatgtaaatgatgcaattgtgaaactattcaatgattttgatgttaaggaaacctcccatcatttagtgatttctcatctagatctacacatatgtgatgacattcatgctaaagaaaaagagtcaaacagacgtattactggaggggcaatgcaactctcttttacacagctaactatagattattatccttatcataaagcaggagatagttgtaatcattggatgtattttagtgatgcaaccaaaacaaaaaatggatgggccaatgagttattgcatgaatttgagtgcaacgttgaaatgcttaaacaggctgtgaaggatcataatgtaggttcacctcctaaatccccaacacatgcctctccccagcacacacaaacagagaaggactaccctctgaaagggacatgcagaacaccttcagtattatctcaacaatcaaaagctaagctaatgtctagttctgttgtggttagacttgcagatttcaatatataccaggtctctacagcggaacaatgtcgttcttcccccaaaagcatgatttgctgcaataaaaaatccctatatcttccacaagaaatgtcagctgtctatatagaattcacagaatattactatccagatggaaaggattttccaactgccttcctaagcagatgagaaaactcaagatagatgaaggaagacatctgctctgcatctcatagggagtaaaatggcacagttgaaactcaagcattgtcttgtaaatctaaattcattgttttttctccactgtattacactgctcccctttgcccctgtattcaccacggccattgtctgttattgcataatcatagtattccagccatgcccccataattgtttttcttaaataaaatatatcattgaacaagta

SEQ ID NO: 7302 - DNA, 8714 bp, Homo sapiens
  misc_feature (6498)..(6498): n is a, c, g, or t
  misc_feature (6511)..(6511): n is a, c, g, or t
  misc_feature (6584)..(6584): n is a, c, g, or t
  misc_feature (6623)..(6623): n is a, c, g, or t
  misc_feature (6671)..(6671): n is a, c, g, or t
  misc_feature (6695)..(6695): n is a, c, g, or t
  misc_feature (6705)..(6705): n is a, c, g, or t
  misc_feature (6717)..(6717): n is a, c, g, or t
  misc_feature (7562)..(7562): n is a, c, g, or t
  misc_feature (8089)..(8089): n is a, c, g, or t
  misc_feature (8203)..(8203): n is a, c, g, or t
ctcttaggtgatgctgcagccaagatggcgcccgcggcggccgtggcggcctgagcgtgatgctccgggttctcggcggcggctgtggccttggccggggccttgggtctctcccggtcgtgagcgatcagcgcctctccgccggccgggctagccgggacagagaggagacggccacgaagagaggaggcagtgagcaacaggacgagaccgcggcgtctccagcctcggtaccatggccgggatcatcaagaaacaaatcttgaagcacctctccagatttaccaaaaatttatctcctgacaagataaatctaagtacccttaaaggagaaggtgaactgaagaatttggagttggatgaagaagtactccagaatatgttggatttgccaacatggcttgctatcaacaaagttttttgtaataaagcgtccattaggatcccatggacaaaactgaaaacacatcccatctgtttgtccctggataaagtaataatggaaatgagtacatgtgaagaaccaagaagccctaatggcccatcaccaattgcaactgcttcaggacaaagtgaatacggctttgctgaaaaagtagttgagggaatttctgtttctgtaaattctatagtcatcagaattggagcaaaagccttcaatgcatcatttgaactttctcagcttcggatctatagtgtaaatgcacactgggaacatggagatttgagatttactcgtattcaggatccacagagaggagaggttttgacttttaaagaaataaattggcagatgataagaatagaggcagatgccacccaaagttcacatcttgaaattatgtgtgctcctgttcgattaataaccaaccaatcaaaaatcagagtcacacttaaaagaaggttaaaggactgcaatgtcatagcaacaaagttagttctaatattggatgacttattatgggttttgactgattcccagttgaaagctatggtacaatatgcaaagtctcttagtgaagcaatagaaaaatcaacagaacaaaggaagagtatggctcctgaacctacacagagctctacagtagtcgcatctgcccagcaagtgaagacaacgcaaacttcaaatgctcctgatgtaaatgatgcaattgtgaaactattcaatgattttgatgttaaggaaacctcccatcatttagtgatttctcatctagatctacacatatgtgatgacattcatgctaaagaaaaagagtcaaacagacgtattactggaggggcaatgcaactctcttttacacagctaactatagattattatccttatcataaagcaggagatagttgtaatcattggatgtattttagtgatgcaaccaaaacaaaaaatggatgggccaatgagttattgcatgaatttgagtgcaacgttgaaatgcttaaacaggctgtgaaggatcataatgtaggttcacctcctaaatccccaacacatgcctctccccagcacacacaaacagagaaggactaccctctgaaagggacatgcagaacaccttcagtattatctcaacaatcaaaagctaagctaatgtctagttctgttgtggttagacttgcagatttcaatatataccaggtctctacagcggaacaatgtcgttcttcccccaaaagcatgatttgctgcaataaaaaatccctatatcttccacaagaaatgtcagctgtctatatagaattcacagaatattactatccagatggaaaggattttccaattccatctcccaacctctatagccagctgaatgcactacagtttactgtggatgaaagaagcattctatggttaaatcaatttctgttggatttaaaacagagtcttaatcagttcatggctgtgtacaagttgaatgacaattcaaaatctgacgagcatgttgatgttcgagttgatggcttaatgctaaagtttgtcattccttctgaagtgaaatctgaatgtcatcaagatcagccacgtgcaatttctattcagagttctgaaatgattgccacaaatacaaggcactgtccaaactgtcgacattctgacctagaagctttgtttcaagactttaaagattgtgatttttttagtaaaacatataccagcttccccaaatcttgtgacaattttaatcttctacatccaattttccagagacatgctcatgaacaagataccaaaatgcatgaaatttataaaggaaatattactccccaattgaataaaaacactcttaaaacttctgctgccacggatgtttgggctgtgtacttttctcaattttggatagattatgaagggatgaaaagtggaaaaggacggccaataagttttgtagactcattccctctttccatttggatttgtcaaccaacaagatatgcagagtcacaaaaagagccgcagacttgtaatcaggtatctctaaatacatcacaaagtgaatctagtgatctggctggccgattgaagcggaagaagctcttgaaggagtattatagtacagagtctgagcctttgacaaatggtggtcagaagccttcttcatcagatacatttttcagattttccccttcctcgtcagaggcagatattcatctcctagttcatgttcataaacatgtcagtatgcagattaatcactaccagtatctgcttctacttttcctgcatgagtcacttatcctgctttcagagaacttaaggaaagatgtagaagctgtaactggcagtcctgctagtcagacatccatttgtattggaattttacttagaagtgcagaactggctcttttgctccatccagtggatcaagcaaatactcttaagtctcctgtttctgaaagtgtgagcccagtggtacctgattatttgcctacagaaaatggggattttttgtcttcaaaaagaaaacaaattagtagggatataaatagaattagaagtgtaactgttaatcatatgtcagacaacagatctatgagtgttgaccttagccatatccctttaaaggatcctttgctttttaaatcagctagtgatacaaatctgcaaaaaggcatttcttttatggactatttatcagataaacatttagggaaaataagtgaagatgaaagtagtggacttgtttacaaaagtggctcaggagaaattggatcagaaacaagtgacaaaaaggattcattttatacagattcaagtagtatcttaaactacagagaagattcgaatatactttcatttgatagtgatggtaatcaaaacatactttcaagtactttaactagtaaaggaaatgaaaccatagagtccatctttaaagctgaagatttgcttccagaagcagcttcactctctgaaaacctggatatcagtaaagaagagacccccccagttagaacacttaaatcacagtcatctttaagtggaaagcctaaggaacgttgcccacccaacctggctcctctctgtgtttcttataagaatatgaaaagaagctcttcacaaatgtcattggataccatttcacttgacagcatgatattggaagaacagttattagaaagtgatggaagtgatagccatatgtttttggaaaaaggaaataaaaagaactcaactacaaattacaggggcacagcagaaagtgtgaatgctggtgcaaacctacagaattatggtgaaacttctccagatgccatcagtacaaattcagagggtgctcaggaaaatcatgatgacctgatgtccgttgtggtatttaaaattactggtgttaatggggaaattgacatccgaggggaagatacagaaatctgtcttcaagtgaaccaggtgacaccagaccaattaggcaatatcagccttcggcattacctttgtaatcgtccagttggttccgatcagaaagctgtaattcattccaaatcctctcctgagatttctctgagatttgaaagtgggcctggtgctgtaatacactctttacttgcagaaaaaaatggatttctgcagtgccacatagaaaacttcagcactgagtttcttacatcttctcttatgaatattcaacattttttggaagatgaaactgttgcaacagtaatgccaatgaagatacaagtttctaacacgaaaataaatttaaaagatgatagtccccggagtagtacagtatcccttgaaccagctcctgtaactgtacatattgatcatcttgtggtagagagaagtgacgatggctcttttcatatcagagattctcacatgcttaacactggaaatgatttgaaagaaaatgtcaaaagcgattcagtgctgctgaccagtggaaagtatgatctgaagaaacaacgcagtgtcacgcaagccactcagacaagcccaggggttccttggccttctcagtcagctaactttcctgagttctcctttgacttcactagggaacagctcatggaagagaatgaatctcttaaacaggaactggctaaagctaaaatggctcttgcagaggctcacttggaaaaagatgctcttcttcatcatataaagaagatgacagttgaatagcaggagtggcagtcaaaactgaaattatagctctggagtaggaaggttatatttataatgtggatgttaccagttaggggaagacttttattttcatgaaaagacaataaaacaaaatggaatgtgatgaagtggtgactatttcaaagccagtttagaaagtattagtacgggcattacaatcttttggttgttttgtgttttggggcttaaccctcttttaagctgttgtgatctagggaagtcaacacatagtgtaaaataattacatgcctaatgaaaagaagatgtcatttcctaattttgatatctcattttcggcattttttaaaatgtaaaaggaaaacctcttgtgttcacacagattgctgaattgatttctccatatttgttaataatttactattatttacaaagattcaaatgcttttatgactaatgtaaaatgaaaagaggcttacattttaaatgttattaaaattatgtacttaaatctataattatttaattattgtaaaaagtccaagcagatcaataaactatataattaatgggtttggaaaatcatcaccctactgaacttacaaaatatcttgaaaatgtgaaaaatatcattttaaataatgggtacattgtataagtggaagctataattttcaacaaaaagatggtacaaatgtaaaagtaaaaagcacaaactatacaaaagcaaaatctatggccaagtgatttaaaagcattacttgtacattcctttaaacatttgttgttagaagcaaaagagtaatttatcctgctaaatttggcaccatttgtaattataaaaattttgattaatactatttatattaatttctttaccttcattttttctccttaaggagttgattgtttttggaaatgtttttttccttgcacataagacagtttcataccattcttatagaatcatattaggtgggtgtttgcacatactaaatttataaagctagttttgattaaagctctatgtgagatatatatacatacacaagtcttctataataagagtcgttggtgaattttgaattctattttgttaggaattaaggttgaaatcaacatgaaagaatctcaatcatgcattataaaataaaagtacatgggtgttaagaaacaagagacttttaaagatttaaaatatatttctgatagaatttaactaagtggtgtgtattttaaaattcacattcttaaacataaatctatccaagatagaaaatgaaatagctggactactctttctttaagatacttgaaaattttaaaccacattgcaacactttatggtgctttgcgtgtttggcatgacatacacagtggtcctggtatataagtgcttgggggaaaatacatattttgtttacattaaattttgaagtgatttaggctttattgaaaacaatactggccttccctccccttctctaacatccattttcatttacgttatttaaaatatacaggcactgttttgggtacagaggatatagccaagagcaaattgatagtagtttacctcagagtattaaaaaaatcataataagtcatgttaatctaaaactatataatagccttagattaaatgtgcagatgtctaattaaagatttaaaatgtatagcgtatgtccttagaacatttgatttttaggtatacattcggcaaaaacagtctgttatggaaaagaaggattgatgggacattaacttcttccgagctaacattgtttctgaagattgacctattctatataaatttaaatttttctatgtttttctttttttttttgcgatgaggtttcgctcttgttgcccaggctggagtacantggtgtgatcttngctcaccgcaacctccgcctcgtgggttcaaatgattctcctgtctcagcctcctgagtaactggggttacangcgcccaccactacgcccagctaatttttggtatttttngtagacacagggtttcaccatgttggccaggctggtcttcaactcctnaccccaggtgatccgcccacctcngcctcccaangtgctgggattncaggcgtgagccaccgtacccggcctctatcgtatattataattgcttattgttatagaagctgaatgttttacttactacttttaaatttatttggtcttcccaaggaaatcatacaaacggtagagattatgataatctgagcattctgtgtgcttagtttgatttttttatttataagcagtactatttttatagatgtttaaaattcataaaacactgtattctgagaggtaggtattattcaaatgttagaaattttttttaaaaaaatgccctgaggcttagaaaggacaaatgactgaaatcacaattagtaatctggtctttagacttaaagcctagttatatgcttttattatagcttagtcattaattcacacattttcccttatcttttttatcttttaaaggtgaccataaaactttaaattgtgtgtgtacgtctatgtatgaggtatatgttaccctgtttgtgttattcaaactacctaaaagataggatgatttttgtttaagtgaatcccaaactagcagtctgagaaatacaggaaagcctgataattgacttaccagagttggctttttttttttaagttaccataatttagatataaagttgtcatgtcctggaatttaaaaaagaaatctctagctgagagatgttaatggtcaggagttgaaaatgacaattgtgctttgctttttatttttattttttgtttacttttgagttttttggagtttttttcctatatttttaattgagaagtaaaaattatatatttatggtgtacaacacgatgtgatacatgtataccttgtggaatggctaaatcaagctntctaacatgttacctcacaaactttttttgtagcgagaacacttaaaattttgtaacaattttcaagtatacagcatattgttattaactgtaatcacgtgatatacagtagatctcttgaacttatatttactaactgcaatttcgtgtccttttacaaacatctccccatttccccatcccccagcctctgataaccagaattttactctccatcccatgaagttgactttttttgcactccgtaagtgagatcatctagaattttggcatgtctttctgtgcctggcttatttcacttaacacagtggtcccctgtgtagctgggaccacaggcgtgtgccactacacccaggtttatccatgttgtcagaaatgacaggatttcctttttttaaaagttgaatggtattctcttatgtatattttccacatttgctttttccattcatccattgatggacagttaaattgattccatatcttggctattgagtaatgctgcagtgaacatgggattgcagatntctcttccacatactgatttcgtttcctttgaacatataccaaatagtgggattggtggataatatggtagttctattttttaatgttttgaggaccctccatactgttttccntaatggctataataatttacattgccaccaacagtgtacaaagcttttctttccttttctctgcatcctctccaacacttcccttttgtcttcttgataatagtcattctaacgggtatgattacagtagctttgtagtgggttttctgtgctgtgctttttaatttcatgtatgtaaaaaacattgggtattttgaatgtttttcttttctcaccttatcctagaacttgaggctgggcgcggtggctcatccctgtaatctcagcactttgggaggccaaattgggcagatcacttgaggtcaggagttcgagaccagcctggccaacatggtgaaaccccatttctactaaaaatacaaaaattagccaggcgtggtggtgcacgcctgtagtcccagccaatcagtaggctgaggcacgagaatcgcttgaacccaggaggccaaggctgcagtgagccacgattgcaccactgcactctaacctgagcaacacagactccatctca

SEQ ID NO: 7303 - DNA, 8645 bp, Homo sapiens
  misc_feature (6429)..(6429): n is a, c, g, or t
  misc_feature (6442)..(6442): n is a, c, g, or t
  misc_feature (6515)..(6515): n is a, c, g, or t
  misc_feature (6554)..(6554): n is a, c, g, or t
  misc_feature (6602)..(6602): n is a, c, g, or t
  misc_feature (6626)..(6626): n is a, c, g, or t
  misc_feature (6636)..(6636): n is a, c, g, or t
  misc_feature (6648)..(6648): n is a, c, g, or t
  misc_feature (7493)..(7493): n is a, c, g, or t
  misc_feature (8020)..(8020): n is a, c, g, or t
  misc_feature (8134)..(8134): n is a, c, g, or t
ttgttgcaaatgacaggatctcattcttttttatggctgaataatactccatcgtgtatatgtaccacattttctttatccatttgtcgttgatggacattatgttgtgtccactcctattatatttttagttctctgtatatttgaaaaaaagactctggagtatagtaactgacacataaataaatgtcaatgtgtattctctttcagatttaccaaaaatttatctcctgacaagataaatctaagtacccttaaaggagaaggtgaactgaagaatttggagttggatgaagaagtactccagaatatgttggatttgccaacatggcttgctatcaacaaagttttttgtaataaagcgtccattaggatcccatggacaaaactgaaaacacatcccatctgtttgtccctggataaagtaataatggaaatgagtacatgtgaagaaccaagaagccctaatggcccatcaccaattgcaactgcttcaggacaaagtgaatacggctttgctgaaaaagtagttgagggaatttctgtttctgtaaattctatagtcatcagaattggagcaaaagccttcaatgcatcatttgaactttctcagcttcggatctatagtgtaaatgcacactgggaacatggagatttgagatttactcgtattcaggatccacagagaggagaggttttgacttttaaagaaataaattggcagatgataagaatagaggcagatgccacccaaagttcacatcttgaaattatgtgtgctcctgttcgattaataaccaaccaatcaaaaatcagagtcacacttaaaagaaggttaaaggactgcaatgtcatagcaacaaagttagttctaatattggatgacttattatgggttttgactgattcccagttgaaagctatggtacaatatgcaaagtctcttagtgaagcaatagaaaaatcaacagaacaaaggaagagtatggctcctgaacctacacagagctctacagtagtcgcatctgcccagcaagtgaagacaacgcaaacttcaaatgctcctgatgtaaatgatgcaattgtgaaactattcaatgattttgatgttaaggaaacctcccatcatttagtgatttctcatctagatctacacatatgtgatgacattcatgctaaagaaaaagagtcaaacagacgtattactggaggggcaatgcaactctcttttacacagctaactatagattattatccttatcataaagcaggagatagttgtaatcattggatgtattttagtgatgcaaccaaaacaaaaaatggatgggccaatgagttattgcatgaatttgagtgcaacgttgaaatgcttaaacaggctgtgaaggatcataatgtaggttcacctcctaaatccccaacacatgcctctccccagcacacacaaacagagaaggactaccctctgaaagggacatgcagaacaccttcagtattatctcaacaatcaaaagctaagctaatgtctagttctgttgtggttagacttgcagatttcaatatataccaggtctctacagcggaacaatgtcgttcttcccccaaaagcatgatttgctgcaataaaaaatccctatatcttccacaagaaatgtcagctgtctatatagaattcacagaatattactatccagatggaaaggattttccaattccatctcccaacctctatagccagctgaatgcactacagtttactgtggatgaaagaagcattctatggttaaatcaatttctgttggatttaaaacagagtcttaatcagttcatggctgtgtacaagttgaatgacaattcaaaatctgacgagcatgttgatgttcgagttgatggcttaatgctaaagtttgtcattccttctgaagtgaaatctgaatgtcatcaagatcagccacgtgcaatttctattcagagttctgaaatgattgccacaaatacaaggcactgtccaaactgtcgacattctgacctagaagctttgtttcaagactttaaagattgtgatttttttagtaaaacatataccagcttccccaaatcttgtgacaattttaatcttctacatccaattttccagagacatgctcatgaacaagataccaaaatgcatgaaatttataaaggaaatattactccccaattgaataaaaacactcttaaaacttctgctgccacggatgtttgggctgtgtacttttctcaattttggatagattatgaagggatgaaaagtggaaaaggacggccaataagttttgtagactcattccctctttccatttggatttgtcaaccaacaagatatgcagagtcacaaaaagagccgcagacttgtaatcaggtatctctaaatacatcacaaagtgaatctagtgatctggctggccgattgaagcggaagaagctcttgaaggagtattatagtacagagtctgagcctttgacaaatggtggtcagaagccttcttcatcagatacatttttcagattttccccttcctcgtcagaggcagatattcatctcctagttcatgttcataaacatgtcagtatgcagattaatcactaccagtatctgcttctacttttcctgcatgagtcacttatcctgctttcagagaacttaaggaaagatgtagaagctgtaactggcagtcctgctagtcagacatccatttgtattggaattttacttagaagtgcagaactggctcttttgctccatccagtggatcaagcaaatactcttaagtctcctgtttctgaaagtgtgagcccagtggtacctgattatttgcctacagaaaatggggattttttgtcttcaaaaagaaaacaaattagtagggatataaatagaattagaagtgtaactgttaatcatatgtcagacaacagatctatgagtgttgaccttagccatatccctttaaaggatcctttgctttttaaatcagctagtgatacaaatctgcaaaaaggcatttcttttatggactatttatcagataaacatttagggaaaataagtgaagatgaaagtagtggacttgtttacaaaagtggctcaggagaaattggatcagaaacaagtgacaaaaaggattcattttatacagattcaagtagtatcttaaactacagagaagattcgaatatactttcatttgatagtgatggtaatcaaaacatactttcaagtactttaactagtaaaggaaatgaaaccatagagtccatctttaaagctgaagatttgcttccagaagcagcttcactctctgaaaacctggatatcagtaaagaagagacccccccagttagaacacttaaatcacagtcatctttaagtggaaagcctaaggaacgttgcccacccaacctggctcctctctgtgtttcttataagaatatgaaaagaagctcttcacaaatgtcattggataccatttcacttgacagcatgatattggaagaacagttattagaaagtgatggaagtgatagccatatgtttttggaaaaaggaaataaaaagaactcaactacaaattacaggggcacagcagaaagtgtgaatgctggtgcaaacctacagaattatggtgaaacttctccagatgccatcagtacaaattcagagggtgctcaggaaaatcatgatgacctgatgtccgttgtggtatttaaaattactggtgttaatggggaaattgacatccgaggggaagatacagaaatctgtcttcaagtgaaccaggtgacaccagaccaattaggcaatatcagccttcggcattacctttgtaatcgtccagttggttccgatcagaaagctgtaattcattccaaatcctctcctgagatttctctgagatttgaaagtgggcctggtgctgtaatacactctttacttgcagaaaaaaatggatttctgcagtgccacatagaaaacttcagcactgagtttcttacatcttctcttatgaatattcaacattttttggaagatgaaactgttgcaacagtaatgccaatgaagatacaagtttctaacacgaaaataaatttaaaagatgatagtccccggagtagtacagtatcccttgaaccagctcctgtaactgtacatattgatcatcttgtggtagagagaagtgacgatggctcttttcatatcagagattctcacatgcttaacactggaaatgatttgaaagaaaatgtcaaaagcgattcagtgctgctgaccagtggaaagtatgatctgaagaaacaacgcagtgtcacgcaagccactcagacaagcccaggggttccttggccttctcagtcagctaactttcctgagttctcctttgacttcactagggaacagctcatggaagagaatgaatctcttaaacaggaactggctaaagctaaaatggctcttgcagaggctcacttggaaaaagatgctcttcttcatcatataaagaagatgacagttgaatagcaggagtggcagtcaaaactgaaattatagctctggagtaggaaggttatatttataatgtggatgttaccagttaggggaagacttttattttcatgaaaagacaataaaacaaaatggaatgtgatgaagtggtgactatttcaaagccagtttagaaagtattagtacgggcattacaatcttttggttgttttgtgttttggggcttaaccctcttttaagctgttgtgatctagggaagtcaacacatagtgtaaaataattacatgcctaatgaaaagaagatgtcatttcctaattttgatatctcattttcggcattttttaaaatgtaaaaggaaaacctcttgtgttcacacagattgctgaattgatttctccatatttgttaataatttactattatttacaaagattcaaatgcttttatgactaatgtaaaatgaaaagaggcttacattttaaatgttattaaaattatgtacttaaatctataattatttaattattgtaaaaagtccaagcagatcaataaactatataattaatgggtttggaaaatcatcaccctactgaacttacaaaatatcttgaaaatgtgaaaaatatcattttaaataatgggtacattgtataagtggaagctataattttcaacaaaaagatggtacaaatgtaaaagtaaaaagcacaaactatacaaaagcaaaatctatggccaagtgatttaaaagcattacttgtacattcctttaaacatttgttgttagaagcaaaagagtaatttatcctgctaaatttggcaccatttgtaattataaaaattttgattaatactatttatattaatttctttaccttcattttttctccttaaggagttgattgtttttggaaatgtttttttccttgcacataagacagtttcataccattcttatagaatcatattaggtgggtgtttgcacatactaaatttataaagctagttttgattaaagctctatgtgagatatatatacatacacaagtcttctataataagagtcgttggtgaattttgaattctattttgttaggaattaaggttgaaatcaacatgaaagaatctcaatcatgcattataaaataaaagtacatgggtgttaagaaacaagagacttttaaagatttaaaatatatttctgatagaatttaactaagtggtgtgtattttaaaattcacattcttaaacataaatctatccaagatagaaaatgaaatagctggactactctttctttaagatacttgaaaattttaaaccacattgcaacactttatggtgctttgcgtgtttggcatgacatacacagtggtcctggtatataagtgcttgggggaaaatacatattttgtttacattaaattttgaagtgatttaggctttattgaaaacaatactggccttccctccccttctctaacatccattttcatttacgttatttaaaatatacaggcactgttttgggtacagaggatatagccaagagcaaattgatagtagtttacctcagagtattaaaaaaatcataataagtcatgttaatctaaaactatataatagccttagattaaatgtgcagatgtctaattaaagatttaaaatgtatagcgtatgtccttagaacatttgatttttaggtatacattcggcaaaaacagtctgttatggaaaagaaggattgatgggacattaacttcttccgagctaacattgtttctgaagattgacctattctatataaatttaaatttttctatgtttttctttttttttttgcgatgaggtttcgctcttgttgcccaggctggagtacantggtgtgatcttngctcaccgcaacctccgcctcgtgggttcaaatgattctcctgtctcagcctcctgagtaactggggttacangcgcccaccactacgcccagctaatttttggtatttttngtagacacagggtttcaccatgttggccaggctggtcttcaactcctnaccccaggtgatccgcccacctcngcctcccaangtgctgggattncaggcgtgagccaccgtacccggcctctatcgtatattataattgcttattgttatagaagctgaatgttttacttactacttttaaatttatttggtcttcccaaggaaatcatacaaacggtagagattatgataatctgagcattctgtgtgcttagtttgatttttttatttataagcagtactatttttatagatgtttaaaattcataaaacactgtattctgagaggtaggtattattcaaatgttagaaattttttttaaaaaaatgccctgaggcttagaaaggacaaatgactgaaatcacaattagtaatctggtctttagacttaaagcctagttatatgcttttattatagcttagtcattaattcacacattttcccttatcttttttatcttttaaaggtgaccataaaactttaaattgtgtgtgtacgtctatgtatgaggtatatgttaccctgtttgtgttattcaaactacctaaaagataggatgatttttgtttaagtgaatcccaaactagcagtctgagaaatacaggaaagcctgataattgacttaccagagttggctttttttttttaagttaccataatttagatataaagttgtcatgtcctggaatttaaaaaagaaatctctagctgagagatgttaatggtcaggagttgaaaatgacaattgtgctttgctttttatttttattttttgtttacttttgagttttttggagtttttttcctatatttttaattgagaagtaaaaattatatatttatggtgtacaacacgatgtgatacatgtataccttgtggaatggctaaatcaagctntctaacatgttacctcacaaactttttttgtagcgagaacacttaaaattttgtaacaattttcaagtatacagcatattgttattaactgtaatcacgtgatatacagtagatctcttgaacttatatttactaactgcaatttcgtgtccttttacaaacatctccccatttccccatcccccagcctctgataaccagaattttactctccatcccatgaagttgactttttttgcactccgtaagtgagatcatctagaattttggcatgtctttctgtgcctggcttatttcacttaacacagtggtcccctgtgtagctgggaccacaggcgtgtgccactacacccaggtttatccatgttgtcagaaatgacaggatttcctttttttaaaagttgaatggtattctcttatgtatattttccacatttgctttttccattcatccattgatggacagttaaattgattccatatcttggctattgagtaatgctgcagtgaacatgggattgcagatntctcttccacatactgatttcgtttcctttgaacatataccaaatagtgggattggtggataatatggtagttctattttttaatgttttgaggaccctccatactgttttccntaatggctataataatttacattgccaccaacagtgtacaaagcttttctttccttttctctgcatcctctccaacacttcccttttgtcttcttgataatagtcattctaacgggtatgattacagtagctttgtagtgggttttctgtgctgtgctttttaatttcatgtatgtaaaaaacattgggtattttgaatgtttttcttttctcaccttatcctagaacttgaggctgggcgcggtggctcatccctgtaatctcagcactttgggaggccaaattgggcagatcacttgaggtcaggagttcgagaccagcctggccaacatggtgaaaccccatttctactaaaaatacaaaaattagccaggcgtggtggtgcacgcctgtagtcccagccaatcagtaggctgaggcacgagaatcgcttgaacccaggaggccaaggctgcagtgagccacgattgcaccactgcactctaacctgagcaacacagactccatctca

SEQ ID NO: 7304 - DNA, 8577 bp, Homo sapiens
  misc_feature (6361)..(6361): n is a, c, g, or t
  misc_feature (6374)..(6374): n is a, c, g, or t
  misc_feature (6447)..(6447): n is a, c, g, or t
  misc_feature (6486)..(6486): n is a, c, g, or t
  misc_feature (6534)..(6534): n is a, c, g, or t
  misc_feature (6558)..(6558): n is a, c, g, or t
  misc_feature (6568)..(6568): n is a, c, g, or t
  misc_feature (6580)..(6580): n is a, c, g, or t
  misc_feature (7425)..(7425): n is a, c, g, or t
  misc_feature (7952)..(7952): n is a, c, g, or t
  misc_feature (8066)..(8066): n is a, c, g, or t
aatatataatttcatcaatgaatatatctgggagtagagattctgttttcatgaaatctgatgattttagtagttaatggctatgtcttaattccccaccccccaacacctgtaatacacatagcttttccaccagataataaatgccttgagaactgattgagtgctttgtgttcttttttggcatttgtctttttagacctgtagagaggcacttaaatgactctgctcactttttactttcttcctaaagaaaaatgaaagagaaaataatcttaaataatactttaataatatacgtagaataaataatctaattgtttatattttaacgtttttattagtccctggataaagtaataatggaaatgagtacatgtgaagaaccaagaagccctaatggcccatcaccaattgcaactgcttcaggacaaagtgaatacggctttgctgaaaaagtagttgagggaatttctgtttctgtaaattctatagtcatcagaattggagcaaaagccttcaatgcatcatttgaactttctcagcttcggatctatagtgtaaatgcacactgggaacatggagatttgagatttactcgtattcaggatccacagagaggagaggttttgacttttaaagaaataaattggcagatgataagaatagaggcagatgccacccaaagttcacatcttgaaattatgtgtgctcctgttcgattaataaccaaccaatcaaaaatcagagtcacacttaaaagaaggttaaaggactgcaatgtcatagcaacaaagttagttctaatattggatgacttattatgggttttgactgattcccagttgaaagctatggtacaatatgcaaagtctcttagtgaagcaatagaaaaatcaacagaacaaaggaagagtatggctcctgaacctacacagagctctacagtagtcgcatctgcccagcaagtgaagacaacgcaaacttcaaatgctcctgatgtaaatgatgcaattgtgaaactattcaatgattttgatgttaaggaaacctcccatcatttagtgatttctcatctagatctacacatatgtgatgacattcatgctaaagaaaaagagtcaaacagacgtattactggaggggcaatgcaactctcttttacacagctaactatagattattatccttatcataaagcaggagatagttgtaatcattggatgtattttagtgatgcaaccaaaacaaaaaatggatgggccaatgagttattgcatgaatttgagtgcaacgttgaaatgcttaaacaggctgtgaaggatcataatgtaggttcacctcctaaatccccaacacatgcctctccccagcacacacaaacagagaaggactaccctctgaaagggacatgcagaacaccttcagtattatctcaacaatcaaaagctaagctaatgtctagttctgttgtggttagacttgcagatttcaatatataccaggtctctacagcggaacaatgtcgttcttcccccaaaagcatgatttgctgcaataaaaaatccctatatcttccacaagaaatgtcagctgtctatatagaattcacagaatattactatccagatggaaaggattttccaattccatctcccaacctctatagccagctgaatgcactacagtttactgtggatgaaagaagcattctatggttaaatcaatttctgttggatttaaaacagagtcttaatcagttcatggctgtgtacaagttgaatgacaattcaaaatctgacgagcatgttgatgttcgagttgatggcttaatgctaaagtttgtcattccttctgaagtgaaatctgaatgtcatcaagatcagccacgtgcaatttctattcagagttctgaaatgattgccacaaatacaaggcactgtccaaactgtcgacattctgacctagaagctttgtttcaagactttaaagattgtgatttttttagtaaaacatataccagcttccccaaatcttgtgacaattttaatcttctacatccaattttccagagacatgctcatgaacaagataccaaaatgcatgaaatttataaaggaaatattactccccaattgaataaaaacactcttaaaacttctgctgccacggatgtttgggctgtgtacttttctcaattttggatagattatgaagggatgaaaagtggaaaaggacggccaataagttttgtagactcattccctctttccatttggatttgtcaaccaacaagatatgcagagtcacaaaaagagccgcagacttgtaatcaggtatctctaaatacatcacaaagtgaatctagtgatctggctggccgattgaagcggaagaagctcttgaaggagtattatagtacagagtctgagcctttgacaaatggtggtcagaagccttcttcatcagatacatttttcagattttccccttcctcgtcagaggcagatattcatctcctagttcatgttcataaacatgtcagtatgcagattaatcactaccagtatctgcttctacttttcctgcatgagtcacttatcctgctttcagagaacttaaggaaagatgtagaagctgtaactggcagtcctgctagtcagacatccatttgtattggaattttacttagaagtgcagaactggctcttttgctccatccagtggatcaagcaaatactcttaagtctcctgtttctgaaagtgtgagcccagtggtacctgattatttgcctacagaaaatggggattttttgtcttcaaaaagaaaacaaattagtagggatataaatagaattagaagtgtaactgttaatcatatgtcagacaacagatctatgagtgttgaccttagccatatccctttaaaggatcctttgctttttaaatcagctagtgatacaaatctgcaaaaaggcatttcttttatggactatttatcagataaacatttagggaaaataagtgaagatgaaagtagtggacttgtttacaaaagtggctcaggagaaattggatcagaaacaagtgacaaaaaggattcattttatacagattcaagtagtatcttaaactacagagaagattcgaatatactttcatttgatagtgatggtaatcaaaacatactttcaagtactttaactagtaaaggaaatgaaaccatagagtccatctttaaagctgaagatttgcttccagaagcagcttcactctctgaaaacctggatatcagtaaagaagagacccccccagttagaacacttaaatcacagtcatctttaagtggaaagcctaaggaacgttgcccacccaacctggctcctctctgtgtttcttataagaatatgaaaagaagctcttcacaaatgtcattggataccatttcacttgacagcatgatattggaagaacagttattagaaagtgatggaagtgatagccatatgtttttggaaaaaggaaataaaaagaactcaactacaaattacaggggcacagcagaaagtgtgaatgctggtgcaaacctacagaattatggtgaaacttctccagatgccatcagtacaaattcagagggtgctcaggaaaatcatgatgacctgatgtccgttgtggtatttaaaattactggtgttaatggggaaattgacatccgaggggaagatacagaaatctgtcttcaagtgaaccaggtgacaccagaccaattaggcaatatcagccttcggcattacctttgtaatcgtccagttggttccgatcagaaagctgtaattcattccaaatcctctcctgagatttctctgagatttgaaagtgggcctggtgctgtaatacactctttacttgcagaaaaaaatggatttctgcagtgccacatagaaaacttcagcactgagtttcttacatcttctcttatgaatattcaacattttttggaagatgaaactgttgcaacagtaatgccaatgaagatacaagtttctaacacgaaaataaatttaaaagatgatagtccccggagtagtacagtatcccttgaaccagctcctgtaactgtacatattgatcatcttgtggtagagagaagtgacgatggctcttttcatatcagagattctcacatgcttaacactggaaatgatttgaaagaaaatgtcaaaagcgattcagtgctgctgaccagtggaaagtatgatctgaagaaacaacgcagtgtcacgcaagccactcagacaagcccaggggttccttggccttctcagtcagctaactttcctgagttctcctttgacttcactagggaacagctcatggaagagaatgaatctcttaaacaggaactggctaaagctaaaatggctcttgcagaggctcacttggaaaaagatgctcttcttcatcatataaagaagatgacagttgaatagcaggagtggcagtcaaaactgaaattatagctctggagtaggaaggttatatttataatgtggatgttaccagttaggggaagacttttattttcatgaaaagacaataaaacaaaatggaatgtgatgaagtggtgactatttcaaagccagtttagaaagtattagtacgggcattacaatcttttggttgttttgtgttttggggcttaaccctcttttaagctgttgtgatctagggaagtcaacacatagtgtaaaataattacatgcctaatgaaaagaagatgtcatttcctaattttgatatctcattttcggcattttttaaaatgtaaaaggaaaacctcttgtgttcacacagattgctgaattgatttctccatatttgttaataatttactattatttacaaagattcaaatgcttttatgactaatgtaaaatgaaaagaggcttacattttaaatgttattaaaattatgtacttaaatctataattatttaattattgtaaaaagtccaagcagatcaataaactatataattaatgggtttggaaaatcatcaccctactgaacttacaaaatatcttgaaaatgtgaaaaatatcattttaaataatgggtacattgtataagtggaagctataattttcaacaaaaagatggtacaaatgtaaaagtaaaaagcacaaactatacaaaagcaaaatctatggccaagtgatttaaaagcattacttgtacattcctttaaacatttgttgttagaagcaaaagagtaatttatcctgctaaatttggcaccatttgtaattataaaaattttgattaatactatttatattaatttctttaccttcattttttctccttaaggagttgattgtttttggaaatgtttttttccttgcacataagacagtttcataccattcttatagaatcatattaggtgggtgtttgcacatactaaatttataaagctagttttgattaaagctctatgtgagatatatatacatacacaagtcttctataataagagtcgttggtgaattttgaattctattttgttaggaattaaggttgaaatcaacatgaaagaatctcaatcatgcattataaaataaaagtacatgggtgttaagaaacaagagacttttaaagatttaaaatatatttctgatagaatttaactaagtggtgtgtattttaaaattcacattcttaaacataaatctatccaagatagaaaatgaaatagctggactactctttctttaagatacttgaaaattttaaaccacattgcaacactttatggtgctttgcgtgtttggcatgacatacacagtggtcctggtatataagtgcttgggggaaaatacatattttgtttacattaaattttgaagtgatttaggctttattgaaaacaatactggccttccctccccttctctaacatccattttcatttacgttatttaaaatatacaggcactgttttgggtacagaggatatagccaagagcaaattgatagtagtttacctcagagtattaaaaaaatcataataagtcatgttaatctaaaactatataatagccttagattaaatgtgcagatgtctaattaaagatttaaaatgtatagcgtatgtccttagaacatttgatttttaggtatacattcggcaaaaacagtctgttatggaaaagaaggattgatgggacattaacttcttccgagctaacattgtttctgaagattgacctattctatataaatttaaatttttctatgtttttctttttttttttgcgatgaggtttcgctcttgttgcccaggctggagtacantggtgtgatcttngctcaccgcaacctccgcctcgtgggttcaaatgattctcctgtctcagcctcctgagtaactggggttacangcgcccaccactacgcccagctaatttttggtatttttngtagacacagggtttcaccatgttggccaggctggtcttcaactcctnaccccaggtgatccgcccacctcngcctcccaangtgctgggattncaggcgtgagccaccgtacccggcctctatcgtatattataattgcttattgttatagaagctgaatgttttacttactacttttaaatttatttggtcttcccaaggaaatcatacaaacggtagagattatgataatctgagcattctgtgtgcttagtttgatttttttatttataagcagtactatttttatagatgtttaaaattcataaaacactgtattctgagaggtaggtattattcaaatgttagaaattttttttaaaaaaatgccctgaggcttagaaaggacaaatgactgaaatcacaattagtaatctggtctttagacttaaagcctagttatatgcttttattatagcttagtcattaattcacacattttcccttatcttttttatcttttaaaggtgaccataaaactttaaattgtgtgtgtacgtctatgtatgaggtatatgttaccctgtttgtgttattcaaactacctaaaagataggatgatttttgtttaagtgaatcccaaactagcagtctgagaaatacaggaaagcctgataattgacttaccagagttggctttttttttttaagttaccataatttagatataaagttgtcatgtcctggaatttaaaaaagaaatctctagctgagagatgttaatggtcaggagttgaaaatgacaattgtgctttgctttttatttttattttttgtttacttttgagttttttggagtttttttcctatatttttaattgagaagtaaaaattatatatttatggtgtacaacacgatgtgatacatgtataccttgtggaatggctaaatcaagctntctaacatgttacctcacaaactttttttgtagcgagaacacttaaaattttgtaacaattttcaagtatacagcatattgttattaactgtaatcacgtgatatacagtagatctcttgaacttatatttactaactgcaatttcgtgtccttttacaaacatctccccatttccccatcccccagcctctgataaccagaattttactctccatcccatgaagttgactttttttgcactccgtaagtgagatcatctagaattttggcatgtctttctgtgcctggcttatttcacttaacacagtggtcccctgtgtagctgggaccacaggcgtgtgccactacacccaggtttatccatgttgtcagaaatgacaggatttcctttttttaaaagttgaatggtattctcttatgtatattttccacatttgctttttccattcatccattgatggacagttaaattgattccatatcttggctattgagtaatgctgcagtgaacatgggattgcagatntctcttccacatactgatttcgtttcctttgaacatataccaaatagtgggattggtggataatatggtagttctattttttaatgttttgaggaccctccatactgttttccntaatggctataataatttacattgccaccaacagtgtacaaagcttttctttccttttctctgcatcctctccaacacttcccttttgtcttcttgataatagtcattctaacgggtatgattacagtagctttgtagtgggttttctgtgctgtgctttttaatttcatgtatgtaaaaaacattgggtattttgaatgtttttcttttctcaccttatcctagaacttgaggctgggcgcggtggctcatccctgtaatctcagcactttgggaggccaaattgggcagatcacttgaggtcaggagttcgagaccagcctggccaacatggtgaaaccccatttctactaaaaatacaaaaattagccaggcgtggtggtgcacgcctgtagtcccagccaatcagtaggctgaggcacgagaatcgcttgaacccaggaggccaaggctgcagtgagccacgattgcaccactgcactctaacctgagcaacacagactccatctca

SEQ ID NO: 7305 - DNA, 6502 bp, Homo sapiens
  misc_feature (4286)..(4286): n is a, c, g, or t
  misc_feature (4299)..(4299): n is a, c, g, or t
  misc_feature (4372)..(4372): n is a, c, g, or t
  misc_feature (4411)..(4411): n is a, c, g, or t
  misc_feature (4459)..(4459): n is a, c, g, or t
  misc_feature (4483)..(4483): n is a, c, g, or t
  misc_feature (4493)..(4493): n is a, c, g, or t
  misc_feature (4505)..(4505): n is a, c, g, or t
  misc_feature (5350)..(5350): n is a, c, g, or t
  misc_feature (5877)..(5877): n is a, c, g, or t
  misc_feature (5991)..(5991): n is a, c, g, or t
ggcagattcgcgtgtaacattttcatcaagagcgacacatatttagctcaccacaaatggtggaataaaaacactcttaaaacttctgctgccacggatgtttgggctgtgtacttttctcaattttggatagattatgaagggatgaaaagtggaaaaggacggccaataagttttgtagactcattccctctttccatttggatttgtcaaccaacaagatatgcagagtcacaaaaagagccgcagacttgtaatcaggtatctctaaatacatcacaaagtgaatctagtgatctggctggccgattgaagcggaagaagctcttgaaggagtattatagtacagagtctgagcctttgacaaatggtggtcagaagccttcttcatcagatacatttttcagattttccccttcctcgtcagaggcagatattcatctcctagttcatgttcataaacatgtcagtatgcagattaatcactaccagtatctgcttctacttttcctgcatgagtcacttatcctgctttcagagaacttaaggaaagatgtagaagctgtaactggcagtcctgctagtcagacatccatttgtattggaattttacttagaagtgcagaactggctcttttgctccatccagtggatcaagcaaatactcttaagtctcctgtttctgaaagtgtgagcccagtggtacctgattatttgcctacagaaaatggggattttttgtcttcaaaaagaaaacaaattagtagggatataaatagaattagaagtgtaactgttaatcatatgtcagacaacagatctatgagtgttgaccttagccatatccctttaaaggatcctttgctttttaaatcagctagtgatacaaatctgcaaaaaggcatttcttttatggactatttatcagataaacatttagggaaaataagtgaagatgaaagtagtggacttgtttacaaaagtggctcaggagaaattggatcagaaacaagtgacaaaaaggattcattttatacagattcaagtagtatcttaaactacagagaagattcgaatatactttcatttgatagtgatggtaatcaaaacatactttcaagtactttaactagtaaaggaaatgaaaccatagagtccatctttaaagctgaagatttgcttccagaagcagcttcactctctgaaaacctggatatcagtaaagaagagacccccccagttagaacacttaaatcacagtcatctttaagtggaaagcctaaggaacgttgcccacccaacctggctcctctctgtgtttcttataagaatatgaaaagaagctcttcacaaatgtcattggataccatttcacttgacagcatgatattggaagaacagttattagaaagtgatggaagtgatagccatatgtttttggaaaaaggaaataaaaagaactcaactacaaattacaggggcacagcagaaagtgtgaatgctggtgcaaacctacagaattatggtgaaacttctccagatgccatcagtacaaattcagagggtgctcaggaaaatcatgatgacctgatgtccgttgtggtatttaaaattactggtgttaatggggaaattgacatccgaggggaagatacagaaatctgtcttcaagtgaaccaggtgacaccagaccaattaggcaatatcagccttcggcattacctttgtaatcgtccagttggttccgatcagaaagctgtaattcattccaaatcctctcctgagatttctctgagatttgaaagtgggcctggtgctgtaatacactctttacttgcagaaaaaaatggatttctgcagtgccacatagaaaacttcagcactgagtttcttacatcttctcttatgaatattcaacattttttggaagatgaaactgttgcaacagtaatgccaatgaagatacaagtttctaacacgaaaataaatttaaaagatgatagtccccggagtagtacagtatcccttgaaccagctcctgtaactgtacatattgatcatcttgtggtagagagaagtgacgatggctcttttcatatcagagattctcacatgcttaacactggaaatgatttgaaagaaaatgtcaaaagcgattcagtgctgctgaccagtggaaagtatgatctgaagaaacaacgcagtgtcacgcaagccactcagacaagcccaggggttccttggccttctcagtcagctaactttcctgagttctcctttgacttcactagggaacagctcatggaagagaatgaatctcttaaacaggaactggctaaagctaaaatggctcttgcagaggctcacttggaaaaagatgctcttcttcatcatataaagaagatgacagttgaatagcaggagtggcagtcaaaactgaaattatagctctggagtaggaaggttatatttataatgtggatgttaccagttaggggaagacttttattttcatgaaaagacaataaaacaaaatggaatgtgatgaagtggtgactatttcaaagccagtttagaaagtattagtacgggcattacaatcttttggttgttttgtgttttggggcttaaccctcttttaagctgttgtgatctagggaagtcaacacatagtgtaaaataattacatgcctaatgaaaagaagatgtcatttcctaattttgatatctcattttcggcattttttaaaatgtaaaaggaaaacctcttgtgttcacacagattgctgaattgatttctccatatttgttaataatttactattatttacaaagattcaaatgcttttatgactaatgtaaaatgaaaagaggcttacattttaaatgttattaaaattatgtacttaaatctataattatttaattattgtaaaaagtccaagcagatcaataaactatataattaatgggtttggaaaatcatcaccctactgaacttacaaaatatcttgaaaatgtgaaaaatatcattttaaataatgggtacattgtataagtggaagctataattttcaacaaaaagatggtacaaatgtaaaagtaaaaagcacaaactatacaaaagcaaaatctatggccaagtgatttaaaagcattacttgtacattcctttaaacatttgttgttagaagcaaaagagtaatttatcctgctaaatttggcaccatttgtaattataaaaattttgattaatactatttatattaatttctttaccttcattttttctccttaaggagttgattgtttttggaaatgtttttttccttgcacataagacagtttcataccattcttatagaatcatattaggtgggtgtttgcacatactaaatttataaagctagttttgattaaagctctatgtgagatatatatacatacacaagtcttctataataagagtcgttggtgaattttgaattctattttgttaggaattaaggttgaaatcaacatgaaagaatctcaatcatgcattataaaataaaagtacatgggtgttaagaaacaagagacttttaaagatttaaaatatatttctgatagaatttaactaagtggtgtgtattttaaaattcacattcttaaacataaatctatccaagatagaaaatgaaatagctggactactctttctttaagatacttgaaaattttaaaccacattgcaacactttatggtgctttgcgtgtttggcatgacatacacagtggtcctggtatataagtgcttgggggaaaatacatattttgtttacattaaattttgaagtgatttaggctttattgaaaacaatactggccttccctccccttctctaacatccattttcatttacgttatttaaaatatacaggcactgttttgggtacagaggatatagccaagagcaaattgatagtagtttacctcagagtattaaaaaaatcataataagtcatgttaatctaaaactatataatagccttagattaaatgtgcagatgtctaattaaagatttaaaatgtatagcgtatgtccttagaacatttgatttttaggtatacattcggcaaaaacagtctgttatggaaaagaaggattgatgggacattaacttcttccgagctaacattgtttctgaagattgacctattctatataaatttaaatttttctatgtttttctttttttttttgcgatgaggtttcgctcttgttgcccaggctggagtacantggtgtgatcttngctcaccgcaacctccgcctcgtgggttcaaatgattctcctgtctcagcctcctgagtaactggggttacangcgcccaccactacgcccagctaatttttggtatttttngtagacacagggtttcaccatgttggccaggctggtcttcaactcctnaccccaggtgatccgcccacctcngcctcccaangtgctgggattncaggcgtgagccaccgtacccggcctctatcgtatattataattgcttattgttatagaagctgaatgttttacttactacttttaaatttatttggtcttcccaaggaaatcatacaaacggtagagattatgataatctgagcattctgtgtgcttagtttgatttttttatttataagcagtactatttttatagatgtttaaaattcataaaacactgtattctgagaggtaggtattattcaaatgttagaaattttttttaaaaaaatgccctgaggcttagaaaggacaaatgactgaaatcacaattagtaatctggtctttagacttaaagcctagttatatgcttttattatagcttagtcattaattcacacattttcccttatcttttttatcttttaaaggtgaccataaaactttaaattgtgtgtgtacgtctatgtatgaggtatatgttaccctgtttgtgttattcaaactacctaaaagataggatgatttttgtttaagtgaatcccaaactagcagtctgagaaatacaggaaagcctgataattgacttaccagagttggctttttttttttaagttaccataatttagatataaagttgtcatgtcctggaatttaaaaaagaaatctctagctgagagatgttaatggtcaggagttgaaaatgacaattgtgctttgctttttatttttattttttgtttacttttgagttttttggagtttttttcctatatttttaattgagaagtaaaaattatatatttatggtgtacaacacgatgtgatacatgtataccttgtggaatggctaaatcaagctntctaacatgttacctcacaaactttttttgtagcgagaacacttaaaattttgtaacaattttcaagtatacagcatattgttattaactgtaatcacgtgatatacagtagatctcttgaacttatatttactaactgcaatttcgtgtccttttacaaacatctccccatttccccatcccccagcctctgataaccagaattttactctccatcccatgaagttgactttttttgcactccgtaagtgagatcatctagaattttggcatgtctttctgtgcctggcttatttcacttaacacagtggtcccctgtgtagctgggaccacaggcgtgtgccactacacccaggtttatccatgttgtcagaaatgacaggatttcctttttttaaaagttgaatggtattctcttatgtatattttccacatttgctttttccattcatccattgatggacagttaaattgattccatatcttggctattgagtaatgctgcagtgaacatgggattgcagatntctcttccacatactgatttcgtttcctttgaacatataccaaatagtgggattggtggataatatggtagttctattttttaatgttttgaggaccctccatactgttttccntaatggctataataatttacattgccaccaacagtgtacaaagcttttctttccttttctctgcatcctctccaacacttcccttttgtcttcttgataatagtcattctaacgggtatgattacagtagctttgtagtgggttttctgtgctgtgctttttaatttcatgtatgtaaaaaacattgggtattttgaatgtttttcttttctcaccttatcctagaacttgaggctgggcgcggtggctcatccctgtaatctcagcactttgggaggccaaattgggcagatcacttgaggtcaggagttcgagaccagcctggccaacatggtgaaaccccatttctactaaaaatacaaaaattagccaggcgtggtggtgcacgcctgtagtcccagccaatcagtaggctgaggcacgagaatcgcttgaacccaggaggccaaggctgcagtgagccacgattgcaccactgcactctaacctgagcaacacagactccatctca

SEQ ID NO: 7306 - DNA, 5185 bp, Homo sapiens
ctcttaggtgatgctgcagccaagatggcgcccgcggcggccgtggcggcctgagcgtgatgctccgggttctcggcggcggctgtggccttggccggggccttgggtctctcccggtcgtgagcgatcagcgcctctccgccggccgggctagccgggacagagaggagacggccacgaagagaggaggcagtgagcaacaggacgagaccgcggcgtctccagcctcggtaccatggccgggatcatcaagaaacaaatcttgaagcacctctccagatttaccaaaaatttatctcctgacaagataaatctaagtacccttaaaggagaaggtgaactgaagaatttggagttggatgaagaagtactccagaatatgttggatttgccaacatggcttgctatcaacaaagttttttgtaataaagcgtccattaggatcccatggacaaaactgaaaacacatcccatctgtttgtccctggataaagtaataatggaaatgagtacatgtgaagaaccaagaagccctaatggcccatcaccaattgcaactgcttcaggacaaagtgaatacggctttgctgaaaaagtagttgagggaatttctgtttctgtaaattctatagtcatcagaattggagcaaaagccttcaatgcatcatttgaactttctcagcttcggatctatagtgtaaatgcacactgggaacatggagatttgagatttactcgtattcaggatccacagagaggagaggttttgacttttaaagaaataaattggcagatgataagaatagaggcagatgccacccaaagttcacatcttgaaattatgtgtgctcctgttcgattaataaccaaccaatcaaaaatcagagtcacacttaaaagaaggttaaaggactgcaatgtcatagcaacaaagttagttctaatattggatgacttattatgggttttgactgattcccagttgaaagctatggtacaatatgcaaagtctcttagtgaagcaatagaaaaatcaacagaacaaaggaagagtatggctcctgaacctacacagagctctacagtagtcgcatctgcccagcaagtgaagacaacgcaaacttcaaatgctcctgatgtaaatgatgcaattgtgaaactattcaatgattttgatgttaaggaaacctcccatcatttagtgatttctcatctagatctacacatatgtgatgacattcatgctaaagaaaaagagtcaaacagacgtattactggaggggcaatgcaactctcttttacacagctaactatagattattatccttatcataaagcaggagatagttgtaatcattggatgtattttagtgatgcaaccaaaacaaaaaatggatgggccaatgagttattgcatgaatttgagtgcaacgttgaaatgcttaaacaggctgtgaaggatcataatgtaggttcacctcctaaatccccaacacatgcctctccccagcacacacaaacagagaaggactaccctctgaaagggacatgcagaacaccttcagtattatctcaacaatcaaaagctaagctaatgtctagttctgttgtggttagacttgcagatttcaatatataccaggtctctacagcggaacaatgtcgttcttcccccaaaagcatgatttgctgcaataaaaaatccctatatcttccacaagaaatgtcagctgtctatatagaattcacagaatattactatccagatggaaaggattttccaattccatctcccaacctctatagccagctgaatgcactacagtttactgtggatgaaagaagcattctatggttaaatcaatttctgttggatttaaaacagagtcttaatcagttcatggctgtgtacaagttgaatgacaattcaaaatctgacgagcatgttgatgttcgagttgatggcttaatgctaaagtttgtcattccttctgaagtgaaatctgaatgtcatcaagatcagccacgtgcaatttctattcagagttctgaaatgattgccacaaatacaaggcactgtccaaactgtcgacattctgacctagaagctttgtttcaagactttaaagattgtgatttttttagtaaaacatataccagcttccccaaatcttgtgacaattttaatcttctacatccaattttccagagacatgctcatgaacaagataccaaaatgcatgaaatttataaaggaaatattactccccaattgaataaaaacactcttaaaacttctgctgccacggatgtttgggctgtgtacttttctcaattttggatagattatgaagggatgaaaagtggaaaaggacggccaataagttttgtagactcattccctctttccatttggatttgtcaaccaacaagatatgcagagtcacaaaaagagccgcagacttgtaatcaggtatctctaaatacatcacaaagtgaatctagtgatctggctggccgattgaagcggaagaagctcttgaaggagtattatagtacagagtctgagcctttgacaaatggtggtcagaagccttcttcatcagatacatttttcagattttccccttcctcgtcagaggcagatattcatctcctagttcatgttcataaacatgtcagtatgcagattaatcactaccagtatctgcttctacttttcctgcatgagtcacttatcctgctttcagagaacttaaggaaagatgtagaagctgtaactggcagtcctgctagtcagacatccatttgtattggaattttacttagaagtgcagaactggctcttttgctccatccagtggatcaagcaaatactcttaagtctcctgtttctgaaagtgtgagcccagtggtacctgattatttgcctacagaaaatggggattttttgtcttcaaaaagaaaacaaattagtagggatataaatagaattagaagtgtaactgttaatcatatgtcagacaacagatctatgagtgttgaccttagccatatccctttaaaggatcctttgctttttaaatcagctagtgatacaaatctgcaaaaaggcatttcttttatggactatttatcagataaacatttagggaaaataagtgaagatgaaagtagtggacttgtttacaaaagtggctcaggagaaattggatcagaaacaagtgacaaaaaggattcattttatacagattcaagtagtatcttaaactacagagaagattcgaatatactttcatttgatagtgatggtaatcaaaacatactttcaagtactttaactagtaaaggaaatgaaaccatagagtccatctttaaagctgaagatttgcttccagaagcagcttcactctctgaaaacctggatatcagtaaagaagagacccccccagttagaacacttaaatcacagtcatctttaagtggaaagcctaaggaacgttgcccacccaacctggctcctctctgtgtttcttataagaatatgaaaagaagctcttcacaaatgtcattggataccatttcacttgacagcatgatattggaagaacagttattagaaagtgatggaagtgatagccatatgtttttggaaaaaggaaataaaaagaactcaactacaaattacaggggcacagcagaaagtgtgaatgctggtgcaaacctacagaattatggtgaaacttctccagatgccatcagtacaaattcagagggtgctcaggaaaatcatgatgacctgatgtccgttgtggtatttaaaattactggtgttaatggggaaattgacatccgaggggaagatacagaaatctgtcttcaagtgaaccaggtgacaccagaccaattaggcaatatcagccttcggcattacctttgtaatcgtccagttggttccgatcagaaagctgtaattcattccaaatcctctcctgagatttctctgagatttgaaagtgggcctggtgctgtaatacactctttacttgcagaaaaaaatggatttctgcagtgccacatagaaaacttcagcactgagtttcttacatcttctcttatgaatattcaacattttttggaagatgaaactgttgcaacagtaatgccaatgaagatacaagtttctaacacgaaaataaatttaaaagatgatagtccccggagtagtacagtatcccttgaaccagctcctgtaactgtacatattgatcatcttgtggtagagagaagtgacgatggctcttttcatatcagagattctcacatgcttaacactggaaatgatttgaaagaaaatgtcaaaagcgattcagtgctgctgaccagtggaaagtatgatctgaagaaacaacgcagtgtcacgcaagccactcagacaagcccaggggttccttggccttctcagtcagctaactttcctgagttctcctttgacttcactagggaacagctcatggaagagaatgaatctcttaaacaggaactggctaaagctaaaatggctcttgcagaggctcacttggaaaaagatgctcttcttcatcatataaagaagatgacagttgaatagcaggagtggcagtcaaaactgaaattatagctctggagtaggaaggttatatttataatgtggatgttaccagttaggggaagacttttattttcatgaaaagacaataaaacaaaatggaatgtgatgaagtggtgactatttcaaagccagtttagaaagtattagtacgggcattacaatcttttggttgttttgtgttttggggcttaaccctcttttaagctgttgtgatctagggaagtcaacacatagtgtaaaataattacatgcctaatgaaaagaagatgtcatttcctaattttgatatctcattttcggcattttttaaaatgtaaaaggaaaacctcttgtgttcacacagattgctgaattgatttctccatatttgttaataatttactattatttacaaagattcaaatgcttttatgactaatgtaaaatgaaaagaggcttacattttaaatgttattaaaattatgtacttaaatctataattatttaattattgtaaaaagtccaagcagatcaataaactatataattaatggg

SEQ ID NO: 7307 - DNA, 4756 bp, Homo sapiens
ctcttaggtgatgctgcagccaagatggcgcccgcggcggccgtggcggcctgagcgtgatgctccgggttctcggcggcggctgtggccttggccggggccttgggtctctcccggtcgtgagcgatcagcgcctctccgccggccgggctagccgggacagagaggagacggccacgaagagaggaggcagtgagcaacaggacgagaccgcggcgtctccagcctcggtaccatggccgggatcatcaagaaacaaatcttgaagcacctctccagatttaccaaaaatttatctcctgacaagataaatctaagtacccttaaaggagaaggtgaactgaagaatttggagttggatgaagaagtactccagaatatgttggatttgccaacatggcttgctatcaacaaagttttttgtaataaagcgtccattaggatcccatggacaaaactgaaaacacatcccatctgtttgtccctggataaagtaataatggaaatgagtacatgtgaagaaccaagaagccctaatggcccatcaccaattgcaactgcttcaggacaaagtgaatacggctttgctgaaaaagtagttgagggaatttctgtttctgtaaattctatagtcatcagaattggagcaaaagccttcaatgcatcatttgaactttctcagcttcggatctatagtgtaaatgcacactgggaacatggagatttgagatttactcgtattcaggatccacagagaggagaggttttgacttttaaagaaataaattggcagatgataagaatagaggcagatgccacccaaagttcacatcttgaaattatgtgtgctcctgttcgattaataaccaaccaatcaaaaatcagagtcacacttaaaagaaggttaaaggactgcaatgtcatagcaacaaagttagttctaatattggatgacttattatgggttttgactgattcccagttgaaagctatggtacaatatgcaaagtctcttagtgaagcaatagaaaaatcaacagaacaaaggaagagtatggctcctgaacctacacagagctctacagtagtcgcatctgcccagcaagtgaagacaacgcaaacttcaaatgctcctgatgtaaatgatgcaattgtgaaactattcaatgattttgatgttaaggaaacctcccatcatttagtgatttctcatctagatctacacatatgtgatgacattcatgctaaagaaaaagagtcaaacagacgtattactggaggggcaatgcaactctcttttacacagctaactatagattattatccttatcataaagcaggagatagttgtaatcattggatgtattttagtgatgcaaccaaaacaaaaaatggatgggccaatgagttattgcatgaatttgagtgcaacgttgaaatgcttaaacaggctgtgaaggatcataatgtaggttcacctcctaaatccccaacacatgcctctccccagcacacacaaacagagaaggactaccctctgaaagggacatgcagaacaccttcagtattatctcaacaatcaaaagctaagctaatgtctagttctgttgtggttagacttgcagatttcaatatataccaggtctctacagcggaacaatgtcgttcttcccccaaaagcatgatttgctgcaataaaaaatccctatatcttccacaagaaatgtcagctgtctatatagaattcacagaatattactatccagatggaaaggattttccaattccatctcccaacctctatagccagctgaatgcactacagtttactgtggatgaaagaagcattctatggttaaatcaatttctgttggatttaaaacagagtcttaatcagttcatggctgtgtacaagttgaatgacaattcaaaatctgacgagcatgttgatgttcgagttgatggcttaatgctaaagtttgtcattccttctgaagtgaaatctgaatgtcatcaagatcagccacgtgcaatttctattcagagttctgaaatgattgccacaaatacaaggcactgtccaaactgtcgacattctgacctagaagctttgtttcaagactttaaagattgtgatttttttagtaaaacatataccagcttccccaaatcttgtgacaattttaatcttctacatccaattttccagagacatgctcatgaacaagataccaaaatgcatgaaatttataaaggaaatattactccccaattgaataaaaacactcttaaaacttctgctgccacggatgtttgggctgtgtacttttctcaattttggatagattatgaagggatgaaaagtggaaaaggacggccaataagttttgtagactcattccctctttccatttggatttgtcaaccaacaagatatgcagagtcacaaaaagagccgcagacttgtaatcaggtatctctaaatacatcacaaagtgaatctagtgatctggctggccgattgaagcggaagaagctcttgaaggagtattatagtacagagtctgagcctttgacaaatggtggtcagaagccttcttcatcagatacatttttcagattttccccttcctcgtcagaggcagatattcatctcctagttcatgttcataaacatgtcagtatgcagattaatcactaccagtatctgcttctacttttcctgcatgagtcacttatcctgctttcagagaacttaaggaaagatgtagaagctgtaactggcagtcctgctagtcagacatccatttgtattggaattttacttagaagtgcagaactggctcttttgctccatccagtggatcaagcaaatactcttaagtctcctgtttctgaaagtgtgagcccagtggtacctgattatttgcctacagaaaatggggattttttgtcttcaaaaagaaaacaaattagtagggatataaatagaattagaagtgtaactgttaatcatatgtcagacaacagatctatgagtgttgaccttagccatatccctttaaaggatcctttgctttttaaatcagctagtgatacaaatctgcaaaaaggcatttcttttatggactatttatcagataaacatttagggaaaataagtgaagatgaaagtagtggacttgtttacaaaagtggctcaggagaaattggatcagaaacaagtgacaaaaaggattcattttatacagattcaagtagtatcttaaactacagagaagattcgaatatactttcatttgatagtgatggtaatcaaaacatactttcaagtactttaactagtaaaggaaatgaaaccatagagtccatctttaaagctgaagatttgcttccagaagcagcttcactctctgaaaacctggatatcagtaaagaagagacccccccagttagaacacttaaatcacagtcatctttaagtggaaagcctaaggaacgttgcccacccaacctggctcctctctgtgtttcttataagaatatgaaaagaagctcttcacaaatgtcattggataccatttcacttgacagcatgatattggaagaacagttattagaaagtgatggaagtgatagccatatgtttttggaaaaaggaaataaaaagaactcaactacaaattacaggggcacagcagaaagtgtgaatgctggtgcaaacctacagaattatggtgaaacttctccagatgccatcagtacaaattcagagggtgctcaggaaaatcatgatgacctgatgtccgttgtggtatttaaaattactggtgttaatggggaaattgacatccgaggggaagatacagaaatctgtcttcaagtgaaccaggtgacaccagaccaattaggcaatatcagccttcggcattacctttgtaatcgtccagttggttccgatcagaaagctgtaattcattccaaatcctctcctgagatttctctgagatttgaaagtgggcctggtgctgtaatacactctttacttgcagaaaaaaatggatttctgcagtgccacatagaaaacttcagcactgagtttcttacatcttctcttatgaatattcaacattttttggaagatgaaactgttgcaacagtaatgccaatgaagatacaagtttctaacacgaaaataaatttaaaagatgatagtccccggagtagtacagtatcccttgaaccagctcctgtaactgtacatattgatcatcttgtggtagagagaagtgacgatggctcttttcatatcagagattctcacatgcttaacactggaaatgatttgaaagaaaatgtcaaaagcgattcagtgctgctgaccagtggaaagtatgatctgaagaaacaacgcagtgtcacgcaagccactcagacaagcccaggggttccttggccttctcagtcagctaactttcctgagttctcctttgacttcactagggaacagctcatggaagagaatgaatctcttaaacaggaactggctaaagctaaaatggctcttgcagaggctcacttggaaaaagatgctcttcttcatcatataaagaagatgacagttgaatagcaggagtggcagtcaaaactgaaattatagctctggagtaggaaggttatatttataatgtggatgttaccagttaggggaagacttttattttcatgaaaagacaataaaacaaaatggaatgtg

SEQ ID NO: 7308 - DNA, 5127 bp, Homo sapiens
ctcttaggtgatgctgcagccaagatggcgcccgcggcggccgtggcggcctgagcgtgatgctccgggttctcggcggcggctgtggccttggccggggccttgggtctctcccggtcgtgagcgatcagcgcctctccgccggccgggctagccgggacagagaggagacggccacgaagagaggaggcagtgagcaacaggacgagaccgcggcgtctccagcctcggtaccatggccgggatcatcaagaaacaaatcttgaagcacctctccagatttaccaaaaatttatctcctgacaagataaatctaagtacccttaaaggagaaggtgaactgaagaatttggagttggatgaagaagtactccagaatatgttggatttgccaacatggcttgctatcaacaaagttttttgtaataaagcgtccattaggatcccatggacaaaactgaaaacacatcccatctgtttgtccctggataaagtaataatggaaatgagtacatgtgaagaaccaagaagccctaatggcccatcaccaattgcaactgcttcaggacaaagtgaatacggctttgctgaaaaagtagttgagggaatttctgtttctgtaaattctatagtcatcagaattggagcaaaagccttcaatgcatcatttgaactttctcagcttcggatctatagtgtaaatgcacactgggaacatggagatttgagatttactcgtattcaggatccacagagaggagaggttttgacttttaaagaaataaattggcagatgataagaatagaggcagatgccacccaaagttcacatcttgaaattatgtgtgctcctgttcgattaataaccaaccaatcaaaaatcagagtcacacttaaaagaaggttaaaggactgcaatgtcatagcaacaaagttagttctaatattggatgacttattatgggttttgactgattcccagttgaaagctatggtacaatatgcaaagtctcttagtgaagcaatagaaaaatcaacagaacaaaggaagagtatggctcctgaacctacacagagctctacagtagtcgcatctgcccagcaagtgaagacaacgcaaacttcaaatgctcctgatgtaaatgatgcaattgtgaaactattcaatgattttgatgttaaggaaacctcccatcatttagtgatttctcatctagatctacacatatgtgatgacattcatgctaaagaaaaagagtcaaacagacgtattactggaggggcaatgcaactctcttttacacagctaactatagattattatccttatcataaagcaggagatagttgtaatcattggatgtattttagtgatgcaaccaaaacaaaaaatggatgggccaatgagttattgcatgaatttgagtgcaacgttgaaatgcttaaacaggctgtgaaggatcataatgtaggttcacctcctaaatccccaacacatgcctctccccagcacacacaaacagagaaggactaccctctgaaagggacatgcagaacaccttcagtattatctcaacaatcaaaagctaagctaatgtctagttctgttgtggttagacttgcagatttcaatatataccaggtctctacagcggaacaatgtcgttcttcccccaaaagcatgatttgctgcaataaaaaatccctatatcttccacaagaaatgtcagctgtctatatagaattcacagaatattactatccagatggaaaggattttccaattccatctcccaacctctatagccagctgaatgcactacagtttactgtggatgaaagaagcattctatggttaaatcaatttctgttggatttaaaacagagtcttaatcagttcatggctgtgtacaagttgaatgacaattcaaaatctgacgagcatgttgatgttcgagttgatggcttaatgctaaagtttgtcattccttctgaagtgaaatctgaatgtcatcaagatcagccacgtgcaatttctattcagagttctgaaatgattgccacaaatacaaggcactgtccaaactgtcgacattctgacctagaagctttgtttcaagactttaaagattgtgatttttttagtaaaacatataccagcttccccaaatcttgtgacaattttaatcttctacatccaattttccagagacatgctcatgaacaagataccaaaatgcatgaaatttataaaggaaatattactccccaattgaataaaaacactcttaaaacttctgctgccacggatgtttgggctgtgtacttttctcaattttggatagattatgaagggatgaaaagtggaaaaggacggccaataagttttgtagactcattccctctttccatttggatttgtcaaccaacaagatatgcagagtcacaaaaagagccgcagacttgtaatcaggtatctctaaatacatcacaaagtgaatctagtgatctggctggccgattgaagcggaagaagctcttgaaggagtattatagtacagagtctgagcctttgacaaatggtggtcagaagccttcttcatcagatacatttttcagattttccccttcctcgtcagaggcagatattcatctcctagttcatgttcataaacatgtcagtatgcagattaatcactaccagtatctgcttctacttttcctgcatgagtcacttatcctgctttcagagaacttaaggaaagatgtagaagctgtaactggcagtcctgctagtcagacatccatttgtattggaattttacttagaagtgcagaactggctcttttgctccatccagtggatcaagcaaatactcttaagtctcctgtttctgaaagtgtgagcccagtggtacctgattatttgcctacagaaaatggggattttttgtcttcaaaaagaaaacaaattagtagggatataaatagaattagaagtgtaactgttaatcatatgtcagacaacagatctatgagtgttgaccttagccatatccctttaaaggatcctttgctttttaaatcagctagtgatacaaatctgcaaaaaggcatttcttttatggactatttatcagataaacatttagggaaaataagtgaagatgaaagtagtggacttgtttacaaaagtggctcaggagaaattggatcagaaacaagtgacaaaaaggattcattttatacagattcaagtagtatcttaaactacagagaagattcgaatatactttcatttgatagtgatggtaatcaaaacatactttcaagtactttaactagtaaaggaaatgaaaccatagagtccatctttaaagctgaagatttgcttccagaagcagcttcactctctgaaaacctggatatcagtaaagaagagacccccccagttagaacacttaaatcacagtcatctttaagtggaaagcctaaggaacgttgcccacccaacctggctcctctctgtgtttcttataagaatatgaaaagaagctcttcacaaatgtcattggataccatttcacttgacagcatgatattggaagaacagttattagaaagtgatggaagtgatagccatatgtttttggaaaaaggaaataaaaagaactcaactacaaattacaggggcacagcagaaagtgtgaatgctggtgcaaacctacagaattatggtgaaacttctccagatgccatcagtacaaattcagagggtgctcaggaaaatcatgatgacctgatgtccgttgtggtatttaaaattactggtgttaatggggaaattgacatccgaggggaagatacagaaatctgtcttcaagtgaaccaggtgacaccagaccaattaggcaatatcagccttcggcattacctttgtaatcgtccagttggttccgatcagaaagctgtaattcattccaaatcctctcctgagatttctctgagatttgaaagtgggcctggtgctgtaatacactctttacttgcagaaaaaaatggatttctgcagtgccacatagaaaacttcagcactgagtttcttacatcttctcttatgaatattcaacattttttggaagatgaaactgttgcaacagtaatgccaatgaagatacaagtttctaacacgaaaataaatttaaaagatgatagtccccggagtagtacagtatcccttgaaccagctcctgtaactgtacatattgatcatcttgtggtagagagaagtgacgatggctcttttcatatcagagattctcacatgcttaacactggaaatgatttgaaagaaaatgtcaaaagcgattcagtgctgctgaccagtggaaagtatgatctgaagaaacaacgcagtgtcacgcaagccactcagacaagcccaggggttccttggccttctcagtcagctaactttcctgagttctcctttgacttcactagggaacagctcatggaagagaatgaatctcttaaacaggaactggctaaagctaaaatggctcttgcagaggctcacttggaaaaagatgctcttcttcatcatataaagaagatgacagttgaatagcaggagtggcagtcaaaactgaaattatagctctggagtaggaaggttatatttataatgtggatgttaccagttaggggaagacttttattttcatgaaaagacaataaaacaaaatggaatgtgatgaagtggtgactatttcaaagccagtttagaaagtattagtacgggcattacaatcttttggttgttttgtgttttggggcttaaccctcttttaagctgttgtgatctagggaagtcaacacatagtgtaaaataattacatgcctaatgaaaagaagatgtcatttcctaattttgatatctcattttcggcattttttaaaatgtaaaaggaaaacctcttgtgttcacacagattgctgaattgatttctccatatttgttaataatttactattatttacaaagattcaaatgcttttatgactaatgtaaaatgaaaagaggcttacattttaaatgttattaaaattatgtacttaaatcta

SEQ ID NO: 7309 - DNA, 5546 bp, Homo sapiens
ctcttaggtgatgctgcagccaagatggcgcccgcggcggccgtggcggcctgagcgtgatgctccgggttctcggcggcggctgtggccttggccggggccttgggtctctcccggtcgtgagcgatcagcgcctctccgccggccgggctagccgggacagagaggagacggccacgaagagaggaggcagtgagcaacaggacgagaccgcggcgtctccagcctcggtaccatggccgggatcatcaagaaacaaatcttgaagcacctctccagatttaccaaaaatttatctcctgacaagataaatctaagtacccttaaaggagaaggtgaactgaagaatttggagttggatgaagaagtactccagaatatgttggatttgccaacatggcttgctatcaacaaagttttttgtaataaagcgtccattaggatcccatggacaaaactgaaaacacatcccatctgtttgtccctggataaagtaataatggaaatgagtacatgtgaagaaccaagaagccctaatggcccatcaccaattgcaactgcttcaggacaaagtgaatacggctttgctgaaaaagtagttgagggaatttctgtttctgtaaattctatagtcatcagaattggagcaaaagccttcaatgcatcatttgaactttctcagcttcggatctatagtgtaaatgcacactgggaacatggagatttgagatttactcgtattcaggatccacagagaggagaggttttgacttttaaagaaataaattggcagatgataagaatagaggcagatgccacccaaagttcacatcttgaaattatgtgtgctcctgttcgattaataaccaaccaatcaaaaatcagagtcacacttaaaagaaggttaaaggactgcaatgtcatagcaacaaagttagttctaatattggatgacttattatgggttttgactgattcccagttgaaagctatggtacaatatgcaaagtctcttagtgaagcaatagaaaaatcaacagaacaaaggaagagtatggctcctgaacctacacagagctctacagtagtcgcatctgcccagcaagtgaagacaacgcaaacttcaaatgctcctgatgtaaatgatgcaattgtgaaactattcaatgattttgatgttaaggaaacctcccatcatttagtgatttctcatctagatctacacatatgtgatgacattcatgctaaagaaaaagagtcaaacagacgtattactggaggggcaatgcaactctcttttacacagctaactatagattattatccttatcataaagcaggagatagttgtaatcattggatgtattttagtgatgcaaccaaaacaaaaaatggatgggccaatgagttattgcatgaatttgagtgcaacgttgaaatgcttaaacaggctgtgaaggatcataatgtaggttcacctcctaaatccccaacacatgcctctccccagcacacacaaacagagaaggactaccctctgaaagggacatgcagaacaccttcagtattatctcaacaatcaaaagctaagctaatgtctagttctgttgtggttagacttgcagatttcaatatataccaggtctctacagcggaacaatgtcgttcttcccccaaaagcatgatttgctgcaataaaaaatccctatatcttccacaagaaatgtcagctgtctatatagaattcacagaatattactatccagatggaaaggattttccaattccatctcccaacctctatagccagctgaatgcactacagtttactgtggatgaaagaagcattctatggttaaatcaatttctgttggatttaaaacagagtcttaatcagttcatggctgtgtacaagttgaatgacaattcaaaatctgacgagcatgttgatgttcgagttgatggcttaatgctaaagtttgtcattccttctgaagtgaaatctgaatgtcatcaagatcagccacgtgcaatttctattcagagttctgaaatgattgccacaaatacaaggcactgtccaaactgtcgacattctgacctagaagctttgtttcaagactttaaagattgtgatttttttagtaaaacatataccagcttccccaaatcttgtgacaattttaatcttctacatccaattttccagagacatgctcatgaacaagataccaaaatgcatgaaatttataaaggaaatattactccccaattgaataaaaacactcttaaaacttctgctgccacggatgtttgggctgtgtacttttctcaattttggatagattatgaagggatgaaaagtggaaaaggacggccaataagttttgtagactcattccctctttccatttggatttgtcaaccaacaagatatgcagagtcacaaaaagagccgcagacttgtaatcaggtatctctaaatacatcacaaagtgaatctagtgatctggctggccgattgaagcggaagaagctcttgaaggagtattatagtacagagtctgagcctttgacaaatggtggtcagaagccttcttcatcagatacatttttcagattttccccttcctcgtcagaggcagatattcatctcctagttcatgttcataaacatgtcagtatgcagattaatcactaccagtatctgcttctacttttcctgcatgagtcacttatcctgctttcagagaacttaaggaaagatgtagaagctgtaactggcagtcctgctagtcagacatccatttgtattggaattttacttagaagtgcagaactggctcttttgctccatccagtggatcaagcaaatactcttaagtctcctgtttctgaaagtgtgagcccagtggtacctgattatttgcctacagaaaatggggattttttgtcttcaaaaagaaaacaaattagtagggatataaatagaattagaagtgtaactgttaatcatatgtcagacaacagatctatgagtgttgaccttagccatatccctttaaaggatcctttgctttttaaatcagctagtgatacaaatctgcaaaaaggcatttcttttatggactatttatcagataaacatttagggaaaataagtgaagatgaaagtagtggacttgtttacaaaagtggctcaggagaaattggatcagaaacaagtgacaaaaaggattcattttatacagattcaagtagtatcttaaactacagagaagattcgaatatactttcatttgatagtgatggtaatcaaaacatactttcaagtactttaactagtaaaggaaatgaaaccatagagtccatctttaaagctgaagatttgcttccagaagcagcttcactctctgaaaacctggatatcagtaaagaagagacccccccagttagaacacttaaatcacagtcatctttaagtggaaagcctaaggaacgttgcccacccaacctggctcctctctgtgtttcttataagaatatgaaaagaagctcttcacaaatgtcattggataccatttcacttgacagcatgatattggaagaacagttattagaaagtgatggaagtgatagccatatgtttttggaaaaaggaaataaaaagaactcaactacaaattacaggggcacagcagaaagtgtgaatgctggtgcaaacctacagaattatggtgaaacttctccagatgccatcagtacaaattcagagggtgctcaggaaaatcatgatgacctgatgtccgttgtggtatttaaaattactggtgttaatggggaaattgacatccgaggggaagatacagaaatctgtcttcaagtgaaccaggtgacaccagaccaattaggcaatatcagccttcggcattacctttgtaatcgtccagttggttccgatcagaaagctgtaattcattccaaatcctctcctgagatttctctgagatttgaaagtgggcctggtgctgtaatacactctttacttgcagaaaaaaatggatttctgcagtgccacatagaaaacttcagcactgagtttcttacatcttctcttatgaatattcaacattttttggaagatgaaactgttgcaacagtaatgccaatgaagatacaagtttctaacacgaaaataaatttaaaagatgatagtccccggagtagtacagtatcccttgaaccagctcctgtaactgtacatattgatcatcttgtggtagagagaagtgacgatggctcttttcatatcagagattctcacatgcttaacactggaaatgatttgaaagaaaatgtcaaaagcgattcagtgctgctgaccagtggaaagtatgatctgaagaaacaacgcagtgtcacgcaagccactcagacaagcccaggggttccttggccttctcagtcagctaactttcctgagttctcctttgacttcactagggaacagctcatggaagagaatgaatctcttaaacaggaactggctaaagctaaaatggctcttgcagaggctcacttggaaaaagatgctcttcttcatcatataaagaagatgacagttgaatagcaggagtggcagtcaaaactgaaattatagctctggagtaggaaggttatatttataatgtggatgttaccagttaggggaagacttttattttcatgaaaagacaataaaacaaaatggaatgtgatgaagtggtgactatttcaaagccagtttagaaagtattagtacgggcattacaatcttttggttgttttgtgttttggggcttaaccctcttttaagctgttgtgatctagggaagtcaacacatagtgtaaaataattacatgcctaatgaaaagaagatgtcatttcctaattttgatatctcattttcggcattttttaaaatgtaaaaggaaaacctcttgtgttcacacagattgctgaattgatttctccatatttgttaataatttactattatttacaaagattcaaatgcttttatgactaatgtaaaatgaaaagaggcttacattttaaatgttattaaaattatgtacttaaatctataattatttaattattgtaaaaagtccaagcagatcaataaactatataattaatgggaaaaaaaaaaaaaaaaaaaaaaaaaaaaaaaaaaaaaaaaaaaaaaaaaaaaaaaaaaaaaaaaaaaaaaaaaacaacaaaaaaaaaaaaaaaaagggaaaaaaaaactaaaaaaaaaaaaaaacttttgggccccctttgcccaaagtgcttttgacctgggcaggttttttgatggggccccaaattgggcctacttggccaaattcccctttttgggggggtttaaaaatcaatggccccggtttaacacctttggcctgggaaaacccggggttcccccaattaaaacccttggggaaaaacccctttttcccacgtggggataaatccaaagggcccccccaccgacgccctttcc

SEQ ID NO: 7310 - DNA, 5708 bp, Homo sapiens
  misc_feature (3492)..(3492): n is a, c, g, or t
  misc_feature (3505)..(3505): n is a, c, g, or t
  misc_feature (3578)..(3578): n is a, c, g, or t
  misc_feature (3617)..(3617): n is a, c, g, or t
  misc_feature (3665)..(3665): n is a, c, g, or t
  misc_feature (3689)..(3689): n is a, c, g, or t
  misc_feature (3699)..(3699): n is a, c, g, or t
  misc_feature (3711)..(3711): n is a, c, g, or t
  misc_feature (4556)..(4556): n is a, c, g, or t
  misc_feature (5083)..(5083): n is a, c, g, or t
  misc_feature (5197)..(5197): n is a, c, g, or t
gggattttgctgtgttgcccaggctggtcttgaacttctgggctcaagtgatcctctctccaaagtgctgggattacagacgtgagccaccacacccaggcttgttcactttagtggaaatattattttatcagagatgtcttcttaacccctgatgatgttaggaaccccttatgaaatgcctttattagcccctcataccacaaatgtattcacaggtattttccctgggccatttttttaataatgtattgagcacctaccacattgccaagcactatgttagaagctgactacagagtagtaaatacaataataaattgagacttatgttttgtatgtctttaggttttcttacctaatttttctattaattcatttttatggcattttttaaaagtattgatctgtgatggctactgaattttaaaaaaaattgtcttttaccacagatagtttgagaaatattgaattatagcacattcattgtttgctaactaattacaatctaatttttcttggtccattttttaaaggaggcagtgcttgagaaagagttgaagggatagtccatttttgttaaataagcatacagtgttagatcatgtgtaaaactgactttaatttattaatttacttttgtgttatttcaggaaataaaaagaactcaactacaaattacaggggcacagcagaaagtgtgaatgctggtgcaaacctacagaattatggtgaaacttctccagatgccatcagtacaaattcagagggtgctcaggaaaatcatgatgacctgatgtccgttgtggtatttaaaattactggtgttaatggggaaattgacatccgaggggaagatacagaaatctgtcttcaagtgaaccaggtgacaccagaccaattaggcaatatcagccttcggcattacctttgtaatcgtccagttggttccgatcagaaagctgtaattcattccaaatcctctcctgagatttctctgagatttgaaagtgggcctggtgctgtaatacactctttacttgcagaaaaaaatggatttctgcagtgccacatagaaaacttcagcactgagtttcttacatcttctcttatgaatattcaacattttttggaagatgaaactgttgcaacagtaatgccaatgaagatacaagtttctaacacgaaaataaatttaaaagatgatagtccccggagtagtacagtatcccttgaaccagctcctgtaactgtacatattgatcatcttgtggtagagagaagtgacgatggctcttttcatatcagagattctcacatgcttaacactggaaatgatttgaaagaaaatgtcaaaagcgattcagtgctgctgaccagtggaaagtatgatctgaagaaacaacgcagtgtcacgcaagccactcagacaagcccaggggttccttggccttctcagtcagctaactttcctgagttctcctttgacttcactagggaacagctcatggaagagaatgaatctcttaaacaggaactggctaaagctaaaatggctcttgcagaggctcacttggaaaaagatgctcttcttcatcatataaagaagatgacagttgaatagcaggagtggcagtcaaaactgaaattatagctctggagtaggaaggttatatttataatgtggatgttaccagttaggggaagacttttattttcatgaaaagacaataaaacaaaatggaatgtgatgaagtggtgactatttcaaagccagtttagaaagtattagtacgggcattacaatcttttggttgttttgtgttttggggcttaaccctcttttaagctgttgtgatctagggaagtcaacacatagtgtaaaataattacatgcctaatgaaaagaagatgtcatttcctaattttgatatctcattttcggcattttttaaaatgtaaaaggaaaacctcttgtgttcacacagattgctgaattgatttctccatatttgttaataatttactattatttacaaagattcaaatgcttttatgactaatgtaaaatgaaaagaggcttacattttaaatgttattaaaattatgtacttaaatctataattatttaattattgtaaaaagtccaagcagatcaataaactatataattaatgggtttggaaaatcatcaccctactgaacttacaaaatatcttgaaaatgtgaaaaatatcattttaaataatgggtacattgtataagtggaagctataattttcaacaaaaagatggtacaaatgtaaaagtaaaaagcacaaactatacaaaagcaaaatctatggccaagtgatttaaaagcattacttgtacattcctttaaacatttgttgttagaagcaaaagagtaatttatcctgctaaatttggcaccatttgtaattataaaaattttgattaatactatttatattaatttctttaccttcattttttctccttaaggagttgattgtttttggaaatgtttttttccttgcacataagacagtttcataccattcttatagaatcatattaggtgggtgtttgcacatactaaatttataaagctagttttgattaaagctctatgtgagatatatatacatacacaagtcttctataataagagtcgttggtgaattttgaattctattttgttaggaattaaggttgaaatcaacatgaaagaatctcaatcatgcattataaaataaaagtacatgggtgttaagaaacaagagacttttaaagatttaaaatatatttctgatagaatttaactaagtggtgtgtattttaaaattcacattcttaaacataaatctatccaagatagaaaatgaaatagctggactactctttctttaagatacttgaaaattttaaaccacattgcaacactttatggtgctttgcgtgtttggcatgacatacacagtggtcctggtatataagtgcttgggggaaaatacatattttgtttacattaaattttgaagtgatttaggctttattgaaaacaatactggccttccctccccttctctaacatccattttcatttacgttatttaaaatatacaggcactgttttgggtacagaggatatagccaagagcaaattgatagtagtttacctcagagtattaaaaaaatcataataagtcatgttaatctaaaactatataatagccttagattaaatgtgcagatgtctaattaaagatttaaaatgtatagcgtatgtccttagaacatttgatttttaggtatacattcggcaaaaacagtctgttatggaaaagaaggattgatgggacattaacttcttccgagctaacattgtttctgaagattgacctattctatataaatttaaatttttctatgtttttctttttttttttgcgatgaggtttcgctcttgttgcccaggctggagtacantggtgtgatcttngctcaccgcaacctccgcctcgtgggttcaaatgattctcctgtctcagcctcctgagtaactggggttacangcgcccaccactacgcccagctaatttttggtatttttngtagacacagggtttcaccatgttggccaggctggtcttcaactcctnaccccaggtgatccgcccacctcngcctcccaangtgctgggattncaggcgtgagccaccgtacccggcctctatcgtatattataattgcttattgttatagaagctgaatgttttacttactacttttaaatttatttggtcttcccaaggaaatcatacaaacggtagagattatgataatctgagcattctgtgtgcttagtttgatttttttatttataagcagtactatttttatagatgtttaaaattcataaaacactgtattctgagaggtaggtattattcaaatgttagaaattttttttaaaaaaatgccctgaggcttagaaaggacaaatgactgaaatcacaattagtaatctggtctttagacttaaagcctagttatatgcttttattatagcttagtcattaattcacacattttcccttatcttttttatcttttaaaggtgaccataaaactttaaattgtgtgtgtacgtctatgtatgaggtatatgttaccctgtttgtgttattcaaactacctaaaagataggatgatttttgtttaagtgaatcccaaactagcagtctgagaaatacaggaaagcctgataattgacttaccagagttggctttttttttttaagttaccataatttagatataaagttgtcatgtcctggaatttaaaaaagaaatctctagctgagagatgttaatggtcaggagttgaaaatgacaattgtgctttgctttttatttttattttttgtttacttttgagttttttggagtttttttcctatatttttaattgagaagtaaaaattatatatttatggtgtacaacacgatgtgatacatgtataccttgtggaatggctaaatcaagctntctaacatgttacctcacaaactttttttgtagcgagaacacttaaaattttgtaacaattttcaagtatacagcatattgttattaactgtaatcacgtgatatacagtagatctcttgaacttatatttactaactgcaatttcgtgtccttttacaaacatctccccatttccccatcccccagcctctgataaccagaattttactctccatcccatgaagttgactttttttgcactccgtaagtgagatcatctagaattttggcatgtctttctgtgcctggcttatttcacttaacacagtggtcccctgtgtagctgggaccacaggcgtgtgccactacacccaggtttatccatgttgtcagaaatgacaggatttcctttttttaaaagttgaatggtattctcttatgtatattttccacatttgctttttccattcatccattgatggacagttaaattgattccatatcttggctattgagtaatgctgcagtgaacatgggattgcagatntctcttccacatactgatttcgtttcctttgaacatataccaaatagtgggattggtggataatatggtagttctattttttaatgttttgaggaccctccatactgttttccntaatggctataataatttacattgccaccaacagtgtacaaagcttttctttccttttctctgcatcctctccaacacttcccttttgtcttcttgataatagtcattctaacgggtatgattacagtagctttgtagtgggttttctgtgctgtgctttttaatttcatgtatgtaaaaaacattgggtattttgaatgtttttcttttctcaccttatcctagaacttgaggctgggcgcggtggctcatccctgtaatctcagcactttgggaggccaaattgggcagatcacttgaggtcaggagttcgagaccagcctggccaacatggtgaaaccccatttctactaaaaatacaaaaattagccaggcgtggtggtgcacgcctgtagtcccagccaatcagtaggctgaggcacgagaatcgcttgaacccaggaggccaaggctgcagtgagccacgattgcaccactgcactctaacctgagcaacacagactccatctca

SEQ ID NO: 7311 - DNA, 4698 bp, Homo sapiens
ctcttaggtgatgctgcagccaagatggcgcccgcggcggccgtggcggcctgagcgtgatgctccgggttctcggcggcggctgtggccttggccggggccttgggtctctcccggtcgtgagcgatcagcgcctctccgccggccgggctagccgggacagagaggagacggccacgaagagaggaggcagtgagcaacaggacgagaccgcggcgtctccagcctcggtaccatggccgggatcatcaagaaacaaatcttgaagcacctctccagatttaccaaaaatttatctcctgacaagataaatctaagtacccttaaaggagaaggtgaactgaagaatttggagttggatgaagaagtactccagaatatgttggatttgccaacatggcttgctatcaacaaagttttttgtaataaagcgtccattaggatcccatggacaaaactgaaaacacatcccatctgtttgtccctggataaagtaataatggaaatgagtacatgtgaagaaccaagaagccctaatggcccatcaccaattgcaactgcttcaggacaaagtgaatacggctttgctgaaaaagtagttgagggaatttctgtttctgtaaattctatagtcatcagaattggagcaaaagccttcaatgcatcatttgaactttctcagcttcggatctatagtgtaaatgcacactgggaacatggagatttgagatttactcgtattcaggatccacagagaggagaggttttgacttttaaagaaataaattggcagatgataagaatagaggcagatgccacccaaagttcacatcttgaaattatgtgtgctcctgttcgattaataaccaaccaatcaaaaatcagagtcacacttaaaagaaggttaaaggactgcaatgtcatagcaacaaagttagttctaatattggatgacttattatgggttttgactgattcccagttgaaagctatggtacaatatgcaaagtctcttagtgaagcaatagaaaaatcaacagaacaaaggaagagtatggctcctgaacctacacagagctctacagtagtcgcatctgcccagcaagtgaagacaacgcaaacttcaaatgctcctgatgtaaatgatgcaattgtgaaactattcaatgattttgatgttaaggaaacctcccatcatttagtgatttctcatctagatctacacatatgtgatgacattcatgctaaagaaaaagagtcaaacagacgtattactggaggggcaatgcaactctcttttacacagctaactatagattattatccttatcataaagcaggagatagttgtaatcattggatgtattttagtgatgcaaccaaaacaaaaaatggatgggccaatgagttattgcatgaatttgagtgcaacgttgaaatgcttaaacaggctgtgaaggatcataatgtaggttcacctcctaaatccccaacacatgcctctccccagcacacacaaacagagaaggactaccctctgaaagggacatgcagaacaccttcagtattatctcaacaatcaaaagctaagctaatgtctagttctgttgtggttagacttgcagatttcaatatataccaggtctctacagcggaacaatgtcgttcttcccccaaaagcatgatttgctgcaataaaaaatccctatatcttccacaagaaatgtcagctgtctatatagaattcacagaatattactatccagatggaaaggattttccaattccatctcccaacctctatagccagctgaatgcactacagtttactgtggatgaaagaagcattctatggttaaatcaatttctgttggatttaaaacagagtcttaatcagttcatggctgtgtacaagttgaatgacaattcaaaatctgacgagcatgttgatgttcgagttgatggcttaatgctaaagtttgtcattccttctgaagtgaaatctgaatgtcatcaagatcagccacgtgcaatttctattcagagttctgaaatgattgccacaaatacaaggcactgtccaaactgtcgacattctgacctagaagctttgtttcaagactttaaagattgtgatttttttagtaaaacatataccagcttccccaaatcttgtgacaattttaatcttctacatccaattttccagagacatgctcatgaacaagataccaaaatgcatgaaatttataaaggaaatattactccccaattgaataaaaacactcttaaaacttctgctgccacggatgtttgggctgtgtacttttctcaattttggatagattatgaagggatgaaaagtggaaaaggacggccaataagttttgtagactcattccctctttccatttggatttgtcaaccaacaagatatgcagagtcacaaaaagagccgcagacttgtaatcaggtatctctaaatacatcacaaagtgaatctagtgatctggctggccgattgaagcggaagaagctcttgaaggagtattatagtacagagtctgagcctttgacaaatggtggtcagaagccttcttcatcagatacatttttcagattttccccttcctcgtcagaggcagatattcatctcctagttcatgttcataaacatgtcagtatgcagattaatcactaccagtatctgcttctacttttcctgcatgagtcacttatcctgctttcagagaacttaaggaaagatgtagaagctgtaactggcagtcctgctagtcagacatccatttgtattggaattttacttagaagtgcagaactggctcttttgctccatccagtggatcaagcaaatactcttaagtctcctgtttctgaaagtgtgagcccagtggtacctgattatttgcctacagaaaatggggattttttgtcttcaaaaagaaaacaaattagtagggatataaatagaattagaagtgtaactgttaatcatatgtcagacaacagatctatgagtgttgaccttagccatatccctttaaaggatcctttgctttttaaatcagctagtgatacaaatctgcaaaaaggcatttcttttatggactatttatcagataaacatttagggaaaataagtgaagatgaaagtagtggacttgtttacaaaagtggctcaggagaaattggatcagaaacaagtgacaaaaaggattcattttatacagattcaagtagtatcttaaactacagagaagattcgaatatactttcatttgatagtgatggtaatcaaaacatactttcaagtactttaactagtaaaggaaatgaaaccatagagtccatctttaaagctgaagatttgcttccagaagcagcttcactctctgaaaacctggatatcagtaaagaagagacccccccagttagaacacttaaatcacagtcatctttaagtggaaagcctaaggaacgttgcccacccaacctggctcctctctgtgtttcttataagaatatgaaaagaagctcttcacaaatgtcattggataccatttcacttgacagcatgatattggaagaacagttattagaaagtgatggaagtgatagccatatgtttttggaaaaaggaaataaaaagaactcaactacaaattacaggggcacagcagaaagtgtgaatgctggtgcaaacctacagaattatggtgaaacttctccagatgccatcagtacaaattcagagggtgctcaggaaaatcatgatgacctgatgtccgttgtggtatttaaaattactggtgttaatggggaaattgacatccgaggggaagatacagaaatctgtcttcaagtgaaccaggtgacaccagaccaattaggcaatatcagccttcggcattacctttgtaatcgtccagttggttccgatcagaaagctgtaattcattccaaatcctctcctgagatttctctgagatttgaaagtgggcctggtgctgtaatacactctttacttgcagaaaaaaatggatttctgcagtgccacatagaaaacttcagcactgagtttcttacatcttctcttatgaatattcaacattttttggaagatgaaactgttgcaacagtaatgccaatgaagatacaagtttctaacacgaaaataaatttaaaagatgatagtccccggagtagtacagtatcccttgaaccagctcctgtaactgtacatattgatcatcttgtggtagagagaagtgacgatggctcttttcatatcagagattctcacatgcttaacactggaaatgatttgaaagaaaatgtcaaaagcgattcagtgctgctgaccagtggaaagtatgatctgaagaaacaacgcagtgtcacgcaagccactcagacaagcccaggggttccttggccttctcagtcagctaactttcctgagttctcctttgacttcactagggaacaggtaatgggaaacctaattcagattcagcttcagcaattaaataactaggtattaagatactaatagttaaaacattgtttacttattttaataaaatgtaccgagtgcttgttattgtgcccaggtgctttgctaggtgctatggttagagtgttgagcaaaaaataaagaaaaatttaataccttct

SEQ ID NO: 7312 - DNA, 1794 bp, Homo sapiens
ctcttaggtgatgctgcagccaagatggcgcccgcggcggccgtggcggcctgagcgtgatgctccgggttctcggcggcggctgtggccttggccggggccttgggtctctcccggtcgtgagcgatcagcgcctctccgccggccgggctagccgggacagagaggagacggccacgaagagaggaggcagtgagcaacaggacgagaccgcggcgtctccagcctcggtaccatggccgggatcatcaagaaacaaatcttgaagcacctctccagatttaccaaaaatttatctcctgacaagataaatctaagtacccttaaaggagaaggtgaactgaagaatttggagttggatgaagaagtactccagaatatgttggatttgccaacatggcttgctatcaacaaagttttttgtaataaagcgtccattaggatcccatggacaaaactgaaaacacatcccatctgtttgtccctggataaagtaataatggaaatgagtacatgtgaagaaccaagaagccctaatggcccatcaccaattgcaactgcttcaggacaaagtgaatacggctttgctgaaaaagtagttgagggaatttctgtttctgtaaattctatagtcatcagaattggagcaaaagccttcaatgcatcatttgaactttctcagcttcggatctatagtgtaaatgcacactgggaacatggagatttgagatttactcgtattcaggatccacagagaggagaggttttgacttttaaagaaataaattggcagatgataagaatagaggcagatgccacccaaagttcacatcttgaaattatgtgtgctcctgttcgattaataaccaaccaatcaaaaatcagagtcacacttaaaagaaggttaaaggactgcaatgtcatagcaacaaagttagttctaatattggatgacttattatgggttttgactgattcccagttgaaagctatggtacaatatgcaaagtctcttagtgaagcaatagaaaaatcaacagaacaaaggaagagtatggctcctgaacctacacagagctctacagtagtcgcatctgcccagcaagtgaagacaacgcaaacttcaaatgctcctgatgtaaatgatgcaattgtgaaactattcaatgattttgatgttaaggaaacctcccatcatttagtgatttctcatctagatctacacatatgtgatgacattcatgctaaagaaaaagagtcaaacagacgtattactggaggggcaatgcaactctcttttacacagctaactatagattattatccttatcataaagcaggagatagttgtaatcattggatgtattttagtgatgcaaccaaaacaaaaaatggatgggccaatgagttattgcatgaatttgagtgcaacgttgaaatgcttaaacaggctgtgaaggatcataatgtaggttcacctcctaaatccccaacacatgcctctccccagcacacacaaacagacacatatgtagtaggacggacagatattaaaagagggattacagacacagtgtacattttagaagtgtaaaacaaggggatttccccagcttggtttcttcccagttcatcctcactttgtgttcctttcctggcttttcagcatggtcatttagccctgctttagcttgggtgtcatcgcaaacttagtggggcctggccccctggtcatggtgggaatatgaaaaggggaatatggtatagtgtaaaggacactgggacttaggaatg

SEQ ID NO: 7313 - DNA, 385 bp, Homo sapiens
ccccccaacacctgtaatacacatagcttttccaccagataataaatgccttgagaactgattgagtgctttgtgttcttttttggcatttgtctttttagacctgtagagaggcacttaaatgactctgctcactttttactttcttcctaaagaaaaatgaaagagaaaataatcttaaataatactttaataatatacgtagaataaataatctaattgtttatattttaacgtttttattagtccctggataaagtaataatggaaatgagtacatgtgaagaaccaagaagccctaatggcccatcaccaattgcaactgcttcaggacaaaggtaagctacttccattaatctgcatgactgccaataacaggacatta

SEQ ID NO: 7314 - DNA, 531 bp, Homo sapiens
ttttttttttttgattcagagtctcacctcactctgtcacccaggctggagtgcagtggcgcaatctaagctcactgcaacctccacctcccagaactcaagcttaattctcatgcctcagcctaccacgtagctgggactacagacacacaccacaacactaaccaccatgcccagttttgttttgtttttgtttttgtttttgtatttttagtggagagaaggttttgccatgttggccaggctggtctcgaactcctggcctcaagtgatctgccagccttgacctcccaagtgctgggattacaggcgtgagccacggcactcggcctcaaatctacgtctttattatcatttctctatctgatctattagattattatgagattctgtcaaatgatttcctgaaacgcagacttcctctgtgtctattataccggcctaatctgccagcctggcaaatcttatgaaaaagaaaattagagttgggaggaacttgagacagtcttctggggtactgataatgttaca

SEQ ID NO: 7315 - DNA, 480 bp, Homo sapiens
ccatatagcttttttaataaagttttatggaaatataatttatatagcataaagtttactcatttaaagtatacaattcagtgacttttaatatatttaccaaattgtgtagctggcaccacgatctaattttagaacattttcctgatcccaacttctgtagctgtttaaaaaatatttcaagattaatcaaagattgatactatatttagttgatgtgattctttggtctcctttaatctggaactgttccctgcctttttcttccttgcttgacatttgtatttttgaagcttctaggccagatatcttttagaatgccccatacaatgcatttctttaatcattatttatcatagttaaattcaggttaaacgtcttggccaggaaaaaggtagtctcaatgtaggagacattgaagaggcatttgagatttttaagcaccatcgtgcactaggcccggtaacgaaaaaaaaaaaa

SEQ ID NO: 7316 - DNA, 828 bp, Homo sapiens
tatatagttctgatatgtcagttataatatctgttgatttaattatcaaacctcaatgtaatggttatgagcttttaatatttctttcccatttacccgaaagctttaaattacatttctttgatatgacagaaaataggaaatggaaactaagagattagaattaaaacatatttactatcatagctttaatataaccatggttacattgtttaatgcacacgtaaaagtagccagggacagctgggtagcctgaggttcccatgctaggaaggagagcatcctgctaaggattggagtttagagacacacgaatgaaagtatctgtcaggatggaatgatctagatatgatggccgtggatcttcattgatagagaaactgtcttctgtattaactgacaggagaaaagtgaagaaaagcaaaggatattcaaatgacagataatttggctgcataagggaagaatagttctaacttcaaatccagccctttcatatctgtgtcttaatgttgctccatgttttatgccaatcaaatttgataacatgaactaagattttttataaggtatagtgtatggaaaaataatacagccttattcttaggtatcaacagactattaaacaaactgtaatcataagatatgaaattgggttatttattacagtgataaactgctgaacattgtgtgaaaaacgtaggatagttttgcattaattttaagtttttataaattctataaacattgggatttattaaaaaacagtgttttaactgatgatattctgttggaattttctagcaataaatgggtgttttgttcaac

SEQ ID NO: 7317 - DNA, 243 bp, Homo sapiens
aaagatcaaatgacacggagacagagagaaagacacaaagagacgaagacgggagaaatagacaagaaagtgaccaaaaagagagacagacactgggcatggtggctcatgcctgtaatcccagcactttgggaggccaaggcgggaggatggcttgaggccagaagttccagacaagcctgggcaacacagtgagaccccatctctaccaaaaaatttttttaaaaaattagccaggagtgg

SEQ ID NO: 7318 - DNA, 409 bp, Homo sapiens
agaaggaagtgagaatatgaaataaaggaacattaaaataaaatgatgttaggaggagagaagacaacattcagtagtcttgagaactgtatgtttaaatcaacccaaaatatattcgagactgtgcttaaaatatacctaacaatggaagaggaggttttatattttaatattcagcttgcataggacagaggtgtgctatgtttagaagacagtatagcagaactgttaagagcacacttttagaatcactgaaacaaaaattctgatactagcatttatttagtgtgcaataacaggaggattcttgacttccctaagcctctgctttcttatctgtaaaatgggaattattatagccaactcctcggggtactttcaatatgaaactagataatgttaacaaaaa

SEQ ID NO: 7319 - DNA, 496 bp, Homo sapiens
ctaccttcacgggacctttggaagatggacatgtaagtcactgcagtgttgggacttccaggatagagtctgcaacattgcttgaagcacagagaggagatctaatagccgggagaaaaggagtagagcagatgagggttctaggcatcagcaaagatatggtgccttgacagggactggcccacctggagtgtgaatgtgatctactaaggcttaagtttgcttgcagtgtatgtgtgtatgtctgtgtgtgcatgcacgcacatgtgcacatgcagcagggagagtggaattaaggtgaaagagtagtggatttctaagaccttgccaaagaatctgaacttcatcccaaaagtcatgaacttcagaaagattttaagccagagaagaggcatgataatatctatattaaaaagacaatcaggtagcaagtgtggaggatgcatgggagagggcaaagggagaggagggaagatccgctaggaggtggaggcaa

SEQ ID NO: 7320 - DNA, 495 bp, Homo sapiens
ataagctactgcaaggtatatgcagagttcattaactaatagttgatattttgagtgcttacggtgtgactaaagaatcctaaacactctacgttcattatcttacttaaccaaaatccttaggaactctgtgagcttcagtactttattattattttaaaactcagaaaaaagaggttaaaaaaccttttactaagtcacacagctgatagctgatagtcctgagagctgaagtcagctttgtctagttccaaactaaattatttctagactgcatacataatccagctgtagccttggtcgctgcagttataagatagggctgaggccgccattccattactgagaaggaagccaccgcttcaaacactgtgttcatatctgtgagtccatcattacatatcacgtggttactcctggaggccactacatttgccctaaaatgaagactagagatgcaaaacattgagtcagtttagcctaatgccaaaaaaa

SEQ ID NO: 7321 - DNA, 622 bp, Homo sapiens
aatgtgtgctctaagctcttaaaacagctctgcctcaggaaagactgtccagggcataggaagcccacacacagggtgggatgacaagtttgcatctggcacggctgggagccctggggcgctctgcccttttggccgcgttgtctcctggcttttagggtggtgggattctcggctctgattgcagcaggtggattcacttagctctcctccccttttagcattactgtcttctgtaataaacctctcactttgatctgccaggctgtcaaatgctttgattgccctctctgttttgttccaatggttcatcaatccaaatatccacaacacaaggacagattttagtctcttcatacagtgggatatttcacagctattaaaacaaatcaaataaatgcttgtgtattgatatgcaaagttgtcctgcatcaataacttttaaacacattttatgatcccacatctatatctatacataatgtttgccactgcttaaacaaaacaaaatctaagctttagactccaaatggaattacaggggaatcttgatgtctgtgttctgcagttctgtcatgtttgaaattgtcaaataaacatggtgcctttccagtaaaaaaaa

SEQ ID NO: 7322 - DNA, 285 bp, Homo sapiens
gaaatgtggcacatatacacatggaatatgattctgtcataaaaaataaaatcctgccatctgcaacaacattaatgaaactggaggacattatgttaagtgaaatataccagacacagaaagacaaataatgtatgatctcacttacatgtggaatctaaaaaagttgctatcatagaagtagagagtgcaacagtgattacccagagactggggagaggatggggatgggaatgaggaggatggggagaggttggttaataggtagatagaaggaataagttc

SEQ ID NO: 7323 - DNA, 498 bp, Homo sapiens
ttggaataaagatgtattccaaagatgtaatccaggctggatttgtaattctatattcattattattttattcatttttttccctgattttaaaaggaatcaaaatgaaaacatattttgggccctgggcacggtccctactgggcctgatggaggcggcaactctctggctggggtcggggtgacggatgcttgagccagggaagcaggaactggtgaggaggggtcggcttgggggtgagggtctccaggggatggcagagccacccaagggatgtgaggatctggaaactcagatcccatcctttaggtccagatcacagattgaaattaagtaagaatcatcaatttctatgaataacaaaagtaataataatgagtatgaatgaatagcacactctgctttgactgtcctgacccccttggcattcttcaaaagcctccaagcaaaaggaaaagaaactgccaagcacattccaggctcagggccttcgcctt

SEQ ID NO: 7324 - DNA, 482 bp, Homo sapiens
agtggtgcacgcctgtaatcccagctactcggaaggttgaggcaggagaatctcttgaacccagaagtggagtttgtattgaaccgagattgcaccactgcactcccgcctgggtgacagagtgagattctgtctccaaaaccaaaaaaagtgatggaagtattgttaatttatagaattattattggtacttttaggtaaatagttcaaatatcaaaaataaaagttaacctactgttagaattcaagtaagatgtataattttaaatcaaaagcgggcaggattaacttgcagcttctactcggatggacaaaacagtgtgtggagactcacatcgtgaacttttgcttcaagaactaccgcaggaacataacagtaaaaccgaaattattcacagaccctttgaaataagcggcttgtcgctgcaaattccatgagacagccaaaagctgtgagtgcccaaagtgaagagggggaaagt

SEQ ID NO: 7325 - DNA, 794 bp, Homo sapiens
cctgggttcacatccagcttggccgctcactgtcatgacaagtggacagatgccccgggctcagttgacccatctgtaagtggggccacgcgacacacctctgtcacagggctgggtgtggggtgaacaggctggtccctggaggcaagtagtgtggtgccctgaggcctgaggcaggctccaggaccgctcaaggaacaggggatttgaggcaactcagagaggacaggcccagcagccggccccagcctgatatcttccctccgctcaggccccagacgcagctgcatcctggagtccttctgagaaatgtgggacctgccccagctccaccccaggtgaggggcaccagccagctccagagctgcctaccttccctgtcaggtgcacaggtcagcgccaggccaaccccagagcgagaacacctgtgctggactgagctggagcagcagggtggcctgcaccggggcagcgagggaggcgttggatggagccaccccacggctcctctgtgaaggtctgcacgtcactcagaaagttgaagcaaaccaagcagggttggagcccacagttcacagccggctgcacaggggatgcaccaagcacagtttcctatgacaagtggaaacctgtgcgccacagcaaaactccgtcaccacagcagcagatggctccgaagaagtggagcgttttcatcaggttcaactttgaaacctccaccatcaccatcaccagcaccgctgtgtcatgctgataacttgaggacaggcaggacaaggccttctggcggccgc

SEQ ID NO: 7326 - DNA, 666 bp, Homo sapiens
cctgggttcacatccagcttggccgctcactgtcatgacaagtggacagatgccccgggctcagttgacccatctgtaagtggggccacgcgacacacctctgtcacagggctgggtgtggggtgaacaggctggtccctggaggcaagtagtgtggtgccctgaggcctgaggcaggctccaggaccgctcaaggaacaggggatttgaggcaactcagagaggacaggcccagcagccggccccagcctgatatcttccctccgctcaggccccagacgcagctgcatcctggagtccttctgagaaatgtgggacctgccccagctccaccccaggggcagcgagggaggcgttggatggagccaccccacggctcctctgtgaaggtctgcacgtcactcagaaagttgaagcaaaccaagcagggttggagcccacagttcacagccggctgcacaggggatgcaccaagcacagtttcctatgacaagtggaaacctgtgcgccacagcaaaactccgtcaccacagcagcagatggctccgaagaagtggagcgttttcatcaggttcaactttgaaacctccaccatcaccatcaccagcaccgctgtgtcatgctgataacttgaggacaggcaggacaaggccttctggcggccgc

SEQ ID NO: 7327 - DNA, 647 bp, Homo sapiens
cctgggttcacatccagcttggccgctcactgtcatgacaagtggacagatgccccgggctcagttgacccatctgtaagtggggccacgcgacacacctctgtcacagggctgggtgtggggtgaacaggctggtccctggaggcaagtagtgtggtgccctgaggcctgaggcaggctccaggaccgctcaaggaacaggggatttgaggcaactcagagaggacaggcccagcagccggccccagcctgatatcttccctccgctcaggccccagacgcagctgcatcctggagtccttctgagaaatgtgggacctgccccagctccaccccaggggcagcgagggaggcgttggatggagccaccccacggctcctctgtgaaggtctgcacgtcactcagaaagttgaagcaaaccaagcagggttggagcccacagttcacagccggctgcacaggggatgcaccaagcacagtttcctatgacaagtggaaacctgtgcgccacagcagcagatggctccgaagaagtggagcgttttcatcaggttcaactttgaaacctccaccatcaccatcaccagcaccgctgtgtcatgctgataacttgaggacaggcaggacaaggccttctggcggccgc

SEQ ID NO: 7328 - DNA, 779 bp, Homo sapiens
taaacatttatggagcaactgaaatattcaggatagaatgtttaaattagcgctggtctctgccttccttcctgcctgtgtgtttctctgttttgtaccctagcccattccggcaacgactatagagcatcacacttatcagatgatgtcataccgtgcccggatgaaagctagttctcaaggcactcagatcatgggcacaaaacaaagaggaaagatgtgtctttaagtcattcatttaggcactataactgcattttcagaggggaacttctatccatgtttattctcaagattgaaggactcagtgcagctctcgtggtgacagattggctcttcttgtgtgttttttctcttgctgtttagacgtaaggaccccttttctcccacctcaacatggctacatgtttgttatttcatgataatttttaaaaaaatcataagtgaaccttcacactgttagaattatttaattgtaagtgaatatcttattagaattatttttaccctgcaagactactcttttatgtaacaactgtctaatgacaaaagtggtaattatatactttgctacctacaaatgataggaaaacagagtaagctatttctggggccctctctgccactcattctgtgaggcctccatcacatcacctgacccctcacatccacagctttcctaatctttaacatgaacaggttgaagttgaggatccctaatttcccttccagatccactgttctgtgattctaggtatgtgtaacccagctatttaaaa

SEQ ID NO: 7329 - DNA, 286 bp, Homo sapiens
gacagtaagtttgaattatacttctacttttaactaagtggaatgaatgtatttatttgaacatggctcttgatatttttattggttttgtttctttgaaatttcagaaaactttagtgttgaagttttcagttcgttaaaatttacttttaacttacttttaacacctttcttatgaacaatttacctgacaatgagactgttctaatattttaaaaatattttttcatatttaaaagttttgtttgctgatttggaaatctaaaatttttacaaactggaggga

SEQ ID NO: 7330 - DNA, 1092 bp, Homo sapiens
gttacaggcatgagccaccgcgcttggccagaagtggcattcttaaattcaagaaattgggatggggagtattcacacattttataacccagaaattcaagcaattctggtgactacaaatgcattgttttggagaatagttgtaaggtggaaaaagaattaggaactcgacagatagtgagttttaactttaaataacaattcttcttttgttttgttttgtttgagacggggtctcgctctgctgcccaggctggagtgcagtggcaggatcacggtttattgcagccttaacctcctgggctcaagcagttctccctcctcagcctccagagtagctgggactataggcaagtgccaccacgcctgactaatttttaaattttttgtagagatggggtctcccatcttgcccaggctggccttgaactcttgggctcaagcaagcctcccacctctgcctcccaaagtccaaggattacaggtgtgagccattgcccccagccagtataacagtttgtgtgtgtgtgtgtgtgtgtgtgtgtgtgtgtgtgtttgacacggggtctcattctgttgcccaggcagtagtgtagtggtgcgaccatggctcactgtagtcttgacttctcaggctcaagtgatcctctcacctcagcctcctgagtagcagcggttacaggcatgcatcaccacacctggcttatttttaaaacttttttgtggagacagggtcttactatgttgccatggctggtctagaacttctgggctcgagtaatcctcctgccttggcctctcaaaatgttgggattacaggtgtgagccactgtgtcataacaattattttaaaatttttatttatttatttttaataattatacaagatggagtctcactatgttgcccaggctggtcttgaatgcctgggctcaaatgatcttcctgccttgaccccccaaagtgctgggattacaggcgtgagccactgcgcctggcctataacaattcttatgaagctaaagttgatttggattttagctgccgttactacttatataattaattagattaaacaagtcacaaaaattg

SEQ ID NO: 7331 - DNA, 1308 bp, Homo sapiens
gttacaggcatgagccaccgcgcttggccagaagtggcattcttaaattcaagaaattgggatggggagtattcacacattttataacccagaaattcaagcaattctggtgactacaaatgcattgttttggagaatagttgtaaggtggaaaaagaattaggaactcgacagatagtgagttttaactttaaataacaattcttcttttgttttgttttgtttgagacggggtctcgctctgctgcccaggctggagtgcagtggcaggatcacggtttattgcagccttaacctcctgggctcaagcagttctccctcctcagcctccagagtagctgggactataggcaagtgccaccacgcctgactaatttttaaattttttgtagagatggggtctcccatcttgcccaggctggccttgaactcttgggctcaagcaagcctcccacctctgcctcccaaagtccaaggattacaggtgtgagccattgcccccagccagtataacagtttgtgtgtgtgtgtgtgtgtgtgtgtgtgtgtgtgtgtttgacacggggtctcattctgttgcccaggcagtagtgtagtggtgcgaccatggctcactgtagtcttgacttctcaggctcaagtgatcctctcacctcagcctcctgagtagcagcggttacaggcatgcatcaccacacctggcttatttttaaaacttttttgtggagacagggtcttactatgttgccatggctggtctagaacttctgggctcgagtaatcctcctgccttggcctctcaaaatgttgggattacaggtgtgagccactgtgtcataacaattattttaaaatttttatttatttatttttaataattatacaagatggagtctcactatgttgcccaggctggtcttgaatgcctgggctcaaatgatcttcctgccttgaccccccaaagtgctgggattacaggcgtgagccactgcgcctggcctataacaattcttatgaagctaaagttgatttggattttagctgccgttactacttatataattaattagattaaacaagtcacaaaaattggatgagctatcttggtgtgttttctttacttttctctttcaacagagagttgaaggagaggacaagtgtcttgtctgtggcttccaggaatgtgtggcaatataagatttactgttacagcagccaactcaccaagtcattatttgacttactgagttaaggaggaactaagggtcattttccccccatcatttgcatgttttgactcctgaactg

SEQ ID NO: 7332 - DNA, 353 bp, Homo sapiens
aactgcttgcccaaacacaaatgtctgtgccatcagactgcagatgcattgtgactgtaatctcttgagaaaactcctaagaggacccctgtactgtctagaagactatttagtttcactgatattcataataaagtctataatcatgtactctggaccaacatcagagcatcacctgaaagcttgttagaaatgcgtaatcatgccaggaataggtacagttctgctggatcggctgggcgccatggctaacacctataatcccagcactttgggaggcagagacgggcagatcacctgagggcaggagttcaagacaagcctggccaacatggtgtaaaccccatctctac

SEQ ID NO: 7333 - DNA, 405 bp, Homo sapiens
aattttatttaaagcttagaacaaaaaaattaatctgaatgtgtatttataattgcaaggctccttaatcactttacgcgcacggggtgaattcttcttatctggaaagcagcattaatcctgcagaatttaaaatgaattatgactccttatcacaagagtatgatttttcttcctgtctttggttaaaaaaaagtttgtagggttagaatttgatcctctaaattgtggtttaattgtgaaagtagatagcaaacattcatggtttccttaatagttactcatctgacaaactacacctatattcatcttcgttgatgtaatgataagtcttgaaatgtttttaaaaaatttcacaattcccaaatgaaacacttacagcaacttgactgaggttagtgctac

SEQ ID NO: 7334 - DNA, 906 bp, Homo sapiens
agcacaagctggtcaggagattgcaggctccacacctgccttagtggtagttccatcagtgcagtctgcaaagtcagagggaagcagattggccagaatgcccaggaggtcacagatcaggagaattgggaggggaaagagccttggacttggaggcaagcgatctgagtgatgacctggggtatgccgcttcacctctactggccttggtttccctgcaaaatggggaacgtgttccctgctgatcgtgtgaaaagagtgagacaaccagtttagagtgctctgaaaacatgcaagtgctagatattacagcccagtaaaacctcctttatctagttgggatggcagccagtctgaataataaaatacaaatacatgtgctattatttctttcctgtacagagcgtattttatagtatttgctaagtagaagtctttaggggaatcagtttgaagagtgaagagtaattagtaaccggtgtatcagttttcatcctgttccagcagtgcctctggtacttaaaaaacagtttattctttttgaattaaacttgttaacatcaattatgtgttaatcagatcctttttacataatacaaaagtaaactctggctttgttttttgttaaaaaatgcctaatgggcccttctaattattcagatttaaaaaaatctttactagcgccccagcaagggcaccttttccatgtagaagaatccaaagtccttagggcccttattccctctctcactgcccagtttcttcacttccaacccctgctgcaattccgtttctccttctctgagcctaagctgctaagtgcagctggagtaatttgcataaccatctcgcccggccctcttccttcatgggttgtggatgcaacagagtctgcaacacttcaag

SEQ ID NO: 7335 - DNA, 365 bp, Homo sapiens
atttttttaaatctgaataattagaagggcccattaggcattttttaacaaaaaacaaagccagagcttacttttgttttttgttaaaaaatgcctaatgggcccttctaattattcagatttaaaaaaatctttactagcgccccagcaagggcaccttttccatgtagaagaatccaaagtccttagggcccttattccctctctcactgcccagtttcttcacttccaacccctgctgcaattccgtttctccttctctgagcctaagctgctaagtgcagctggagtaatttgcataaccatctcgcccggccctcttccttcatgggttgtggatgcaacagagtctgcaacacttcaag

SEQ ID NO: 7336 - DNA, 240 bp, Homo sapiens
gcaccaagtatagagatatcaggcatagagaagggcaatggtgatgtgccataccaagaataagaactaaatgagaatctgcatactgaaggatagatctcttccctacccatctgccttctaattccagaaccacagaaaccaggatcatttccacaatcatgagaattaaaagattcttctctgtagaagcagaactgtccccagagaaaagaactacagatactacagctataatta

SEQ ID NO: 7337 - DNA, 341 bp, Homo sapiens
actttatataccttcatttcgtcctttcagaaaaggaacaaacagagctgggtgcactggctcacgcctgtaatctcagcattttgggaggccaaggcgggacgatcacctgaggtcaggagttcaagaccggcctggccaacatggcgaaaccccgtctctactaaaaaatacaaaaattagccaggtgtagtggtgtgcacctgtaatcccagctacttaggaggctgaggtgggataattgcttgaacctgggaggtggaggctacagtgagctgagatgtgccactgcattccagcctgggcaacagagtgacactctgtttcaaaataaaataaaa

SEQ ID NO: 7338 - DNA, 321 bp, Homo sapiens
gccaataggtggtgtattagcatcactcatgctgctataaagaaatacccaagactgggtaatttctaaaggaaagaggtttgattgactcacagttccacatggctggggaggccttgggaaacttacaatcatggcagaaggcgagggagaagcaaaggtgcatcttatgtggcagcaggcaagatcgagtgtatatcagcacagaagaaactaccttatataaaaccatcagatctcatgagaattcactcactatcacaagattagcatgagggaaccgcccccataatccattcacttcccacccgctctctccct

SEQ ID NO: 7339 - DNA, 426 bp, Homo sapiens
ccatccacggcttgggctgatgtaaccaggaagtattccaatgatgtgaattattaatgtagaataaagtaagagaggaagtattcagtgaaggggtgaacgtcaacacagatccccaaggatctagccatgtatttgctgtgaaattcacactctgtgtgactactaaagacagttcagctactcgtacttcactccatttcctttgtgaaatctgaagaactctaggtgaatcaggtgatggttgtaaaaaataatcatcatcttaaaatctttaaagcactttttacaacacaaatagcattgttgccatagaagattaagttttaaaaagtgctttatctaaatgatgtttcccctttttcctttccagttttcctctccaattgtgatgccattttacatctataatgccacatattctta

SEQ ID NO: 7340 - DNA, 594 bp, Homo sapiens
ttttaataaggggacatatagttggaattaaaatttagatctttctgtacaaagcttgtttggtgttgtgtcctatatgtatttgtttatttttgttcattcttaacaaatatctattctctgccagacactgaggatacaatgcaaattaaaaaaactaaactgaaaatacaggctttctgttcttagaccttattctccagtacgagaggacaggaatggatttcaaatgggcctgctgggaaattttgggaaattgacctttactttacataatttgctgtaagcactgtagtaatgtggtaacattattttgaacttggtgagaagacgggcataccggtagattttctaaagcaggtaggaataaagggcatgaatatattaaaattccctgtgagtttgacacagatcttaacttcaagagtttaatagtttaaggatcttagcttaagaattcttagaaagtaggctgggtgtggtggctcacacctgtaatctcagcagggagatgtgggaggccgaggcgggcagatgacttgagcccaggagtgtaagactagcctgggcaacataacaaaaccccgtctttac

SEQ ID NO: 7341 - DNA, 358 bp, Homo sapiens
gataatcgattataataccgtaaaatgctaattgtagatgatggacatatgtgtatccacttcccaattctttcaactttccgcatgcttgaaaatacaaaaatggtaaggaaaatttttacaagcactgggagacaaaaacaaaagtgataattctgttggtggtaaaagtttctctcatttgatgttacacacctcactgcttcacaaaatacactacctttggaactcgttaaaccaataccccaatcacctactgtccctggggaaactgataggtacatttcaggaattgttgtttcctgtcaccaactgttcacgttgtttgcgatcttcagagattaagtcagtaattatg

SEQ ID NO: 7342 - DNA, 196 bp, Homo sapiens
gaaaactgagacaaacagaagctaaaagacaaagtcacagacaaatcagtcattgagctgagattgaaagccagttctctcaatccctgcaacaggcctcttttcacaccacactatctccattttttagaacctgcttctattaaactgccgattatctattcaatttatttccagcagtagttgtaataaatct

SEQ ID NO: 7343 - DNA, 425 bp, Homo sapiens
tcaatttgcaatttcagagagaaattgcaaaaggtctatgagaccgaatttttttagtggtgtgtttataaacttagagcactgcgtgggactgagcaggggccagggaagaaaatgacgttggtaggcgttctttggcctgaacatttctaggtatttgttacatggactgttttactttcacacccgtctgtgagaggggaattattgcctcctctcttagaggaaaccgaagctgagactaagtgatgatacgaaaggccttccttcagtaaggggtagagccagggctacacaaattggttctgtgacagaatggactacgctggtgctggttttaggctgcctttcatttgtgaagatcacataactgacgcccttcctgagagttaaataggtcttagtttaagctgttcttttgagaa

SEQ ID NO: 7344 - DNA, 343 bp, Homo sapiens
cagagagtcacattgagaatcctggacccagagcagtagaatctgtaacaactgagaaaattcttctggcaagaacgtgtgctcataatgagttctcactacacctggagctgacccctagcaatcatgaatgaatacttgaactcctctgccatctctggttctctaaaaggaaaataaaacaagagagaaaagggatagaaggaggaaaggagggaagagagagaggagcaaagaagaaaaactgagccaaataaattctgactctgctttgtagctttacacttatttatttattagagacacagtctcactctgttgcctaggctagaatgcagtggtg

SEQ ID NO: 7345 - DNA, 582 bp, Homo sapiens
tgagctgtaaccagaaagacatcaccgaatttaccattgaaatgtcttcatttaagtccgtttctcaacagttgttagccagatccagctggattttatatctgacttgtgatcacggtgaaagaatgcaaaaaggagacacagacttttaaaatgttctgtccagaaaagaataagaacactatctaaaaaaacatgaagttctagtaaaaatgatgcttgagacagaaaaaagaatttaaaaagatacagtgaattaactaaaaataaaagacagttctttgtttggtttaccattctccccccaaaatggagggatatttgtatatttgtatattctgacaggcactttctcttctaagggagggaagtagttagaggccctaggctccactgtagaaatgtgataatggagatgtgcagtgctctagggccaagattagtctccgagacagcattgggtgacattgttttaccgtagtatttttgctttctgttttgagttccttgttggttcacaaatgttctctttttctccaccttttatctaatcagtcacaataaaatgtaactgtcaaccag

SEQ ID NO: 7346 - DNA, 842 bp, Homo sapiens
ttgagacgatgcctcgctgtctcccaggctgaagtgcagtggtgccatctcggctcattgcaacctctgcctcccaggttcaagtgattctcctgcttcagcctcctgagtatctaggactacaggcatgcgccaccaggcccagctaatcttttgtatttttagtagagatgaggttttttttaaaaatcaaatttccaataaatgcacttcttagggacttctcagtgtggggtgcctggccctggagcacttgtggtttggaaatcaagtgtaacaagccagtagttataaagactaacaaatttgtgttccttctcctccctttcctctcctgggttaagtggaagcattaaaaattaagaaatagatcctgagccacaatcaattcctaagaagctactgtttcttcatttctggtattaaatagtaagaactacttacattgcatccattcctgcaaaaatgcactgactgtatgattaaggcacagtaagtctaacattttgtcccgatcacttttctagtattcaaaccactgtaagtaataccactatgtactctgcatctttctctgaagagctttaacagcttttatgtattacccatatcaagatacttcatggattaggaaggggcaataatatttcaatagtttcataaaattagtttcccaggactttaagtagagtttattctctaagattttagttcttcaaatatgtgaagatggtgattttaaatactttatttcaatcaattcagttcaaggatttaaattatttcaaatacttgaattagctattgtcacatgatttctcacacagaatgtgaccatctct

SEQ ID NO: 7347 - DNA, 411 bp, Homo sapiens
aacaacaacaacaacaacaacaaaccaacaataatatctatgccttggctttgctagacaacacaacagcgtgtagaggttaggaacacagactttggagccaggttacccaggctcaggtcccagcaccgcgactctcaatctcatgaccttgggcaagttacttgttccctctgtgcttcagtttcctcattggttcagtgggcaaaataagactaacataaagttattgcaaaaatggaatgagataataaatgttaagcttttagaacagtacttggcacatagtaagcactagggaagtgtttttattgttgtggttgtgagatttaaatgaatgtgtagaaaatacctagcatggtgcaaatgctcagtaaaatttttttctgacactaaattctatgctaacta

SEQ ID NO: 7348 - DNA, 291 bp, Homo sapiens
gtaactctccttcccaaacggagcccaggcttcgtcttcagtgccctgtctgaatattacaagcagttgcaaaggtgcaagctagtgtctcgagacagtgacatgaggttttcctggaaataaggaatgtcaaggaaatgtcacagtacgtcaaaactccccgtcccgtctttaagatgagacaacaagggaaggccactgtggatttgcaaataataattctgtttgagtgaaaggtggcatttctcaggttaagtgaatcccatgatttgattaaagatatttgtgttt

SEQ ID NO: 7349 - DNA, 425 bp, Homo sapiens
agtataaataatgtagttttattaatagataagtattagtaaaactttgcattagaagatgtatgactgacgttgcatagagttgtgtgatgtagagtaatattcatggtgtacacatcataattatgtttgcgaaacatgaatacctactacaggtctttgtgatagacatcagggtggggatgcataggggacaaaaatgtacacaattttgtgtctgctctcagagagattacatagtaggagaggaagacccagtattaaaaaatagaataaaggcaagtgccccaaatctttgtcattaattttgactggaagagaggcttaggaaagatgagacatttaagcattgcatggaggaaaaaagaagtagatctcccttggcaggtggataggctaggacattccaaactgagaaaaagcaa

SEQ ID NO: 7350 - DNA, 344 bp, Homo sapiens
tggcccttccttgcagccccatccccaacaatcctggtctatcaggaacatctggtttggaggtagaaggagctccagggaaagggagcttcaggatcctcagcattaatcatcaataggagaaatggaccttagtcttgaagattaaaaaagaaagttttatgttgcaaaaacgtggtgtcttcatagttactatgccaacagaaccctaattttatttccgcttcatagcaagggtcatcttctggaagagaaagagcagagaggaagataagtcatcctgccacatagatactagagtcagtctgagacaaagagagtcaaaggaaggaaatgtgcagacc

SEQ ID NO: 7351 - DNA, 322 bp, Homo sapiens
tcactgtgtgccctggcctgggtgagcatcattcttcggggagaaccttgatgaaaacaaagctgcattccaaaaagttaaaaccgtgctacttactgtactgaggtaaaaattaaaagacctaggggactcttccaaaagttaaaacgtaaataaatatcttgtaacattaatatacacctgacgatgtcctgagtgaacacgccccggtttaaaaacaaaacaaaaacaaaaaaaaccacaagtaggttattcaagttgtttgcaacatacattttgtaatgaaatgtgagaaattaataaagaatttttttcacatgtg

SEQ ID NO: 7352 - DNA, 244 bp, Homo sapiens
ggagtctcttggaggtcttgatacaacagatttttagtgcccctcctccctcccccagagtgtctgctttggtaggtcggtagtgaggcctaagcattagaattttcagcaggttcccaggtgatgctgatgcctttgctctgggaccaaacttggagaaccagtagacctcgacacatgctgctccctctgccaagtccccaccccctacaccatcagtggcatcctccctgtgcgtccccag

SEQ ID NO: 7353 - DNA, 1301 bp, Homo sapiens
gtcagatcccacaggtttaagggctcattccccaagtctgctcctccagttgagacacaagtcacaaatccaggcttctgaaacttcggaccaaccagcttcaatcagggttcccactaccccctctttgggggtagagtggctcatggaactcagagaaacatttatttcggcttgctggtttattataaaagcaaggtttattataaaagatactacaaaggatacagatgaagaggcacatagggcaaggtacggggttccacgccctccctgagtgcatcaccctctgggaacctccgtgtgttcacgtctcatgaagctctccaaatccagtcctcttgggtttttatggaagcttcatgatgtcagcattctttcctccagtgtataggatgggatcctctctggggagggtcttaagacccacaattagaaaggcaagggaagattagagtcctgctttggggtagatgaaaggaaaggagagagattctgtttcctgaggcttaatacacccaacattataacaaaggactgtagcaagggctatgggagttctgaagcagaaaccatgggctaaaaccaacatacatcttaataccagataccctaatcccagtcctaacttcatttaaccttggtcacattgagtcattccaggatgagtggctcaagtatttcctcagggaaaatacttctgtgccccctgatttgagggtaagaagtagataatgaggccactgtgggtgttattttttcatgtctggacctcagcctatatcctgagactaagtggaagtgggaaaagagtacaagagaagagacaaagtggggatatttgtaaggcttagatgagatagtgtttttttagaaaaaaactttatcttaccattaagtaaaatgtttgccataggctttctggggctttctctttttaaagtcagactgttgaaggtttcttctattcttatttgttaagagttttcttttattgtttaaatcatgaatgaatgttgaattttattaaatgcagtttctgtaaatattaacgtgatcatattatttttattctttcatttacataattataaattagattaagttttcaatgttaagctacccttgcatttatgaaataaaccacgcttgctcatgatggtttttgaacatttataatctgtctcacagatttgtttagaatttctgtatttatgtttatgtagagatggctctgttatttcacttttctctactgtccttgttagcttttacataaaacttagttttcctgaaaggag

SEQ ID NO: 7354 - DNA, 1683 bp, Homo sapiens
gtcagatcccacaggtttaagggctcattccccaagtctgctcctccagttgagacacaagtcacaaatccaggcttctgaaacttcggaccaaccagcttcaatcagggttcccactaccccctctttgggggtagagtggctcatggaactcagagaaacatttatttcggcttgctggtttattataaaagcaaggtttattataaaagatactacaaaggatacagatgaagaggcacatagggcaaggtacggggttccacgccctccctgagtgcatcaccctctgggaacctccgtgtgttcacgtctcatgaagctctccaaatccagtcctcttgggtttttatggaagcttcatgatgtcagcattctttcctccagtgtataggatgggatcctctctggggagggtcttaagacccacaattagaaaggcaagggaagattagagtcctgctttggggtagatgaaaggaaaggagagagattctgtttcctgaggcttaatacacccaacattataacaaaggactgtagcaagggctatgggagttctgaagcagaaaccatgggctaaaaccaacatacatcttaataccagataccctaatcccagtcctaacttcatttaaccttggtcacattgagtcattccaggatgagtggctcaagtatttcctcagggaaaatacttctgtgccccctgatttgagggtaagaagtagataatgaggccactgtgggtgttattttttcatgtctggacctcagcctatatcctgagactaagtggaagtgggaaaagagtacaagagaagagacaaagtggggatatttgtaaggcttagatgagatagtgtttttttagaaaaaaactttatcttaccattaagtaaaatgtttgccataggctttctggggctttctctttttaaagtcagactgttgaaggtttcttctattcttatttgttaagagttttcttttattgtttaaatcatgaatgaatgttgaattttattaaatgcagtttctgtaaatattaacgtgatcatattatttttattctttcatttacataattataaattagattaagttttcaatgttaagctacccttgcatttatgaaataaaccacgcttgctcatgaaaaaaaaaaaaaaaaaaaaaaaaaaaaaaaaaaaaaaaaaaaaaaaaaaaaaaaaaaaaaaaaaaaaaaaaaaaaaaaaaaaaaaaaaaaaaaaaaaaaaaaaaaaaaaaaaaaaaaaaaaaaataaaaactacaaaaaaaaaaacaaaaaacacaataaaaaaaaatactttaagggggccccctgtcccaaaatcccctatttggggggcttttacaactaagtggccgttgtttttaacacgtgcgcgcgggaaaaacccgtggtctaccccatttaaaccccttgtcaaaaatcctcttttctcacgcttggtcataaaatcaagagcccccctcctatgctcctttcaaaaagttgcccatctttctgtgtcatcgcaattttggcgcgcaattttttttaaacaccccgcttaaattttttgttaaacactttttttttcaccaattggccttaattctataaccccttttaattacaaacatcccccctaatacgcttggcggtttctcctttttcc

SEQ ID NO: 7355 - DNA, 4525 bp, Homo sapiens
  misc_feature (394)..(394): n is a, c, g, or t
  misc_feature (610)..(610): n is a, c, g, or t
  misc_feature (949)..(949): n is a, c, g, or t
  misc_feature (1133)..(1133): n is a, c, g, or t
  misc_feature (1149)..(1149): n is a, c, g, or t
  misc_feature (1415)..(1415): n is a, c, g, or t
atctttgaagaggcactagcatcagacctcaaggcttttgtcccaccaaagatagtgggggagtttttgaacccttgtgggagcctggtccaggtgaattgtgttcctccccattggaatgcaaaaataggctgactcattggagctagcctgaagcagaaaaaggcaccttttaagtccaaacaggaaaaccaggcagcatgagcaggaatgtggctcgtcattgtatacgggttcaaaaactcccccactatctttgaagaggcactagcatcagacctcaaggcttttgtcccaccaaatgacaagtgtgtattgttacaatacattggtgatcttttgtttgcggcacctaccgaggaagattgcttccagggcaccaaagatctccttngccttctatggaaggcaggttacaagatgtctaaggaaaaagctcaggtctgtgcaaaaagagtaagatatctaggtttcctagtagcccaagggcagcgtgaactcggcagtgggcagaaggaagccatatgtgcgctccccactcctgtcacccggcgacaagtaagggagtttttaggggcagcaggcttttgctgtacttcaatgccaaacntttcactcacggcaaagccattgtatgaagccacaaagtgggggagaaaaagagcccctcctctggggtaatgagcagaagaaggcctttaatgagatcaaaaaggccttaagccaagctcgagccctgggattgccagacctgactaagcctttctttttctatgtccatgaaagaaaaggaatgactacaggagtttcagttcaaacagtaggatcatggtattgaccagtagcctatttatcaaagcggttagaccttgtggccctgggtggcccccctgcttaaaagcattagctgccactgccatgctggcagaaaatgctggaagctgacacnaggacaaaagctaataatacgggtgccacacacagtgatcaccttaatggagcaaagaggatatatcactggctatctaatccaagaatgttaagatatcaggggctcttatgtggaaatccatacgtaactttaaaaaccgcgaataccctcaacccggctaccctgttgcctgtagaaatgncgaagttgcaagaccngtttccccaacgctattgcgtagacgtagtagatgaggtgttctcaagccggaaagacttaagagaccaaccctttaaggacccagacgctgaatatttcacagagggaagcaggtttgtatcagaaggggtctgcagagccgggtatgcagggtgactctaaattcagtagccaaggcacaggccctccctaccaggacctcagcacaaaaagcagaatagctctaaatagagcactactagtagccaaaggaaggacagttaanatctatactgattcaaagtatgcttttgctacattacatgcccatggagccatttacaaagaaaggggactcttaactgctggagggaaagaaattaaagaagaaatcttacaactcttagaagctgtgtgggccccagacaaggtggccgttattcactgtaaaggacatcagacaagaggcggcatagaagcaaaaggaaataggaaggcagacagagaagccagacaagcagctatgtccaactcaagtactaaaaagaaaaccccaaccctgctgcttctactagaaccttccttacctgaaaccccaagctactctcccaatgaaaaagcttggtttgaacaagagagcggaagttacatacaaggaggcaggtggaagttctcagatgggaggctagctattccggaagcaatagccccccaatttatgaagcagtttcatcagggaacacacatgggaaagactgcattagaaactcttgtaggatggcatttctatgtgccatgccttactgccatcactcgagccgtttgtgagcaatgtttaacctgcgcccagaacaatccatggcaagtgccaactcagcccccagggattcaagagaccggagctacaccctgtgaaaacttgcttgtggactttaccgaactgccccgagcacggggttatcagtacatgctagtgtttgtttgcactttctcagggtgggtcgaggcattccctaccaggatagagaaagcccaagaagtaaccagactgttgctaaaagacattattcctaggtttggactgcctctaactttaggatcagataatggcccagcattcatggctgaagtagttcagcagctgtcgcagctgctaaagataaagtggaaactgcacatagtctaccacccacagagctcaggaaaggtacaatggatgaaccagacactaaaacatctgctgaagttttgtcaagaacctcatcttaggtgggatcaggtcttgcccatggcctttctccaagtcaggtgtacccttaccaaattgactgggctttcaccctgtgaaattgtgttcggccgaccacccccgattataaatcaggtaaaaggtgatctgtgggaactaggggaactaactttaaaaaggcaaatgcaagctttaggattagctatgcaaaagattcatggctgggtacgagaaaaattgcctataagcctaacagacccagttcacccctttacacctggggacttggtttgggttaagaaatggaacccaaccacactagggcccatatgggatgggcccacactgtaatcttgtctactcccactgctgttaaagttgcaggtatcacaccttggattcatcacagtcgactgaagctggctgcgcaggaccagtgaaccagtcaacaagactcagaccatccaacatgactaatcctgtggcaaaaccacgacaccactgagaaagtcaaccaccctgctgtgatcactctggaggctggtcagtctacgcacaactgaagcttgagaagtcaaaccctgctgtagtcacacactggaagctgactagtctacgcatggccaaagcttgaggagtcttcactagataagtaaatgtggatagaacttataagcctagtagtgatcttagtaatactgattatcttattattatgttactgtttttgttcaggaaaaggcctatattggatctgtggagcacaggcatatcagcaactgccagctaaatggacaagagcatgtgtattaggaacaatcaagccatccttctttctaattcctctaaagcaaggggaactcttaggatatccagtctataatgagaataaaagaactaaaaggagcatgatctcaaaaataaatataaatatcaaaaaagacatagacataggagactagaaaaataatcaatggcctcctgaaaaaatcattaaatactatgggccagctacctaggcacaaaataggtaatggggataccacaccccaatttatatgctcaactgtatcataaggttacaggctgttcttgaaataataacctatgaaacatcaagagctttttgatgaacctatgaacatcaagatttactagctgtacaagctacacagataaggaatgccatatatcaaaacaggctggcactagattacctcctagcctcagaaggaggagtatgtgggaagtttaatctaacaaactgctgtttagacgtagacaataggcgagctgtcatgggaattactgccaggatgtggaagttagcccaagttccagttcaaacctggtcaggttggtctccagattctctctttgaaggatggttttcaacctttagtgggttcaaaaccttaataggtgggttcctgcttatcacaggtgcctgcctaattctcccttgtctcctacctcttctcatcagaagtgttcagtcaactatagaggcagttgtggccaaatacactactactcaaataatggcattgactaagtattgccccaagaataatatgtaccgactcaagaaaaaataaacaactgtggtgctattaaccaacatttatatagagcaccaaaggggggaatgaagtggaaaattaaaataggataatagcataagtaataatagtaaaattatagtaacagaaataatagctcatagaatgaattgctgtaccaaccaaggctaaaaagaatttaagtagcccccctgaagttagagttaaagaaggatattaactgccagtcccaagaaacattaaccatatctgcccttcaggtattttgtaggctctgtaagctcgtgttttcttccctccttgtacagctgcaaggtcacaagacagataagcataagctgcatactaagttttcccagagatgtaagacatgttgcaaaagtgtcacaagataattaatggactttgttcttgcttctgtaagcctgcttcctgcttcacgtaattcctgcctcaaaatgcttaaaagacattcgttttctttgatctatgcttagattttctggatgcaattccactgagccgatgtacacctaaaaataaaaactttcctgcatccaattc

SEQ ID NO: 7356 - DNA, 4471 bp, Homo sapiens
  misc_feature (394)..(394): n is a, c, g, or t
  misc_feature (610)..(610): n is a, c, g, or t
  misc_feature (949)..(949): n is a, c, g, or t
  misc_feature (1133)..(1133): n is a, c, g, or t
  misc_feature (1149)..(1149): n is a, c, g, or t
  misc_feature (1415)..(1415): n is a, c, g, or t
atctttgaagaggcactagcatcagacctcaaggcttttgtcccaccaaagatagtgggggagtttttgaacccttgtgggagcctggtccaggtgaattgtgttcctccccattggaatgcaaaaataggctgactcattggagctagcctgaagcagaaaaaggcaccttttaagtccaaacaggaaaaccaggcagcatgagcaggaatgtggctcgtcattgtatacgggttcaaaaactcccccactatctttgaagaggcactagcatcagacctcaaggcttttgtcccaccaaatgacaagtgtgtattgttacaatacattggtgatcttttgtttgcggcacctaccgaggaagattgcttccagggcaccaaagatctccttngccttctatggaaggcaggttacaagatgtctaaggaaaaagctcaggtctgtgcaaaaagagtaagatatctaggtttcctagtagcccaagggcagcgtgaactcggcagtgggcagaaggaagccatatgtgcgctccccactcctgtcacccggcgacaagtaagggagtttttaggggcagcaggcttttgctgtacttcaatgccaaacntttcactcacggcaaagccattgtatgaagccacaaagtgggggagaaaaagagcccctcctctggggtaatgagcagaagaaggcctttaatgagatcaaaaaggccttaagccaagctcgagccctgggattgccagacctgactaagcctttctttttctatgtccatgaaagaaaaggaatgactacaggagtttcagttcaaacagtaggatcatggtattgaccagtagcctatttatcaaagcggttagaccttgtggccctgggtggcccccctgcttaaaagcattagctgccactgccatgctggcagaaaatgctggaagctgacacnaggacaaaagctaataatacgggtgccacacacagtgatcaccttaatggagcaaagaggatatatcactggctatctaatccaagaatgttaagatatcaggggctcttatgtggaaatccatacgtaactttaaaaaccgcgaataccctcaacccggctaccctgttgcctgtagaaatgncgaagttgcaagaccngtttccccaacgctattgcgtagacgtagtagatgaggtgttctcaagccggaaagacttaagagaccaaccctttaaggacccagacgctgaatatttcacagagggaagcaggtttgtatcagaaggggtctgcagagccgggtatgcagggtgactctaaattcagtagccaaggcacaggccctccctaccaggacctcagcacaaaaagcagaatagctctaaatagagcactactagtagccaaaggaaggacagttaanatctatactgattcaaagtatgcttttgctacattacatgcccatggagccatttacaaagaaaggggactcttaactgctggagggaaagaaattaaagaagaaatcttacaactcttagaagctgtgtgggccccagacaaggtggccgttattcactgtaaaggacatcagacaagaggcggcatagaagcaaaaggaaataggaaggcagacagagaagccagacaagcagctatgtccaactcaagtactaaaaagaaaaccccaaccctgctgcttctactagaaccttccttacctgaaaccccaagctactctcccaatgaaaaagcttggtttgaacaagagagcggaagttacatacaaggaggcaggtggaagttctcagatgggaggctagctattccggaagcaatagccccccaatttatgaagcagtttcatcagggaacacacatgggaaagactgcattagaaactcttgtaggatggcatttctatgtgccatgccttactgccatcactcgagccgtttgtgagcaatgtttaacctgcgcccagaacaatccatggcaagtgccaactcagcccccagggattcaagagaccggagctacaccctgtgaaaacttgcttgtggactttaccgaactgccccgagcacggggttatcagtacatgctagtgtttgtttgcactttctcagggtgggtcgaggcattccctaccaggatagagaaagcccaagaagtaaccagactgttgctaaaagacattattcctaggtttggactgcctctaactttaggatcagataatggcccagcattcatggctgaagtagttcagcagctgtcgcagctgctaaagataaagtggaaactgcacatagtctaccacccacagagctcaggaaaggtacaatggatgaaccagacactaaaacatctgctgaagttttgtcaagaacctcatcttaggtgggatcaggtcttgcccatggcctttctccaagtcaggtgtacccttaccaaattgactgggctttcaccctgtgaaattgtgttcggccgaccacccccgattataaatcaggtaaaaggtgatctgtgggaactaggggaactaactttaaaaaggcaaatgcaagctttaggattagctatgcaaaagattcatggctgggtacgagaagtttgggttaagaaatggaacccaaccacactagggcccatatgggatgggcccacactgtaatcttgtctactcccactgctgttaaagttgcaggtatcacaccttggattcatcacagtcgactgaagctggctgcgcaggaccagtgaaccagtcaacaagactcagaccatccaacatgactaatcctgtggcaaaaccacgacaccactgagaaagtcaaccaccctgctgtgatcactctggaggctggtcagtctacgcacaactgaagcttgagaagtcaaaccctgctgtagtcacacactggaagctgactagtctacgcatggccaaagcttgaggagtcttcactagataagtaaatgtggatagaacttataagcctagtagtgatcttagtaatactgattatcttattattatgttactgtttttgttcaggaaaaggcctatattggatctgtggagcacaggcatatcagcaactgccagctaaatggacaagagcatgtgtattaggaacaatcaagccatccttctttctaattcctctaaagcaaggggaactcttaggatatccagtctataatgagaataaaagaactaaaaggagcatgatctcaaaaataaatataaatatcaaaaaagacatagacataggagactagaaaaataatcaatggcctcctgaaaaaatcattaaatactatgggccagctacctaggcacaaaataggtaatggggataccacaccccaatttatatgctcaactgtatcataaggttacaggctgttcttgaaataataacctatgaaacatcaagagctttttgatgaacctatgaacatcaagatttactagctgtacaagctacacagataaggaatgccatatatcaaaacaggctggcactagattacctcctagcctcagaaggaggagtatgtgggaagtttaatctaacaaactgctgtttagacgtagacaataggcgagctgtcatgggaattactgccaggatgtggaagttagcccaagttccagttcaaacctggtcaggttggtctccagattctctctttgaaggatggttttcaacctttagtgggttcaaaaccttaataggtgggttcctgcttatcacaggtgcctgcctaattctcccttgtctcctacctcttctcatcagaagtgttcagtcaactatagaggcagttgtggccaaatacactactactcaaataatggcattgactaagtattgccccaagaataatatgtaccgactcaagaaaaaataaacaactgtggtgctattaaccaacatttatatagagcaccaaaggggggaatgaagtggaaaattaaaataggataatagcataagtaataatagtaaaattatagtaacagaaataatagctcatagaatgaattgctgtaccaaccaaggctaaaaagaatttaagtagcccccctgaagttagagttaaagaaggatattaactgccagtcccaagaaacattaaccatatctgcccttcaggtattttgtaggctctgtaagctcgtgttttcttccctccttgtacagctgcaaggtcacaagacagataagcataagctgcatactaagttttcccagagatgtaagacatgttgcaaaagtgtcacaagataattaatggactttgttcttgcttctgtaagcctgcttcctgcttcacgtaattcctgcctcaaaatgcttaaaagacattcgttttctttgatctatgcttagattttctggatgcaattccactgagccgatgtacacctaaaaataaaaactttcctgcatccaattc

SEQ ID NO: 7357 - DNA, 517 bp, Homo sapiens
aaacaatattattacaactacttgaaattaactttctacttctgatggtattttaataccttaaaatatttgagtataaaatttattcttgttcactttctttcattgtatttatccctctgaagtacagagccaacaacagaaatgtgcagaaaacaggagataactttgaatattgacattccagctgtctttgttgagtaacaaactataccataatttctatggactgaatgtttgtgcctcccccataagttcatatgttgaaatcctaatgctcaatattatactaagatgcaatagggccattgaggtaattatgtcacaagagtgggcctaatatgaccaatcctatatcaatgagattagtgttcttacaaaaagacaccagacaggccctgagtacagtatcttaggcctgtaatcccagcactttgggaggctggggtgggaggatcacctgagcccaggagttccagaccagcctggaaaacagggcaagacactgcctctacca

SEQ ID NO: 7358 - DNA, 477 bp, Homo sapiens
ttttgtatttttagtagaaacggggtttcaccatgttagccaggatggtctcgatctcctgacctcgtgatctgcccgcctcggcctcccaaagtgctgggattacaggcattagccaccgcgcccggccaatacattttaaaagattaaaatcatctgaaaaatctccaaacacaatggcacgaaactagaaataagtaatagaaaaaaatgagaaattcataaatatgtaaatattaaataacacactacgaaaaggccaatgggtcaaagaagaaattacaaggtaaattagaaaatatttagagtggaataaaagcaaaaatacaatctactgaaacttttggaattcagcaaaagaaacctactcagagattaatttacagttggaaatgctcacattaaaaaagaacagtgggtaggaggcagagcaagatggtcaaatagaagcctccagtgattgtacccttgacagga

SEQ ID NO: 7359 - DNA, 153 bp, Homo sapiens
tataatgacattttacattatggttgcaacttttgcacttgaaactagtattctaaactatttattttggggggttatttggatgtctagttggaaaagtgaaagatcaagcctctatattcatgaagttattacacaataaattaaacagtt

SEQ ID NO: 7360 - DNA, 558 bp, Homo sapiens
tgtgtttattgcagcactgttcacaatagcaaagagttggaaccaacccaaatgcccatccatgatagactagataaagaaaatgtggcacatatacaccatggaatactatggagccataaaaatgatgagttcctgtcctttgcagggacatggatgaagctggaaactatcattcttagaaaactaacacaggaacagaaaaccaaacaccgcatgttctcactcatgagtgggagttgaacaatgagaacacatggacatagggaggggtacatcacatgctgggtcttgtcagggtttcgggggctaggggagggatagcattaggagaaatacctaatgtagatgatgggttgatgggtgcagcaaaccaccatgacacgtgtatacctatgtagcaaacctgcacgttctgcacatgtaccgcagaacttaaagtataataaaaaagtacatatagttgcaacttatctaaataataaaaaatattaaaaaacagaatatagaccttatttagtgtctatatgcaacatgccacagcagccatagcatatg

SEQ ID NO: 7361 - DNA, 1147 bp, Homo sapiens
tctgctaatatgtattctctagaaaactcaactttttttttttttttttgagatggagtttcgctcttgttgcccaggctggagtgcaatggcgcaatctcagctcaccacagcctccacctcctgggttcaagcgattctcctgcctcagcctcccaagtagctggggctacaggcatgcaccaccgtgcccggctaattctgtatttctcgtaaagacggggtttcttcatgttggtcaggctggtctcaaactcccgacctcaggtgatctgcccacctcggcctcccaaatgctggaattacaggcgtgaaccacctcgcccggcctcaacttcttttaaaaataaaatccaggttccctacttcttggtttcttttaaaatacagcaaatattatttaaaatatattaaattagtgagaacatttttgttgcttgtttcactccaaaggaagcaacttcaaccagaacactaaataatctccttaaaagaaactgtcttcctcaggaaaagatctacagacacttacttggccaactggagaagggaaaggaaacacatgcaaaatcaagaatatgccaatatcaatgtattaatctgatggaaaacaactgatactcatattttctaaatcaaaaccttaaataatgtttcactaactggaattacacatttattttttagagacagggtcgctgaggctggagtacagtagcacgatcagctcactgcagcctccacctttcaggctcaagtgatcctcttgcttcagcctcccaaagctctgggattacaagtgtgagctgcacatcagcctattgcctattttaaaaggcagttttacttatgcaataatagaaattcctaagtgctctcttatatatgcaagtcttgctaaaatgtgaaggcattataacataactaaagaaagaatacagtcaaacacaaaaacccactgattatcacagccactctgtcattgagaacaatccctcaggaatcagttctgattttaaaatggttaaggttacatcaatctacaaaactgtcctaaagacttaaactacagagaaagaactcttttgttgttttttgggaaacaccatttttttttgagatggcgtctcactccgtcacccaggct

SEQ ID NO: 7362 - DNA, 872 bp, Homo sapiens
tcattacatttaagccatctgagggctatgagcgtggcctgcaaagtcactctgagcaacacaaggtggagtttgaaagcagattcaaagccagaccactgggcttgagtcctcacatgcaagcatgtagtcttcaccatggagaagggggtttgcctttctcaaagcttttttcttttaaattaagaaaaagaactgatttatcagtctagtgtttcattttaaaaacatatgaaagggtgggtaacttgcagaagaaagtatttggagcctataattccattaagggttataatggcggtcatggttggggaggcagcattttgcatattatatcaaaatgttatggtaccataaccatccaaatgttaatggtaccaatttcttctatcctagaaacatttcattttatgttgttgaaacataacaactatatcagctagattttttttctatgctttacctgctatggaaaatttgacacattctgctttactcttttgtttataggtgaatcacagaatgtatttttatgtattctgtagttcaatagccatggctgtttacttcatttaatttatttagcataaagacattatgaaaaggcctaaacatgagcttcacttccccactaactaattagcatctgttatttcttaaccgtaatgcctaggcctaacctcaaccaaccttccacaatcttgttcacagtcagagacccaaaaaagagtgttataagtggggtgtcactattgtgaaagtagtgctaatggtgttgaattggtacctatgattcttcttttgaattagattgtatgtttcatgatctcaacttacattactaaaattcaataaactgatcatttagatga

SEQ ID NO: 7363 - DNA, 946 bp, Homo sapiens
tcattacatttaagccatctgagggctatgagcgtggcctgcaaagtcactctgagcaacacaaggtggagtttgaaagcagattcaaagccagaccactgggcttgagtcctcacatgcaagcatgtagtcttcaccatggagaagggggtttgcctttctcaaagcttttttcttttaaattaagaaaaagaactgatttatcagtctagtgtttcattttaaaaacatatgaaagggtgggtaacttgcagaagaaagtatttggagcctataattccattaagggttataatggcggtcatggttggggaggcagcattttgcatattatatcaaaatgttatggtaccataaccatccaaatgttaatggtaccaatttcttctatcctagaaacatttcattttatgttgttgaaacataacaactatatcagctagattttttttctatgctttacctgctatggaaaatttgacacattctgctttactcttttgtttataggtgaatcacagaatgtatttttatgtattctgtagttcaatagccatggctgtttacttcatttaatttatttagcataaagacattatgaaaaggcctaaacatgagcttcacttccccactaactaattagcatctgttatttcttaaccgtaatgcctaggcctaacctcaaccaaccttccacaatcttgttcacagtcagagacccaaaaaagagtgttataagtggggtgtcactaacctcaaccaaccttccacaatcttgttcacagtcagagacccaaaaaagagtgttataagtggggtgtcactattgtgaaagtagtgctaatggtgttgaattggtacctatgattcttcttttgaattagattgtatgtttcatgatctcaacttacattactaaaattcaataaactgatcatttagatga

SEQ ID NO: 7364 - DNA, 418 bp, Homo sapiens
tgccccctcgccagaagacattggttttcctgctgtcctatgtcacccggagaagagggagcaagaggctgcctttacccatcatttcttttccctgtcactacctgttagtaatgttaaagacaggtcctctggttaaaacggtttctgtagaaagaggatgatcaattttaatttcctttcccaacatgggctttgattttctgttttcaaaaacaggatacacagtgagaaatgctgggcgctccccactttgtgaccctcatctacgatgagttatgacgggttaattataactgcagggaattatgcttatatcataggagattgatattttctgtgaggaaattagaaagctgttaggaaggcccagaacatgcagaaagaaaaaaaaaacctcctttgaggcagagttaaa

SEQ ID NO: 7365 - DNA, 357 bp, Homo sapiens
tatctatgtaacaaacctgcacgttctgcacatgtaccccagaacttaaagtataataataaataataataataacttttttaaaaagaaataatgtgcaatgaatacaacacactcaggatttaagtaatctgagtatatgcatgtgttgtgttgtggttgcagttatatcattcccaatggcatattgtatatttattttaacatacaactgtttaaatcacacagctaagtattcctttccttcaccaagataactgatggcaaaataggtactcttgttacttaaacattactagcattattgccatttttacataacctctatgattttaataaagaaaattatgtaaaaaa

SEQ ID NO: 7366 - DNA, 429 bp, Homo sapiens
gaaataaaaggtagcttgtctttcattatttaagctggtagacacacctctagcgtctgaaataaacatggagaggcaaagagttcgctcatggcccaacagacagtactagaagagggtctaaaaggcccaaatttggatcacagcttggccacttaccaggtgcttgtccttggggacgtgacctaacctgtttttgcctcagtttttcgtctataaaatggggctgttgaacttaaaagttctttcctgctctggacatattattataagtgaagtactttaaagtttttctaactgctttccaaagctgctctgggctctctgaaaaaatatctttgctcaggacattttcttacatggaaatatcctcacccttctgtctctgtgaagattcagcaacctgaagtcagctcacctagtttcctc

SEQ ID NO: 7367 - DNA, 406 bp, Homo sapiens
caatatggttacattgctttgtataatttttatttttcctttgattaataacttgatttttttcttatttgtacctatccctaattcattcccaactgaattttaaacattttaaagttcagcttacacattgatttttaaaattgtgtttacacgttgattttaaaatgtaagcattagggataggtaaaaagtgaataagcaaagtgaataagcacattctgtgaataagcactgaactaatggagttaaaacatgaatcaaaatatatacagataaattagatgtaggaaaaacaatcagaaccttcagtgacattttacaatcttatcaaaaagatatgttagcatttagactatttcaggtaatatagtaaacagttgattccccgtaagcaatgtatcaa

SEQ ID NO: 7368 - DNA, 437 bp, Homo sapiens
  misc_feature (53)..(53): n is a, c, g, or t
  misc_feature (62)..(62): n is a, c, g, or t
gtggttttacttacttacggtgtgtgtgtgtcttttagtgaagaacacgatantgaagagtntgtgatactctgctttgttactgccaaagaggttaagatgagctgggataaaatgactgccatcgaggtgctgccctgaggcactagggaattaacacgtgtgtgcagcacctgacacatgccctggacttccacgtcgctgagaacctgcctctgctcagtcagcctccttggggcttccctactcataaccttcaagtgttactatgcctgaagtgtttccttccttctttcagcaaatcttcattgaggttttttaggtgctgggtagaattcacaaatgcagggacccatcccaacagtgtccttgtccccatagagcctgcatatatatgggggaagacagaagataaaaattttcaaaaatataaaaaa

SEQ ID NO: 7369 - DNA, 446 bp, Homo sapiens
tttgtcatggagtctgatgtaaaaattgatgacactttctaacttctggtgtgcttcccttccttgttcattttccataagtagcttcctccatccctcttcccaacaggccacagtcaattcaggacattttaaccatgaaaatgagtctctgtaagaggaatttagaggccaggcacggtggcccagcacttcaggaggttgaggccagcagatcacctgaggtcaggagttctggaccagactgaccaacatggtgaaaccctgtctctactaaacatacaaaattagccaggcatggtggcgggggtctgtagtcccagctgcttttcttgcccaggcataatctcagctcactgcaacctccgcctcccgggttcaagtgattctcctgcctcagccttccaagcagcgtcgacgcggccgcgaatttagtagtagtaggc

SEQ ID NO: 7370 - DNA, 267 bp, Homo sapiens
cattttaaccatgaaaatgagtctctgtaagaggaatttagaggccaggcacggtggcccagcacttcaggaggttgaggccagcagatcacctgaggtcaggagttctggaccagactgaccaacatggtgaaaccctgtctctactaaacatacaaaattagccaggcatggtggcgggggtctgtagtcccagctgcttggaaggctgaggcaggagaatcacttgaacccgggaggcggaggttgcagtgagctgagattatg

SEQ ID NO: 7371 - DNA, 598 bp, Homo sapiens
ggttatgataagagagaattaaaaacatagtccttgtcctcaaaagacatgaaacctggggccttggtaatataggaaaccttcttgccaatataggaatatgttgacatattagctatagcaaaaggcttatattagcaccgaatgaggctctgctgcatccattcacctagggaatatgcactgtggcgcttcccaaaggatcacttgcaggtacctcagtgtacctgatggcttgactgttgttgcagccattagtacatctcccttcttgccacctttctctccccaaatctcaacaaaaccagttgtttttaatcttaacactacccatcaccctcctacactcactgaaatgtcttcagcccctaacctctagaagagctgaggacatcatggaaggaaggtaagtctttctctgaaagagattgtagacctgggatataatggataaagtgatccccaagatgcacttttgatgttttaatttctcagattttttttgctagatacttactttgcattgctttgttgttgttttgtgaaagaacagacttctgattttaaaacacaaggtgaagaaatgttaaaaaaaaaa

SEQ ID NO: 7372 - DNA, 1111 bp, Homo sapiens
atagtatagtaatgaaataaagatataacatgattactggttttaataagagttatcttaactttaagttatttgcccatttatagcattgttatgaattattcataaaattatgtcccacagtatatagttttgaaaaaacatatgatatactacatccagtctaacttctgtggaaagtagatcagaaaaaataagatagtcttgagagaattttattatagaagctgtctaatttgacctattttgcttgctcagtgctaaatctattgcttttttttaatctcctggcttgaaattatatttacttcaataggaaaggtaaaaacatcagtttttacttttcaaagttaattttctgaaataattgcattttaatgagcacaaaatgggtcattttatttttattatactcatcttgtttacacctatacataaacagaaaacgttaaagaagagaaaaataaaggagctaagttctgctgttgaagattatttcatccaaggcttggttttgaataactgagggaaatatctctaaatctcaagttcatcaaagcagctgcaatggaataaaattgctattttatcgagaaacctggtttggatgcttataaattccactactctcagcttcattttcctgagtacgtggtcactgaagcatcatttagacattacataaactggcatgcagataaacctatttacatagagggagaaaacagtttcaatgtcttggacaatctgttattttaatgatttacttaagaaagaaacaatctgaaagcttaccatagcttatcttttctactcacttggagattcaagctattcaatgtgagttttaaaaagttaagcacagttagtgagtgaaatggtagaatgtagaacctttaagcttgctggttgataaacagaatcaatcttccaggacagataattccctgaagggacctatccttgcataagtgaactagttactcatacagaaaatgatctgcacatcttactacaacactacacacaagaactaaaagattaatgattatctgtattctcttcactaattactattatgggggaataatgattagcaaattatatgaat

SEQ ID NO: 7373 - DNA, 316 bp, Homo sapiens
cgtgccttccaagcccattccctgttgaaaaatggcaaggtccagaccaagtttgctttgtggctcagtgttctttttcataatgaggatgccaatatgggttgtgaatggaattaaaagagttaatacactttcagcgtttttaaagcagtgtctggaacatagtgaggactaagctctgatttttttatcttgcccaaattcctgtctaaggggtctgggagtcatgccctacaaaccataaaatcccatcagatgggttttatttgacactgtatatcgtgacttaccttccagtctgactctggcataacat

SEQ ID NO: 7374 - DNA, 523 bp, Homo sapiens
ctgccaccctcccgttggcctcaggagctccatgccccattaatcctgtctcccatcaggagctccatgccccattaatcctatctcccatgtgaatgcccagccttcccctgtacccaggagcagagacagcacccagaccagctgctctaaccttgccaaagcccccagtacaaaaaggtaaacaggaaattcatgccggggtggaagcttattaagaatcgggtttcggccggtcatggtggctcacgcctgtaatcccagccctttgggaggccaaggcaggaggatatcgcatgagcccaggaatttgagaccagcctgggcaacacagagagactccatctctacaaaaagtttaaaaaattaaccagacgtgatggcacgtgcctgtagttccaactatttaagaggctgggatgggaggatcacttgagctaagggtttgagactgcagtgaaccgtggtcatgccactgcactccagcctgggccacagagcaagatctcatctcaaaaaaaaa

SEQ ID NO: 7375 - DNA, 234 bp, Homo sapiens
tctaaagttttttcttgccctgcatgttaaaaagaatccaaaaaacaggacaactcatcccatattttcattattacactgtgtcatttctttgggtttgttgaagaagtttttaagaggaatttattgttgtttttcagtatttacattacattactttgggatagagatccccaattacaaaatccaccagtagatggaactttaataaaatatataaatgtgtgtatatct

SEQ ID NO: 7376 - DNA, 335 bp, Homo sapiens
ggggtgcacagctctgtttgccttcatcattgtaacccgtagaaagaaaacttgagtaaggtcaaggtttccatgctttccttaaagtgtggagccttttattccatgaaaaggttatacaaaaatccaggttatcaagcaaataaacaagcagttcttactcagataaacaagatacaccccctcaccctacctgctcaatttctctttctccactcccccaaacccacctccattgtagttcctgcagggggtcccgtaagcttattttgaaaatcactaggatgggctgggcgcggtggctcacgcatgtaatgccagcactttgggaggcc

SEQ ID NO: 7377 - DNA, 228 bp, Homo sapiens
gcaggtgataagattagggcaagaaagctgcgatttaacagtttccaggcacttgatatctcaccagagctcagctaccagttgtctgcattaatccccaaggcaaacctgagaggcaggtgggtggaattgagctaccttttatctcagaaaagggaaaagccaaaccccttgaacatcagtttctggagggcaagagggctctttccccagcgtgcacctcaccac

SEQ ID NO: 7378 - DNA, 395 bp, Homo sapiens
gggaggctgccctctgggttccagtcatatctcaattaaagaataacacacgcccttcccctaactcatctagaacaaccccatgtacgtagctggcagtgaacacaaaagctctctgagtagccggaagagcccacaatttcatcagctctctagacctgttggacaccctcagatcagggtgactgagggagtgtgggcaggaagcccagaccaggaatccaggagaggctgcttagggctttggggtccaggcagagcaggaactataaggaggtggagccacttggaggaaggcgaggaccagaatggagtggagtggctcttttggctccacatgaccaccatttagctacttggtgtgttggcctctctacatccagttgctgcttctc

SEQ ID NO: 7379 - DNA, 367 bp, Homo sapiens
aatgagctgactttcttttctggattactcttttatgtaataaaaagtagacatgagggtcaaacagaaagggaaaaaggggaatttgtttaatttctaccaagtgccaggcatagtacaaagaacatttagataaggcagaaggcattaattatttttatctacccagaaccccctgccccacctaagcaccccagcccctgacctggccacgtgggtggctatgtgacccgagctgaaccaatcagagtccttccctgggatctttttcacatcataaccacatgagaaggtctcccattatgaaacagagaagcttgttggcagccatggttctagccaaggatggaaaaaacaaccaaaaaaa

SEQ ID NO: 7380 - DNA, 366 bp, Homo sapiens
ccaatctctaatcattcttcaggtcctcttatatccctaaaaactgggttaggtaacccttcctcgtgcagcagtagaaccctgtacttaatactgacacacactatcttaaccaaaattgcctattctttatgccctatctttacttctagctgaggacaccttgaactgtgttttgcaaaccattggtgttgcatcacctattgcaattttcctggtatataataaacacaaaatttttttgagttgaattaatatattaaaacaatgtttgatggcattataaatggcaatgtatctgattattttttccccgtaggaaaaagtgtaaatttccttcagctcaataaagctagttaatgttct

SEQ ID NO: 7381 - DNA, 303 bp, Homo sapiens
cgtttaagagatataagccgtaagcatagtgtaagcgcgcagctgaatttgttgagttctgtgtctgtcctttatagcacctaccagtgttgcatggtggtgggtggcgaattgagctagaccatgtgtggttgaagtgcagtttgcttatcctaagttactcttgtttatagggtaagggataaaaagcatattgattccttgaccacatttcattctcaatttaattatgacactgcatgctagtcccaaatttgtcagcttgctttatttttaagtcagtcttcgaattattacaccgtg

SEQ ID NO: 7382 - DNA, 413 bp, Homo sapiens
cgatcaaagaaatccaatgattaacagatttaggattcactattatatagaataaaaatcttttaattataaatgcatatatatctatgtgtgtgtgtgtgtgtgtttaaagaacttagattcaacttcccctccaccaccacttaaagtatgaggagctaggagcaatacagtgttgacagtccctatcctggcagggggcagttgggaaaacactggattagaaaagatgaaagacaatggagcttccctaggagactgatttttgaagggcttttgatcatcctccacccagtgtcaaagccagtcatgaatcctcagaaccaaggaggtcctggcaagttctgttgtggttacccgtcggacatccctgtctggtcaccggggctccgaggggtgccctgctctcagga

SEQ ID NO: 7383 - DNA, 452 bp, Homo sapiens
gctatttttcaaattagccatttttttaacagcagaatgtgctaaccaattgcaccacagacacatgtagccattttttattttttatgttgataaatacaaatgcctaaatgcagaaaattagccagtgaaatttttaaaacatcaacaactttaactactatagatgtttaaattcacacttaaaaaaactgtttcagtacatttgttgaacttagaagatacatcattttattaatgattacagattttttttactacaccattatctttatttggttaataagttatctcgaatttgcaggtggattggtccatgaatagaaaattaatatctcggctaggcgtggtgcctcacagctgtaatcctagcacaggccaaagtgggaggattgcttgaggccaggagttcaagaccagcctggtcaagatagtaagaccctatttctaaa

SEQ ID NO: 7384 - DNA, 363 bp, Homo sapiens
accaaaaaataggaaaaattagccaggcatgatggcacacagctgtagtcccagctcctcgggaggctgaggtgggaggatcacttaagcccaggaggcagaggttacagtgagccaagatcacaccactgcactccagcctgggtgacagagcgagatgccatctcaacaccatcttaaaacaaacaagacaaggtgactccaggtgcaccaggtcctgcaggcatcacacctgcactgctcttcagggaaattcacggaacaaatgcgccatcgtcacgagaactgattgcatcgatgggtatggccatggtgacaagtgaccgacagcccagcagcctgcacgcagaggtgtcactgtag

SEQ ID NO: 7385 - DNA, 186 bp, Homo sapiens
cgtcctgtgcctcacccgggcccagcagccacgggcacacacttggcaaatgcaccggctcgagggacggacgggggtgtgggctgtgcctcgttggtgtctcgaggggagcagctctgacaggcgggagacacggccacgcggtgctgcctgtcagagcatgttctgggagctgctcattgttcc

SEQ ID NO: 7386 - DNA, 230 bp, Homo sapiens
ctatagggataaaatttttaaaagaaagtaggctgtgggaaactaaggtatcagataaatgaagttttctcaacaaataaatcacctatatggatagtttgtatcaaaccaacactctcactaattggaaaagccagatttaaaacacacacacacacacacacacacacacacacactctctctctctctctctctctctctctctctctctctctctctctctcaaaa

SEQ ID NO: 7387 - DNA, 340 bp, Homo sapiens
tccgcctcccgggttcacaccattctcctgcctcagcctccctagtatctgggactacaggcacccgccaccgcacctggctaattttttgtattattagcagagacggggtttcaccatgttagccaggatggtctcgatctcctgacctcgtgatcaacttgccttggcctcccaaagtgctggcattacaggcgtgagccactgcgcccagcccccaatcaccttttcaataaagctttctaaaaatatatcctggctgatatcattgtatcaagctataaaatggggacctttctttaacagtttctttgtagatgaaaatttatattgagagatt

SEQ ID NO: 7388 - DNA, 315 bp, Homo sapiens
ggcaagtggtcattgtccacagctgtgtatcaggacaccatggttgggaactcttgccagggaatagctcatccatattttagacacttctgatcatttattttaggtatataatagtttcccggcatcatcaaagaaaaaacgtatttaaaaatgaactcaccccaaccttacactttcagtttttcgatttatgtctcttctttgtaactcattattctgaatgctttcttgctggaagagtaaaggcaattattctcctagaaatgttttttcctaaaaattatatcattatatatatcaatgaaaactgtt

SEQ ID NO: 7389 - DNA, 449 bp, Homo sapiens
acaaattcgtaaccctgaattgtagtccatttcccattaccaagtgtttagagtgccctagtggcaactgtaagtcaccttttatagtgaggtgttactagctcacttttaaataaaattggaacagcttggcttttgtcaatgtagcaaaagatgattttttaaaaggtgggggtggggcacagtggtacacacctgtaatctcagtactttgaggctgagatgagaagatcacttgagaccaggagttcaaggtcagcctgggcagtatagtgagacctcatctctacaaaaaaattgtaaaattagctgggcgtagtggcacacacctgtagtcctagctactcaggaggctgaggcaagaggatcacttgagccgaggagttcaaggctgcagtacgctgtgtgcactccagcctgggcaatggagcaagaccctgtctcttaaa

SEQ ID NO: 7390 - DNA, 349 bp, Homo sapiens
tagaagactttgggagatgtcaaaagtagactcactatttcattatcaaaatgcagagagtggggctggatgcagtggctcattcctgtaatctcagcactttgggaggctgaggcgggtggatcacctgaggtcagaagttcacgaccagcctgaccaacatggtaaaaccctgtctctactaaaaataaaaaaaattagctgggcatggtggcaggcacctgtaatcccagctacttgggaggctgaggcaggagaaacacttgaacccgggaggcgaggttacagtgagccaagatcatgccattgcattccatcctgggagacaagagtgaaactccatctcaaa

SEQ ID NO: 7391 - DNA, 488 bp, Homo sapiens
cgttttaaatgtaccacatggcagacatgcactggaaagtcatgtgtctgcatgtcctgacacggataaaggcatatagtcaggtgggtgatagactatcctgaaagattttttggtcaggaatgattggtcagagacagcaatatacccatataacaaatctgcacatgtaccttctgtatctaaaataaaagttgaattgcaaaaaaagaaatggccacagccacccaatcttcaacagccaccaccctgttcagttagcagccatcaacatcaaagcaagaccctccaccagcaaaaagattacaacttgctgaaggcccagatgatcattagcatttttttaccaacaaaatatttttaaattaaaaaaaaaatgacaatatgacattaactggaagaaaattgaaagtcttgtgcttaaatttaaaaaatccaaaacccagaaatgctagccgtgggagattggccttatagcaatttatgaa

SEQ ID NO: 7392 - DNA, 218 bp, Homo sapiens
taaatatcagttttaaagttgtttcttttataaaaccttatttcccaggtcttatggttggaaaaagcttgtttggcccaacactggtaaacctgatgactataagaacaaaaaacctttaagcgagcaaataaataaattttcttctcacaatacaaacttctcgactatgattctaccatagcctgcttaattcagagcatcctgtttgtttgttt

SEQ ID NO: 7393 - DNA, 217 bp, Homo sapiens
tctgacagctttatcagggctttaaggaaacgctgaattttgtccttagccaattgaaatgaagacacatgtttgggtcagaaaattggtcaaattatgaacacgtttagtcacaggaagagtttagacatcagagcccgatgaagtggaagttatttgagaaatagtggttaggtttataatgtgatcaacacaaaatgatgcagtttagttattt

SEQ ID NO: 7394 - DNA, 391 bp, Homo sapiens
cttaaaaaaaaaaaaaagacatttgcactctttttaaaaataaatttcatagtatgattgaactataaatatgaaatttaaagtaaagaaaggaaacttattcataagttctggtcaccaattttaagtaaagagagtaaatacggtcattcagatgttaacaatattatagaaaagaatggaaaacctggattatgtttctgaaatatataagcttagaagaagaaagaagacagtggaatctcagatgacttcataatgccactctgtaatgttatcttttagtggcagttacagttctagtccttttatatatactagtacactcagaaatcaaagaactgggtggtagatgggaatgtctgcattgccctgggattccctattggtg

SEQ ID NO: 7395 - DNA, 501 bp, Homo sapiens
ctaatctttttattttaatagagacgggggttcactgtgttgcccaggctggtctcaaactcccgagctcaggcaattcacccacctgagcctcgcaaagcgctgggattacaggcgtgagccactgcacccggccttgaagttcttttttgatgatggtgtttgtgccttgatagaatttttaggctgagagatcatggagtttatgccttccttatcagtgaggctgtttagtggtgctggccttggaggctaagtgacttgtccaaggtcacacagcaaatgagcaacaagtcttcgttgggtggccttgcacctgcccctcgtcctgtgctccacggttcttctcgtggtcagtatcagtgggcggcagccgcgcctccttccacacagctactgtggctgtggtggcaacccactgggattatgatgataatgacttttaaatgaaagcttaatttaatagttggatacattaaaagccaaaatagagcagtttaa

SEQ ID NO: 7396 - DNA, 212 bp, Homo sapiens
ggctaatttttttgtatttttagtagagacagggtttcactgtgttagccaggatggtcttgatctgacctcaggtgatccacccgcctcggcctcccaaagtgctgggattataggtgtgagccaccgtgcccagtctgttttcttttatgtatttttgtttctgacaagagtatgctgcttgtggtgaagaaaaaacaaaccaaaaaacc

SEQ ID NO: 7397 - DNA, 386 bp, Homo sapiens
tcaatgagcaccgcattggacaaggtctaagcacctgcggccttccctaagcctggcaggcccatggagagagggaaggcgagaagagcaaaacagtggccaccaaagcaaggtgaatccccagctggggaagccaggcactgggaggaggaagtcataaaaatagcaaacacaagttagaaggtttaaagggaagacgttaggaaccactacagagaggtctggaaagagaagtggcttacaaaaaaaaaagtttgaaaagttagaaggccatgatggaggggtttggaagttgccacaaggttgggttgatgagagaattctaaactgatgtgtacaggatacacaagcatttgatggtacataaataacctcctttaatcgtc

SEQ ID NO: 7398 - DNA, 2031 bp, Homo sapiens
gaaaagagaggaaagctaaataaccaagtaaatctgtatctaattaacaaattggctaaataaggtgttatcagctgcttgatatagagctgataaaatcttcagctaggcatacttgaggcctgattacagaagtgaccgtagtccacccacacacctgaaatttatttaagagaccaagctaggctcttcctggcctttaggaagaggactggcatggagaaatatgttcctcactagttctcccaagccatggcacgtcccaacaaattcctcctttggttttgctgctttgcctggctgtgttttcctattagccttggttctcaggcttctgggggagaagctcagattgctgctagtgctgagttggaatctggggctatgccttggtccttgctgcagcatatagatgagagagacagagctggcctccttcccgcgcttttcaaagttctatctgttgggcgaggtgggtcacctaggctgcagccagactccagagctttgcactacatgaagaagctctataagacatatgctaccaaggaagggattcctaaatccaatagaagtcacctctacaacactgttcggctcttcaccccctgtacccggcacaagcaggctcctggagaccaggtaacaggaatccttccatcagtggaactgctatttaacctggatcgcattactaccgttgaacacttactcaagtcagtcttgctgtacaatatcaacaactcagtttctttttcctctgctgtcaaatgtgtgtgcaatctaatgataaaggagccaaagtcttctagcaggactctcggcagagctccatactcatttacctttaactcacagtttgaatttggaaagaaacacaaatggattcagattgatgtgaccagcctccttcaacctttagtggcctccaacaagagaagtattcacatgtctataaattttacttgcatgaaagaccagctggagcatccttcagcacagaatggtttgtttaacatgactctggtgtccccctcactgatcttatatttgaatgacacaagtgctcaggcttatcacagctggtattcccttcactataaaaggaggccttcccagggtcctgaccaggagagaagtctgtctgcctatcctgtgggagaagaggctgctgaggatgggagatcttcccatcaccgtcaccgcagaggtcaggaaactgtcagttctgaattgaagaagcccttgggcccagcttccttcaatctgagtgaatacttcagacaatttcttcttccccaaaatgagtgtgagctccatgactttagacttagctttagtcagctgaagtgggacaactggattgtggctccgcacaggtacaaccctcgatactgtaaaggggactgtccaagggcagttggacatcggtatggctctccagttcacaccatggtacagaacatcatctatgagaagctggactcctcagtgccaagaccgtcatgtgtacctgccaaatacagccccttgagtgttttgaccattgagcccgatggctcaattgcctataaagagtacgaagatatgatagctacaaagtgcacctgtcgttaacaaatggtcctcttaaaaccttgagcctatttggcaaagtaactactgtgtgcctatgtgtgccttcaagagaaagcttcatatattaagtctctaaatgtagcatatgttatataaagaggagcctgtgtaggttagtaccttctatggcatctatcaggataaagggataacatcaattgttgctacagagcctttttttatttccaaatttaaatgaaatataattattgtggagaactttacatttttttccttgagtgattttttttcttttcataggagtcttattcttgatagggaaaaaaccttaattagcatcaatcctggatggacttgcagctataaataggcaattcagattgctgtagtcttaatagaagaataaatttctgtcaatggcataaattttgt

SEQ ID NO: 7399 - DNA, 1220 bp, Homo sapiens
gatttttctctcattttattgcatccttggcttttgtcctcaaggttgcctcgtggcacaaaataattgccagagctccagccttcacctcctcattctgagggaaagtcagaggccagcgctggctaggtgtctcctggaagtcttcccaggaagcctcgaaacccttctttttatatcccactggccagaacagagcgaaatggccataccttgctgcaggggaggctgggaaatgtggctgtccagatggatgagattctgttacaggcataaggggagcggggggcttaggcagtgattctctaagtgtctccatccatttcacagatgaggaaacggaggccccaagagaggcagtgactcaccagggggcccacggccaggactgaggcaccagagccaggattctcacctgaaccccataatctccatgctgctgatgtgcaagtctcagactctgcaaaatccactgcaccccctcgggctgtgaacatttcaaatccatgtgtgcccaagcttggagcagcccagggccaggggcacggctggagagctggacccaggttcctggctgtggacccatggctgagggcttagctgctttgtgcctcagtttcctcatctgtaatatggggacacgaagtggccctgtctccaagggctctgacaagacacatgacttcatgtgaggcattccggggacccccacacaataggtcctcaatgtgtgttaatcgttctcatgctgctgctgcttttggggtgtaggcatgggtagtttctggggctcaaggaaataacagaggggtctccaaaggtctcctgtcttgcacaacccacaagtaaactctgatattcactaaaaaaaaaaaaacaaaaacgaagaaacaaaaaaaaaaaaaaaggggggggcccccccaaaaatttccccacggcgggggggccaacgtttatcgcgttcacccaagttttcttggggtaccaaagggggtgcgccctatagtgaggaggccggaattaataaggctcaggcgctggggcgcgtctgtttaccaacagtctgtggatctcgggaacacttggcatcgttgggggatccttgtgggagagggaacccattcatctcctgggggggggagacctcttggcgcacatctcacaacgggagatttacaacggcctacggggagtattacacctgacagcgatcacgtggc

SEQ ID NO: 7400 - DNA, 263 bp, Homo sapiens
aagttctgaagtccttgaccatcgaaggattttacctagatctctgacgacctaccttggcttttctttaccggagaattgcccatctatggttctttgctccatctgtgcaatttgcccttttcaggacttgaggacaacatggtcgcctttgccttgcttggctgtggtttggggtggcattaacaccatgatttctttcagggcccactgaaggttggtttctgcgctcctgcgccacctgctgtcaccagctccaagtg

SEQ ID NO: 7401 - DNA, 216 bp, Homo sapiens
aatattctttatcttattaaacgtaacatagaatatgatttcaaaacacagtaatgataatttttttctaaagctaagtatttctcaattgttgtcagcaaaaaggcagctcttagagcttaaatgttaattataactatataacattgcaaaaggagattttgagatctttagtcatcttcctcttttctgtgtgtgaatccttaatctgaactt

SEQ ID NO: 7402 - DNA, 451 bp, Homo sapiens
tagtaggtggtgttttaaagggaaaaccaacacatagtgtttgtcacggtactgttgcagtaggtttttaagaattatcatcatatgatcgtcaccaccatccaaagaggtagttcctactctattaccattacagatgagaaaactgagggacagtgatgataagttagatttgaacccaggaaatttggccctagggtatatgctctttaatcactgcacaataatacctttatattagggtcttaggtaatatctttcttcttctctagcttgagaaatttttttcctacaattataatgagtgaagggttttttttttaaactagtttttccacacaccaaagctcatcttttcacttctttaataagtgggcttttggctttacttttctatgacagtaagttagacagcaacttttagccacccccacacaatgatgtattttaa

SEQ ID NO: 7403 - DNA, 297 bp, Homo sapiens
gtgccattgtaaatcgtgtgagcaatggttgggtgtgcaggcttgaagtcagaaagttttgggtttgagcctcaactctgccacctccttgctgggttatcttaggcaagctattcaacccccctacacctgcatttttaaaatctgtgaaataggaataataattgtggctgtctcatataagcgtttgggagaattaagtgagatgacacttataaaatcctggcacataacaaatgataacaattggttaaataaaattatttatgttttaaaaaaagcatccttgggaaagac

SEQ ID NO: 7404 - DNA, 378 bp, Homo sapiens
cattaatcctcctttctactgactttgaaatggaaaattaaatttcagaaaccttttgattgcacacatgcatcccacaatgtttcatacaccaatacatatataggtagtttgaattctgtgcaccaagccacttgcactgacactgatactaatgtactgtgagagagcagcatactttaaacacttgccgatgtgaatcagacttgagagaacttgagcgtgcgtaagcaccttgatgtcttatccatttggaagcttattgttacagtgcgttttcttttctttctttctttttttttttttttgagacaaaatttctctcttgttgcccaggctggagtgcaatggtgatgtctcagctcactgcaacctcca

SEQ ID NO: 7405 - DNA, 428 bp, Homo sapiens
agaggggtactagagcatttctagggatttcatttcatggtttatctgagtaaatactgtacctaattcctcatccctgaatggatcttctacaatgcttattcatattaccccttccctactttcactgcttttgcctttaaaataaagactggacaggaaaccagtaattttccttaagtagaggattaatatggtagtgtccaaaagcaatcaattccttgagacggagtttcactcttgtcaccccggctggagtgcgatggcacaatctcggctcactgcaacctccacctcctgggttcaagcgattctcctctcttaatctctctagtagctgggattacaggtgcccaccaccacgctggtctaatttttgtgtttttattcgagaccagcctggcaatatagcaagacttgttctctta

SEQ ID NO: 7406 - DNA, 415 bp, Homo sapiens
ccatgattgcccttctgcactccagcctgggcagcagagtgagaccctgtctcaaaaaacaaacaaaaaccaaacttttatgatctaagccttctttgtaaatattcttagattttaaaaattgatttaatggtataattcattcaataggtatttattgagtgccagctatgtgccagccactgtttaagattctgcagatgcatcagggaacaacagaggaaatgtaaccaacattgactttgtcagcacagcacactacttatttgatgattaaaaaaaaaaaaaaggccaggcacattggctcatgcctgttatcccaccactttgggaggcagaggcaggaggattgattgaggccaggagttcaaaaccagcctgagcaacatagcaagaactcatctctacaaaatta

SEQ ID NO: 7407 - DNA, 404 bp, Homo sapiens
gcctactactactaaattaaaggcgcgtcgacggcaggagaatcgcttgaacccgggacgtggaggttgcagtgagccgagattgcaccgtagcactcctgcctcagcctcccgagtagcttggtctacaggcgcatgccaccacacccagctaatttttgtgtttttagtagagacggggtttcacaatgttggccaggatggtctcaatctcttgaccttgtgatccgcccgcttcagcctcccaaagtgctgggagccaccggcgcctggctggaatttgatttttaattgacattcaattttattcaaaggcctttggcattttttggatattatcatgttattttctaagttgtgataattatattgtactacttttgcagagtcatggcatctatttt

SEQ ID NO: 7408 - DNA, 607 bp, Homo sapiens
gttcccatcaaatgttaatctgcttgtcctttccaacaatcaatgcatttgctaaaagctatgaaattctcacttggagaagggatgtctagagaatgaaagcatgtttggaaaagagaagcaggtggagaggtaggggttctcatgaatttcctgatgcattaggatcctatttttaaggtcctcaccacaagatcccaaaaggtcaaacgctgaatcttgctctagggaaaatgtggccaggagtagccccctctttagcaaaccaagagcccgggccagtcattgcctgacatttccaagtgaagtgggagaaccctgatgccctgagctgcaggcaaggcacagagctgtcaggtctcaggcatcgtccaggcagctgacatggcctgctccctcgttcctgcccacgtgtgctgtgagtgaagctggagtccagccacttaggatgtgtcacaactctggcctctaaggtcctagaggaaggtgtccagccatgtctgagtttgtgcaaaacacacggcagaccaacagctcttctttcagcttaatggactgtttccttcttccacacctaaatttatgtgtatgatttagggactgtgac

SEQ ID NO: 7409 - DNA, 1061 bp, Homo sapiens
ctcaatggagtttagagaatgggacaaggagtctttaggcgtagcacccagatgcctgtaattgattagagaatgtgtatataccatttgtggcaaagcagatataaaacaggcatggacgcatgattttaggtcaaggtatttaattatttttacttaaaataggcatttttggttgggaaagagaaggatgaacaatttgatgtcacctttaagactgatgtttttaattctgcttttgggaccacttgatctagaatgccttgaaaattccagaaagatttaacaacacactgaggtaagcaaaacaagaaaagaaagtaggggtgaggtgatacccagataatgcaaatgcaggatgtattgtctgtgaatttcagcatcaatctgaaaaacatgttttgataatgcctgataattcatcatctcactgattacatgtctttttttctatttgtttataatcttgtgtcttcaaatgtgtggaagatgtgccagacttatttttaggtatctgagataggaagggccaatgttggcataatttgaacccacatttcggggctaatgggcggacaccacctggaaacacttacctgcaccctctgttttgcaatcacaatgattagcatcttgctgaatgatgaccccaatgtgaagatggcatttcagtgtttatttctggatctatgagttactttagcagagttattagtagtttataaagccatatttaaacttgtacacttgattgtaagatagatttgaattgtgcactatgttgactactgtatataaatgtggaaattctgtatatttggtcttaatgctatatgtatttgatgtgtaaatgataactaatggatatgaaatagttttctgtgaatgtctttcttccaatttacttctcttttgcaaatttgaatgtttaaacttcaggctcatggggaaaatctgaaatgtttgcatctaatatactgttaagtggtggtctcttagatgactgggagagtattttagttgtaaggctcttgtataattaaaacagaggtaatgaaaaa

SEQ ID NO: 7410 - DNA, 474 bp, Homo sapiens
ttatgaaacacatttgatttaccaacttttagacttctgttttctacaaattagctctcttgcgcaagtggagaaatagcatatgtatttggtactaagtttccctcataattgtcagaacctcaccatttattgttttgtagaaactgggctttaaaaaaaatcagaccatatggtaattttgatattaatactcttttgaaagactaagtgaatgaactagtcatctatattcactgattaaaaacaaaataagacaaacttattccatagtatagtactttgggtttgtctaaaaaaaaattcatttacaaatactatttctgagggacaatagcatttctctaggatacatctatgtacatgcaactgaagaaaatagcttttaaatttactttatctcttgtagtagttttatagctacataagagtattgtaatgcaaaaggtacatcataaaaactgctttgttata

SEQ ID NO: 7411 - DNA, 399 bp, Homo sapiens
atttttttgagatgtagtttctctctttttgcccaggctggagtgcggtgttgcagtgagctgagatcacaccactgcactccatcaaagattagtctttctcctgggaaaaacaatccgagtaagaaggtcattcaagattagcatggaatgggttctatagaaacattggctgataagaaagcaataaggggtattgggaaaagccccatgcttacagttagataatctgggtttaaattttgcctttatgcttctagttttatagatcttgggaaattacccaaccaccctaagtctcagcttcctcatctgtaaaactggcataataatacatggcttattaggaagatgatggatgtgaaagtgcctggaacatagtataataagctcaaacct

SEQ ID NO: 7412 - DNA, 484 bp, Homo sapiens
tgctaggattacaggtgtgagccactgcacccagccaacatgttcatgccttagagcctttactcatgcttccttctacctggaaagcccttctcccccctactccatcattcctcacgcctaaactaacacttccttggtgaagccttcccagaccatacaattgacagtggtctggctggacgtggtagttcacatatattatcccaacattttgcgaggccgaggtaggatgatcacttgagcccaagagtttgagaccagcctaggcaacatggtgaaaccccttatctacaaaaaatgcaaaaattagtcaggtgtggtggttcactcctgtggtcccagctacttgggaggctgaggtaggaggatcacttgagcccaggagggccttgagggtgaggctgccgttaagccctgatcacgccactgcactccagcctgggcaacagagcaagaccctgtctcaaaagaaataataata

SEQ ID NO: 7413 - DNA, 627 bp, Homo sapiens
gcaaaaagcaatgtagtgcacatactttgtacctttgtctttgaagtagttacatgagcacctctagcattgatttctagatgcgaaattatttggtcaaagtgtggcagattgcctttaaaaatgcctggtcaggctgagcgccgtggcttatgcctgtaatcccagcactttgggaggctgaggtgggcggatcacgaggtcaggagttcgagaccctcctggccaatgtgatgaaaccctgtctctactaaaaatacaaaaaattagctaggtgtggtggcgtgcacctgtagtctcagctacttgggaggctgaggcaggagaatcgcttgaactcgtgaggtggaggttgcagtgagccaagatcgtgccactacactccagcctggtgacagagcgagactctgtcaaaaaaaaaaaaaaaaaaaagcctggtcagtacttacacacattaacaatacttgttatttacaaataccatctcccatatgagtagccaggattcaaatttagagactctgcctctagagcctgtatgtttaacctttttatttcatctgccttagtgtccccattagaaaaagaggataatagtatctacctgtgtactagttaacctattac

SEQ ID NO: 7414 - DNA, 524 bp, Homo sapiens
gattctttaaagcagaaagtagtggctaaaatggagtagccaattacctggttgaatatagaaagtatattcaaacatcctcacagggtcccctggcagagacttggagatttacctgctctagacacttaaggaaataactgtccaattaactgaacactgaggtagctgggtacagactttagcggctacatttgacaaacattgcaattacaagcagcaacacaaaccaaccttgggatggggatagaattcttttctttcttctttctttttttttttttttttttgagacagagtctcgctctgtcacccaggccggagtgcagtggcgcaatctccgctcactgcaaactccacctcctgggttcaagtgatcctcctgcctcagcctcccaagtagcttggattatgggtgcccaccaccatgcctggctaatttttgtatgtttgatagaaacggtgtttcaccctgttgaccaggctggccttgagctcctgacttcaggtgatccacctgcctc

SEQ ID NO: 7415 - DNA, 842 bp, Homo sapiens
gtagttcagaagtcaaattgtgtagctttactattgccctttctaaaggggctcaaacctacatatgaaagcaaatcccaatatgtaagcctttgtgtggttaacatttctgtctactctctcaatagtatggatttaagtgatatttttcatggtgcctggaatgagatgtagtgattcactgtcattgtttcacagaactaagatggcataaatgctgtgctgatcctatttttagttgccttcacctgtcctcccatcatgtaacaagtctacataagaacattttaaatatgtgcatctgtttgtgttcctagtttgtacaagtggaatgacagagtggagtaccagttagagtgcaaacaacctgctactttcattcctaataacgtcatacttactaaacactagttccactctctatgcatgtcccaccattgccacatttcattaaactgcagggagaagcatgacactggccaacactgcgtccagcatttgggtggccctcaggatttcccagtcctctgaaatggccatccttctcagtgcgaacttgaagagtgaaaatacagccttgaagaaatgcaaaaacacttcgtgttaacaaacagaagaaatagaaaaaacaagaagaagagattttgcctttctatacatctttagaaagaacttctcggccgggaacggtggctcatgcctgtaatcccagcactttgggaggccgaggcgggtggatcacgaggtcaggagattgagaccatcctggctaacatggtgaaaccccatctctattaaaaatacaattagccgggcgtggtggcgggtgcctgtagtcccag

SEQ ID NO: 7416 - DNA, 1009 bp, Homo sapiens
gtagttcagaagtcaaattgtgtagctttactattgccctttctaaaggggctcaaacctacatatgaaagcaaatcccaatatgtaagcctttgtgtggttaacatttctgtctactctctcaatagtatggatttaagtgatatttttcatggtgcctggaatgagatgtagtgattcactgtcattgtttcacagaactaagatggcataaatgctgtgctgatcctatttttagttgccttcacctgtcctcccatcatgtaacaagtctacataagaacattttaaatatgtgcatctgtttgtgttcctagtttgtacaagtggaatgacagagtggagtaccagttagagtgcaaacaacctgctactttcattcctaataacgtcatacttactaaacactagttccactctctatgcatgtcccaccattgccacatttcattaaactgcagggagaagcatgacactggccaacactgcgtccagcatttgggtggccctcaggatttcccagtcctctgaaatggccatccttctcagtgcgaacttgaagagtgaaaatacagccttgaagaaatgcaaaaacacttcgtgttaacaaacagaagaaatagaaaaaacaagaagaaggttatttttcatttttaaagtagaagtttttcaaaataaagtaatacatgtaaattttaaaagaaatataagaatacagaaatgcgcagagaaatttttttttaaaagtcattcatgatatcatttcacagcagacaactattaacattttggtgtgtgtgtgtgtgtggtattttttctatgcttagtcatattttcttttaaacaaaaatgcaatctgcactaagctgtagaaaatataatattataccaaaaagttgaacatcataaataacattaacttttttcttgtagcattaactatttttaagtgatggcatattttcttatatcaaaatatatttaataaacctataattattataccatt

SEQ ID NO: 7417 - DNA, 209 bp, Homo sapiens
acagcatctgtaaaaatagggtgcttctgttgcccagttgtctggtggcattgactttgctcataggactttcatgtttacagattcagctgactaacatgggtgaggctgttgcaattcatttagcagtaagtgggtcatttagtaataagctgtgaatgaaatcagtgtgctataagatgagataggttggcttgttttcttttatt

SEQ ID NO: 7418 - DNA, 313 bp, Homo sapiens
tgggaaaggaaagagcctctccatagagaatccccagttctgccaagcgtttttaatgcggttcaatctcctggccatgtatgtttcgacaattagcatgcacacatttgaaaaacacacagtgtcttttccattttcttccttctcttatggagaatgcatccaagagcctatgaagcaactgttgctgatctcaaatcccaaaggacccaccattcactctcaacttttttcataatgcatttcattatagcgtaaccctgacccagttctcctgaaccataaagacaggccacttctttctcatcatgct

SEQ ID NO: 7419 - DNA, 731 bp, Homo sapiens
cctcccaggttcaagagattttcctgcctcagcctcccgagtagctgggactacaggtgcatgccaccaagcccagctaattttttgtatttttagtagagacggtgtttcaccacattagccaggattgtctccatctcctgacctcatgatctgcctgtctcagccttccaaagtgctgggattacagacaacatgttttaattattaatttcagaagttagatggatcaagatttgagccaaggctcagaggatggctggagatgagagatggaaggatgctcagagggtgttcaggccaaggagaagcagatggaaccacagagcaggtgttgcgaggggatggggacaaccttagaagatctgcttgttggaagccagagactacgtcaggagtcaagggaaagaggaatcgatggacagatcgggtggcactttgggtagaagctggagcatcagacaggctggacttgatgcaacagttggcagaggagccactgcagcctcctaggcaggtgacgacttaagaagagcaattccgtgggctgcctcagtctctgagcacaggatgacctgaagacacatggacctaggaggaggaaggtgaggggccctgaccgtgatgggatctggaggaaggagctccagagtggggatgcctccagagttgaagatctaggaagacttcctgtccacttgggtatgaagggaaaggctgggagaagggag

SEQ ID NO: 7420 - DNA, 405 bp, Homo sapiens
gatgtgagtgattaacatttgaaacactgataagggaatacatagtgtaagggtagttgtttggcattggaaataccctaatgaggagataactactgtaaatttaacctgcttatctttaaatctacaccagagagttttctagttagcataaaggatgtcagaaataatttcaaattggattgattagaaataccatacaggttcctctggcacatgaattgctcataagattctggcaagccaggtagcctaatgcctgcacagtgtcacccgaggcagagcactgttcgggcctgttgactatcacctaacagaagatgcttcctacctggtagaaaggtagtgaggagacctatggccatgcctgtcttcagtctttggaggcactgatatataccctcc

SEQ ID NO: 7421 - DNA, 597 bp, Homo sapiens
ggaagaagaattgtcttgggccacatataaaacacactaacattaacaacagctgatgagctaaattaaaaacaaaaatcacataatgttttaagaaagtttactaatttgtgttgggcttcattcaaagccatcttgggccacatgcacgttggacaagcttggtttaaaggatcactctgactttggtcatgggtagggacaatgcagggagaccacataagagtccaccataataatatcaagagccaagatgaggacactgtcctgcacccctccctccatagcctatgagagctccctgaaacctattatctgtgcatgttctgcaaaatcgcctgccccaaacaattccatttcctgacctcctcttacactgcccaaactgggaaaacaaggtcaaaaataaatgacagtggttcagcttcaggcccacaggaagtgaataactcatttacatttaagaggggactgactgagaagcccctatgaatttaaataaaaggagtagtgactggggctagaagacatagggaggacagcggcagaagctctgggaaagtcatcaccctttctcttctccctttgcaaggttga

SEQ ID NO: 7422 - DNA, 340 bp, Homo sapiens
cacttcttggaccacatattcttgactatttgcaatactgacagaaaaatcttgatcttcccctcaaatctgtccctccgtaagcttttgccatcttaataaattgcgaagtggtttcaccaataaccaatcccaagagaggacttccactctgtggaggacagaagagatcatcatcactgtgtcaaccacaaggaacaggagtctgaacacttctgtccactgcgtcctcagctgcagtgttaccaattccctgagtctatgagacagaacacactcatatgcaacacgttacatgaagcaagttaattacttacagataggcagcaagaaacaaaac

SEQ ID NO: 7423 - DNA, 471 bp, Homo sapiens
aatcatttccctttcttggatttgaactgttaagttttgggaatttagggatgagtaaaacgcatactcccttcaataatctcatattctccatccctaagactttaaaaatgttaaagcaaagagatttctctcccctccagttggagatggagatgagacataacagagaaattgctgttttaaaaagagaaaaaccggccagatgctgtggctcacgcctggtaatcccagcactttgggaggctgactcaggcggatcacctgaagtcatgagttcaagaccggcctggccaacatggtgaaataccatctctacaaaaaatacaaaaattagctgggcatggtggagcaagcctgtaatcccagctacttgggaggctgagacaggagaatcacttgaacccaggaggcggaggttgcagtgaaccactggactccaggctgggcgacagagtgagattctgtctt

SEQ ID NO: 7424 - DNA, 492 bp, Homo sapiens
ccactgcactccagcatgggcaacagtgagattctgtctcaaaaaaaaaaaaaaattatagtaaataaaattacttggtaagaggatgaaattcaaaggaaaatattaaataagtatatcatatattattatttataaattattatatacataaattctcatttccaaaatggaaataatatttcctgcttcatagcattgctatgaaaattaaaggccgggcgcggtggctcatgcctgtaatcctagcactttgggaggccgaggcgggtggatcacaaggtcaggagatcgagatcatccgggctaacatggtgaaacctcgcctctactaaaaatacaaaaaaaattagccgggcgtggtggtgggtgcctgtagtcccagctactcaggaggctgaggcaggagaatgacatgaacccaggaggcggagcttacagtgagccaagatcccgccactgcactccagcctgggtgactgagcgagactc

SEQ ID NO: 7425 - DNA, 637 bp, Homo sapiens
gtacaaaatgcatttgaaactcatgcaataattatcctcagtagtatttcttacagtgagacaacaggcgatgtcagtgagggcgatcatagggcataagcctaagccataccatgcagcctttgtgccagcaaccaaatcccatgtttcctactgtgttaagtttaaaaatgcatttattatagaattgtctacatttctgaggatgtcatggagaatgcttaattttctttctctgaacttcaaaatattaaatattttcttatttatttttttgattaaagtataaattaagacaccctattgacttccgggtaaggggagtcaattgattacccagcagcacagtatttgctttttataattccctttttaaatacttgttcttaattcactggttttccttttctgtcatttttcagagtttagattgtgagtccatgttttgtctgttgtgcctataaaggaaatttgaaatctgtatcattctactataaagacacatgcacacgtatgtttattgcagcactgtttacaatagcaaagacttggaaccaaccaaaatacccacaaatgatagaccggataaagttcatattcttcacagggacatggatgaagctgggccatcatcctc

SEQ ID NO: 7426 - DNA, 636 bp, Homo sapiens
gtacaaaatgcatttgaaactcatgcaataattatcctcagtagtatttcttacagtgagacaacaggcgatgtcagtgagggcgatcatagggcataagcctaagccataccatgcagcctttgtgccagcaaccaaatcccatgtttcctactgtgttaagtttaaaaatgcatttattatagaattgtctacatttctgaggatgtcatggagaatgcttaattttctttctctgaacttcaaaatattaaatattttcttatttatttttttgattaaagtataaattaagacaccctattgacttccgggtaaggggagtcaattgattacccagcagcacagtatttgctttttataattccctttttaaatacttgttcttaattcactggttttccttttctgtcatttttcagagtttagattgtgagtccatgttttgtctgttgtgcctataaaggaaatttgaaatctgtatcattctactataaagacacatgcacacgtatgtttattgcagcactgtttacaatagcaaagacttggaaccaaccgaatactatgcagccatagaaaaggatgagttcatattcttcacagggacatggatgaagctgggccatcatcctc

SEQ ID NO: 7427 - DNA, 687 bp, Homo sapiens
gtacaaaatgcatttgaaactcatgcaataattatcctcagtagtatttcttacagtgagacaacaggcgatgtcagtgagggcgatcatagggcataagcctaagccataccatgcagcctttgtgccagcaaccaaatcccatgtttcctactgtgttaagtttaaaaatgcatttattatagaattgtctacatttctgaggatgtcatggagaatgcttaattttctttctctgaacttcaaaatattaaatattttcttatttatttttttgattaaagtataaattaagacaccctattgacttccgggtaaggggagtcaattgattacccagcagcacagtatttgctttttataattccctttttaaatacttgttcttaattcactggttttccttttctgtcatttttcagagtttagattgtgagtccatgttttgtctgttgtgcctataaaggaaatttgaaatctgtatcattctactataaagacacatgcacacgtatgtttattgcagcactgtttacaatagcaaagacttggaaccaaccaaaatacccacaaatgatagaccggataaagcgtgacacatatacaccatggaatactatgcagccatagaaaaggatgagttcatattcttcacagggacatggatgaagctgggccatcatcctc

SEQ ID NO: 7428 - DNA, 260 bp, Homo sapiens
tcctcagacaacagattggctggaggtttgatgttggacttgtcaacctccagaactgcaaaaaatttctgttacttatttctataatttatgagcacccacttgatgacagtttgtgatagcagcccaaacggactaagacagagataaggaacaagggaaagcaaatcaagtgattctgtgtagagtgtgtctttcatcttcaactcctaagtctggcatagtgtttcacatttagtaagtgaccagtcaggaagtca

SEQ ID NO: 7429 - DNA, 841 bp, Homo sapiens
tacaacagctccagttacaacagctccagttacaacagctttaaaaatattaaatctgctatagcaaatcctactcataagaatcaaatgcagaaacgggctatttggttacatggatatcaggtaggatcagggggcgtgtaacggtacgggggttgagagatggagaataaaaagatttcatgagaaacggttgtaaaagtggtaagaaaacgccccagatgagccattgataacacatgacagcagactggagaagtgagaggaaatgctaaaggttaaaaggggagggaggaaggcattctgaagtgacgccagtatccggttagagtgcgtgggataaggaatgttatgagtattaatcagtggatcaaaaggctaagcgacacatggtgacacaggaagctgtagaataaaactacatcaaaagccgtgagagtaaaagaaaagtgacaggtagtacagatagaaaactgaaaatcattctcctaccacagacctggagcccagcagggagcaattgacattcgctgaggattggcaaagaagcttttcaaatgtaacctggacagtagtactctagtagtcttcacagcaaaccatttagcaaatggtgacgctaccatcacagcttcacaaacaaggaaataatcaagctgacaatgcttcttgaaaaccccaaagctcgggttggtagagcacaccgggtttcttcttcagagctttatttgcgacactgtattcaataaattaattttgacactgattttctactttctactttttgattgttctcatttgtttccacttcatactatgattgttaaaaagtacgcacatg

SEQ ID NO: 7430 - DNA, 587 bp, Homo sapiens
  misc_feature (55)..(55): n is a, c, g, or t
  misc_feature (139)..(139): n is a, c, g, or t
gcgatagtttgctgagaatgatggtttccagcttcatccacgtccctacaaaggncatgaactcacccttttttatggctgcacagtattccatagtgtatatgaggcagctccaattctattatgtcactgacatctntctaggacttttcttacacatcctaaaggactcgacttcatatttacactaacatgagtataatatagaaatattacctctatatgggctgggcgcagtggctcacgcctgtaatcccagcaactttgtgaggccgaggcaggccgatggcttgagctcaggagtttgagatcagcctgggcaacatagtgagatgctgtgtcttgaaaaaaaaaaaaaaaaaaaaaaaaaaaatcaagagtgctagagaccggtaccatttctccccaacaatctgttattccttgaaaacattttgacatgaatcacttcatgcaaaatggcttcaaagataaacatattaaacaggaatttccagtctgtttatctgctggatgatctatatgacttcaaagttcaagtagcttctagcacaaaattcatgtttccagtccttcagtgagaatga

SEQ ID NO: 7431 - DNA, 795 bp, Homo sapiens
ttttaatgttacattaatattgactgacccaattactttattaaaaatagtggtcagttcaggtaattggggcatatagtgacatggggcaaaaaaaggatcaaattaacttaaatgtttttctagttggcccttaaattcttgagcatttaacccttcaaaaatttttgagcaactacaaaaatgttttgtaattagtttagaaagcatccttacaaaattagatccatctcagaaatatgagacgccatgtaatacaaagttttgcaacgatgtctcctcaggttgaaaacagatgtgccacaggaagacacttcttaatgtaaaagtccagagacatctgaaaatacatgatgtcataaagttgatttctagataatattacatggatttgatacatactcaatgtattccctcaaaattgagggtgttaggccgggtttggtggctcacgcctgtaatcccagcaactttgtgaggccgaggcaggccgatggcttgagctcaggagtttgagatcagcctgggcaacatagtgagatgctgtgtcttgaaaaaaaaaaaaaaaaaaaaaaaaaaaatcaagagtgctagagaccggtaccatttctccccaacaatctgttattccttgaaaacattttgacatgaatcacttcatgcaaaatggcttcaaagataaacatattaaacaggaatttccagtctgtttatctgctggatgatctatatgacttcaaagttcaagtagcttctagcacaaaattcatgtttccagtccttcagtgagaatga

SEQ ID NO: 7432 - DNA, 531 bp, Homo sapiens
ttttaatgttacattaatattgactgacccaattactttattaaaaatagtggtcagttcaggtaattggggcatatagtgacatggggcaaaaaaaggatcaaattaacttaaatgtttttctagttggcccttaaattcttgagcatttaacccttcaaaaatttttgagcaactacaaaaatgttttgtaattagtttagaaagcatccttacaaaattagatccatctcagaaatatgagacgccatgtaatacaaagttttgcaacgatgtctcctcaggttgaaaacagatgtgccacaggaagacacttcttaatgtaaaagtccagagacatctgaaaatacatgatgtcataaagttgatttctagataatattacatggatttgatacatactcaatgtattccctcaaaattgagggtgttaggccgggtttggtggctcacgcctgtaatcccagcatctcactatgttgcccaggctgatctcaaactcctgagctcaaccatccgctgcctcggcct

SEQ ID NO: 7433 - DNA, 881 bp, Homo sapiens
  misc_feature (71)..(71): n is a, c, g, or t
  misc_feature (92)..(92): n is a, c, g, or t
attcttgttatttgagtgctctttcactctcctccgccatgcccgacccggctaaatctgctcctgccccnaaaaagggctccaagaaagcngtaaccaaggcccagaaaaaggacggcaagaagcgcaagcgcagccgcaaagagagttactctatctacgtgtacaaggtgctgaagcaagtccaccccgacaccggcatctcatcgaaggccatgggcatcatgaactccttcgtcaatgacatctttgagcgcatcgctggcgaggcttcccgcctggcgcattacaacaagcgctcgaccatcacctccagggagatccagacggccgtgcgcctgctgctgcccggggagctggccaagcacgccgtgtccgagggcacaaaggccgtcaccaagtacaccagctccaagtgagctctcgcagctgccagcaatccaaaggctcttttcatagccactcacgcttccagagaaagagcctgtgcattttgcttgtagtcttttgggtggactccggccggcctccattaggagggaagacggcgggaaaagtacagccgtctctgtgtacctgcaaccaccttcgcccagctccaaggaccaaggaaagatggtttctctcttctatggaatcattgcacccatgctgaatccccttatatatacacttaggaacaaggaggtaaaggaaggctttaaaaggttggttgcaagagtcttcttaatcaagaaataagaaatatgcaaatgataagctttgctaaagacaaaatgtttacttagcttactaacttctctgtaagttgccctatttttgttgttactgtagagaacaatgtaaactccctcaaataaaatttccttgatgaagagcta

SEQ ID NO: 7434 - DNA, 2113 bp, Homo sapiens
gagacagggtctcactctgttgcccaaaacggggtaggtacagtggcatgctcacggctcactgcaacctccacctcccggggcttaagcaatccttccacctcagccttctaagtagctgggactacaggcatgcaccaacacacctggctaatttttgtattttttttgttgagacaggtttttcccatgttgcccaggctgatcttgaactcctgggctcaagtgatctgcccatctcggcctcccaaagtgctgggattataggcatgagcctccaggcctgccccaaagatttttaatccacaatttaaggtatgagaaacaaacaaagtggtgtgtatgcagcaagccttgtcactggacaactgaagttgccgcaaagtcaaagcaagtcagtaccctcctgagccagcctttctatgatttacagcaatagtatcatactcaatgctccctagtgacccctccagcttggttaaaatttcacaatagatatatgtgcaaatttaaagaaagtaaagatgttccctttgtacaaaagcctaataaagcaatttctgaaaaaggtgttgttgttgttgttttttagcattggcaaggaactaaaaattctgttctaagcttcacctttcataaagtaatcctctcatgctctttaatcctcaatgttgtaaggtaagtattaaacctactttataggtgaagaactaaggctctgatattaacttgttcaaagacctagccattgagcagaagctcaagaactcgaatttaaattccctttaagtctctattatggggtggtggggatgtagagggggttggaggccgggagactattcgcattctgtatcagaggaaaacgaaagaaaaagagaccaaagctttgaagacttttaaatccaaccctattgtgggcacattccttgtatactgagggcaatggagctacagagcattaacaaatactcatcttcccagatttttttccccatattttatgagctatatttttcctgatatgtttatctttgaagactctttaaaattaggccctattccataatttctatacaacaaaattatgtcctcctgcctacttttaattgaatttaagtctgcgcctgttgtgatgcttctgtgataatccttttgctgaatggcgtaagatctctactaagatccatttggcttaaacctaataaacactagtgaacacatccttaaatgacttttgtttatttcctttaagtaacacttccaaaaaaacaaattcaaggcaattcaatattcagcattagctagacttatgagccattactgaaatttctactgactttatcaaattttttcatggaatctcccaaatgcctatactcacgcataactgttaacacggcatttggtactaaattctcacacataagctttattatattatttaaggtattcttattcccaagaattactatttcaaagaaaaccaagttggtcactttaagcaactatttgaataaatgaaaaactgaagtaattctcaggtgctttgagagttctctgtttaatttaaaaacgttttgggggagaagtaaaatagtggcctttgaaaaaatatgctgacacaagacatattgaattttgtggttttaaaaaattaacaaataatgaacttggcattttattaaatgcatcgaaaagggtcaagttatttttaatagaaaatccataattctattaaatggttgagaaattagtcacatcaatagacttctttcatttctgagcccatcttctgtactgctacaagttcctttggcaatgaccactttgctgtaaacattcttagaaaagtaggaattaggcttggcgcggtggctcacgcatgtaatcccagcactttgggaggccgaggctggtggatcacgaggtcaggagatcgagaccatcctggccaacacggtgaaaccctgtatctactaaaaacacaaaaaattagccaggcgtggtggcgggcgcctgtagtcccagcaacttaggaggctaaggcaggagaatggcgtgaacctgggaggcggagcttgcagtgagccgagattgcgccactgcactc

SEQ ID NO: 7435 - DNA, 554 bp, Homo sapiens
ttttttttttttgagacaaggtctggctctatctcccaggctacaatgcagtggcatgatgccactctctgctcactgcaagctccacctcccaggctcaaaccaccctttcagactcaagccatcctcccacctaagcctcccaagtggctgggacaacaggtgcacaccaccatgcccagctaatttttgtatttttttgtagacacagggtttcaccatgttgcccaggctagtcttgaactcatgagctcaagcgatctgcccgcctcagcctcccaaagtgctgggattataggcttgagccagcacacttagcctaaaatactgtaaattttatttgcacaattctttcaagcagcagctaggttttaaaaccaccactgggatattcttttctacagacattcccttctatacacctctgtattaagctagacaatttccttggacaaaaatttcatagcatgttttatttttcatttcctttttaacatacatacacgattacatcattgttattgtcgacgcggccgcgaatttagtagtagtag

SEQ ID NO: 7436 - DNA, 327 bp, Homo sapiens
ctgtttcaataggactgaataaagccaaggaaattagattttaaggctaattgctataatgagaagagacaagtatagaacgtgaactagaaatgaaattaagtgcaaaggtttctatatacaggtgcacctcaatttccagaaactcagaaggtaaaagtgatggtttaaaaacgaaaaagaatataatttctattcatttttaaaaatctggcaacaccatttcaagagaagatccattttagctaacgttttacaatcagctaaatgtctaaacatttgagatatcatttactattaaaagtgaaccaaaatgtaacataaatt

SEQ ID NO: 7437 - DNA, 366 bp, Homo sapiens
tgatatatattatactaattttctattaacatgtaacaaattcccataaacttaacaacttaaaaccacatttattaatcagcttatattactgtaggttagaagtcctgcataggcactttgggaggccaaggcaggaggtttgcttgagctcaggagttcaagatgcgcctgggcaacatagtgagaccccatccctactaaaaatcaaaaaaattagtcaggcatggtggtacatgcctatagtcctagctacttggaggctgaggcaggaggatcacttgaacccatggggctgaggctgcactgagtcatggtcatgccactgcactccagcctgggtgagagatgagaccagtctcaaaa

SEQ ID NO: 7438 - DNA, 491 bp, Homo sapiens
gctttgcgccagtaattcttttgccattaagcggttgatgtcattctttgaatgagtgacagtaattccccacctcagggtgggctgcgggggagattcagttggaaaagtaacccatgaggttttgtgcctctgggggtcctgaggccccacccgtgcctgggattctctaagacaaaggacaagtcttaaagccttacagcatcttaagtcttagatcacatttagagagacccggtacaggtggaacagtgcaaccctcagaattctgcactggcccttcaagaaggcagttgtgggctctttggacccttgacggggatctgtcctctgtcctcctaagcacaaagatgggaattcttcccattgcctgtttctctccccatctcggcttctacacaatgcaaagtggcccgctaactagagtccgtgttcagttttgaatacatcaaccaattattttgggaagaaaagaatctgccaaagaaact

SEQ ID NO: 7439 - DNA, 518 bp, Homo sapiens
gttctgtttttttgtggaaaaggggaaactgatgggctgatttttttgtttctgtttttacatcatagataatcagagttatttttcattacttatcattggtagacttcttactagtttgatccatgctatagtctgaatattgcgtcccccgcccctccattttatatgttgaaatcctaacccctaaactgatggtattaggaggtcattcctttgggaggcgattaggtcatgatggcagagccttcatgaatgggattagtggccttaaaaaggaggcctgagagagaccctcactccttccactatatgaagacacagcaagaagtcaccctctctgaactagaaagaagacacacacacacacagacgtggaatctgctgttgccttgaacttcctagcccccagactataggaaataaaaatttttttttttttttttttgagacagagcctcactctgtcacccaggctggagtgcactggcatgatcttggctgattgcaacctccac

SEQ ID NO: 7440 - DNA, 501 bp, Homo sapiens
tgcccgccttggtctcccaaagtgttgggattacaggcatgagccaccgtgcccagcctgaacatagtttaatggtacttcaaggctaataaggaaagccccttgctccatcctttcctattcctcagtcccatcccaagagacattcagccttcagttttttctagctcggttctttcagccttcagtttttggttttaggtttctaaataatatgattatacagccatttattttttaggtgtttgtcaacttactattaagacaggtgaaaatttcttttattgtttcacatccttctaatattattttggttagatcatgtacctgtttgcatagctgtgatcatacttgtatgttcactcatgaattaatttaatgtgcttacattttcattctcatacaacgttttgtcttggagttaatgctcttttttttggctttttatgcacatcattgattcttcccaaacagtcccaaataaattatgtcacaactttt

SEQ ID NO: 7441 - DNA, 740 bp, Homo sapiens
agcgggcctccaccgccttcttccaggaggaggggccgtgcggcgcctgcccgggggccctcaggccgcaggcgggcgcgagcttcagggaacttagggggctcccgcctccccggccacgcgagcgggaacagtctcctccactcggagcgattatagatccagactcctgtgcctgaccactgcccatggccaactctctgctgatgactggacttgactacacaagttgttggccatcttaaaaccactcaaagttgacggtctcctctcctgcctcctgcggcttccattaccatggcagagactgtggtgtctgaggtggtgtagcgtactgaagcaaggctgtcttgaagaagaggagacaactcacaattctaccacctttgttgacctcttcttctcccccagcttattgctgtagaggctacctgagctcattgtccctggagatggaccaaatagaagaataagcagtgcctgtgtggtgagcttcaagaggcatctgttctctggggagtgggtgggtggtaaagcaaagacgggagatgtgtatattagctatccattactgtataattaattatacacaaaactaaactatacactaaactaaaacttcacagcttaaaacaggaaatatgtattatctcacacaatttctgagagtcaggaatctgaaaatggcttagctagtttggttctggctcagggtgacctatggagttgcagccaagatg

SEQ ID NO: 7442 - DNA, 935 bp, Homo sapiens
gaaagaacctgtttaaatttccatgccaatttgcaacccccatactgtgccagattatagatccagactcctgtgcctgaccactgcccatggccaactctctgctgatgactggacttgactacacaagttgttgggtactttgactagaacaccaaccaagtcattggaaatataatgctttgttctttctagctccaagatatgaacatgtgacaacccaaacaaacaaaatcccaacaaggttgtcagatatgcaaattacagttgacccttgaacaacagagagggtagaggtgctgatcactggcacagttgaaaattcaaaagttttgactcccctaaaacttaattactaataacctactgttgactagaagcctactgataatataaacgatttattaacacatattttatatgttatatgtattaggtactgtattataataaagtaagctagagcaaagaaaatgttatggataaaatcataagaaagagaaaagatatttactctccattgaatagaaatggctcatcataaagatcttcattctcaccatcttcaaattgggtaggctgaagaggagcaataagagaaggggttggtcttgccatctcaggtgtggcagagacggaaaacaatccacgtataaatatggacccatgtagttcaaacctgtgttgttcaaaggtcaactgtatttactttaaattacttgtctgacctgagattttcctgaccataatccaagagattgacacctttctaaagtttgttcttatgttttccaaaatgacaacttgttttccagaagttagcagccaccatgttttaagacagaaacagcctgaggttctcccaaggtctattgagcataagagttttttgccttctagtaaaataaacccatattcgcagagtgtctggacca

SEQ ID NO: 7443 - DNA, 640 bp, Homo sapiens
agcgggcctccaccgccttcttccaggaggaggggccgtgcggcgcctgcccgggggccctcaggccgcaggcgggcgcgagcttcagggaacttagggggctcccgcctccccggccacgcgagcgggaacagtctcctccactcggagcggcgccatcttcagctctgagtcaccagggctggaaaaatactagatgcgctactcgtggactcgtgaatacactcgtgaatacaggccatttcctgtacctacagccacccgctccactcatcatgccttacctggatgatgcagaagtccctggaaacagaaggtctcacccttctttatctttctcatggctttccaaggctctttatcatgttactttcctgctcagaattctttaatgacttgcctcaatgaccagatacatgtgatctacagtcagccttccagcctcatcattcctcttccatttcctccccagaaacactgtactttatgaagctcctccaagacgaacctgttggagaatgtactccttggaaataaggaagaaagaggatccagggaacaggagtttcaccacagaggagcaggaaagggaattcccagtatgatggcaagttgctaaattaaatgttttgcccattat

SEQ ID NO: 7444 - DNA, 722 bp, Homo sapiens
agcgggcctccaccgccttcttccaggaggaggggccgtgcggcgcctgcccgggggccctcaggccgcaggcgggcgcgagcttcagggaacttagggggctcccgcctccccggccacgcgagcgggaacagtctcctccactcggagcgattatagatccagactcctgtgcctgaccactgcccatggccaactctctgctgatgactggacttgactacacaagttgttggccatcttaaaaccactcaaagttgacggtctcctctcctgcctcctgcggcttccattaccatggcagagactgtggtgtctgaggtggtgtagcgtactgaagcaaggctgtcttgaagaagaggagacaactcacaattctaccacctttgttgacctcttcttctcccccagcttattgctgtagaggctacctgagctcattgtccctggagatggaccaaatagaagaataagcagtgcctgtgtgctgaaggtaaagaaatttcatgtggtggattcctacaaaagaaaaagctgcaaaagagtcaaccaggaaaggtgctagacacacatccaatggctgctgagtgatgaatgagaaagaaaccttcggtgtagtaagccattgaaatttgggggaaatttgtaatagctgttgctgtaaacctccgcactgcaaaacacacacatcctagataattaaaagacaacttctaccagat

SEQ ID NO: 7445 - DNA, 567 bp, Homo sapiens
gtggcaattgtgaatgggattgcctctctgatttgtctctaggcttggctgttgttgatataaaggaatgcagctaaccagggagatggaaaatctctacagtgagagccacaaaacacttctcaaagaaatcagagatgacacagacaaatggaaaaacattacatgcttatggataggaagaatcaatatcattaaaatggccatactgcccaaagcaatttacagattgaatgttatttctatcaaactaccaatgacatttttcacagaactagaaagaactattttaaaattcatatggaaccaaaaaagagtctgaatagccaaggtaaccctaagcaaaaagaacaaagctggagacatcccagtatttgacttcaaactatactacaggactacggtaaccaaaacagcatggtacttttttacaaaaggagacacatagaccaatggaacagaatagagagcccagaaataatgccagacacctacaaccacatgatctttgacaaagctgacaaaaactagcaatggggaaaaagctccctcttcagtaaatggtgc

SEQ ID NO: 7446 - DNA, 548 bp, Homo sapiens
agcgggcctccaccgccttcttccaggaggaggggccgtgcggcgcctgcccgggggccctcaggccgcaggcgggcgcgagcttcagggaacttagggggctcccgcctccccggccacgcgagcgggaacagtctcctccactcggagcggcgccatcttcagctctgagtcaccagggctggaaaaatactagatgcgctactcgtggactcgtgaatacactcgtgaatacaggccatttcctgtacctacagccacccgcttttcttctcccagtgacctctattaacagagcctacatggaaccagccggcaaagacaagttccactgtcacaactagagaaaagaggatgggtttggaattgaaaggcttggctgttgttgatataaaggaatgcagctaaccagggagatggaaaatctctacagtgagagccacaaaacacttctcaaagaaatcagagatgacacagacaaatggaaaaacattacatgcttatggataggaagaatcaatatcattaaaatggccatactgcccaaa

SEQ ID NO: 7447 - DNA, 764 bp, Homo sapiens
agcgggcctccaccgccttcttccaggaggaggggccgtgcggcgcctgcccgggggccctcaggccgcaggcgggcgcgagcttcagggaacttagggggctcccgcctccccggccacgcgagcgggaacagtctcctccactcggagcggcgccatcttcagctctgagtcaccagggctggaaaaatactagatgcgctactcgtggactcgtgaatacactcgtgaatacaggccatttcctgtacctacagccacccgctccactcatcatgccttacctggatgatgcagaagtccctggaaacagaaggtctcacccttctttatctttctcatggctttccaaggctctttatcatgttactttcctgctcagaattctttaatgacttgcctcaatgaccagatacatgtgatctacagtcagccttccagcctcatcattcctcttccatttcctccccagaaacactgtactttatgaagctcctccaagactgctctctcagcagctgggacccggtcttggaatcttagtgtcaactatgatgaatcaccaacactaacaaaaacattatcttttattgggttaaatagtttctactcttcccaagactgggaactgatgtaacaggcttcgtgctttcttcccaacaaattgattctgtgtggtcagctcctgtcatgatgatagaaccccctgtattgatttatacttaggggtatatcaatgtcagtctaaacttgtcctacctact

SEQ ID NO: 7448 - DNA, 429 bp, Homo sapiens
agggacccagataagtagggcttgaagtgaatccccagcaaactgcagcagccctacagaagaggtgcctgactgttcaaaggaaaacagaaagcaacaacaacatcaaccaaaaagtccccacgaaaacctcatctaaaggtcagcagcctcaaagatcaaaatgagacaaactcatgaagatgagaaaggaatgaaaaacccctcacaactcaaaaggccagagtggcttgtttactccaaatgatcacaacacctctacagcaagggcacagtgctgggaggaggttgagatggatgaattgacagaagtaggcttcagaaggtgggtagtagcaaacttcactgagctaaaggagcacgttctaacccaacacattggaacgaatcccagaacttaaagattggttctctaaaataagacagaca

SEQ ID NO: 7449 - DNA, 2664 bp, Homo sapiens
gggcgagcgcgacgcgggagccggggcggcgcgggcagcgcgggccggccgggctgtgcggggcgagcggcggcgcggcgggggccttcggccggggcggcagctgggcgccggcgggagctagcagcgtctgcagccgcgcccggccagccggcgcgctccggctcggccatggagctgccagctgttggcgagcacgtcttcgcggtggagagcatcgagaagaagcggatccgcaagggcagagtggagtatctggtgaaatggagaggctggtcgcccaaatataacacgtgggaaccggaggagaacatcctggaccccaggctgctgatcgccttccagaacagggaacggcaggagcagctgatgggatatcggaagagagggccgaagcccaaaccgctagtggtgcaggtgcctacctttgcccgtcgttccaatgtcctgaccggcctccaggactcctccactgacaaccgtgccaagctggatttgggcgcgcaggggaagggccaggggcatcagtacgagctcaacagcaagaagcaccaccagtaccagccgcacagcaaggagcgggcgggcaagcccccgccgccgggcaagagcggcaagtactactaccagctcaacagcaagaagcaccacccctaccagcccgaccccaaaatgtacgacctgcagtaccagggcggccacaaggaggcgcccagccccacctgcccggacctgggggccaagagccacccgcccgacaagtgggcgcaaggtgcgggggccaaaggctacctgggggcggtgaagcccctggccggtgcggcgggtgctccaggcaaaggctccgagaagggcccccccaacggaatgatgccggcccccaaagaggctgtgacgggcaacgggattgggggcaagatgaagatagtcaagaacaagaacaagaacggacgcatcgtgatcgtgatgagcaaatacatggagaacggcatgcaggcggtgaagatcaagtccggcgaggtggcagagggggaggctcgctcccccagccacaagaagcgggcagccgacgagcgccaccctcctgccgacaggacttttaaaaaggcggcgggcgcagaggagaagaaggtggaggcgccgcccaagaggagggaggaggaggtgtccggggttagcgatccgcagccccaggatgccggctcccgcaagctgtccccgaccaaggaggcctttggagagcagcccctgcagctcaccaccaagcccgacctgcttgcctgggacccggcccggaacacgcacccgccctcacaccacccgcacccgcacccccatcaccaccaccaccaccaccaccaccaccaccacgccgtcggcctgaatctctcccacgtgcgcaagcgctgcctctccgagacccacggcgagcgcgagccctgcaagaagcggctgactgcgcgcagcatcagcacccccacctgcctggggggcagcccagccgctgagcgcccggccgacctgccaccagccgccgccctcccgcagcccgaggtcatcctgctagactcagacctggatgaacccatagacttgcgctcggtcaagacgcgcagcgaggccggggagccgcccagctccctccaggtgaagcccgagacaccggcgtcggcggcggtggcggtggcggcggcagcggcacccaccacgacggcggagaagcctccagccgaggcccaggacgaacctgcagagtcgctgagcgagttcaagcccttctttgggaatataattatcaccgacgtcaccgcgaactgcctcaccgttactttcaaggagtacgtgacggtgtagccggagggcgtcggaaggggaagcgccattcccgcgggggggcggggagctgagcacctggggcctcggggcgggctcccctctcgccaacccgccaaccgcgagagacccaggctggcccccagggtgaggacgcccggagcggaggtaaccatgttccccctgcggcggctgtcagacctgggcggaggccccttccacgcggtgccggcggggctcgccctctcctgcccttccccgctggagatggacccccggaacggacagggcagctctgcgcccggcctcagagttctagtattatattttaaccgtgctaacttgtcaagtgctgactctactcccgtttgtacgtggtgttattattgaaatgtattgtttgagctcaaaaggcccgaccaccccccttcgggctgctatatatatatttatttgtaggtatttatatattgaaatataaaaacctagatttatggagtttcctctagatcatgttatattctatatcagacaaactattttcttttgacctttcttcccctccatccagtatttcggttgatttcattttctcccctctcttccccttccacgaactgcaataccagtaaccttggtatatattttttgatactgtacacatggatgtcttgtttctatgtgcaaaaaaaaaaaaaaaaaaaagtttgttaaaaggctacacgagctctctagaaactgctgctactagaaatgtctaaactataagcttccaactattacctgcttgaatgtaaatattaaatggagatgttgaaggtgcaaaaaaac

SEQ ID NO: 7450 - DNA, 2929 bp, Homo sapiens
gggcgagcgcgacgcgggagccggggcggcgcgggcagcgcgggccggccgggctgtgcggggcgagcggcggcgcggcgggggccttcggccggggcggcagctgggcgccggcgggagctagcagcgtctgcagccgcgcccggccagccggcgcgctccggctcggccatggagctgccagctgttggcgagcacgtcttcgcggtggagagcatcgagaagaagcggatccgcaagggcagagtggagtatctggtgaaatggagaggctggtcgcccaaatataacacgtgggaaccggaggagaacatcctggaccccaggctgctgatcgccttccagaacagggaacggcaggagcagctgatgggatatcggaagagagggccgaagcccaaaccgctagtggtgcaggtgcctacctttgcccgtcgttccaatgtcctgaccggcctccaggactcctccactgacaaccgtgccaagctggatttgggcgcgcaggggaagggccaggggcatcagtacgagctcaacagcaagaagcaccaccagtaccagccgcacagcaaggagcgggcgggcaagcccccgccgccgggcaagagcggcaagtactactaccagctcaacagcaagaagcaccacccctaccagcccgaccccaaaatgtacgacctgcagtaccagggcggccacaaggaggcgcccagccccacctgcccggacctgggggccaagagccacccgcccgacaagtgggcgcaaggtgcgggggccaaaggctacctgggggcggtgaagcccctggccggtgcggcgggtgctccaggcaaaggctccgagaagggcccccccaacggaatgatgccggcccccaaagaggctgtgacgggcaacgggattgggggcaagatgaagatagtcaagaacaagaacaagaacggacgcatcgtgatcgtgatgagcaaatacatggagaacggcatgcaggcggtgaagatcaagtccggcgaggtggcagagggggaggctcgctcccccagccacaagaagcgggcagccgacgagcgccaccctcctgccgacaggacttttaaaaaggcggcgggcgcagaggagaagaaggtggaggcgccgcccaagaggagggaggaggaggtgtccggggttagcgatccgcagccccaggatgccggctcccgcaagctgtccccgaccaaggaggcctttggagagcagcccctgcagctcaccaccaagcccgacctgcttgcctgggacccggcccggaacacgcacccgccctcacaccacccgcacccgcacccccatcaccaccaccaccaccaccaccaccaccaccacgccgtcggcctgaatctctcccacgtgcgcaagcgctgcctctccgagacccacggcgagcgcgagccctgcaagaagcggctgactgcgcgcagcatcagcacccccacctgcctggggggcagcccagccgctgagcgcccggccgacctgccaccagccgccgccctcccgcagcccgaggtcatcctgctagactcagacctggatgaacccatagacttgcgctcggtcaagacgcgcagcgaggccggggagccgcccagctccctccaggtgaagcccgagacaccggcgtcggcggcggtggcggtggcggcggcagcggcacccaccacgacggcggagaagcctccagccgaggcccaggacgaacctgcagagtcgctgagcgagttcaagcccttctttgggaatataattatcaccgacgtcaccgcgaactgcctcaccgttactttcaaggagtacgtgacggtgtagccggagggcgtcggaaggggaagcgccattcccgcgggggggcggggagctgagcacctggggcctcggggcgggctcccctctcgccaacccgccaaccgcgagagacccaggctggcccccagggtgaggacgcccggagcggaggtaaccatgttccccctgcggcggctgtcagacctgggcggaggccccttccacgcggtgccggcggggctcgccctctcctgcccttccccgctggagatggacccccggaacggacagggcagctctgcgcccggcctcagagttctagtattatattttaaccgtgctaacttgtcaagtgctgactctactcccgtttgtacgtggtgttattattgaaatgtattgtttgagctcaaaaggcccgaccaccccccttcgggctgctatatatatatttatttgtaggtatttatatattgaaatataaaaacctagatttatggagtttcctctagatcatgttatattctatatcagacaaactattttcttttgacctttcttcccctccatccagtatttcggttgatttcattttctcccctctcttccccttccacgaactgcaataccagtaaccttggtatatattttttgatactgtacacatggatgtcttgtttctatgtgcaaaaaaaaaaaaaaaaaaaagtttgttaaaaggctacacgagctctctagaaactgctgctactagaaatgtctaaactataagcttccaactattacctgcttgaatggtacatctcaggggcccgcggtgagaggcgccaacaacgacacgacatcacacacaaacaccacctgtgtgtggccgcaccgtcgcccctgaaaaaaacgttcagaacacaccttcgggtgtggccccggcggcccacatggtaagcgagaaccgtggcaccacagggggctcaaaaaagaacactgggcaccgaacaacggcgtggtctccaccaaaaaaacagcccgggggcaccggccgctctgaaccaccagaggggcccgcagccacgggcacacacgggccacgaagcaaaaatga

SEQ ID NO: 7451 - DNA, 1853 bp, Homo sapiens
gggcgagcgcgacgcgggagccggggcggcgcgggcagcgcgggccggccgggctgtgcggggcgagcggcggcgcggcgggggccttcggccggggcggcagctgggcgccggcgggagctagcagcgtctgcagccgcgcccggccagccggcgcgctccggctcggccatggagctgccagctgttggcgagcacgtcttcgcggtggagagcatcgagaagaagcggatccgcaagggcagagtggagtatctggtgaaatggagaggctggtcgcccaaatataacacgtgggaaccggaggagaacatcctggaccccaggctgctgatcgccttccagaacagggaacggcaggagcagctgatgggatatcggaagagagggccgaagcccaaaccgctagtggtgcaggtgcctacctttgcccgtcgttccaatgtcctgaccggcctccaggactcctccactgacaaccgtgccaagctggatttgggcgcgcaggggaagggccaggggcatcagtacgagctcaacagcaagaagcaccaccacacgccgtcggcctgaatctctcccacgtgcgcaagcgctgcctctccgagacccacggcgagcgcgagccctgcaagaagcggctgactgcgcgcagcatcagcacccccacctgcctggggggcagcccagccgctgagcgcccggccgacctgccaccagccgccgccctcccgcagcccgaggtcatcctgctagactcagacctggatgaacccatagacttgcgctcggtcaagacgcgcagcgaggccggggagccgcccagctccctccaggtgaagcccgagacaccggcgtcggcggcggtggcggtggcggcggcagcggcacccaccacgacggcggagaagcctccagccgaggcccaggacgaacctgcagagtcgctgagcgagttcaagcccttctttgggaatataattatcaccgacgtcaccgcgaactgcctcaccgttactttcaaggagtacgtgacggtgtagccggagggcgtcggaaggggaagcgccattcccgcgggggggcggggagctgagcacctggggcctcggggcgggctcccctctcgccaacccgccaaccgcgagagacccaggctggcccccagggtgaggacgcccggagcggaggtaaccatgttccccctgcggcggctgtcagacctgggcggaggccccttccacgcggtgccggcggggctcgccctctcctgcccttccccgctggagatggacccccggaacggacagggcagctctgcgcccggcctcagagttctagtattatattttaaccgtgctaacttgtcaagtgctgactctactcccgtttgtacgtggtgttattattgaaatgtattgtttgagctcaaaaggcccgaccaccccccttcgggctgctatatatatatttatttgtaggtatttatatattgaaatataaaaacctagatttatggagtttcctctagatcatgttatattctatatcagacaaactattttcttttgacctttcttcccctccatccagtatttcggttgatttcattttctcccctctcttccccttccacgaactgcaataccagtaaccttggtatatattttttgatactgtacacatggatgtcttgtttctatgtgcaaaaaaaaaaaaaaaaaaaagtttgttaaaaggctacacgagctctctagaaactgctgctactagaaatgtctaaactataagcttccaactattacctgcttgaatgtaaatattaaatggagatgttgaaggtgcaaaaaaac

SEQ ID NO: 7452 - DNA, 2672 bp, Homo sapiens
cgtgtccactttgcttcgcacagagccacaggcccaaggccgtgggcgggagggccagaggtgcagccctgagcttctgcctcctgagcacagaggtggggcttgggggggtgctggttcgggtgtgggcatcaaagtgggggagccctttgcccaggacctcttgggcagaggagggttggtgtgagggttaagggcgcagaggcctgacctgccctgaactcttgattcctgtgtccggccagccctacctgatgctctctgaagcgggggggggggcttcacagaagattccggaataagcgggtagggggcgaccctgaggctaacagcactgccctctgttccctcccacccaggaacggcaggagcagctgatgggatatcggaagagagggccgaagcccaaaccgctagtggtgcaggtgcctacctttgcccgtcgttccaatgtcctgaccggcctccaggactcctccactgacaaccgtgccaagctggatttgggcgcgcaggggaagggccaggggcatcagtacgagctcaacagcaagaagcaccaccagtaccagccgcacagcaaggagcgggcgggcaagcccccgccgccgggcaagagcggcaagtactactaccagctcaacagcaagaagcaccacccctaccagcccgaccccaaaatgtacgacctgcagtaccagggcggccacaaggaggcgcccagccccacctgcccggacctgggggccaagagccacccgcccgacaagtgggcgcaaggtgcgggggccaaaggctacctgggggcggtgaagcccctggccggtgcggcgggtgctccaggcaaaggctccgagaagggcccccccaacggaatgatgccggcccccaaagaggctgtgacgggcaacgggattgggggcaagatgaagatagtcaagaacaagaacaagaacggacgcatcgtgatcgtgatgagcaaatacatggagaacggcatgcaggcggtgaagatcaagtccggcgaggtggcagagggggaggctcgctcccccagccacaagaagcgggcagccgacgagcgccaccctcctgccgacaggacttttaaaaaggcggcgggcgcagaggagaagaaggtggaggcgccgcccaagaggagggaggaggaggtgtccggggttagcgatccgcagccccaggatgccggctcccgcaagctgtccccgaccaaggaggcctttggagagcagcccctgcagctcaccaccaagcccgacctgcttgcctgggacccggcccggaacacgcacccgccctcacaccacccgcacccgcacccccatcaccaccaccaccaccaccaccaccaccaccacgccgtcggcctgaatctctcccacgtgcgcaagcgctgcctctccgagacccacggcgagcgcgagccctgcaagaagcggctgactgcgcgcagcatcagcacccccacctgcctggggggcagcccagccgctgagcgcccggccgacctgccaccagccgccgccctcccgcagcccgaggtcatcctgctagactcagacctggatgaacccatagacttgcgctcggtcaagacgcgcagcgaggccggggagccgcccagctccctccaggtgaagcccgagacaccggcgtcggcggcggtggcggtggcggcggcagcggcacccaccacgacggcggagaagcctccagccgaggcccaggacgaacctgcagagtcgctgagcgagttcaagcccttctttgggaatataattatcaccgacgtcaccgcgaactgcctcaccgttactttcaaggagtacgtgacggtgtagccggagggcgtcggaaggggaagcgccattcccgcgggggggcggggagctgagcacctggggcctcggggcgggctcccctctcgccaacccgccaaccgcgagagacccaggctggcccccagggtgaggacgcccggagcggaggtaaccatgttccccctgcggcggctgtcagacctgggcggaggccccttccacgcggtgccggcggggctcgccctctcctgcccttccccgctggagatggacccccggaacggacagggcagctctgcgcccggcctcagagttctagtattatattttaaccgtgctaacttgtcaagtgctgactctactcccgtttgtacgtggtgttattattgaaatgtattgtttgagctcaaaaggcccgaccaccccccttcgggctgctatatatatatttatttgtaggtatttatatattgaaatataaaaacctagatttatggagtttcctctagatcatgttatattctatatcagacaaactattttcttttgacctttcttcccctccatccagtatttcggttgatttcattttctcccctctcttccccttccacgaactgcaataccagtaaccttggtatatattttttgatactgtacacatggatgtcttgtttctatgtgcaaaaaaaaaaaaaaaaaaaagtttgttaaaaggctacacgagctctctagaaactgctgctactagaaatgtctaaactataagcttccaactattacctgcttgaatgtaaatattaaatggagatgttgaaggtgcaaaaaaac

SEQ ID NO: 7453 - DNA, 403 bp, Homo sapiens
caggcaggtttgtacaggttttgctgcaaaaatgaggagtgtgtgtgcatgtgcatactgttttttccttcagtagcagtaatattttacccttaaaaatgcctcttgaggctgggagcggtggcttatgcctgtaattccagcactttgggaggctgaggcagatggatcacttgaggtcaggagttcgagaccagcctggccaacatggtgaaaccccgtctctactgaaaatacaaaatttagccgagtgtggtggcgggcgcctgtggtcccagctactcgggaggctgaggcaggagaatggcatgaactcgggaggcagaggggcggagggtgcagtgagccgagattgcaccactgcactccagcctgggcaatagagtgagactcagtctcaaaa

SEQ ID NO: 7454 - DNA, 269 bp, Homo sapiens
gaaagtttgctgcgtagggatagggagaccgggccggattgcggggagtgagcaggttcagcagtgacggcattcttaagagtcctgcccaagtgagggacttggggtgtgggacagagtggcccccagctccagccgccggctcggactcggtctctgacccccaactcggtcccctagtccggccccggctccgggccccccaaccctcgctccggccggcccggtccccacaccagcccatgccgaccgcacccagggccctggcc

SEQ ID NO: 7455 - DNA, 1260 bp, Homo sapiens
ggctgtaccggtctggagttgtaagggatcttccctagaccctcttctctcccttcggcttctctctttcggccggcgccgccagttcctggggcacacccagaggtccccttctcgccgccgcctgcaactgcgagggtagcccggggccgcttggagtcgcccggacctgagaggctgctgcactgggcctcagccagccctccggatgctggtgctgccatccccctgccctcagcctctggcattttcctccgttgagaccatggagggccctccccgtcggacttgccgctccccagaacctggaccttcctcctccatcggatctccccaggcttcatctcctccaaggcccaaccactacctgcttattgacactcagggtgtcccctacacagtgctggtggacgaggagtcacagagggagccaggggccagtggggctccaggccagaaaaagtgctacagctgccccgtgtgctcaagggtcttcgagtacatgtcctaccttcagcgacacagcatcacccactcggaggtaaagcccttcgagtgtgacatctgtgggaaggcattcaagcgcgccagccacttggcacggcaccattccattcacctggcgggtggtgggcggccccacggctgcccgctctgccctcgccgcttccgggatgcgggtgagctggcccagcacagccgggtgcactctggggaacgcccgtttcagtgtccacactgccctcgccgctttatggagcagaacacactgcagaaacacacgcggtggaagcatccatgagccgggctgccgggtgccccaggtaccacaggactttgcagggagcctggactcctgtccagacacctggtgagagcctgaggctggtgttcagggccctggacacagacacagagcagccgcatctcaaaggcagagccctgcctgaaggaggaatccgtgagtaatcttcaggtcctccgtgttctggagctgagatgggaatgagcccctacacagaatggagtcctctagcctaaagatatcagctgttccatggcagagccttgactggatggaggtggggagtgtggtgtgtaaagtctctggcctcataaaaggtggctgtgggtcgtcaggaatctgcgccatcttcctggggcttctgcgctgttgttggggaagggaccccagtcctgccttccaccccccaaccaggcctgagactgatcaaacaataaacacgtttcccactctga

SEQ ID NO: 7456 - DNA, 1529 bp, Homo sapiens
  misc_feature (1303)..(1303): n is a, c, g, or t
ggtgtgtgtttctggccggagccgtttcgcgacggcccgggcgccccgccccaaccttccttccctagaccctcttctctcccttcggcttctctctttcggccggcgccgccagttcctggggcacacccagaggtccccttctcgccgccgcctgcaactgcgagggtagcccggggccgcttggagtcgcccggacctgagaggctgctgcactgggcctcagccagccctccggatgctggtgctgccatccccctgccctcagcctctggcattttcctccgttgagaccatggagggccctccccgtcggacttgccgctccccagaacctggaccttcctcctccatcggatctccccaggcttcatctcctccaaggcccaaccactacctgcttattgacactcagggtgtcccctacacagtgctggtggacgaggagtcacagagggagccaggggccagtggggctccaggccagaaaaagtgctacagctgccccgtgtgctcaagggtcttcgagtacatgtcctaccttcagcgacacagcatcacccactcggaggtaaagcccttcgagtgtgacatctgtgggaaggcattcaagcgcgccagccacttggcacggcaccattccattcacctggcgggtggtgggcggccccacggctgcccgctctgccctcgccgcttccgggatgcgggtgagctggcccagcacagccgggtgcactctggggaacgcccgtttcagtgtccacactgccctcgccgctttatggagcagaacacactgcagaaacacacgcggtggaagcatccatgagccgggctgccgggtgccccaggtaccacaggactttgcagggagcctggactcctgtccagacacctggtgagagcctgaggctggtgttcagggccctggacacagacacagagcagccgcatctcaaaggcagagccctgcctgaaggaggaatccgtgagtaatcttcaggtcctccgtgttctggagctgagatgggaatgagcccctacacagaatggagtcctctagcctaaagatatcagctgttccatggcagagccttgactggatggaggtggggagtgtggtgtgtaaagtctctggcctcataaaaggtggctgtgggtcgtcaggaatctgcgccatcttcctggggcttctgcgctgttgttggggaagggaccccagtcctgccttccaccccccaaccaggcctgagactgatcaaacaataaacacgtttcccactctgaaaaaaacacaaanacaacaaaaaaaacctttttgcgcggcctcggcccatgaagagggtctctaaaccccaatcgtgtggcgcccgccccaagggtagctgaccctggccaaaggccgctccaagggaaccctgccaggactaggggtgggttccaccaaaaaagccgcgggggaccggggtctgaacaaccatggggctgcgccttggttacaccgggcaggtctctccccccgaggt

SEQ ID NO: 7457 - DNA, 1197 bp, Homo sapiens
ggctgtaccggtctggagttgtaagggatcttccctagaccctcttctctcccttcggcttctctctttcggccggcgccgccagttcctggggcacacccagaggtccccttctcgccgccgcctgcaactgcgagggtagcccggggccgcttggagtcgcccggacctgagaggctgctgcactgggcctcagccagccctccggatgctggtgctgccatccccctgccctcagcctctggcattttcctcctccatcggatctccccaggcttcatctcctccaaggcccaaccactacctgcttattgacactcagggtgtcccctacacagtgctggtggacgaggagtcacagagggagccaggggccagtggggctccaggccagaaaaagtgctacagctgccccgtgtgctcaagggtcttcgagtacatgtcctaccttcagcgacacagcatcacccactcggaggtaaagcccttcgagtgtgacatctgtgggaaggcattcaagcgcgccagccacttggcacggcaccattccattcacctggcgggtggtgggcggccccacggctgcccgctctgccctcgccgcttccgggatgcgggtgagctggcccagcacagccgggtgcactctggggaacgcccgtttcagtgtccacactgccctcgccgctttatggagcagaacacactgcagaaacacacgcggtggaagcatccatgagccgggctgccgggtgccccaggtaccacaggactttgcagggagcctggactcctgtccagacacctggtgagagcctgaggctggtgttcagggccctggacacagacacagagcagccgcatctcaaaggcagagccctgcctgaaggaggaatccgtgagtaatcttcaggtcctccgtgttctggagctgagatgggaatgagcccctacacagaatggagtcctctagcctaaagatatcagctgttccatggcagagccttgactggatggaggtggggagtgtggtgtgtaaagtctctggcctcataaaaggtggctgtgggtcgtcaggaatctgcgccatcttcctggggcttctgcgctgttgttggggaagggaccccagtcctgccttccaccccccaaccaggcctgagactgatcaaacaataaacacgtttcccactctga

SEQ ID NO: 7458 - DNA, 1290 bp, Homo sapiens
ggtgtgtgtttctggccggagccgtttcgcgacggcccgggcgccccgccccaaccttccttccctagaccctcttctctcccttcggcttctctctttcggccggcgccgccagttcctggggcacacccagaggtccccttctcgccgccgcctgcaactgcgagggtagcccggggccgcttggagtcgcccggacctgagaggctgctgcactgggcctcagccagccctccggatgctggtgctgccatccccctgccctcagcctctggcattttcctccgttgagaccatggagggccctccccgtcggacttgccgctccccagaacctggaccttcctcctccatcggatctccccaggcttcatctcctccaaggcccaaccactacctgcttattgacactcagggtgtcccctacacagtgctggtggacgaggagtcacagagggagccaggggccagtggggctccaggccagaaaaagtgctacagctgccccgtgtgctcaagggtcttcgagtacatgtcctaccttcagcgacacagcatcacccactcggaggtaaagcccttcgagtgtgacatctgtgggaaggcattcaagcgcgccagccacttggcacggcaccattccattcacctggcgggtggtgggcggccccacggctgcccgctctgccctcgccgcttccgggatgcgggtgagctggcccagcacagccgggtgcactctggggaacgcccgtttcagtgtccacactgccctcgccgctttatggagcagaacacactgcagaaacacacgcggtggaagcatccatgagccgggctgccgggtgccccaggtaccacaggactttgcagggagcctggactcctgtccagacacctggtgagagcctgaggctggtgttcagggccctggacacagacacagagcagccgcatctcaaaggcagagccctgcctgaaggaggaatccgtgagtaatcttcaggtcctccgtgttctggagctgagatgggaatgagcccctacacagaatggagtcctctagcctaaagatatcagctgttccatggcagagccttgactggatggaggtggggagtgtggtgtgtaaagtctctggcctcataaaaggtggctgtgggtcgtcaggaatctgcgccatcttcctggggcttctgcgctgttgttggggaagggaccccagtcctgccttccaccccccaaccaggcctgagactgatcaaacaataaacacgtttcccactctga

SEQ ID NO: 7459 - DNA, 1760 bp, Homo sapiens
gaaagtttgctgcgtagggatagggagaccgggccggattgcggggagtgagcaggttcagcagtgacggcattcttaagagtcctgcccaagtgagggacttggggtgtgggacagagtggcccccagggcagtgggcgttggaaactgagaggccctgcgaaggaggcttggggaggggctacggtgaccaggggacgaggtataggaagaggagggcggaaagccttgagggtgggcttcttggatcccaattgccccagaggcacaggcctgggcatcactgtattatttcccgaggggagaaggggctatttcccatgggaagacaaagtgggatgaatagtggaccttgagaagagggggtggccaggaaaaggttcctgaaggaggcaggacccagactgcaggctggggagggtttgggcagccagagggaggtgagggtgctggagcgggggtcaatcggtcactccggccggagatctgagtggcctctgccccctctgcgctgtggagtgcatctgattgccagcctcgctggaccgttgagaggattcatcgagaccctggatatgaatatgcagtgtgaactgaagtttggggacatgagtaatcagtcacagtggcccaagatttgaggtgtaaatggagaagtcagaatgattcgctgcagctgtctggaacaggcctcagccagccctccggatgctggtgctgccatccccctgccctcagcctctggcattttcctccgttgagaccatggagggccctccccgtcggacttgccgctccccagaacctggaccttcctcctccatcggatctccccaggcttcatctcctccaaggcccaaccactacctgcttattgacactcagggtgtcccctacacagtgctggtggacgaggagtcacagagggagccaggggccagtggggctccaggccagaaaaagtgctacagctgccccgtgtgctcaagggtcttcgagtacatgtcctaccttcagcgacacagcatcacccactcggaggtaaagcccttcgagtgtgacatctgtgggaaggcattcaagcgcgccagccacttggcacggcaccattccattcacctggcgggtggtgggcggccccacggctgcccgctctgccctcgccgcttccgggatgcgggtgagctggcccagcacagccgggtgcactctggggaacgcccgtttcagtgtccacactgccctcgccgctttatggagcagaacacactgcagaaacacacgcggtggaagcatccatgagccgggctgccgggtgccccaggtaccacaggactttgcagggagcctggactcctgtccagacacctggtgagagcctgaggctggtgttcagggccctggacacagacacagagcagccgcatctcaaaggcagagccctgcctgaaggaggaatccgtgagtaatcttcaggtcctccgtgttctggagctgagatgggaatgagcccctacacagaatggagtcctctagcctaaagatatcagctgttccatggcagagccttgactggatggaggtggggagtgtggtgtgtaaagtctctggcctcataaaaggtggctgtgggtcgtcaggaatctgcgccatcttcctggggcttctgcgctgttgttggggaagggaccccagtcctgccttccaccccccaaccaggcctgagactgatcaaacaataaacacgtttcccactctga

SEQ ID NO: 7460 - DNA, 1104 bp, Homo sapiens
gcgggcggcgggaggggctggaccgcgtggagggcctcagccagccctccggatgctggtgctgccatccccctgccctcagcctctggcattttcctccgttgagaccatggagggccctccccgtcggacttgccgctccccagaacctggaccttcctcctccatcggatctccccaggcttcatctcctccaaggcccaaccactacctgcttattgacactcagggtgtcccctacacagtgctggtggacgaggagtcacagagggagccaggggccagtggggctccaggccagaaaaagtgctacagctgccccgtgtgctcaagggtcttcgagtacatgtcctaccttcagcgacacagcatcacccactcggaggtaaagcccttcgagtgtgacatctgtgggaaggcattcaagcgcgccagccacttggcacggcaccattccattcacctggcgggtggtgggcggccccacggctgcccgctctgccctcgccgcttccgggatgcgggtgagctggcccagcacagccgggtgcactctggggaacgcccgtttcagtgtccacactgccctcgccgctttatggagcagaacacactgcagaaacacacgcggtggaagcatccatgagccgggctgccgggtgccccaggtaccacaggactttgcagggagcctggactcctgtccagacacctggtgagagcctgaggctggtgttcagggccctggacacagacacagagcagccgcatctcaaaggcagagccctgcctgaaggaggaatccgtgagtaatcttcaggtcctccgtgttctggagctgagatgggaatgagcccctacacagaatggagtcctctagcctaaagatatcagctgttccatggcagagccttgactggatggaggtggggagtgtggtgtgtaaagtctctggcctcataaaaggtggctgtgggtcgtcaggaatctgcgccatcttcctggggcttctgcgctgttgttggggaagggaccccagtcctgccttccaccccccaaccaggcctgagactgatcaaacaataaacacgtttcccactctga

SEQ ID NO: 7461 - DNA, 541 bp, Homo sapiens
cttcacaagagaaaatattatcaacaaacttatggaaaaatcagattcatttttaatcaggaaaatgcaaatgaaaaccatatcagaatggctaaagttaaaaagactgacaatataggtattgaggcagtaaaccaatggaagctgtcacgtactgctggtgagagtataatttggcacaaccactttggaaaccagtttttgatctagcaatcccactctgaggaatattctctgtttaaatgcatggacttgttcatcaagatacagtttataaaaatgctttggtgggatgcagtggcttatgcctgtaatcctagcactttgagaagccgaggcaggtggactgcttgagcccaggagtttgagaccagcctgggcaacatggcgaaaacccatctctacaaaaaatacaaaaaattagctgggcattttggcgcatggctgtagtcccagctactaggaaggagaatcacttgagcccagaagttgacttgctgtgagtcatgattgtgccactgcattccagcctgggcaacag

SEQ ID NO: 7462 - DNA, 419 bp, Homo sapiens
tttcaccatgttggtcagtctggtctagaactcctgacctcaggtgatccgctggcctcaacctcctgaagtgctgggattacaggcatgagccaccatgcctggcctctaaattgctcttatggagactcattttcatggttaaaatgtcctgaattgactgtggcttgttggtgggaggagggatggaggaagctacttatggaaaatgaacaaggaagggaagcacaccagaagctagaaagtgtcatcaatttttacatcaaagactccatgacaaagagaaagtacaagtagcctgtttttgtagctgaccattggactgcggactgcacatgcagctaccaggttcttctggatagtcccagttttaaatttttgacctgatattcatgaacatagtgctactggtcagacct

SEQ ID NO: 7463 - DNA, 395 bp, Homo sapiens
aagaaatcctggaagggcatctcccagctctgagactctctgatgctatgaattcaagttattctgtccatgactgggtctggaggtcactgtgtaaaatctacgcttctaaataaatgttatgatatctcagcatactataccatacttataacatgtatgcttataacagcatactataccatatagtatagttcccaagaaaagggaatgtttcttcccccctaaaaaaaggaaaattcccattatctaatatataaaacaaacttttttgatgatttaaagtgactgtgtgttgtgaactgagtagacaaggcaggaaggagtagtgatgttcctgagttcttgctgaattctgacaacgtgccaacactttgatttctctgtcaaaatgg

SEQ ID NO: 7464 - DNA, 591 bp, Homo sapiens
ggtttttccatggtgaagtttggaaaactgagggtctgagtccctcatttggtggtattagaatttaactgagtaggaggagagaagaaaacagtaacaaatgtcaaaatttcaagcaaccatgtggtatggctgtggtagagatgtatcaggcaattgaaagttttctaggtggtgccatcttgctaaaataataaaaagtacaggtttataaatcaaaaacaagtgcaatctatgtagggaaggattgtctatggatatacaagtggccagtgcaggaagtgaagtaacatttatctttatcttaatttctatgctcatgtcccccattccccttctgaagccaggcctgggaccttagatagcagcttagagggtctggccctgatacatttactcctttaattttggaatttccttctagtctctcaagagtgtttgtggcatatatttttcattttataaatataaaattgtacaaagtaatgtacattttgttttagagaagtcttttaaatgtttgcagacagcccagatcgtccatccctatttaggcagtggtctccaaacgtttatgtttattcaccctat

SEQ ID NO: 7465 - DNA, 237 bp, Homo sapiens
acaagaatagaaactattttgaaatttacaaaatgctgagaaatggaagaaatcaaagacctaaaaaatcagagagactttggggatcagaaaacccagaaaggttttttttttttttttttaaatataggtactagacctagacagtctcattctgaaatgtagatggcatagcacaggacctataataactaaaacaactctgaaaaagaagaaaaaagtaggaggaatcattgt

SEQ ID NO: 7466 - DNA, 2035 bp, Homo sapiens
  misc_feature (44)..(44): n is a, c, g, or t
  misc_feature (997)..(997): n is a, c, g, or t
ggcttggcaatgaggccgaactcctggagagcatgggggatgcnccgccgccccaggacgagcacaccaccatcatagaccgcggaccgggggcctgcgaggagagcaaccatctcctgctcaatggtggctcccacaagcacgtgcagagccagattcacaggtcagccgactccggggggcggcagggcagagaacagaagcaggaccccctgcactcgcccacctccaagaggaagaaggtgaaatttaccacctttaccaccatccccccggacgacagctgccccacggtgaactccatcgtcagcagcaatgatgaggacatcaaatgggtgtgtcaagacgtggctgtgggtgcccccaaggaacttagaaactatctggagaaactcaaagataaggcttaggcccctctagccaaagggccctgcccagatgccttccttgtactggaaactggcccaagtggggcagaaggcgttgtcagtggggttaagaagggacggtcccagggtccatgctagaccagttggaaagttttgaagtcaggaaaagacgtttttgtatcaagggatttttagcagttaatggtggtggatttttaaaggtcaggggaataaagtctggggcatggggagtgcagaccaagttactgaactgcacaggcaaaattaggaaggttattttatgagtcaaaacatactacagacaagctaccaaaaattatttgttaaaaaatgcaacaagacaaataaaaagagaaataatcatctgtttatatttctaataaaggagcaaaatataaaaataggacctgctaagagacattttccattctaattcacgattcacttttccaaggacagccttcaactgtcaccacacagctgggggggagtcatttcttaacaagggatgcctcttgggatagaactagggagttttaaatctttacttgatcatcttttattttcttttccactttttccttttntctctctctctgtgtcctagacttccattgcatttatatttaatgtttatttctgagaatcaagcagtatatttttcctaaatgaaacataaattatattcctattcattagataggttcctaggaacaatgccaattaatccattgtttaagtagtaacttgaatgtttttctatatccctccagctttgttgatagtggcgggttttgtacaattggagggagccctcagagccttctgggggaggagaggaactgtccttaatccatcaccactaccatagggcaaagccagcaggtgtggccctgtgaggggctgtacagacgggatgtggccaggagaacagagccccacctggaccacctgacccctcgggattccacccctgtcatcgtggggatgttcctatatgggagaaagttgggttaaatcaaaaaagaggccacgcccaggtgtaatcagagccaacctggtgggctgggtctatcacaagacataactgatgctgaacatgaacaaagataaaaactgtttggagggtttttgagttgtttttcttatgttgttgggtggggtataccagcataaactctaaagataaaatctatgttagattgtcaatcaactgtgtttttgaacagcataattgtgtagcagcacattgcaaaaatgcattcatccaaagcgacacatgtggcaacgtagaccacgccagtgaaataagccccttcgtgatcacctgactccagttctccgtgtgctccattggctgcggctgcaggaggaagatgcctgacagccctcatgctctccgcaggggggcgctcacaaagatgccaggggtgtttattgtgtttatttttttaattactaaaatcagtagctaagaaagggtccttgaagcctcctaacctgggttggacctttgaaaaatatatttgtagcacatattatagatggaaagaagaagatatttatttatacctgtgatgccaattgtcattaaaaggcttttcatggcttgacaagtcagaaac

SEQ ID NO: 7467 - DNA, 2132 bp, Homo sapiens
  misc_feature (1094)..(1094): n is a, c, g, or t
gagatcaaaggaaagatggatgcggtggtgaacttcacataccagtacctgagcgcccccctgtgtgtcaccgtgtgggtgccccggctgcccctgcagatcgaggtctctgacacggagctcagccagataaagggctggagggtccccattgtgaccaataagaggtgagcgttgtgcagatgaactttgaaatagccagtttcagcagcctttcagggactcagcccatcacgtggcaggtggagtacccacggaaggggaccacagacatcgccgtgtccgagatctttgtcagccagaaggacctggtgggcatcgttcccttggctatggtgagtgaaatttaccacctttaccaccatccccccggacgacagctgccccacggtgaactccatcgtcagcagcaatgatgaggacatcaaatgggtgtgtcaagacgtggctgtgggtgcccccaaggaacttagaaactatctggagaaactcaaagataaggcttaggcccctctagccaaagggccctgcccagatgccttccttgtactggaaactggcccaagtggggcagaaggcgttgtcagtggggttaagaagggacggtcccagggtccatgctagaccagttggaaagttttgaagtcaggaaaagacgtttttgtatcaagggatttttagcagttaatggtggtggatttttaaaggtcaggggaataaagtctggggcatggggagtgcagaccaagttactgaactgcacaggcaaaattaggaaggttattttatgagtcaaaacatactacagacaagctaccaaaaattatttgttaaaaaatgcaacaagacaaataaaaagagaaataatcatctgtttatatttctaataaaggagcaaaatataaaaataggacctgctaagagacattttccattctaattcacgattcacttttccaaggacagccttcaactgtcaccacacagctgggggggagtcatttcttaacaagggatgcctcttgggatagaactagggagttttaaatctttacttgatcatcttttattttcttttccactttttccttttntctctctctctgtgtcctagacttccattgcatttatatttaatgtttatttctgagaatcaagcagtatatttttcctaaatgaaacataaattatattcctattcattagataggttcctaggaacaatgccaattaatccattgtttaagtagtaacttgaatgtttttctatatccctccagctttgttgatagtggcgggttttgtacaattggagggagccctcagagccttctgggggaggagaggaactgtccttaatccatcaccactaccatagggcaaagccagcaggtgtggccctgtgaggggctgtacagacgggatgtggccaggagaacagagccccacctggaccacctgacccctcgggattccacccctgtcatcgtggggatgttcctatatgggagaaagttgggttaaatcaaaaaagaggccacgcccaggtgtaatcagagccaacctggtgggctgggtctatcacaagacataactgatgctgaacatgaacaaagataaaaactgtttggagggtttttgagttgtttttcttatgttgttgggtggggtataccagcataaactctaaagataaaatctatgttagattgtcaatcaactgtgtttttgaacagcataattgtgtagcagcacattgcaaaaatgcattcatccaaagcgacacatgtggcaacgtagaccacgccagtgaaataagccccttcgtgatcacctgactccagttctccgtgtgctccattggctgcggctgcaggaggaagatgcctgacagccctcatgctctccgcaggggggcgctcacaaagatgccaggggtgtttattgtgtttatttttttaattactaaaatcagtagctaagaaagggtccttgaagcctcctaacctgggttggacctttgaaaaatatatttgtagcacatattatagatggaaagaagaagatatttatttatacctgtgatgccaattgtcattaaaaggcttttcatggcttgacaagtcagaaac

SEQ ID NO: 7468 - DNA, 474 bp, Homo sapiens
  misc_feature (85)..(85): n is a, c, g, or t
gtttcaggttggttcaggtcagaatttgcagccagctgagttcacatcagatcaatttgccagcaagtgagttaagaaaacaaanaacaagtttgttctcagagcatttatgactttagagttgtctatcagcatttgtggacctataatgttttgttcattaatcaaaaccttctgtaattgtttagcaaatggttatatcatttctaatttcaagtggacaggtagaaattatttctgctttcctcatttcccctggaaaaaaagaaaaggcagatatctgaacagagtttgaggatgattaaatacaggttgagcattcctaatctgaaaatccaaactccaaaatactgccaaatccaaaactttttgtgtaccaacaagaagctcaaaggaaatgctcattggagcatttcggatttctgatttttggtttaagaattctcaaccagtaagtatataacgcaaacattc

SEQ ID NO: 7469 - DNA, 373 bp, Homo sapiens
ctaggagaggatgtgtactggccctcagggaggaagatgccagccacgctgtgctgacatagcagggactgccgactggagccctgagctgtgctgccatttgactctctggcctgatgaggtgcgacagagatgtcaattttctggaacattgcacagatcacatatttatgcaaatgcttttctgtatctacaatcaaaaatggtcatctcagagaaggaaatttactaagccaacagaaacctcaatttttacaacttaaatgtggctctttccctctctgacaccaaaatagtttcaaaagctaggaagtcattaagaatggcttgtctgtcattcctacttagacaaggtgtgggattgataaggaca

SEQ ID NO: 7470 - DNA, 506 bp, Homo sapiens
ccacaaagtaagaaaccatttcttgccgggtgtatgaaatagatcactgggttattttttaaaaatcatcttttgagtagaatatggctggaaatttatggtgaagatttaaaaattttcagcttttttttgttgtagcaagtcctcttaaaatccacttttagacacttcagcaatacagacctgaagtccaaacctagagctagcagcagggcaacaaactgcccttatttgccaagacagggctttcctgggacataagactatcggtgctaaaactgggagaatccggggcaaatcaggacagttggtcactccagatgtctaacaaaatgactcttaatagaaagtagctgtcacattgatgcattgttaaaatataaattttgagtgaaccaaataatgaccatatcccataatatttgggttgaaaatgggggttaatccaactcttggaaaatctgtagccatatatgcatgtttgttcagaccagcttaaaaagaca

SEQ ID NO: 7471 - DNA, 455 bp, Homo sapiens
  misc_feature (279)..(279): n is a, c, g, or t
  misc_feature (361)..(361): n is a, c, g, or t
aatgattcccgtttttcaaacaaacggtgaaataaggacaataaaagaggttatctgaggccctcagcaagcaaccactggaatgtgggttttattggttcaatctagtgctcatttctactatatgactactttattttagcaaagcatttgataatttttggtgatgtgctatgggaaagatagaataatgtaagctacataagattcagaatgtgggttttattggcttaatctagtgctcatttctactatatgactattttagcaaagcatttngataatttttggttatttgctacgggaaacatagaataatgtaagctacataagattctagttgaaagattcatacatggtngaaaacctatacatttaactcaacaaacatttattgagcacttcttatgtgctgggctctctagtaggtctatagaaactagtatattaatgcc

SEQ ID NO: 7472 - DNA, 786 bp, Homo sapiens
taattctcaactgtaagttgatttattgcaaggcaggattccctggatatatgaagaaattatccctattctgcagcagaaggaaaggatctctcttagtgttgcacagtaaaagttgaaacaatacacttgtgagtggaattctgaagacatcacttctgtgatttttaaaccacttctaaatcctttcctcttttgtttgtggtgggtaattaacttcactttttggtatttaatggagctaaagtttatttttaaacgggaactagttcagttttccgaactaactaaactttttgtggaatactatcttttgataccagcagaatattaagtttctttttattaactaaatgattaataagcaatgtttacatggagatactgtttagggacataatgagtttttcacagttcagtgttagaaacaaatcataattcagtaaactaagaactattttagaagtttgttttgaagtggtaaagaagggattaaaggcctggcgcggtgggtcattcctgtaatcccagcactttgggaggctgaggcgggcggatcacttgaggccaggagttggagaccagcctggccaacatggcgaaaccccatctctaccaaaaacacaaaaattagctgggcatggtggcacatgcccatagtcccagcttcttgggaggctgaggcataagaattgcttgaacctgggagatggaggttgcagtgagctgagatcgcatcactgcactacagcctgggtgatagagcaagactgtctgaaaaaaaga

SEQ ID NO: 7473 - DNA, 321 bp, Homo sapiens
gctgaggcaggagattcgcttgagctcgggaggcagaggttgcagtgagcccaggtcacgccatggcactctccagtctggatgacagagcgagactctgtctcaaacccacaagacctctctctcccgctagtctataaagcttcttgacgataaggcttttgtgcttgttagtgaatactagtcctgtttctcctacctgacacagtgaacgctcataagatgtttgagtgctcgcatgaatgaacgaccagacccgactgaattattttttttcttcaggctcctgagtctggtcgacactttcagagtagacgtttc

SEQ ID NO: 7474 - DNA, 569 bp, Homo sapiens
gcaaatgccacataatattttccaaacttgaaaagtaaagtccatattccaatttaaaaattaagcttcttttattttttatacagtacacatatcacttgggaacaaatatgccaatggaacagaagtacaatgtagttttcaattgtcctgtaaaaatattgcacgattccatgcaaccaacttgtgatattaaaatggcagtaaaaccaaacccaaggattagtacgggaatgtcatagtatgtcatacctcagcaaccctcattccacctcatccaattccaataggagtttcagagctacaagagtcacttcagtcatgtatattatagtccaacagcccctccctcgactgaggaattcctagcctgctggtaagtgtcacttagaaggagaagaaatgtttgtctacccttgaaaataggacacactgttagtctttaaataaatttcaaatggtcttcttagaagtggcagagcatgatacaccacatcaacaggaactgactcttaggacttgactggatttataagatttagaaaaagattattaaaccaactaagtga

SEQ ID NO: 7475 - DNA, 419 bp, Homo sapiens
gcagttagattagctacttctaaggtgcttctactttttcaggatgttgtttctgtagcagagtcatctgtttcttgtccctccgccctctctatgttaatgattgatgaatgcctgaagtatatggagttgcagtggcaattactggggtttcagtggtgaacataaccagtccaggttccattgcccttgcccctgtcctcagagctccatctctccttagcagtattctctcttcatccctgatgggctgtataatctaaccatcaaatcccttctctaagccaccatcataggactcagtgctcctgtgtaggagatacatgctagtggcctagaactggggtggtccttgcttctgctaccaagggtgaggtaataaatgttttcctagcctcactcccttcaaactggtgtac

SEQ ID NO: 7476 - DNA, 769 bp, Homo sapiens
agcatcgctgccaccctcagggattcctcttgcatatctctgtgttctgtcctccacacacccatctctttagtcatctattgattttattcaattttcctggcagtttccccagtgtattttacctgaaaggtatgagaggaaaaaggaaaagcacaactcaaaatggttgactattccattctttgttttcttcaaaaagtgtaaagtccataaagatgccatagaaccactaaattcattgtcctttgtcacctctcagccaataatagtcattgatatactctccataccacaaatttaaagttttttgtgaactgtacatgcaatagccaagtttattttaactttagtcattactggatcccagagattttctttctcttttttggcatatagattatttatgtcacttcagtatgcccagtccacagatgagatcttctgagggactgcttctggagccggccctcttgtgtgattgaattagtcagtgatggttctcaggactagattagattgttactcttaaaataattacttaaaaaaaaaaaaaaaaaacttccataacttgaaaattttgtggccaggtgtggtggctcatgcctgtaatcccagcactttgggaagccgaggtgggcggatcgcttgaggtcaggagttcaagagcagcctggccaacatggtgaaaccctgtctctactaaaaatacaaaaattagccgggcatggtggcgcacgcctgtaatttcagctactcaggaggctga

SEQ ID NO: 7477 - DNA, 718 bp, Homo sapiens
agcatcgctgccaccctcagggattcctcttgcatatctctgtgttctgtcctccacacacccatctctttagtcatctattgattttattcaattttcctggcagtttccccagtgtattttacctgaaaggtatgagaggaaaaaggaaaagcacaactcaaaatggttgactattccattctttgttttcttcaaaaagtgtaaagtccataaagatgccatagaaccactaaattcattgtcctttgtcacctctcagccaataatagtcattgatatactctccataccacaaatttaaagttttttgtgaactgtacatgcaatagccaagtttattttaactttagtcattactggatcccagagattttctttctcttttttggcatatagattatttatgtcacttcagtatgcccagtccacagatgagatcttctgagggactgcttctggagccggccctcttgtgtgattgaattagtcagtgatggttctcaggactagattagattgttactcttaaaataattacttaaaaaaaaaaaaaaaaaacaatataaacaaacaaaaaagaattttactaattttaaacactgacttcctgtgaaaattgccagatctttacaggcgttttgtaaaagttagacctgtggggagttttgtttacactaattacaaagtttttacaaattgaattacaagttgaaat

SEQ ID NO: 7478 - DNA, 412 bp, Homo sapiens
  misc_feature (356)..(356): n is a, c, g, or t
  misc_feature (397)..(397): n is a, c, g, or t
  misc_feature (408)..(408): n is a, c, g, or t
acaaaaaaggagctttttgacgtaatcaagcctctatcaatcacttcttgcttcctaataacttttgtatcttcctttcaggagagcagttgaagtgaattcttctgggaccaaatccagtgtttctgccttgaagaaacataattaactgacattttaaaagccactttatagacctgttctgactctggtctaaggacattacttgatttatagtttatgaaaagtctacttttaggaatttggggtatgttttatgggtaggctcttttagttgattgctttcatttttctttggggaaattatctaggaatagctgtaggtggatgtccatcagaagcttgactttttaccnctgtggtacttggaggggctgactgacggcacagggggaanatttccacccnggat

SEQ ID NO: 7479 - DNA, 476 bp, Homo sapiens
gagtctttttcattagcagcctagtaagaaataaagcagtatttctcttgttttgtctttaattatctccattgagggttaacagcgttgggctttgccctttttgttcatgtggttgggtttcagtcaacactggcctgtcgtgttgttttctacagagaatacagagaactggttttggttatatcatattagggagttaaaaagatgtcctatatatatccaatcacaaaacgagcacccaaatcagctttagtggattcaggagatgtagtcaatcttccccacatgctttctaactcacttcaaatatgacagatttgtagctaactttcacagcaacaggaagttcacttagcactcagcgatgtgagatttgagagtcatctatattggcactgtaaattccatttcttagaaaaattacaaatgtcaatccttcttttataaatgcaaattctttccattagaagatg

SEQ ID NO: 7480 - DNA, 384 bp, Homo sapiens
tccactgggaaagggtggactttcccagtccactgactcaaatgtaatctcctttggcaacaccctcacagacacacccaaaaataatactttgtatccttcaatccaatcaagttgacactcagtattaaccatcacagaggccagggcagaatgattgcttgaacccaggagtttgagaccaaccttggcaacacagggcgatcccatccctacaaaaaaaaaaagtttaaaaatcagccaggataattagccattttctgtggtcccagatacttggaaggttaaggtggaaaggtcacttaagcctgggaagttgaagctgcattgagctgtgatctgtcgttgcactctagcctgggcaacacagcaagaccctgtctc

SEQ ID NO: 7481 - DNA, 528 bp, Homo sapiens
atagttttttttctaagcccatagtaatatttcaatcactatttttcataactattcatagctttaagtacattcactgtttttaaaatcgcatgtattcttgactgatggtttaacatcataaagcgtgagattatttttttcttctgatgtttggtttttctgtattttttggtttgctttaccggttggtaaaacagatacataagggttttttaatagaaaaaaagcattaaagagaaaatatgcccttaaaacaagcattttaaaaaaaaaaacctttttaggattagcagtttttctatttatatccaagtcagaagtagcagatggaactctttctaataacctgataatttttccatatcctacaggcattactttctctctaaacttgaatgataaccacatgaaaaacagcgcccaatttcaggcccatttcattggaatgctgaagctgagtccattgacatatatcaaggacacatttctcaggtctttcatgtacatgatcttatttattccacc

SEQ ID NO: 7482 - DNA, 268 bp, Homo sapiens
gatgcaggttgaaactcttcacatgtggatgttcaagaaatgcatgatgaatcatcattagattgtgcttgctagaattactgtatatcacatatagagctgtagtaatgcatttttgctattgcacaggtaggtgtaaggcaggtatagggatctgacctgcttggtgctgctcttcccagggaacatttggttttcctgagtttgctattcctgggagcaatattaagaggacatttaggttaacttggtttacaacagtgactat

SEQ ID NO: 7483 - DNA, 420 bp, Homo sapiens
tatttagttctaggtgaaggggtgggtaacactttacctaaatttcccaaactgctccttgtcctaattaatgacctcatctgagaaggtaaggagaaagtaagctactcttcgcgtctgttctgattagtttaggctgagctgaaggtagtgttcgctattgtgcctcatgaacttcaggtgcgacatacctggtggctgtctagtatttcagccttccaaattctccagtcttgcaccagctgagtgaacggaagagaaaatggccacataagagttttgcaggccgggcgcagtggctcgcgcctgtaatcccagccttttgggaggctgaggcgggcagaccacctgaggttaggagttggagaccagcctggctaacgtggcaaaaccctgtatctactaaacatacaaaaaaaa

SEQ ID NO: 7484 - DNA, 341 bp, Homo sapiens
gtcactacctgactcctaaaactcaccttctgtggtgaggaggagtggtggttggcaccagggctctttccttttgtgtaactaacagaaagctgttaatctttcttgttttttttttcactttcctggaaaattgatacttcattaaagctttctagatgccacttattctacccaagaccaccttctgctgcttatttttagatgactacagattcttcattcactatggaagcttcacaaatcactttgtcagacaaattgtttgaccttccactggagagcagttgttaccactttctaataatggcccataaacatattttttaaaaccacccgga

SEQ ID NO: 7485 - DNA, 486 bp, Homo sapiens
cctgggacgttctgaggaatagttggagcaggggacatggcctgtgcagtcttcagccctgactcacccactccaagaatctcaaagaatgtaaactggcttagggaggggcagcagagccagtctcaaataatatgggcactgtttaccttttcttgcttctaaaatctatctgctcttatttttgaggtttgggtgagagctattctaggcagtggacaaatataaagctgtttttagaaacaggtatttccagtactttagcgaaaatactggggctttgttttcactgcttcgtgtatccttaaatgcgtttttgtttttgtttttttaaccatatggagccactgtggattgaaattacctaacttaaaaaaatctgataagtttaaaataaggatactgaggcattcattctttttctgtcatctaagaacaatcagccacgtaaacgtattaaaatacacggaaagagtgtgtgaaagc

SEQ ID NO: 7486 - DNA, 556 bp, Homo sapiens
ctaaaataccaaaatttgacaagttatcataatcagtctcttaaaaatgcaaatgtctttcagagaattaatgaagacatcagtcattcatatgtaagtgtgaagtagtatagtggctacttttatgtattgctgaccttatatgaaataaagtgagtgagtctataatttcctttaccataagaacactttgctaaaaatactagctttcaaaatatagtgccttactccaacttctatttctctcaacaaatcttctttgatatttcttctttactatgatagaagtctggaaagactcctacttttcatttgttaaattttattcacttctaattccctttaaagcttgtttttttcttttttcaaaaagttatgaccaattatgtgggaagaaacaataactagtaacatacataccaaagttgtccatctcaatatataacaagggaataaaaaatagttacatgctcttcctcttccccatcccctttcctactaagtgttagaatctcataaagccacatgttcttatatacagtatgttaatatacta

SEQ ID NO: 7487 - DNA, 504 bp, Homo sapiens
acttgtttcctgtgtagatagttctttaaggaatcagactgtcagttgtactttaaaacaagaacaataacaacatagaagtaactgttgataaatccagcaagtagtatatctgtgatatatttctttttcctcgtaactacgaaataacatacatgtagttattttttctaagttgttaaagatctatctttgaatcattgatgttaataacattttctcatggcacagattactgtggtgttaattctactattaagttacagtaatttgaactggattaataattctttgttcagtctcattttgcatgacaaaacccccttcgttatatgtgcttgtggtgtatttaagcaagaagtacaaaaagtgcctgggtgagttccagcctggccagtgacatcattttggagatgttttgtcagagaaaatgatgactaaataaatacatggaacctatgggtaaatgtctcattgttgcagattaaaatttgagccatagat

SEQ ID NO: 7488 - DNA, 290 bp, Homo sapiens
agcttataggtctcctgttgcagtggaagaagtcgtctcctctggaaattcaaaaccttaggcctgtctatacttactttgggtacatttacattacgttatagtttgagaatcaccaaggtgaaattttaacattaaaactaaccccaaggcacctggtagaagcagcacagaataaatttctgcttacattctcaattgagacctaacagtgctcccactgaaagagtccaactaaacttgaacccctgtgctgactttgcaaaatgagaccctcaatggctttagat

SEQ ID NO: 7489 - DNA, 456 bp, Homo sapiens
acctactcttcatctttccctcctctgctgaaaataaattttcctctagatgtcctatattacttcaaaacaacacagccctgatgatcacatctatacaaatccacaaatatccttcactcccaaaacatgtcttttcttcactgacatgaactttttcaaaaactctttccttttttgagggaagggggaatttttgcttgttttgctttgctttctgaatgggaggtaggaaactattagaagggggaaggaagaagagaaaccaaagaagtattgagtagagtcaagaaatcagtgctgtctcaatcttgacgattcttgtccttagagaaattgttactgtttaaatggcttttattgtttaacctataaaaaacacccctctgccccaatttttttccttcaagtctcttaacatgtttctcttcacttcccaatgtggggtattttgct

SEQ ID NO: 7490 - DNA, 249 bp, Homo sapiens
ttcaatatggtgggtggactgcaggaggaaccttctgaaagaggtgatggccaggaatgaaatgataagcaggtgctatctgaagaggagacacttcaagcaggaagtttcgatttttttttttaaagagggttgtcatagcagcatcattcatgatagctaaaatgtggaatcaatataagcgtccactgacagatgaatggattagcaatatattgtttatcccattgatggaatgaaattcagctt

SEQ ID NO: 7491 - DNA, 536 bp, Homo sapiens
caactccatcttattttactaagcagttattaattaattttagcaatacatcttcatctttattgtacttctatctttgttaaatgagaaaaccaaggcatcaaataattgagtagacaaagatcatattcacaagttagtaaaaagccagaattagaatgcaggttttttttttcaaagtccagttccatctacattctaccagactgcatatcctattcctgtatctattaggtattcccgaactgaggattagtgtttttaagtacagtctataaatctgttcaaagaatagttagaacattgaatgtagagttaaggctttgcagcagccaattgcaaaaataaggaatccagtcttttgaaaagaaacactactgcttgttctcataccttttataaatgtattttaaaaagaatgaactaattaataaaacatatcaaaggcttttaaggcttgttttgagcctgccttattgtggaaattgcatgcacctggtttggcaaataaattccaaaacctttatacatttgta

SEQ ID NO: 7492 - DNA, 425 bp, Homo sapiens
cctgaccttgcgacccacctgccttggcctcccaaagtgctgggattacaggcgtgagccacccgcgcctggcctgctatttaattttcatatatttgtgagttttttcaattttctttctgttattgatgtttaatttctttccattatagacagagaacatattttggattatttcttttttctttttcttttttttttttttttttttttttttgtgagacggagtctcactccctctccaggccaaagtgcagtggcgtgatctcggctcactgcaacctctgcctcctgggttcaagtgattctcctgcctcagcctcctgagtacaggatgctgggactacaggcatgcaccaccatgcccagctaatttttgtatttttagtagagacagggtttcaccatgttggccaggatgatct

SEQ ID NO: 7493 - DNA, 307 bp, Homo sapiens
gcttgcttagtgctagtttgagtccttcagtggcaggacagcctgtaaagtaccacaagtatgggagtgttataatggcagagtgaaacgattagagcagggaggaagtgaattgtgccattagtaccttcatgcaaattataccatgtgattttggacagtgaatgatttttgcatcattcattcacagcccatcactctgttaaggtgagagtgtaattcttacttctcccatcaccacctgtagctagaaacaggaaagggagaatgagatgatccagacaacataaaaaagatgcatgtaagc

SEQ ID NO: 7494 - DNA, 696 bp, Homo sapiens
tgcccctttatcactgctgagggtggaactgggtgtgggggggcatcttggtatgatttggatatagtctgcactgacttgaaacacaggcatttcatttgccccaggttactggccttttttcatttcatagaaggcaaagagaattggccgggtgcggtggctcaagcctgtaatcccagcacttggggaggccgaggcgagcggatcacgaggtcaggagattgagaccatcctggctaacacgatgaaaccccgtctctactaaaaatacaaaaaattagccaggcatggtggcaggtgcctgtagtcccagctgaggcaggagaatggtgtgaacccgggaggcggagcttgcggtgagccgagatcgtgccactgcactccagcctgggtgacagagcgagactccgtctcaaaaaaaaaaaaaaacaaaaaaaaacaaaaacaaaaaaaccccgcaaagataattgatagcatttgcgggtgtggcaaaggtgttagtacctcctctcctctgttaaagtgctattggagactttcattcagccatatttggcctcctggttacagtactgccctgagggctttgcagtgttagcctgatgtctggagaacctgccccatgtgccactgttttcatattcaggctcatgaagatgatcactcacttaagggttcctatttccttaacct

SEQ ID NO: 7495 - DNA, 263 bp, Homo sapiens
aaagctaaagaagaccaggggaccaagctggaaatcaggctctgcaatcagattccagagggaatgccattccacccaatcacctagccacaacggttcccttccttcaagatgctgcatgcctcttcaggcgaatggattaccttgtaagagtgacctgaaaaagcgttagcccagccacaccgaggcttaactgagccatttgattctcactgcctctctctgttgcttcctcttgctttcaactacagggtctttctgtt

SEQ ID NO: 7496 - DNA, 1696 bp, Homo sapiens
gcaccaagcacccactgtgcaccaggcactaagtctctagcctctttctcccttctgctcccatccaagaaagacagtgtataaggaacatctctgtaattgtgtcccctctcatctatgctctttcctgtcttccttgaccaaagctctctttgaggtccaaaaaaggctgccctgggccatatgtgctatggagaggactctcccaaacccccaatagctagtgacagccacttggcctcactaccagaagaagggtggagtcagaaaccaaagtgacctccagagctgtcctcctggcacctgagtgtccttgctctagaggttcaaaggcagcaaggcagtgagctatgagcccagcatggatgtgtctcaggcacctcatccccaccccacctcaccccaacaaactcctctagaagaagccaagaatttctctctatgtctgtttcactttttggattgcatctccccaaaaactaaatgtgaaatccctaccatttctagcctctattgcccagattggagtcagaggtcaaaaaaggattccaagtgatggaactccaggggtggagggaaattggcagttcctggcatctcttgtgtaccagctgctgtgctgggtgccttgcatgcacgggcttatctgatcttcctcaaacttcagataggttagggaaggacaaaggcccccagccatgaagggttttgctatttccaaagcttccccttatcgtcccctgtgattatctcccaaccccgtgacaaaggtagagcaaatattgttcttcccattttacagattcagaaaccaaggctaagggactggtctaaagtctcacaggtagtatatggtggagccaacacttgaactcagacctttttacacaaaatcccatgatttttccactgagacaaatcctaggctcctgggaggccctggcagaagccagaacacatggctgggcctttccagcccaacccactgtcttgcagtggacggagagccttggcgagggcagcagggtagagaggacaaagaatgtggggctggtttctgccctttaagagcacccggtcagtcagagaacagagatcacacacaccaaaccagacagaggcagggcagcatggagacaggtagacagacctccaggtccctaagctggggacagagaaggttctgagctgtcccatactcccactttgtgccaaatgactttgcacctgcaaatggtgcttcaatgtcgttttgtatctttaagctgtgatgttgtatatatacaatgcctcccagctagactgtaagccctttggggacaagggctgcttccagttcttggatggcgttctcctatctaccttccttcaactgctctgcatataataagcactcaataaatggctcatttgccaataagtactgtttcttccacaacttggcagtggtaatagaaatacagcccaaggtaccagaagacaggcggagctccctaccacttctaccccagccctcaacttctcccagggaactcagaagtccccatatcaggagaggaggggaagggctctccctaagacattcaaattccccctgccacaaatggggagacccatcactcagctcacaaaggtcccgggcattcctctggagctgccagggcagggcctgagtgcttgggcaaagagaattccg

SEQ ID NO: 7497 - DNA, 393 bp, Homo sapiens
gtagggaaaaatgtagatgattccttagctttgtaataagcaaaactaaatactaattaggatttatattctaaagaatggagtgagaaaatagatgtaatagtactgtaatttttttctttaaaaattactactctaaatgaaaacatatgactttgaaccattatttttctttttctttttcttttttttttaaacggagtcttactctgtcgcccaggctggagtacagtggcatgatcttggctccctgcagcctctgcctcccagtttcaagtgattctcctgcctcagcctcccgagtaactgggattacaggcgtccaccaccatgctcgactaatttttgtatttttggtagagacagggtttcaccatgttggccaggctggtg

SEQ ID NO: 7498 - DNA, 466 bp, Homo sapiens
tacttgtaagtaaattaaatcattctctactcctgtatgcctgccaaccaaatgggaaatcgctatagaaaagatggtttaaattttagtctttgaagtggtttacgcacgtttctggaatcaagatttaatgcagacttggattggatattgaatattttttatttgtctacttttctctccatagggagtttatagcttcattgcactgtgtgtggcatttgggtcctgtttggcagcaatgactgcctttctgtttagtgtctgtgtgctatgaagagtgcacacaggggtccagatgcatcctgttttgagaatgttaatggatacaccagctgctgctttggatttcacccattggtggtagttgacccgctgtttgtttggaatgcagacaatttaagtgaagacatatccatatatgtggctctgttacagtggtgaaatctacaaccataagaaggta

SEQ ID NO: 7499 - DNA, 405 bp, Homo sapiens
acactgagacctttcacatctcactctcacttcttggaatggctctctacctcgtctgcctgctgagcaacctcttggggagacgcgggcactcttgagtcactgaacttgagctatttggtgttgggagtttatagcttcattgcactgtgtgtggcatttgggtcctgtttggcagcaatgactgcctttctgtttagtgtctgtgtgctatgaagagtgcacacaggggtccagatgcatcctgttttgagaatgttaatggatacaccagctgctgctttggatttcacccattggtggtagttgacccgctgtttgtttggaatgcagacaatttaagtgaagacatatccatatatgtggctctgttacagtggtgaaatctacaaccataagaaggta

SEQ ID NO: 7500 - DNA, 398 bp, Homo sapiens
ccacagcgcccggccgaactctggtaacttattacctagtgggctcaaaaggaggtggaatttatattgtttaagtttcatatatttccttatccctttgcatatagacgctggagaggggaaagagaacggtagagatgtcccaagattggggactgattcaagagcatgttataagatcagaagaatcagaaagttgactgagagtcagtttttttatttgtaaaatgggaataaataatacctaattcttgaagttgttatgagacttgaatgaggaaagtaaagtgcctcccagataacatagttggtgctgtaacgaaggcaggaaccacagaaggaatcacactagccaagaaatgatgatgatacagtgaaatgagtgctgtaaaagaacc

SEQ ID NO: 7501 - DNA, 421 bp, Homo sapiens
  misc_feature (36)..(36): n is a, c, g, or t
ggaaaacaaaatcaagttgagtgtgagttagatttncccaaaacccacacagcattgtgcctacaacccagtccttgttctccgtgagtctagtacatgtccaactacatgaagatcaatatccctgctcccttccagtttataattcaatcatcggaattgcagtaaaaattatgaacagaggctgggtgcagtggagagtaaggggaaatgacaacagagggagcatggggagaggatggaagaaacagacacaaggggaatgagcagagggaagacaacaaatcacagcagaagggaagggatgagaagcaggagccttcagaggtcacaggtctactactggatcacctgataattaattggaaggtttatgtatacatttaaaacatcatgttccatttctaacattattcataag

SEQ ID NO: 7502 - DNA, 242 bp, Homo sapiens
ctggggtgattagaggatcccctttccagagtagcttccagagggagcatggggagaggatggaagaaacagacacaaggggaatgagcagagggaagacaacaaatcacagcagaagggaagggatgagaagcaggagccttcagaggtcacaggtctactactggatcacctgataattaattggaaggtttatgtatacatttaaaacatcatgttccatttctaacattattcataag

SEQ ID NO: 7503 - DNA, 1856 bp, Homo sapiens
cagcagagtccagtcggactgtcatcctttctgcgactctggcgctggtcccgagcagctcacgggcccgtgtgcttccgggtctgagattggcatggtggaccaggtggagggtgtggcctctactaggaggcaaattcgtaaagacctcggcttgggactccgggaactcgggccccagatccttgttcgagctggtcttcagtttccccatctgtacgctgaagagcctggggtccagtaacccccatcatcacccagtttacagaagaggaaactgaggcccagacggggagcagctgacaccaagtcgttaagagaatcagcgaaggggctgggaatccaggacctgcgccttttacccaccgcggcgccggtctcacgtgcagtcccttcgctcttctcccctagttcggtgccatggcgtcccagggtcgtcggcggaggcccctgcggaggccggagacggtggtgccgggggaggcgaccgagacggattccgagcgctctgcgtcctcgtcggaggaggaggagctgtacctgggtccttcgggcccgacgcgcggccgccccacggggctgcgggtggctggggaagccgcggagaccgactcggagccggagccggagccggaaccgacggccgcgccgagggacctgcctccactcgtggtgcagcgggaatcggcggaggaggcctggggcacggaggaggccccggcgcccgcccccgcgcgctcgctcctgcaacttcggctggcggagagccaggcgcggctggaccacgacgtggcggccgccgtgagcggtgtctaccgccgtgcaggccgcgacgtggccgccctggctagtaggctggcggcagcccaggcggcggggctggcggcggcccacagcgtgcgcctggcgcgcggggacctttgtgcgctggccgagcgtctggacatcgtggctggctgccgcctgctgccggacatccgcggcgtgccagggaccgagcctgagaaagacccggggccgcgggcctagccatgattctacttcccaacctgactgcaatttgggggtaggccttgctgcctctgggacctgactctgtctcctgtgtctcttatcaccccccacccccgctcccatcttggtgtcacccatgggggctaatccggtccccttggataatgctttatattggatatagttcaacccctactgcggagaccagggccccactatccttagatctggttcctctcccgatcctgaccctgccgcctggttctgagccttcccctggggcttggctccagcctttgttacatagttgctccttaatctgtttccaccctgggggctcaccaattttttttttttttttttttttttggagacagggtgtttatctgtcacccaggctagagtgcagtggcgggattactgctcactgcaacctcgacctcctgggctcaagtgatcctcccagctactcgggtgggctgaggcacgagaatcggctggacccaggaggtgggaggttcgcagtgagccggggattggcaccaatggggcatctccaggcgcgggggggtgggcaagagggggaagaatctccctttttctcaaaaagaagaacaaacagcatgaaacaaggcaccacagaggacggcagtcacaagcgagcgtcaactataaacagagcgtagcgcaggggagaataatcttctgccgcgcgccagaaaaggaggaatgaccgactaaggacgcgcgacgtctaatgaggtcaccacacaacacttctgtcatccaaaagatgtaaatgagcgtccacataggggattatatgtacaccgggcaccgac

SEQ ID NO: 7504 - DNA, 2924 bp, Homo sapiens
cagcagagtccagtcggactgtcatcctttctgcgactctggcgctggtcccgagcagctcacgggcccgtgtgcttccgggtctgagattggcatggtggaccaggtggagggtgtggcctctactaggaggcaaattcgtaaagacctcggcttgggactccgggaactcgggccccagatccttgttcgagctggtcttcagtttccccatctgtacgctgaagagcctggggtccagtaacccccatcatcacccagtttacagaagaggaaactgaggcccagacggggagcagctgacaccaagtcgttaagagaatcagcgaaggggctgggaatccaggacctgcgccttttacccaccgcggcgccggtctcacgtgcagtcccttcgctcttctcccctagttcggtgccatggcgtcccagggtcgtcggcggaggcccctgcggaggccggagacggtggtgccgggggaggcgaccgagacggattccgagcgctctgcgtcctcgtcggaggaggaggagctgtacctgggtccttcgggcccgacgcgcggccgccccacggggctgcgggtggctggggaagccgcggagaccgactcggagccggagccggagccggaaccgacggccgcgccgagggacctgcctccactcgtggtgcagcgggaatcggcggaggaggcctggggcacggaggaggccccggcgcccgcccccgcgcgctcgctcctgcaacttcggctggcggagagccaggcgcggctggaccacgacgtggcggccgccgtgagcggtgtctaccgccgtgcaggccgcgacgtggccgccctggctagtaggctggcggcagcccaggcggcggggctggcggcggcccacagcgtgcgcctggcgcgcggggacctttgtgcgctggccgagcgtctggacatcgtggctggctgccgcctgctgccggacatccgcggcgtgccagggaccgagcctgagaaagacccggggccgcgggcctagccatgattctacttcccaacctgactgcaatttgggggtaggccttgctgcctctgggacctgactctgtctcctgtgtctcttatcaccccccacccccgctcccatcttggtgtcacccatgggggctaatccggtccccttggataatgctttatattggatatagttcaacccctactgcggagaccagggccccactatccttagatctggttcctctcccgatcctgaccctgccgcctggttctgagccttcccctggggcttggctccagcctttgttacatagttgctccttaatctgtttccaccctgggggctcaccaattttttttttttttttttttttttggagacagggtgtttatctgtcacccaggctagagtgcagtggcgggattactgctcactgcaacctcgacctcctgggctcaagtgatcctcccagctcagccttcaagagtagctgggactgcagacctgcaccaccacgtccagctgcccggttaatttttttctgtcggtttgaagaggggagaaggtctcactatgttgcccaggcttgtctcaaactcccgggctcaagcaatcctcccactgtggcgtcccaaagtgctggggttacaggtgtgagccaccacacactgggctctgctctgcctttctgagtttggtttctgcttatggtggggagcttgttcccgttcttcccacaagaacccaggatgtggcacagcttccctgccgtcttccttcactcagttggctacgcctcccatcctagctccacttccagaactgccttcaccctaggctgggtccttgttttgtttttagagacagggtctcactgtgtctcccaggctggagtacagtggcgtgatctcggctcactgccacctccacctcccgagttcaagcgattctcctgcctcagcctcccgagtagctaggattacaggcatgcaccaccacgcctggctactttttatatttttagtagagatgaggtttcaccttgttggccaggctggtctcgaactcctggcctcaggtgatccacccgcctcacctcctaaaatgctgggattacaggcgtgggccactgcgcctagccagctgggtccttgttctgctgcccaagcttggccctggttccgtgtgctggttctactttttgttctcccatctgcctcctgcctcctcccctttgagcttagccccgccctctcagcctgatttctgtttcccaagtccagcagtgtcgtgggataggttttgctttcttttactgtctccatcctacttacacctccctgatcctggggtctggggactccccatggtttccttccttctgcaggcccaaaatgatggcccctcttaacccaaggcaggggatcttcctcccaactccctggaccaaggtggcatttcctgcacacccctccaggccaagatgatgctcgctctcaactctgtaggccaaggtggcgtctcctcttgactctccagacctaaagtgacacccttcaggcacttcgggcccaattcagcccagtcctggtgctttcagcgccagatgacagcactttgcagataagaacgatatgatgtgtggatttcactacatttggctcctggatgctataaaaggacttggatttctgacttggctcagggactggggttagcagtctctttctgctccttttcacctgtgttttcttccgatcccagctctggtccctcagccgcattcatatttactctcctctcccagcctgatatccctgtccctcatctcaacccgaagccaagatctgagcccccaagatggagaatggggaggagctttttatggcggactgattaaaactcttaagcattta

SEQ ID NO: 7505 - DNA, 3694 bp, Homo sapiens
cagcagagtccagtcggactgtcatcctttctgcgactctggcgctggtcccgagcagctcacgggcccgtgtgcttccgggtctgagattggcatggtggaccaggtggagggtgtggcctctactaggaggcaaattcgtaaagacctcggcttgggactccgggaactcgggccccagatccttgttcgagctggtcttcagtttccccatctgtacgctgaagagcctggggtccagtaacccccatcatcacccagtttacagaagaggaaactgaggcccagacggggagcagctgacaccaagtcgttaagagaatcagcgaaggggctgggaatccaggacctgcgccttttacccaccgcggcgccggtctcacgtgcagtcccttcgctcttctcccctagttcggtgccatggcgtcccagggtcgtcggcggaggcccctgcggaggccggagacggtggtgccgggggaggcgaccgagacggattccgagcgctctgcgtcctcgtcggaggaggaggagctgtacctgggtccttcgggcccgacgcgcggccgccccacggggctgcgggtggctggggaagccgcggagaccgactcggagccggagccggagccggaaccgacggccgcgccgagggacctgcctccactcgtggtgcagcgggaatcggcggaggaggcctggggcacggaggaggccccggcgcccgcccccgcgcgctcgctcctgcaacttcggctggcggagagccaggcgcggctggaccacgacgtggcggccgccgtgagcggtgtctaccgccgtgcaggccgcgacgtggccgccctggctagtaggctggcggcagcccaggcggcggggctggcggcggcccacagcgtgcgcctggcgcgcggggacctttgtgcgctggccgagcgtctggacatcgtggctggctgccgcctgctgccggacatccgcggcgtgccagggaccgagcctgagaaagacccggggccgcgggcctagccatgattctacttcccaacctgactgcaatttgggggtaggccttgctgcctctgggacctgactctgtctcctgtgtctcttatcaccccccacccccgctcccatcttggtgtcacccatgggggctaatccggtccccttggataatgctttatattggatatagttcaacccctactgcggagaccagggccccactatccttagatctggttcctctcccgatcctgaccctgccgcctggttctgagccttcccctggggcttggctccagcctttgttacatagttgctccttaatctgtttccaccctgggggctcaccaattttttttttttttttttttttttggagacagggtgtttatctgtcacccaggctagagtgcagtggcgggattactgctcactgcaacctcgacctcctgggctcaagtgatcctcccagctcagccttcaagagtagctgggactgcagacctgcaccaccacgtccagctgcccggttaatttttttctgtcggtttgaagaggggagaaggtctcactatgttgcccaggcttgtctcaaactcccgggctcaagcaatcctcccactgtggcgtcccaaagtgctggggttacaggtgtgagccaccacacactgggctctgctctgcctttctgagtttggtttctgcttatggtggggagcttgttcccgttcttcccacaagaacccaggatgtggcacagcttccctgccgtcttccttcactcagttggctacgcctcccatcctagctccacttccagaactgccttcaccctaggctgggtccttgttttgtttttagagacagggtctcactgtgtctcccaggctggagtacagtggcgtgatctcggctcactgccacctccacctcccgagttcaagcgattctcctgcctcagcctcccgagtagctaggattacaggcatgcaccaccacgcctggctactttttatatttttagtagagatgaggtttcaccttgttggccaggctggtctcgaactcctggcctcaggtgatccacccgcctcacctcctaaaatgctgggattacaggcgtgggccactgcgcctagccagctgggtccttgttctgctgcccaagcttggccctggttccgtgtgctggttctactttttgttctcccatctgcctcctgcctcctcccctttgagcttagccccgccctctcagcctgatttctgtttcccaagtccagcagtgtcgtgggataggttttgctttcttttactgtctccatcctacttacacctccctgatcctggggtctggggactccccatggtttccttccttctgcaggcccaaaatgatggcccctcttaacccaaggcaggggatcttcctcccaactccctggaccaaggtggcatttcctgcacacccctccaggccaagatgatgctcgctctcaactctgtaggccaaggtggcgtctcctcttgactctccagacctaaagtgacacccttcaggcacttcgggcccaattcagcccagtcctggtgctttcagcgccagatgacagcactttgcagataagaacgatatgatgtgtggatttcactacatttggctcctggatgctataaaaggacttggatttctgacttggctcagggactggggttagcagtctctttctgctccttttcacctgtgttttcttccgatcccagctctggtccctcagccgcattcatatttactctcctctcccagcctgatatccctgtccctcatctcaacccgaagccaagatctgagcccccaagatggagaatggggaggagctttttatggcggactgattaaaactcttaagcatttaaaaaaaaaaaaaaaaaaaaaaaaaaaaaaaaaaaaaaaaaaaaaaaaaaaaaaaaaaaaaaaaaaaaaaaaaaaaaaaaaaaaaaaaagaaaacaggggggggggaaaaaaaaccggggggccaacaccaacctgaacactaccacgacgtttatgtgtacaacaaggggggcccccatactattatggtacgatatctaaaaacagcagcggcggtgagaacacttataaaaacaacgtcgaaaggcgtgaaaaaacggcacctcgggagaaagcatagaagaaaagaaacacacactttttgtgagggggtggtaacaacatgtgacacaaacagcatcaagagatatagacgccacgagaacaaaaagaaaaccaaggacgaacagtaggggaaacacacccggccgaactagttaggacgagcggggcgaagcggtggcccgacgcagaacatatcttacagaaaattctcgcgggacggtcgtgtgaccatcatgtaccggaagacgcagaggagcaacaggaacgcaaaagcggacggcgagcgagacaccgtaccgacacaacagacggtggccagcaggctgagacgacaggcagccagcacgccaagcaagacaacaacgacaaacggaaagggaaccacaaccgtgagaggacaccgaacaagagcacacagcacatagacacggcgtgagcaagacacaaacagcacgactcacacagagaaagcaaccatgccgaggagaggaccgcagcaacgacag

SEQ ID NO: 7506 - DNA, 1595 bp, Homo sapiens
cagcagagtccagtcggactgtcatcctttctgcgactctggcgctggtcccgagcagctcacgggcccgtgtgcttccgggtctgagattggcatggtggaccaggtggagggtgtggcctctactaggaggcaaattcgtaaagacctcggcttgggactccgggaactcgggccccagatccttgttcgagctggtcttcagtttccccatctgtacgctgaagagcctggggtccagtaacccccatcatcacccagtttacagaagaggaaactgaggcccagacggggagcagctgacaccaagtcgttaagagaatcagcgaaggggctgggaatccaggacctgcgccttttacccaccgcggcgccggtctcacgtgcagtcccttcgctcttctcccctagttcggtgccatggcgtcccagggtcgtcggcggaggcccctgcggaggccggagacggtggtgccgggggaggcgaccgagacggattccgagcgctctgcgtcctcgtcggaggaggaggagctgtacctgggtccttcgggcccgacgcgcggccgccccacggggctgcgggtggctggggaagccgcggagaccgactcggagccggagccggagccggaaccgacggccgcgccgagggacctgcctccactcgtggtgcagcgggaatcggcggaggaggcctggggcacggaggaggccccggcgcccgcccccgcgcgctcgctcctgcaacttcggctggcggagagccaggcgcggctggaccacgacgtggcggccgccgtgagcggtgtctaccgccgtgcaggccgcgacgtggccgccctggctagtaggctggcggcagcccaggcggcggggctggcggcggcccacagcgtgcgcctggcgcgcggggacctttgtgcgctggccgagcgtctggacatcgtggctggctgccgcctgctgccggacatccgcggcgtgccagggaccgagcctgagaaagacccggggccgcgggcctagccatgattctacttcccaacctgactgcaatttgggggcccaaaatgatggcccctcttaacccaaggcaggggatcttcctcccaactccctggaccaaggtggcatttcctgcacacccctccaggccaagatgatgctcgctctcaactctgtaggccaaggtggcgtctcctcttgactctccagacctaaagtgacacccttcaggcacttcgggcccaattcagcccagtcctggtgctttcagcgccagatgacagcactttgcagataagaacgatatgatgtgtggatttcactacatttggctcctggatgctataaaaggacttggatttctgacttggctcagggactggggttagcagtctctttctgctccttttcacctgtgttttcttccgatcccagctctggtccctcagccgcattcatatttactctcctctcccagcctgatatccctgtccctcatctcaacccgaagccaagatctgagcccccaagatggagaatggggaggagctttttatggcggactgattaaaactcttaagcattta

SEQ ID NO: 7507 - DNA, 415 bp, Homo sapiens
gtaaaaacccttttaactcctatgaaaaatgaaatgctgagagcactatgaatgacgacagctgtccataagtatcagagagagttctattgtccagcttgtccctggataaaatgaatactttacagcagaggctgttcagcttggctaaagagtgtggggagaaggggaggaggtcactggagatttcgcacactaatttaatctgggaaaaggacaggctctgcatctcccttgaacagactggcagcaatctgggcccccacagaactatctccttttgcctgtgctctatttattccttatctctgtttaccaaccgctaggtccctttcattcacaccacgaggccgttttcctactatcagtcagcagctgacactgtggaagagcctcaaaggcaaaaaaaaaaaaa

SEQ ID NO: 7508 - DNA, 382 bp, Homo sapiens
agtcaggagttcaagaccaagctggccaacatggaaaaaccccgtctctactaaaaatatgaaaattagctgggagtggtgggagatgcctgtaatcccagctctttgggagcctgaggcaggagaattgcttgaacctgggaggcggagattgcagccaagattatgccactgtactccagccagggtgacagagcaagactccgtctccccaccgccaaaaagaaacgtatatcaataaaatgaagagtatttggtttagtaacacctaagatttttctgtgtagggagatatatcttgaaattaatcttgtagtttacttaatttcaggagattataaggatatggctgtattccccagacccacttagttttgctcaa

SEQ ID NO: 7509 - DNA, 453 bp, Homo sapiens
tcttagataattgccaattttgaaaagttggcattttgcgtcttttgatcaatatagccattttcatatagaagcagtcctacctattgccatttcaggtggaaagccttaccacacaaattgatactgtgtcctcaccaagtttaaaagatctggccgggagccgcagctcacgcctgtaataccagcactttgggaggccgaggcgggtggatcatgaggtcaggagatcgaaaccacgtgttaggaggctaacacagtgaaaccctgtctctactaaaaatacaaaagcaattagccgggcgtggtggcgggctcctgtagtcccagctacttgggaggctgaggcaggagaatggcgtgaacccgggaggcggagcttgcagtgagccgagattgcgccaccgcactccagcctgggcgacagagcgagactccgtctcaaaaaaaaaa

SEQ ID NO: 7510 - DNA, 852 bp, Homo sapiens
aagagacccactgcggaagaaacttgtatcaccaataaaatgtgcatctgacttttggacagggatagattcctcagctcagcttctactttgctatgagtatctcgaaaagcaaatcgtcctacagattgtaaaaggttgctaatcagtgaaatacgttacagggaattttcacattgattatgaatggaaattattttgtgtctgagagaatatgtacaattttaccttgtctgataaggtgaattataaaatgttttacataagaaataaaccaatttcattataagtaacattttaaaccattcttagtacttactaatttgtgttcttcttacagatataagtatccagtatatggtgtccagtggcatccagagaaagcaccttatgagtggaagaatttggatggcatttcccatgcacctaatgctgtgaaaaccgcattttatttagcagagttttttgttaatgaagctcggaaaaacaaccatcattttaaatctgaatctgaagaggagaaagcattgatttatcagttcagtccaatttatactggaaatatttcttcatttcagcaatgttacatatttgattgaaagtcttcaatttgttaacagagcaaatttgaataattccatgattaaactgttagaataacttgctactcatggcaagattaggaagtcacagattcttttctataatgtgcctggctctgattcttcattctgtatgtgactatttatataacattagataattaaatagtgagacataaatagagtgtttttcatggaaaagccttcttatatctgaagattgaaaaaaataaatttactgaaatacaaa

SEQ ID NO: 7511 - DNA, 644 bp, Homo sapiens
  misc_feature (15)..(15): n is a, c, g, or t
  misc_feature (17)..(17): n is a, c, g, or t
  misc_feature (27)..(27): n is a, c, g, or t
  misc_feature (31)..(31): n is a, c, g, or t
  misc_feature (51)..(51): n is a, c, g, or t
  misc_feature (54)..(54): n is a, c, g, or t
gtgccaattttattngntatcaccaantttnaaacccacgtgggtgttaanaanaaagcaggtacgtcgatccggatgaagtaagagtttcatgtctactacaatacagatgcagatgagttattcacagggatataagtatccagtatatggtgtccagtggcatccagagaaagcaccttatgagtggaagaatttggatggcatttcccatgcacctaatgctgtgaaaaccgcattttatttagcagagttttttgttaatgaagctcggaaaaacaaccatcattttaaatctgaatctgaagaggagaaagcattgatttatcagttcagtccaatttatactggaaatatttcttcatttcagcaatgttacatatttgattgaaagtcttcaatttgttaacagagcaaatttgaataattccatgattaaactgttagaataacttgctactcatggcaagattaggaagtcacagattcttttctataatgtgcctggctctgattcttcattctgtatgtgactatttatataacattagataattaaatagtgagacataaatagagtgtttttcatggaaaagccttcttatatctgaagattgaaaaaaataaatttactgaaatacaaa

SEQ ID NO: 7512 - DNA, 491 bp, Homo sapiens
tactactaaattcgcggccgcgtcgacttatgagtggaagaatttggatggcatttcccatgcacctaatgctgtgaaaaccgcattttatttagcagagttttttgttaatgaagctcggaaaaacaaccatcattttaaatctgaatctgaagaggagaaagcattgatttatcagttcagtccaatttatactggaaatatttcttcatttcagcaatgttacatatttgattgaaagtcttcaatttgttaacagagcaaatttgaataattccatgattaaactgttagaataacttgctactcatggcaagattaggaagtcacagattcttttctataatgtgcctggctctgattcttcattctgtatgtgactatttatataacattagataattaaatagtgagacataaatagagtgtttttcatggaaaagccttcttatatctgaagattgaaaaaaataaatttactgaaatacaaa

SEQ ID NO: 7513 - DNA, 338 bp, Homo sapiens
cttcaatttgttaacagagcaaatttaagactttcaatcaaatatgtaacatgctgaaatgaagcaatgttacatatttgattgaaagtcttcaatttgttaacagagcaaatttgaataattccatgattaaactgttagaataacttgctactcatggcaagattaggaagtcacagattcttttctataatgtgcctggctctgattcttcattctgtatgtgactatttatataacattagataattaaatagtgagacataaatagagtgtttttcatggaaaagccttcttatatctgaagattgaaaaaaataaatttactgaaatacaaa

SEQ ID NO: 7514 - DNA, 2101 bp, Homo sapiens
tggaaactttcactgagtacaagctatatatccatgtatttaggaacaatcaacagttttaacgaataggaaccagtcatcttttctgccccggtggataggcttagtggtggtcggtggatggcgctgaccgcggttgatcagaggaagctgacgccgtttgcaggcgtggcctgggcgtgcccgcttcaaagtagacgcccggagttggcccagttctgaccctagtgatgcgcctgtgcatgtgttcctatcgccgtcccgtcttcacttcctacagatgccgcgaccccccaaatagcaagtgtggacattcacattcaggggcacaggctgtccgtacagcgaacgttgtcaccattcccggagatagggccccgaccttcaagggggcggtgcggttggcgcgcagttctcaggcgccttctagaatcccctgccagcctccccgctgcctggttaccaaactcggccggggacacccaacctcccctctcgaggacctgggttggccagcccagctttgtacgggtgactgaagtccacatcgacgtaacagttgaaagggaaggacgcggagaccacccggtacccgccccaggcgtttccagagtctccgcttaggcggcccgtgggggtcggggtcgcggtcgcggtcgcggaccggggacagagcaatggggcgggcgcgcagcgccggctgcactcccagagcctcccaccgccgccccacggccgcctagcgcgcgccgggactgcatttcccataggcccacgctgcggagcaccgcccacccgagtctcacgcgagtgcgctgccgcgaggtgtccctgccgcagcccccgcccgcccgcagagcttttgaaaggcggcgggaggcggcgagcgccatggccagtccgggctgcctgctgtgcgtgctgggcctgctactctgcggggcggcgagcctcgagctgtctagaccccacggcgacaccgccaagaagcccatcatcggaatattaatgcaaaaatgccgtaataaagtcatgaaaaactatggaagatactatattgctgcgtcctatgtaaagtacttggagtctgcaggtgcgagagttgtaccagtaaggctggatcttacagagaaagactatgaaatacttttcaaatctattaatggaatccttttccctggaggaagtgttgacctcagacgctcagattatgctaaagtggccaaaatattttataacttgtccatacagagttttgatgatggagactattttcctgtgtggggcacatgccttggatttgaagagctttcactgctgattagtggagagtgcttattaactgccacagatactgttgacgtggcaatgccgctgaacttcactggaggtcaattgcacagcagaatgttccagaattttcctactgagttgttgctgtcattagcagtagaacctctgactgccaatttccataagtggagcctctccgtgaagaattttacaatgaatgaaaagttaaagaagtttttcaatgtcttaactacaaatacagatggcaagattgagtttatttcaacaatggaaggatataagtatccagtatatggtgtccagtggcatccagagaaagcaccttatgagtggaagaatttggatggcatttcccatgcacctaatgctgtgaaaaccgcattttatttagcagagttttttgttaatgaagctcggaaaaacaaccatcattttaaatctgaatctgaagaggagaaagcattgatttatcagttcagtccaatttatactggaaatatttcttcatttcagcaatgttacatatttgattgaaagtcttcaatttgttaacagagcaaatttgaataattccatgattaaactgttagaataacttgctactcatggcaagattaggaagtcacagattcttttctataatgtgcctggctctgattcttcattctgtatgtgactatttatataacattagataattaaatagtgagacataaatagagtgtttttcatggaaaagccttcttatatctgaagattgaaaaaaataaatttactgaaatacaaa

SEQ ID NO: 7515 - DNA, 2054 bp, Homo sapiens
tggaaactttcactgagtacaagctatatatccatgtatttaggaacaatcaacagttttaacgaataggaaccagtcatcttttctgccccggtggataggcttagtggtggtcggtggatggcgctgaccgcggttgatcagaggaagctgacgccgtttgcaggcgtggcctgggcgtgcccgcttcaaagtagacgcccggagttggcccagttctgaccctagtgatgcgcctgtgcatgtgttcctatcgccgtcccgtcttcacttcctacagatgccgcgaccccccaaatagcaagtgtggacattcacattcaggggcacaggctgtccgtacagcgaacgttgtcaccattcccggagatagggccccgaccttcaagggggcggtgcggttggcgcgcagttctcaggcgccttctagaatcccctgccagcctccccgctgcctggttaccaaactcggccggggacacccaacctcccctctcgaggacctgggttggccagcccagctttgtacgggtgactgaagtccacatcgacgtaacagttgaaagggaaggactaggcggcccgtgggggtcggggtcgcggtcgcggtcgcggaccggggacagagcaatggggcgggcgcgcagcgccggctgcactcccagagcctcccaccgccgccccacggccgcctagcgcgcgccgggactgcatttcccataggcccacgctgcggagcaccgcccacccgagtctcacgcgagtgcgctgccgcgaggtgtccctgccgcagcccccgcccgcccgcagagcttttgaaaggcggcgggaggcggcgagcgccatggccagtccgggctgcctgctgtgcgtgctgggcctgctactctgcggggcggcgagcctcgagctgtctagaccccacggcgacaccgccaagaagcccatcatcggaatattaatgcaaaaatgccgtaataaagtcatgaaaaactatggaagatactatattgctgcgtcctatgtaaagtacttggagtctgcaggtgcgagagttgtaccagtaaggctggatcttacagagaaagactatgaaatacttttcaaatctattaatggaatccttttccctggaggaagtgttgacctcagacgctcagattatgctaaagtggccaaaatattttataacttgtccatacagagttttgatgatggagactattttcctgtgtggggcacatgccttggatttgaagagctttcactgctgattagtggagagtgcttattaactgccacagatactgttgacgtggcaatgccgctgaacttcactggaggtcaattgcacagcagaatgttccagaattttcctactgagttgttgctgtcattagcagtagaacctctgactgccaatttccataagtggagcctctccgtgaagaattttacaatgaatgaaaagttaaagaagtttttcaatgtcttaactacaaatacagatggcaagattgagtttatttcaacaatggaaggatataagtatccagtatatggtgtccagtggcatccagagaaagcaccttatgagtggaagaatttggatggcatttcccatgcacctaatgctgtgaaaaccgcattttatttagcagagttttttgttaatgaagctcggaaaaacaaccatcattttaaatctgaatctgaagaggagaaagcattgatttatcagttcagtccaatttatactggaaatatttcttcatttcagcaatgttacatatttgattgaaagtcttcaatttgttaacagagcaaatttgaataattccatgattaaactgttagaataacttgctactcatggcaagattaggaagtcacagattcttttctataatgtgcctggctctgattcttcattctgtatgtgactatttatataacattagataattaaatagtgagacataaatagagtgtttttcatggaaaagccttcttatatctgaagattgaaaaaaataaatttactgaaatacaaa

SEQ ID NO: 7516 - DNA, 2138 bp, Homo sapiens
tggaaactttcactgagtacaagctatatatccatgtatttaggaacaatcaacagttttaacgaataggaaccagtcatcttttctgccccggtggataggcttagtggtggtcggtggatggcgctgaccgcggttgatcagaggaagctgacgccgtttgcaggcgtggcctgggcgtgcccgcttcaaagtagacgcccggagttggcccagttctgaccctagtgatgcgcctgtgcatgtgttcctatcgccgtcccgtcttcacttcctacagatgccgcgaccccccaaatagcaagtgtggacattcacattcaggggcacaggctgtccgtacagcgaacgttgtcaccattcccggagatagggccccgaccttcaagggggcggtgcggttggcgcgcagttctcaggcgccttctagaatcccctgccagcctccccgctgcctggttaccaaactcggccggggacacccaacctcccctctcgaggacctgggttggccagcccagctttgtacgggtgactgaagtccacatcgacgtaacagttgaaagggaaggacgcggagaccacccggtacccgccccaggcgtttccagagtctccgcttaggcggcccgtgggggtcggggtcgcggtcgcggtcgcggaccggggacagagcaatggggcgggcgcgcagcgccggctgcactcccagagcctcccaccgccgccccacggccgcctagcgcgcgccgggactgcatttcccataggcccacgctgcggagcaccgcccacccgagtctcacgcgagtgcgctgccgcgaggtgtccctgccgcagcccccgcccgcccgcagagcttttgaaaggcggcgggaggcggcgagcgccatggccagtccgggctgcctgctgtgcgtgctgggcctgctactctgcggggcggcgagcctcgagctgtctagaccccacggcgacaccgccaagaagcccatcatcggaatattaatgcaaaaatgccgtaataaagtcatgaaaaactatggaagatactatattgctgcgtcctatgtaaagtacttggagtctgcaggtgcgagagttgtaccagtaaggctggatcttacagagaaagactatgaaatacttttcaaatctattaatggaatccttttccctggaggaagtgttgacctcagacgctcagattatgctaaagtggccaaaatattttataacttgtccatacagagttttgatgatggagactattttcctgtgtggggcacatgccttggatttgaagagctttcactgctgattagtggagagtgcttattaactgccacagatactgttgacgtggcaatgccgctgaacttcactggaggtcaattgcacagcagaatgttccagaattttcctactgagttgttgctgtcattagcagtagaacctctgactgccaatttccataagtggagcctctccgtgaagaattttacaatgaatgaaaagttaaagaagtttttcaatgtcttaactacaaatacagatggcaagattgagtttatttcaacaatggaaggatataagtatccagtatatggtgtccagtggcatccagagaaagcaccttatgagtggaagaatttggatggcatttcccatgcacctaatgctgtgaaaaccgcattttatttagcagagttttttgttaatgaagctcggaaaaacaaccatcattttaaatctgaatctgaagaggagaaagcattgatttatcagttcagtccaatttatactggaaatatttcttcatttcagcaatgttacatatttgattgaaagtcttcaatttgttaacagagcaaatttgaataattccatgattaaactgttagaataacttgctactcatggcaagattaggaagtcacagattcttttctataatgtgcctggctctgattcttcattctgtatgtgactatttatataacattagataattaaatagtgagacataaatagagtgtttttcatggaaaagccttcttatatctgaagattgaaaaaaataaatttactgaaatacaaaaaaaaaaacacaccaccacacacccccaaaaaagggg

SEQ ID NO: 7517 - DNA, 2205 bp, Homo sapiens
tggaaactttcactgagtacaagctatatatccatgtatttaggaacaatcaacagttttaacgaataggaaccagtcatcttttctgccccggtggataggcttagtggtggtcggtggatggcgctgaccgcggttgatcagaggaagctgacgccgtttgcaggcgtggcctgggcgtgcccgcttcaaagtagacgcccggagttggcccagttctgaccctagtgatgcgcctgtgcatgtgttcctatcgccgtcccgtcttcacttcctacagatgccgcgaccccccaaatagcaagtgtggacattcacattcaggggcacaggctgtccgtacagcgaacgttgtcaccattcccggagatagggccccgaccttcaagggggcggtgcggttggcgcgcagttctcaggcgccttctagaatcccctgccagcctccccgctgcctggttaccaaactcggccggggacacccaacctcccctctcgaggacctgggttggccagcccagctttgtacgggtgactgaagtccacatcgacgtaacagttgaaagggaaggacgcggagaccacccggtacccgccccaggcgtttccagagtctccgcttaggcggcccgtgggggtcggggtcgcggtcgcggtcgcggaccggggacagagcaatggggcgggcgcgcagcgccggctgcactcccagagcctcccaccgccgccccacggccgcctagcgcgcgccgggactgcatttcccataggcccacgctgcggagcaccgcccacccgagtctcacgcgagtgcgctgccgcgaggtgtccctgccgcagcccccgcccgcccgcagagcttttgaaaggcggcgggaggcggcgagcgccatggccagtccgggctgcctgctgtgcgtgctgggcctgctactctgcggggcggcgagcctcgagctgtctagaccccacggcgacaccgccaagaagcccatcatcggaatattaatgcaaaaatgccgtaataaagtcatgaaaaactatggaagatactatattgctgcgtcctatgtaaagtacttggagtctgcaggtgcgagagttgtaccagtaaggctggatcttacagagaaagactatgaaatacttttcaaatctattaatggaatccttttccctggaggaagtgttgacctcagacgctcagattatgctaaagtggccaaaatattttataacttgtccatacagagttttgatgatggagactattttcctgtgtggggcacatgccttggatttgaagagctttcactgctgattagtggagagtgcttattaactgccacagatactgttgacgtggcaatgccgctgaacttcactggaggtcaattgcacagcagaatgttccagaattttcctactgagttgttgctgtcattagcagtagaacctctgactgccaatttccataagtggagcctctccgtgaagaattttacaatgaatgaaaagttaaagaagtttttcaatgtcttaactacaaatacagatggcaagattgagtttatttcaacaatggaaggatataagtatccagtatatggtgtccagtggcatccagagaaagcaccttatgagtggaagaatttggatggcatttcccatgcacctaatgctgtgaaaaccgcattttatttagcagagttttttgttaatgaagctcggaaaaacaaccatcattttaaatctgaatctgaagaggagaaagcattgatttatcagttcagtccaatttatactggaaatatttcttcatttcagcaatgttacatatttgattgaaagtcttcaatttgttaacagagcaaatttgaataattccatgattaaactgttagaataacttgctactcatggcaagattaggaagtcacagattcttttctataatgtgcctggctctgattcttcattctgtatgtgactatttatataacattagataattaaatagtgagacataaatagagtgtttttcatggaaaagccttcttatatctgaagattgaaaaaaataaatttactgaaatacaaatattttttctaattgatttgcttgggaaataaataccatcccctacctgcccactccatcctccttgctgaaaaagaaaatagtcttttaaaatcctaaaaatt

SEQ ID NO: 7518 - DNA, 1814 bp, Homo sapiens
tggaaactttcactgagtacaagctatatatccatgtatttaggaacaatcaacagttttaacgaataggaaccagtcatcttttctgccccggtggataggcttagtggtggtcggtggatggcgctgaccgcggttgatcagaggaagctgacgccgtttgcaggcgtggcctgggcgtgcccgcttcaaagtagacgcccggagttggcccagttctgaccctagtgatgcgcctgtgcatgtgttcctatcgccgtcccgtcttcacttcctacagatgccgcgaccccccaaatagcaagtgtggacattcacattcaggggcacaggctgtccgtacagcgaacgttgtcaccattcccggagatagggccccgaccttcaagggggcggtgcggttggcgcgcagttctcaggcgccttctagaatcccctgccagcctccccgctgcctggttaccaaactcggccggggacacccaacctcccctctcgaggacctgggttggccagcccagctttgtacgggtgactgaagtccacatcgacgtaacagttgaaagggaaggacgcggagaccacccggtacccgccccaggcgtttccagagtctccgctcctgctgtgcgtgctgggcctgctactctgcggggcggcgagcctcgagctgtctagaccccacggcgacaccgccaagaagcccatcatcggaatattaatgcaaaaatgccgtaataaagtcatgaaaaactatggaagatactatattgctgcgtcctatgtaaagtacttggagtctgcaggtgcgagagttgtaccagtaaggctggatcttacagagaaagactatgaaatacttttcaaatctattaatggaatccttttccctggaggaagtgttgacctcagacgctcagattatgctaaagtggccaaaatattttataacttgtccatacagagttttgatgatggagactattttcctgtgtggggcacatgccttggatttgaagagctttcactgctgattagtggagagtgcttattaactgccacagatactgttgacgtggcaatgccgctgaacttcactggaggtcaattgcacagcagaatgttccagaattttcctactgagttgttgctgtcattagcagtagaacctctgactgccaatttccataagtggagcctctccgtgaagaattttacaatgaatgaaaagttaaagaagtttttcaatgtcttaactacaaatacagatggcaagattgagtttatttcaacaatggaaggatataagtatccagtatatggtgtccagtggcatccagagaaagcaccttatgagtggaagaatttggatggcatttcccatgcacctaatgctgtgaaaaccgcattttatttagcagagttttttgttaatgaagctcggaaaaacaaccatcattttaaatctgaatctgaagaggagaaagcattgatttatcagttcagtccaatttatactggaaatatttcttcatttcagcaatgttacatatttgattgaaagtcttcaatttgttaacagagcaaatttgaataattccatgattaaactgttagaataacttgctactcatggcaagattaggaagtcacagattcttttctataatgtgcctggctctgattcttcattctgtatgtgactatttatataacattagataattaaatagtgagacataaatagagtgtttttcatggaaaagccttcttatatctgaagattgaaaaaaataaatttactgaaatacaaa

SEQ ID NO: 7519 - DNA, 2047 bp, Homo sapiens
tggaaactttcactgagtacaagctatatatccatgtatttaggaacaatcaacagttttaacgaataggaaccagtcatcttttctgccccggtggataggcttagtggtggtcggtggatggcgctgaccgcggttgatcagaggaagctgacgccgtttgcaggcgtggcctgggcgtgcccgcttcaaagtagacgcccggagttggcccagttctgaccctagtgatgcgcctgtgcatgtgttcctatcgccgtcccgtcttcacttcctacagatgccgcgaccccccaaatagcaagtgtggacattcacattcaggggcacaggctgtccgtacagcgaacgttgtcaccattcccggagatagggccccgaccttcaagggggcggtgcggttggcgcgcagttctcaggcgccttctagaatcccctgccagcctccccgctgcctggttaccaaactcggccggggacacccaacctcccctctcgaggacctgggttggccagcccagctttgtacgggtgactgaagtccacatcgacgtaacagttgaaagggaaggacgcggagaccacccggtacccgccccaggcgtttccagagtctccgcttaggcggcccgtgggggtcggggtcgcggtcgcggtcgcggaccggggacagagcaatggggcgggcgcgcagcgccggctgcactcccagagcctcccaccgccgccccacggccgcctagcgcgcgccgggactgcatttcccataggcccacgctgcggagcaccgcccacccgagtctcacgcgagtgcgctgccgcgaggtgtccctgccgcagcccccgcccgcccgcagagcttttgaaaggcggcgggaggcggcgagcgccatggccagtccgggctgcctgctgtgcgtgctgggcctgctactctgcggggcggcgagcctcgagctgtctagaccccacggcgacaccgccaagaagcccatcatcggaatattaatgcaaaaatgccgtaataaagtcatgaaaaactatggaagatactatattgctgcgtcctatgtaaagtacttggagtctgcaggtgcgagagttgtaccagtaaggctggatcttacagagaaagactatgaaatacttttcaaatctattaatggaatccttttccctggaggaagtgttgacctcagacgctcagattatgctaaagtggccgtgtggggcacatgccttggatttgaagagctttcactgctgattagtggagagtgcttattaactgccacagatactgttgacgtggcaatgccgctgaacttcactggaggtcaattgcacagcagaatgttccagaattttcctactgagttgttgctgtcattagcagtagaacctctgactgccaatttccataagtggagcctctccgtgaagaattttacaatgaatgaaaagttaaagaagtttttcaatgtcttaactacaaatacagatggcaagattgagtttatttcaacaatggaaggatataagtatccagtatatggtgtccagtggcatccagagaaagcaccttatgagtggaagaatttggatggcatttcccatgcacctaatgctgtgaaaaccgcattttatttagcagagttttttgttaatgaagctcggaaaaacaaccatcattttaaatctgaatctgaagaggagaaagcattgatttatcagttcagtccaatttatactggaaatatttcttcatttcagcaatgttacatatttgattgaaagtcttcaatttgttaacagagcaaatttgaataattccatgattaaactgttagaataacttgctactcatggcaagattaggaagtcacagattcttttctataatgtgcctggctctgattcttcattctgtatgtgactatttatataacattagataattaaatagtgagacataaatagagtgtttttcatggaaaagccttcttatatctgaagattgaaaaaaataaatttactgaaatacaaa

SEQ ID NO: 7520 - DNA, 816 bp, Homo sapiens
cgtctttcaactgcagtttgcgtctttcactgctgattagtggagagtgcttattaactgccacagatactgttgacgtggcaatgccgctgaacttcactggaggtcaattgcacagcagaatgttccagaattttcctactgagttgttgctgtcattagcagtagaacctctgactgccaatttccataagtggagcctctccgtgaagaattttacaatgaatgaaaagttaaagaagtttttcaatgtcttaactacaaatacagatggcaagattgagtttatttcaacaatggaaggatataagtatccagtatatggtgtccagtggcatccagagaaagcaccttatgagtggaagaatttggatggcatttcccatgcacctaatgctgtgaaaaccgcattttatttagcagagttttttgttaatgaagctcggaaaaacaaccatcattttaaatctgaatctgaagaggagaaagcattgatttatcagttcagtccaatttatactggaaatatttcttcatttcagcaatgttacatatttgattgaaagtcttcaatttgttaacagagcaaatttgaataattccatgattaaactgttagaataacttgctactcatggcaagattaggaagtcacagattcttttctataatgtgcctggctctgattcttcattctgtatgtgactatttatataacattagataattaaatagtgagacataaatagagtgtttttcatggaaaagccttcttatatctgaagattgaaaaaaataaatttactgaaatacaaa

SEQ ID NO: 7521 - DNA, 2030 bp, Homo sapiens
tggaaactttcactgagtacaagctatatatccatgtatttaggaacaatcaacagttttaacgaataggaaccagtcatcttttctgccccggtggataggcttagtggtggtcggtggatggcgctgaccgcggttgatcagaggaagctgacgccgtttgcaggcgtggcctgggcgtgcccgcttcaaagtagacgcccggagttggcccagttctgaccctagtgatgcgcctgtgcatgtgttcctatcgccgtcccgtcttcacttcctacagatgccgcgaccccccaaatagcaagtgtggacattcacattcaggggcacaggctgtccgtacagcgaacgttgtcaccattcccggagatagggccccgaccttcaagggggcggtgcggttggcgcgcagttctcaggcgccttctagaatcccctgccagcctccccgctgcctggttaccaaactcggccggggacacccaacctcccctctcgaggacctgggttggccagcccagctttgtacgggtgactgaagtccacatcgacgtaacagttgaaagggaaggacgcggagaccacccggtacccgccccaggcgtttccagagtctccgcttaggcggcccgtgggggtcggggtcgcggtcgcggtcgcggaccggggacagagcaatggggcgggcgcgcagcgccggctgcactcccagagcctcccaccgccgccccacggccgcctagcgcgcgccgggactgcatttcccataggcccacgctgcggagcaccgcccacccgagtctcacgcgagtgcgctgccgcgaggtgtccctgccgcagcccccgcccgcccgcagagcttttgaaaggcggcgggaggcggcgagcgccatggccagtccgggctgcctgctgtgcgtgctgggcctgctactctgcggggcggcgagcctcgagctgtctagaccccacggcgacaccgccaagaagcccatcatcggaatattaatgcaaaaatgccgtaataaagtcatgaaaaactatggaagatactatattgctgcgtcctatgtaaagtacttggagtctgcaggtgcgagagttgtaccagtaaggctggatcttacagagaaagactatgaaatacttttcaaatctattaatggaatccttttccctggaggaagtgttgacctcagacgctcagattatgctaaagtggccaaaatattttataacttgtccatacagagttttgatgatggagactattttcctgtgtggggcacatgccttggatttgaagagctttcactgctgattagtggagagtgcttattaactgccacagatactgttgacgtggcaatgccgctgaacttcactggaggtcaattgcacagcagaatgttccagaattttcctactgagttgttgctgtcattagcagtagaacctctgactgccaatttccataagtggagcctctccgtgaagaattttacaatgaatgaaaagttaaagaagtttttcaatgtcttaactacaaatacagatggcaagattgagtttatttcaacaatggaaggatataagtatccagtatatggtgtccagtggcatccagagaaagcaccttatgagtggaagaatttctcggaaaaacaaccatcattttaaatctgaatctgaagaggagaaagcattgatttatcagttcagtccaatttatactggaaatatttcttcatttcagcaatgttacatatttgattgaaagtcttcaatttgttaacagagcaaatttgaataattccatgattaaactgttagaataacttgctactcatggcaagattaggaagtcacagattcttttctataatgtgcctggctctgattcttcattctgtatgtgactatttatataacattagataattaaatagtgagacataaatagagtgtttttcatggaaaagccttcttatatctgaagattgaaaaaaataaatttactgaaatacaaa

SEQ ID NO: 7522 - DNA, 2043 bp, Homo sapiens
  misc_feature (1499)..(1499): n is a, c, g, or t
  misc_feature (1513)..(1514): n is a, c, g, or t
tggaaactttcactgagtacaagctatatatccatgtatttaggaacaatcaacagttttaacgaataggaaccagtcatcttttctgccccggtggataggcttagtggtggtcggtggatggcgctgaccgcggttgatcagaggaagctgacgccgtttgcaggcgtggcctgggcgtgcccgcttcaaagtagacgcccggagttggcccagttctgaccctagtgatgcgcctgtgcatgtgttcctatcgccgtcccgtcttcacttcctacagatgccgcgaccccccaaatagcaagtgtggacattcacattcaggggcacaggctgtccgtacagcgaacgttgtcaccattcccggagatagggccccgaccttcaagggggcggtgcggttggcgcgcagttctcaggcgccttctagaatcccctgccagcctccccgctgcctggttaccaaactcggccggggacacccaacctcccctctcgaggacctgggttggccagcccagctttgtacgggtgactgaagtccacatcgacgtaacagttgaaagggaaggacgcggagaccacccggtacccgccccaggcgtttccagagtctccgcttaggcggcccgtgggggtcggggtcgcggtcgcggtcgcggaccggggacagagcaatggggcgggcgcgcagcgccggctgcactcccagagcctcccaccgccgccccacggccgcctagcgcgcgccgggactgcatttcccataggcccacgctgcggagcaccgcccacccgagtctcacgcgagtgcgctgccgcgaggtgtccctgccgcagcccccgcccgcccgcagagcttttgaaaggcggcgggaggcggcgagcgccatggccagtccgggctgcctgctgtgcgtgctgggcctgctactctgcggggcggcgagcctcgagctgtctagaccccacggcgacaccgccaagaagcccatcatcggaatattaatgcaaaaatgccgtaataaagtcatgaaaaactatggaagatactatattgctgcgtcctatgtaaagtacttggagtctgcaggtgcgagagttgtaccagtaaggctggatcttacagagaaagactatgaaatacttttcaaatctattaatggaatccttttccctggaggaagtgttgacctcagacgctcagattatgctaaagtggccaaaatattttataacttgtccatacagagttttgatgatggagactattttcctgtgtggggcacatgccttggatttgaagagctttcactgctgattagtggagagtgcttattaactgccacagatactgttgacgtggcaatgccgctgaacttcactggaggtcaattgcacagcagaatgttccagaattttcctactgagttgttgctgtcattagcagtagaacctctgactgccaatttccataagtggagcctctccgtgaagantttacaatgaatgnnttatttcaacaatggagatataagtatccagtatatggtgtccagtggcatccagagaaagcaccttatgagtggaagaatttggatggcatttcccatgcacctaatgctgtgaaaaccgcattttatttagcagagttttttgttaatgaagctcggaaaaacaaccatcattttaaatctgaatctgaagaggagaaagcattgatttatcagttcagtccaatttatactggaaatatttcttcatttcagcaatgttacatatttgattgaaagtcttcaatttgttaacagagcaaatttgaataattccatgattaaactgttagaataacttgctactcatggcaagattaggaagtcacagattcttttctataatgtgcctggctctgattcttcattctgtatgtgactatttatataacattagataattaaatagtgagacataaatagagtgtttttcatggaaaagccttcttatatctgaagattgaaaaaaataaatttactgaaatacaaa

SEQ ID NO: 7523 - DNA, 1659 bp, Homo sapiens
tggaaactttcactgagtacaagctatatatccatgtatttaggaacaatcaacagttttaacgaataggaaccagtcatcttttctgccccggtggataggcttagtggtggtcggtggatggcgctgaccgcggttgatcagaggaagctgacgccgtttgcaggcgtggcctgggcgtgcccgcttcaaagtagacgcccggagttggcccagttctgaccctagtgatgcgcctgtgcatgtgttcctatcgccgtcccgtcttcacttcctacagatgccgcgaccccccaaatagcaagtgtggacattcacattcaggggcacaggctgtccgtacagcgaacgttgtcaccattcccggagatagggccccgaccttcaagggggcggtgcggttggcgcgcagttctcaggcgccttctagaatcccctgccagcctccccgctgcctggttaccaaactcggccggggacacccaacctcccctctcgaggacctgggttggccagcccagctttgtacgggtgactgaagtccacatcgacgtaacagttgaaagggaaggacgcggagaccacccggtacccgccccaggcgtttccagagtctccgcttaggcggcccgtgggggtcggggtcgcggtcgcggtcgcggaccggggacagagcaatggggcgggcgcgcagcgccggctgcactcccagagcctcccaccgccgccccacggccgcctagcgcgcgccgggactgcatttcccataggcccacgctgcggagcaccgcccacccgagtctcacgcgagtgcgctgccgcgaggtgtccctgccgcagcccccgcccgcccgcagagcttttgaaaggcggcgggaggcggcgagcgccatggccagtccgggctgcctgctgtgcgtgctgggcctgctactctgcggggcggcgagcctcgagctgtctagaccccacggcgacaccgccaagaagcccatcatcggaatattaatgcaaaaatgccgtaataaagtcatgaaaaactatggaagatactatattgctgcgtcctatgtaaagtacttggagtctgcaggtgcgagagttgtaccagtaaggctggatcttacagagaaagactatgaaatacttttcaaatctattaatggaatccttttccctggaggaagtgttgacctcagacgctcagattatgctaaagtggccaaaatattttataacttgtccatacagagttttgatgatggagactattttcctgtgtggggcacatgccttggatttgaagagctttcactgctgattagtggagagtgcttattaactgccacagatactgttgacgtggcaatgccgctgaacttcactggaggtcaattgcacagcagaatgttccagaattttcctactgagttgttgctgtcattagcagtagaacctctgactgccaatttccataagtggagcctctccgtgaagaattttacaatgaatgaaaagttaaagaagtttttcaatgtcttaactacaaatacagatggcaagattgagtttatttcaacaatggaagttttcctgggtattttcctgaatggggtggtgaagaagaaaagtaaaagaataaagggggcaaggatgaag

SEQ ID NO: 7524 - DNA, 1543 bp, Homo sapiens
tggaaactttcactgagtacaagctatatatccatgtatttaggaacaatcaacagttttaacgaataggaaccagtcatcttttctgccccggtggataggcttagtggtggtcggtggatggcgctgaccgcggttgatcagaggaagctgacgccgtttgcaggcgtggcctgggcgtgcccgcttcaaagtagacgcccggagttggcccagttctgaccctagtgatgcgcctgtgcatgtgttcctatcgccgtcccgtcttcacttcctacagatgccgcgaccccccaaatagcaagtgtggacattcacattcaggggcacaggctgtccgtacagcgaacgttgtcaccattcccggagatagggccccgaccttcaagggggcggtgcggttggcgcgcagttctcaggcgccttctagaatcccctgccagcctccccgctgcctggttaccaaactcggccggggacacccaacctcccctctcgaggacctgggttggccagcccagctttgtacgggtgactgaagtccacatcgacgtaacagttgaaagggaaggacgcggagaccacccggtacccgccccaggcgtttccagagtctccgcttaggcggcccgtgggggtcggggtcgcggtcgcggtcgcggaccggggacagagcaatggggcgggcgcgcagcgccggctgcactcccagagcctcccaccgccgccccacggccgcctagcgcgcgccgggactgcatttcccataggcccacgctgcggagcaccgcccacccgagtctcacgcgagtgcgctgccgcgaggtgtccctgccgcagcccccgcccgcccgcagagcttttgaaaggcggcgggaggcggcgagcgccatggccagtccgggctgcctgctgtgcgtgctgggcctgctactctgcggggcggcgagcctcgagctgtctagaccccacggcgacaccgccaagaagcccatcatcggaatattaatgcaaaaatgccgtaataaagtcatgaaaaactatggaagatactatattgctgcgtcctatgtaaagtacttggagtctgcaggtgcgagagttgtaccagtaaggctggatcttacagagaaagactatgaaatacttttcaaatctattaatggaatccttttccctggaggaagtgttgacctcagacgctcagattatgctaaagtggccaaaatattttataacttgtccatacagagttttgatgatggagactattttcctgtgtggggcacatgccttggatttgaagagctttcactgctgattagtggagagtgcttattaactgccacagatactgttgacgtggcaatgccgctgaacttcactggaggtcaattgcacagcagaatgttccagaattttcctactgagttgttgctgtcattagcagtagaacctctgactgccaatttccataagtggagcctctccgtgaaggtatcacactaattacacaatgaaattaatatgtttagaataactg

SEQ ID NO: 7525 - DNA, 339 bp, Homo sapiens
tctttttttgagatggagtcttgctctgtatccccagctggagtgcagtggcgtgatctcagctcactgcaacctctgcctcctgggtcccagttcaaggaattctcctgcctcagcctcctgaggtttcaccatgttggccaggctggtcttgaactcctgacctcatgatctgatctgcctgcctcggcctcccaaagtgctggaatcacaggcttgaaccacctcgcctggccaccatcatcttaagtcagaggctatcaccaattttggagcaaacagattttgtgttttcagatgtattgcaatagagcctacatgtcgggtgtgttctagaaa

SEQ ID NO: 7526 - DNA, 1041 bp, Homo sapiens
  misc_feature (227)..(227): n is a, c, g, or t
agggagctgcagccacccgcgtgcggcacgcgccggccgcctgcccggatcgcggccaccagtgccgcggcctctcgactcccgccccgccgagccgcgcgcgcgactgccatcctcctcaattgctttttacgattttttttgtgcatgcattcattttctgttccgttttgtcctttttaaggcggtggcggcggcgacagcggcgtaagctcgcagcggggagnggggcggccggaggatgcggcgcggggctgcgctcgctacgtccgctgctgctgcccggctcgggcctgagcgccgagcaggatcccaagtgatggtggtttcctcggagggcgagctgagtcctgcgcgactggttagcacggtggagctggtagccacgcctgctggctggcgtgcgtgaacaggtgtggaccgcaggatctcagcactctgacccaaggggaagcatgtcgaagaaaggccggagcaagggcgagaagcccgagatggagacggacgcggtgcagatggccaacgaggagctgcgggccaagctgaccagcattcagatcgagttccagcaggaaaaaagcaaggtgggcaaactgcgcgagcggctgcaggaggcgaagctggagcgcgagcaggagcagcgacggcacacggcctacatttcggagctcaaggccaagctgcatgaggagaagaccaaggagctgcaggcgctgcgcgaggggctcatccggcagcacgagcaggaggcggcgcgcaccgccaagatcaaggagggcgagctgcagcggctgcaggccacgctgaacgtgctgcgcgacggcgcggccgacaaggtcaagacggcgctgctgaccgaggcgcgcgaggaggcgcgcagggccttcgatggagagcgcctgcggctgcagcaggagatcctggagctcaaggcagcgcgcaagcaggcagaggaggcgctcagtaactgcatgcaggctgacaagaccaaggcagccgacctgcgtgccgcctaccaggcgcaccaagacgaggtgcacc

SEQ ID NO: 7527 - DNA, 1632 bp, Homo sapiens
  misc_feature (227)..(227): n is a, c, g, or t
agggagctgcagccacccgcgtgcggcacgcgccggccgcctgcccggatcgcggccaccagtgccgcggcctctcgactcccgccccgccgagccgcgcgcgcgactgccatcctcctcaattgctttttacgattttttttgtgcatgcattcattttctgttccgttttgtcctttttaaggcggtggcggcggcgacagcggcgtaagctcgcagcggggagnggggcggccggaggatgcggcgcggggctgcgctcgctacgtccgctgctgctgcccggctcgggcctgagcgccgagcaggatcccaagtgatggtggtttcctcggagggcgagctgagtcctgcgcgactggttagcacggtggagctggtagccacgcctgctggctggcgtgcgtgaacaggtgtggaccgcaggatctcagcactctgacccaaggggaagcatgtcgaagaaaggccggagcaagggcgagaagcccgagatggagacggacgcggtgcagatggccaacgaggagctgcgggccaagctgaccagcattcagatcgagttccagcaggaaaaaagcaagatggatgagatcaaagggaaagaccgtgtgattctggccttggagaaggaacttggcgtgcaggctgggcagacccagaagctgcttctgcagaaagaggctttggatgagcagctggttcaggtcaaggaggccgagcggcaccacagtagtccaaagagagagctcccgcccgggatcggggacatggtggagctcatgggcgtccaggatcaacatatggacgagcgagatgtgaggcgatttcaactaaaaattgctgaactgaattcagtgatacggaagctggaagacagaaatacgctgttggcagatgagaggaatgaactgctgaaacgctcacgagagaccgaggttcagctgaagcccctggtggagaagaacaagcggatgaacaagaagaatgaggatctgttgcagagtatccagaggatggaggagaaaatcaagaacctcacgcgggaaaacgtggaaatgaaagaaaagctgtcagcgcaggcgtctctgaagcggcatacctccttgaatgacctcagcctgacgagggatgagcaggagatcgagttcctgaggctgcaggtgctggagcagcagcacgtcattgacgacctctcactggagagagaacggctgttgcgctccaaaaggcatcgagggaaaagtctgaaaccgcccaagaagaatgaaatgcaagacgccaaggatcagaacgagctgttagaattcagagtgctagaactcgaagtaagagactctatctgttgtaaactctcaaacggagcagacattctctttgaacccaaactgaaattcatgtaaagctctcagatgttttcaagcatgtgtaaaggggacatgttatagtttctttctttctttctttctttttttttttaaatctgtatgttcagaataatttcactgccttaatgtgttctggagagcgtgctcacccaagtctatggacatgtaccagagctaatatatttattgcctatggcttgttttgcacttaataaaataatttgtttttgcaataaaaaaaatt

SEQ ID NO: 7528 - DNA, 2070 bp, Homo sapiens
  misc_feature (227)..(227): n is a, c, g, or t
agggagctgcagccacccgcgtgcggcacgcgccggccgcctgcccggatcgcggccaccagtgccgcggcctctcgactcccgccccgccgagccgcgcgcgcgactgccatcctcctcaattgctttttacgattttttttgtgcatgcattcattttctgttccgttttgtcctttttaaggcggtggcggcggcgacagcggcgtaagctcgcagcggggagnggggcggccggaggatgcggcgcggggctgcgctcgctacgtccgctgctgctgcccggctcgggcctgagcgccgagcaggatcccaagtgatggtggtttcctcggagggcgagctgagtcctgcgcgactggttagcacggtggagctggtagccacgcctgctggctggcgtgcgtgaacaggtgtggaccgcaggatctcagcactctgacccaaggggaagcatgtcgaagaaaggccggagcaagggcgagaagcccgagatggagacggacgcggtgcagatggccaacgaggagctgcgggccaagctgaccagcattcagatcgagttccagcaggaaaaaagcaagatggatgagatcaaagggaaagaccgtgtgattctggccttggagaaggaacttggcgtgcaggctgggcagacccagaagctgcttctgcagaaagaggctttggatgagcagctggttcaggtcaaggaggccgagcggcaccacagtagtccaaagagagagctcccgcccgggatcggggacatggtggagctcatgggcgtccaggatcaacatatggacgagcgagatgtgaggcgatttcaactaaaaattgctgaactgaattcagtgatacggaagctggaagacagaaatacgctgttggcagatgagaggaatgaactgctgaaacgctcacgagagaccgaggttcagctgaagcccctggtggagaagaacaagcggatgaacaagaagaatgaggatctgttgcagagtatccagaggatggaggagaaaatcaagaacctcacgcgggaaaacgtggaaatgaaagaaaagctgtcagcgcaggcgtctctgaagcggcatacctccttgaatgacctcagcctgacgagggatgagcaggagatcgagttcctgaggctgcaggtgctggagcagcagcacgtcattgacgacctctcactggagagagaacggctgttgcgctccaaaaggcatcgagggaaaagtctgaaaccgcccaagaagcatgttgtggagacattttttggatttgatgaggagtctgtggactcagaaacgttgtccgaaacatcctacaacacagacaggacagacaggaccccagccacgcccgaagaagacttggacgatgccacagcccgagaggaggctgacctgcgcttctgccagctgacccgggagtaccaggccctgcaacgcgcctacgccctgctccaggagcaggtgggaggcacgctggacgctgagagggaggcccggactcgggagcagctacaagctgatctgctgaggtgtcaggccaaaatcgaagatttggagaagttactggttgagaagggacaggattccaagtgggttgaagagaagcagctgctcatcagaacaaaccaagacttgctggaaaagatttacagactggaaatggaagagaaccagctgaagaatgaaatgcaagacgccaaggatcagaacgagctgttagaattcagagtgctagaactcgaagtaagagactctatctgttgtaaactctcaaacggagcagacattctctttgaacccaaactgaaattcatgtaaagctctcagatgttttcaagcatgtgtaaaggggacatgttatagtttctttctttctttctttctttttttttttaaatctgtatgttcagaataatttcactgccttaatgtgttctggagagcgtgctcacccaagtctatggacatgtaccagagctaatatatttattgcctatggcttgttttgcacttaataaaataatttgtttttgcaataaaaaaaatt

SEQ ID NO: 7529 - DNA, 295 bp, Homo sapiens
acacaaacaagaatgtgagaacttgtctgctgtttacagaaatatgctttttttggggggaggggtaatcttttttcttttggtaaggagaagatagatattcaaagaaagaggcagataaactgggctcttctgaatcctgaattactttatggctcctgggccttggtgtctttgtaaccacagagttcatttcactctccaggaagaaacttgaccctctaataaaaccacatggagccttccagggcgacctcactgtttcatttatggagtggtcagattctgtatctag

SEQ ID NO: 7530 - DNA, 323 bp, Homo sapiens
ccactgtcatcacgctggagctctgttttccctaagtacggtatttgaaaggaattacgcaatatagtgtcttttcccagctgggagaggcaagtcactgcttagatggccggtcctggatatgaagaaatttggtctactcagtgtgagtgacatatttaccctcctccaccatgaatgtgcccatgcacttagccatttctgcagagttgcacagattctgtacttgctgaaaaatatgcttgcatggaaaggccttgtggcgtattttgtggcattgaattgctaccatctgtttcctagccaacgttaaaagaaaaaga

SEQ ID NO: 7531 - DNA, 419 bp, Homo sapiens
gcccaccacaaacttactttttaaagtattactgggcatgccagaaagtgggagaactcttcaagggacacagggagtggcaaatgggcaggagaggtgcgccatccctagcctggtcagcatgggtcacccccacagggaggagctgaacccgacattcctccaccatgcaggaaccaagaactgaagtcaccacatcatgtattttctaaaccagggcatttctgagagtgaaagggagctattaataatactgctggggaaacaggcttaagccaaacctatctgtagcaaagcaagatgtatggttgccctaaaaagtgttccaaggttaataaaaactgctagctcccaccagaaataaatgcaggttctttctgaaaagcattcccaataagttctacaaagtacagccagat

SEQ ID NO: 7532 - DNA, 609 bp, Homo sapiens
cctgtggagagcctggcatgaacagaggccttgcggagaactgaagccttcagtccaagagccagggaggaactgaattctgtcaagaaccacttgagtgaccttggaagcagatcctttcccattggagccttgagattaaagccaccttacctgacaacttgataggagccttatggggtctcgctatgtgcccaggctggcctcaaactcctgggctgaactcctcctccccaactcggcctcccgaagtgctgggattacaagcgtgagccaccgcgcccgcccacatctcttcttacaggtcaactggctttccttgacacccagttacttcgttcttcaggtgttgcaaaactcatcagcaagcacctaggcaattactgttcaaaatatctatgcagtctactagacttaagattcagaaaggcagaaaccacatataccttgttcacagctggacttctcagtgtctagtactaggattctcaatacatatctgttgaagttatgatgacattattaccatatagctatttgagttcctccgtaatcccaattctcaagttctttgagagaaaaaaataagtaaatctcaattatagaatt

SEQ ID NO: 7533 - DNA, 319 bp, Homo sapiens
gcttccacagccaaaacctgagtgcatgcggattctaaaaaggctccttctgccttgtcctaactagagctgtgttatttccccaagttgccctggtttgtatgagctgaaaagcccgtgactagcagtagatcacaggccatcctgcagaagctaggtgcctgcatggggtcaaaggtcaggagttactcacaattgttctggaacaatgtttcagatagtatacttccctaacttagagacaaacgagctgcattcagaatggctctagttcagaaagaaaagcctctcttgcactcaaatcaagatgagaaataac

SEQ ID NO: 7534 - DNA, 382 bp, Homo sapiens
tgcactccgtctgttcttcagagcatttacccaaatgtatgattgtgcatttctttactcatttatttgctctttttcccttcccgaagacgaggcatatgtctgtttcctcccttgttcccagagccaggcaaatacaaaatgacagatagctgtttgtgcagtaactgctgctgagccccctcaggagggaggcattgttattcttattcctagtaggagtagaagccgtcatcgttgtagtcatcacccgtgtcttataattgaggagacggaagcacagagtggataagggacttagttcagattgcacagccaggaagcactggaatggggattgaaacccaggactggcaggttctcaagacccctaccctcagct

SEQ ID NO: 7535 - DNA, 570 bp, Homo sapiens
agcagccccagcagcaatctgggtgttcaatctatctcgatctcacaatgcccatgcctcctagaggtcttcccagagcttaggagtctttgcccctcctgggaactttctgagggtccatatagtggtccttagcactattgctgtttttttttttttttaaattttagttgtaatatacgagtgttagcaatcctcatacatctctgacttatccacagtgcctagtatacaatggacaatttagtgaacaatgaataaatcagaatattgaggcttaggaaactaggacccatcacgaaccttctcatagtaatccagatcctggatggaagcttttaataaacacaacttctgttttccttcctctttgttttttatttcttctcgaaagagacttaattgaagaaaatgagctctttcacttcttccatcctccaggaacataaaactgacagcctcctccaaatgattatttagcatttaatgatttattccttgagcgcccagttgatcttccttgggcccatttgaagaactcttgtagcaaggggaaaattcacatgatca

SEQ ID NO: 7536 - DNA, 449 bp, Homo sapiens
  misc_feature (34)..(34): n is a, c, g, or t
  misc_feature (97)..(97): n is a, c, g, or t
cttgcgagtttcttctcattctccaactgccagnaaaaaaaagcatttgaaacaaattctcaaaaccgacaatactacactacaattggattgctgngaaatacattacagagacagattttacatgctataaatttttcaaacattgatgcgactttaagagtggctttattcctgaagtcagcgagaacacgaacccactggcaggtgttggtctactctttctccagtgataaaatatgaatatcaagatgtggaaataattatagcagaaagcttatagcctttattaatgaggtcaagctcaatttgagttaaatagcattttgtgggtttaatgtctcagaataataatctttaattttctctgaatcaccaatgtgatgtcaccaaaatgaaatgattgttacttttccgaaaaattcaataaatgcattgaattacctcca

SEQ ID NO: 7537 - DNA, 418 bp, Homo sapiens
gtctggatcctagaattgattctaataatagttttgccactgatacacatgagaaacccaggcaagtcacctacttatgctctattcatttcttcacatttaaaatgaatacattgaactagaacaatttttgaaatattctgtgactctaaaaattctatttactctggaggcaggtgttggtctactctttctccagtgataaaatatgaatatcaagatgtggaaataattatagcagaaagcttatagcctttattaatgaggtcaagctcaatttgagttaaatagcattttgtgggtttaatgtctcagaataataatctttaattttctctgaatcaccaatgtgatgtcaccaaaatgaaatgattgttacttttccgaaaaattcaataaatgcattgaattacctcca

SEQ ID NO: 7538 - DNA, 1089 bp, Homo sapiens
aaagttgttatgcataagtttcatagcagtttacttccttttcttgaatacagtttttaaaaccaagagtgagctttcagttttccataaaaatataagccgtactactttgacattgaaatcatcagtgcagccatcacttcttagaatttatttaaacttcttctcccaacagttttattttcttttagctgctaattattttcgaaattcatgaatgttttacctccttttactattctgaaagttatttcaagaagtggccccaaagcaggagaactgagaggggcaaattggcctggtttaattcacagcctgaagaattggcaacctaaagttataagttagatgtattttgcttttcaagccatcttctgagccttttttaggctgaaatgatttgtttatttcccaaattattgctagctacttgattttttatggctacctaacatccacatttggtagatacttttcctctctgcatgcatcccaaagaagaatttgctatttgtggaagaagagaataagggtatcagaatgaaggaaattacagtgactacactgtttatgactccattttgtgaattcttaaatatgctatggatttttttttagaaaaaataatgcaaaaattgggatattacagaatcaccataaagatgatcaacaagtaataagtcttttcatggagttcatttttcttttaaattcatgatttggccacaaaaatatatatataagtgtctgatatatgataacagcccagtttctcggccactcatttgcattatcttaaatcacaaataattacttaatttgctggagtgtgtgctttgcaacttttgtaccagagcaaaatttgtatttaaaacaaaaaataagaatgcccatcactaggagaaacactcctcacagaaaacacacacacacacacacacacacaatttaaaaactgagtaaatttaaatgtatgaaagtaccccacaaattgatttcaacaaataaatttcatttctctagctacttatgtctggccttattttgagcgttacaattttattgccttcatttgcctatttagactga

SEQ ID NO: 7539 - DNA, 833 bp, Homo sapiens
aaaaaagaacactcctttctgagactttgcttaatacttggtgacctcacaatcacgtcggtatgattgggcacccttgcctactgtaagagaccctaaaaccttggtgcagtggtggggaccacaaaacaaccagggaggaagagatacatcattttttagtattaaggaccatctaagacagctctattttttttttgccactttatgattatgtggtcacacccaagtcacagaaataaaaaactgactttaccgctgcaatttttctgttttcctccttactaaatactgatacattactccaatctattttataattatatttgacattttgttcacatcaactaatgttcacctgtagaagagaacaaatttcgaataatccagggaaacccaagagccttactggtcttctgtaacttccaagactgacagctttttatgtatcagtgtttgataaacacagtccttaactgaaggtaaaccaaagcatcacgttgacattagaccaaatacttttgattcccaactactcgtttgttctttttctccttttgtgctttcccatagtgagaatttttataaagacttcttgcttctctcaccatccatccttctcttttctgcctcttacatgtgaatgttgagcccacaatcaacagtggttttattttttcctctactcaaagttaaaactgaccaaagttactggctttttactttgctagaacaacaaactatcttatgtttacatactggtttacaatgttatttatgtgcaaattgtcaaaatgtaaattaaatataaatgttcatgctttaccaaaaat

SEQ ID NO: 7540 - DNA, 465 bp, Homo sapiens
gactctttctcttctttttctttttcttcttctttgtcttccttttcttcagcctcatcatcgcttacttctttatcacgttccttctccacaaaaagagtaatgggatatccaataaactgagaatgtttcttcacaatctcctttattcttcgttccccaaactactcgtttgttctttttctccttttgtgctttcccatagtgagaatttttataaagacttcttgcttctctcaccatccatccttctcttttctgcctcttacatgtgaatgttgagcccacaatcaacagtggttttattttttcctctactcaaagttaaaactgaccaaagttactggctttttactttgctagaacaacaaactatcttatgtttacatactggtttacaatgttatttatgtgcaaattgtcaaaatgtaaattaaatataaatgttcatgctttaccaaaaat

SEQ ID NO: 7541 - DNA, 448 bp, Homo sapiens
aaacttgaagaggcctatttttttttttttttgagacagagtctcactctgtggcccatgctggagtgcagtggtgtggtctcagctcactgcaccctccgcctcccgggttcatgctattctcctgcctcagcctcccgagtagctgggactataggcgcccgccaccacgcccggccaagttttctgtatttttagtagagacggggtttcaccgtgttagccaggatggtctcgatctcatgacctcatgatccgcccgccttggcctcccaaagtgctgggattacaggcgtgagccactgcacccggcctaaagaggcctatttttatttcctagctttggatcccagatgcaagggaggtgtaaggtagtggaaagagcacaggctccattccaaagctctagaggtcgagcgcctttaatttagtagtagtaggcggcggc

SEQ ID NO: 7542 - DNA, 688 bp, Homo sapiens
agggctatgtcatctgctagctcacttgtgaaggcagatggctatgggaagactgaagcatgggcctaggatttcaccagcaagtagtaatgggagacccttttttgggatttcccaggtcaggtggagattacacttagacaacaaataggaaatccttcagtgaggataaggtgaaggagatgaccttcctgtggaaggggaggtgggtcccagctgactggtaatgttaataatatcagcgtggtgaatatgtggggagtataattgtgttgtagaacagatggggaatgtagaaaagtgtaaagatgaaaaattaaaatcacataatatagcactgaaaagcactgcatgactgtcattttgaactagaaacgaacacagaaacatgaaaatgattggtttgttaaggcagtgggaaaggtaatttttttcctttcttttgacatctggtttgcaatggtttcttttagttcttttaatggaaacatataggtgaaagacagctataaaatattgctaaattttagaaatgtagaatgccattttgtttgttgcttttaaaattggttatcctcacttaaagcatattgtgaacttttccctaatgcataaacatttgtccaaaatatgatttaaatggctcctttgcattacatcacgtgaataaatcataattgatttaaaa

SEQ ID NO: 7543 - DNA, 531 bp, Homo sapiens
catgcttcattttcgggtgatatattctcagggccataatctaaaaaggaagtgaaaaaatccacttccctgggataaaaatattaaaacttcaggcatagaatttttttaaaattctatgagtatgcaattttaatggttttcaggaaaagtgtgttctttgtaattctcccaacagctcagaacttatttaagatgtaactgaactcattgagagacagcacatgctttatgttttgtaattgatgaaatgttccccctaaataaatctcacattgccagatctgatgacatgagtaataaaacataaccatgtgaaggaaatggctattttgagcaatatgcaggaaagagatattcatttggtgttgaaaaatagaacatatttttatgaaaaactacactctccagaccattgtagcaaacctcctgacattgagattggaggacatttcagggccaaagttgctaaagaaaaattctctgtttcaaactcaaaaattacggtgtttcagatagcatgtgcctcaa

SEQ ID NO: 7544 - DNA, 343 bp, Homo sapiens
tttcagagtattttctttcttgtccagattagctaaattggattgttctatgctaaattcacttaatcactactctattatttttgaattttttagttctgtttttttcacttggttctttttttaaaaaaacttctactacctttctgagacttctacttttttacttttttcaagaagctttataattacttgctaaagcatttttaccatgactgtttttaacttcttcagataaccacaacatttggttaatcttgaggttggcttggttaactgtcttttctcatcctgcttatgattttccttctaattgtgatttttccggttcttgatagatggg

SEQ ID NO: 7545 - DNA, 609 bp, Homo sapiens
  misc_feature (1)..(3): n is a, c, g, or t
nnnggctgtttttccttttcgttggcgctttatagctacacagtgctatgccagagccagcgaagtctgctcccgccccgaaaaagggctccaagaaggcggtgactaaggcgcagaagaaagacggcaagaagcgcaagcgcagccgcaaggagagctattccatctatgtgtacaaggttctgaagcaggtccaccctgacaccggcatttcgtccaaggccatgggcatcatgaattcgtttgtgaacgacattttcgagcgcatcgcaggtgaggcttcccgcctggcgcattacaacaagcgctcgaccatcacctccagggagatccagacggccgtgcgcctgctgctgcctggggagttggccaagcacgccgtgtccgagggtactaaggccgtcaccaagtacaccagcgctaagtaaacaatattttttagactccctcatctgtcagtgtgggtgcggataatgaaacaaaatgggcaagatgttggtaattgttgaagcctgtgcgacgagacttgggaagtgcaggattctctatatttttgtgtctgcttcaggatgtccatgaccactccctttcccctccaaaaaaaaagtt

SEQ ID NO: 7546 - DNA, 2037 bp, Homo sapiens
  misc_feature (1)..(3): n is a, c, g, or t
  misc_feature (1092)..(1092): n is a, c, g, or t
  misc_feature (1919)..(1919): n is a, c, g, or t
nnnggctgtttttccttttcgttggcgctttatagctacacagtgctatgccagagccagcgaagtctgctcccgccccgaaaaagggctccaagaaggcggtgactaaggcgcagaagaaagacggcaagaagcgcaagcgcagccgcaaggagagctattccatctatgtgtacaaggttctgaagcaggtccaccctgacaccggcatttcgtccaaggccatgggcatcatgaattcgtttgtgaacgacattttcgagcgcatcgcagggctaccctgagaggaatctacatgcagagaagttcaggagactgaactaacggaacgtcaggaagcgctgcgggctggagagctgctgttggaacagggaggagttctccgggccgcaccctgcctccgtcccgcaggtggagtggctgaaacttctcagcaggcgcatctacactagtgacctgaggagagaaaccctaaccccacaatggctgcatcttctctgaagacgagactgatgctcatctttgaaatgaagggcagtgtgtgcatttctccatgaaggtatccagaaacagccatgccagagctgctgtggggtggctgaactgctattccttttctagggtgggatccccactctttgtaaggaaggatattggggtcctgacactgggaactcatcttgtcagtgaggccttctttaactgctgtcttgtaattgagccaccccatctgtgtttcctgttccaatttaggacttttttttttttatcataatataaagatctgaaatgctaaaatttccttattcattggcttattatctttactatcccatcctccacactaaaagttttttcgagctggatttgggagttgtggggtaggttatattttgatcacttgtatttcccagcttctagaacagtgcccagcaaagtacttctctgaataaatgaataaagtatattcctctgctctgctgttgccaactggaatatcctgagggaaatttctttactttcctcaggggatgatccagaagatgaaaaacaaattgtcattccatatagtcctcttctgagtgtttttcngttttgttaaaactcagattttttctttttacctgaatgtttttttgttaatgattattagcatatacagtattttcttttatgtaccaaaaaaaggcaattgatacagtgcatgacttgaaaatatacctgccttctctgaggctcaaattcaggactgtattatttggaaagccttgttgggttgtggctcccaagaaatcatacctaatttcccttctttgagagcactgatttctgagtttccatttctcctagaagagaaacattggcttgtaagaatttatgtatcatcaatgcttccttttccatcctgcacttagaaggacccaagacttgagggctgcgctgtcaacactattccttgctcaccctctcttttgttctaattatttatgtcttcccgccttcagaaatatcagttgctctttcaccagccattgtttcctctctggccctagtgcagagtaggtgacgtagtacagctgaaaggatgaatgctggcaaacttgtttctagcctagatttctccttattttaaatctgcacttgcaaccacatggcctgagacactcctcttgaaaatatcaccaaaaggaccttattataaaaagtcaccgccatctattcagggctatgtattaggggacaataaagtgtaagtcatggccaggcacggtggctaatgcctctaatcccagcactttgggaggccgaggtgggtggatcacgaggtcaggagattgaggccatcctggctaacacggtgaaaccccatctctataaaaatacaaaaattagcagggcgtggtggcgggcacctgtantcccagctacttggaggctgaggcaggagaatcgcttgaacctgggaggcggaggttgcagtgaaccaagattgtgccattgcactccagcctgggtgacagagctagatgtcatctc

SEQ ID NO: 7547 - DNA, 583 bp, Homo sapiens
aaaatattttttccccaacacttttcaaagaatggtttaaaagcaatgacaatccatgatcagtgagaattcccacccagattatggtctcaattcctttttcaaagggcagtcaggctacttggagacttgggtaaatctatggattttaatacattcaagaggaacagcaatcaaatgccatatttggatctggtgggatctcattcagacaaaatataaaaatatttgagacaattcaggattttctttctttaagggctaggtattggataatgttacacatcattttttaaattttcttaggtgtaaaatcttagcgttttttctttatatccatatctgttaggatatttgtgaaaatattcatgattaaaatcacatatttgggatttcatgtttcagatattttttagactccctcatctgtcagtgtgggtgcggataatgaaacaaaatgggcaagatgttggtaattgttgaagcctgtgcgacgagacttgggaagtgcaggattctctatatttttgtgtctgcttcaggatgtccatgaccactccctttcccctccaaaaaaaaagtt

SEQ ID NO: 7548 - DNA, 2195 bp, Homo sapiens
  misc_feature (1)..(3): n is a, c, g, or t
  misc_feature (1250)..(1250): n is a, c, g, or t
  misc_feature (2077)..(2077): n is a, c, g, or t
nnnggctgtttttccttttcgttggcgctttatagctacacagtgctatgccagagccagcgaagtctgctcccgccccgaaaaagggctccaagaaggcggtgactaaggcgcagaagaaagacggcaagaagcgcaagcgcagccgcaaggagagctattccatctatgtgtacaaggttctgaagcaggtccaccctgacaccggcatttcgtccaaggccatgggcatcatgaattcgtttgtgaacgacattttcgagcgcatcgcaggtgaggcttcccgcctggcgcattacaacaagcgctcgaccatcacctccagggagatccagacggccgtgcgcctgctgctgcctggggagttggccaagcacgccgtgtccgagggtactaaggccgtcaccaagtacaccagcgctaagtaaacaggctaccctgagaggaatctacatgcagagaagttcaggagactgaactaacggaacgtcaggaagcgctgcgggctggagagctgctgttggaacagggaggagttctccgggccgcaccctgcctccgtcccgcaggtggagtggctgaaacttctcagcaggcgcatctacactagtgacctgaggagagaaaccctaaccccacaatggctgcatcttctctgaagacgagactgatgctcatctttgaaatgaagggcagtgtgtgcatttctccatgaaggtatccagaaacagccatgccagagctgctgtggggtggctgaactgctattccttttctagggtgggatccccactctttgtaaggaaggatattggggtcctgacactgggaactcatcttgtcagtgaggccttctttaactgctgtcttgtaattgagccaccccatctgtgtttcctgttccaatttaggacttttttttttttatcataatataaagatctgaaatgctaaaatttccttattcattggcttattatctttactatcccatcctccacactaaaagttttttcgagctggatttgggagttgtggggtaggttatattttgatcacttgtatttcccagcttctagaacagtgcccagcaaagtacttctctgaataaatgaataaagtatattcctctgctctgctgttgccaactggaatatcctgagggaaatttctttactttcctcaggggatgatccagaagatgaaaaacaaattgtcattccatatagtcctcttctgagtgtttttcngttttgttaaaactcagattttttctttttacctgaatgtttttttgttaatgattattagcatatacagtattttcttttatgtaccaaaaaaaggcaattgatacagtgcatgacttgaaaatatacctgccttctctgaggctcaaattcaggactgtattatttggaaagccttgttgggttgtggctcccaagaaatcatacctaatttcccttctttgagagcactgatttctgagtttccatttctcctagaagagaaacattggcttgtaagaatttatgtatcatcaatgcttccttttccatcctgcacttagaaggacccaagacttgagggctgcgctgtcaacactattccttgctcaccctctcttttgttctaattatttatgtcttcccgccttcagaaatatcagttgctctttcaccagccattgtttcctctctggccctagtgcagagtaggtgacgtagtacagctgaaaggatgaatgctggcaaacttgtttctagcctagatttctccttattttaaatctgcacttgcaaccacatggcctgagacactcctcttgaaaatatcaccaaaaggaccttattataaaaagtcaccgccatctattcagggctatgtattaggggacaataaagtgtaagtcatggccaggcacggtggctaatgcctctaatcccagcactttgggaggccgaggtgggtggatcacgaggtcaggagattgaggccatcctggctaacacggtgaaaccccatctctataaaaatacaaaaattagcagggcgtggtggcgggcacctgtantcccagctacttggaggctgaggcaggagaatcgcttgaacctgggaggcggaggttgcagtgaaccaagattgtgccattgcactccagcctgggtgacagagctagatgtcatctc

SEQ ID NO: 7549 - DNA, 2057 bp, Homo sapiens
  misc_feature (1)..(3): n is a, c, g, or t
  misc_feature (1112)..(1112): n is a, c, g, or t
  misc_feature (1939)..(1939): n is a, c, g, or t
nnnggctgtttttccttttcgttggcgctttatagctacacagtgctatgccagagccagcgaagtctgctcccgccccgaaaaagggctccaagaaggcggtgactaaggcgcagaagaaagacggcaagaagcgcaagcgcagccgcaaggagagctattccatctatgtgtacaaggttctgaagcaggtccaccctgacaccggcatttcgtccaaggccatgggcatcatgaattcgtttgtgaacgacattttcgagcgcatcgcaggtgaggcttcccgcctggcgcattacaacaagcgctcgaccatcacctccagggagatccagacggccgtgcgcctgctgctgcctggggagttggccaagcacgccgtgtccgagggtactaaggccgtcaccaagtacaccagcgctaagtaaacagtggagtggctgaaacttctcagcaggcgcatctacactagtgacctgaggagagaaaccctaaccccacaatggctgcatcttctctgaagacgagactgatgctcatctttgaaatgaagggcagtgtgtgcatttctccatgaaggtatccagaaacagccatgccagagctgctgtggggtggctgaactgctattccttttctagggtgggatccccactctttgtaaggaaggatattggggtcctgacactgggaactcatcttgtcagtgaggccttctttaactgctgtcttgtaattgagccaccccatctgtgtttcctgttccaatttaggacttttttttttttatcataatataaagatctgaaatgctaaaatttccttattcattggcttattatctttactatcccatcctccacactaaaagttttttcgagctggatttgggagttgtggggtaggttatattttgatcacttgtatttcccagcttctagaacagtgcccagcaaagtacttctctgaataaatgaataaagtatattcctctgctctgctgttgccaactggaatatcctgagggaaatttctttactttcctcaggggatgatccagaagatgaaaaacaaattgtcattccatatagtcctcttctgagtgtttttcngttttgttaaaactcagattttttctttttacctgaatgtttttttgttaatgattattagcatatacagtattttcttttatgtaccaaaaaaaggcaattgatacagtgcatgacttgaaaatatacctgccttctctgaggctcaaattcaggactgtattatttggaaagccttgttgggttgtggctcccaagaaatcatacctaatttcccttctttgagagcactgatttctgagtttccatttctcctagaagagaaacattggcttgtaagaatttatgtatcatcaatgcttccttttccatcctgcacttagaaggacccaagacttgagggctgcgctgtcaacactattccttgctcaccctctcttttgttctaattatttatgtcttcccgccttcagaaatatcagttgctctttcaccagccattgtttcctctctggccctagtgcagagtaggtgacgtagtacagctgaaaggatgaatgctggcaaacttgtttctagcctagatttctccttattttaaatctgcacttgcaaccacatggcctgagacactcctcttgaaaatatcaccaaaaggaccttattataaaaagtcaccgccatctattcagggctatgtattaggggacaataaagtgtaagtcatggccaggcacggtggctaatgcctctaatcccagcactttgggaggccgaggtgggtggatcacgaggtcaggagattgaggccatcctggctaacacggtgaaaccccatctctataaaaatacaaaaattagcagggcgtggtggcgggcacctgtantcccagctacttggaggctgaggcaggagaatcgcttgaacctgggaggcggaggttgcagtgaaccaagattgtgccattgcactccagcctgggtgacagagctagatgtcatctc

SEQ ID NO: 7550 - DNA, 810 bp, Homo sapiens
  misc_feature (1)..(3): n is a, c, g, or t
nnnggctgtttttccttttcgttggcgctttatagctacacagtgctatgccagagccagcgaagtctgctcccgccccgaaaaagggctccaagaaggcggtgactaaggcgcagaagaaagacggcaagaagcgcaagcgcagccgcaaggagagctattccatctatgtgtacaaggttctgaagcaggtccaccctgacaccggcatttcgtccaaggccatgggcatcatgaattcgtttgtgaacgacattttcgagcgcatcgcaggtgaggcttcccgcctggcgcattacaacaagcgctcgaccatcacctccagggagatccagacggccgtgcgcctgctgctgcctggggagttggccaagcacgccgtgtccgagggtactaaggccgtcaccaagtacaccagcgctaagtaaacagtgagttggttgcaaactctcaaccctaacggctcttttaagagccacccatgttctcaaagaaagagctggtgcttgtattcctcctctgctggccactgacaaacccttgtaacttgctactgtgtttgttggtctgaagtagagcagttatttaactaatccttagtgacttttttttatttagatctgccattctaatcttagagttaagtaaggagatgggaaattttctattataagttcgaaaccaattaaaatacgttagaaaccaattaaaatactcgtcggtcccccgtcggttagtgatttggaacagtgccaagttgcagcggtggtcagtttgaatttgcccgggcaacgcccgcccttcctctgc

SEQ ID NO: 7551 - DNA, 1794 bp, Homo sapiens
  misc_feature (849)..(849): n is a, c, g, or t
  misc_feature (1676)..(1676): n is a, c, g, or t
attcgcggccgcgtcgaccctgtctggaatatctttatacaaacacaaataaacaaatgtgtcccctttcattcacatttgccccctttcattcaaatgactgatggtcacatgttcttcacaggttctgtctcttgcttttctcattaactgtctttcttattgcaggtggagtggctgaaacttctcagcaggcgcatctacactagtgacctgaggagagaaaccctaaccccacaatggctgcatcttctctgaagacgagactgatgctcatctttgaaatgaagggcagtgtgtgcatttctccatgaaggtatccagaaacagccatgccagagctgctgtggggtggctgaactgctattccttttctagggtgggatccccactctttgtaaggaaggatattggggtcctgacactgggaactcatcttgtcagtgaggccttctttaactgctgtcttgtaattgagccaccccatctgtgtttcctgttccaatttaggacttttttttttttatcataatataaagatctgaaatgctaaaatttccttattcattggcttattatctttactatcccatcctccacactaaaagttttttcgagctggatttgggagttgtggggtaggttatattttgatcacttgtatttcccagcttctagaacagtgcccagcaaagtacttctctgaataaatgaataaagtatattcctctgctctgctgttgccaactggaatatcctgagggaaatttctttactttcctcaggggatgatccagaagatgaaaaacaaattgtcattccatatagtcctcttctgagtgtttttcngttttgttaaaactcagattttttctttttacctgaatgtttttttgttaatgattattagcatatacagtattttcttttatgtaccaaaaaaaggcaattgatacagtgcatgacttgaaaatatacctgccttctctgaggctcaaattcaggactgtattatttggaaagccttgttgggttgtggctcccaagaaatcatacctaatttcccttctttgagagcactgatttctgagtttccatttctcctagaagagaaacattggcttgtaagaatttatgtatcatcaatgcttccttttccatcctgcacttagaaggacccaagacttgagggctgcgctgtcaacactattccttgctcaccctctcttttgttctaattatttatgtcttcccgccttcagaaatatcagttgctctttcaccagccattgtttcctctctggccctagtgcagagtaggtgacgtagtacagctgaaaggatgaatgctggcaaacttgtttctagcctagatttctccttattttaaatctgcacttgcaaccacatggcctgagacactcctcttgaaaatatcaccaaaaggaccttattataaaaagtcaccgccatctattcagggctatgtattaggggacaataaagtgtaagtcatggccaggcacggtggctaatgcctctaatcccagcactttgggaggccgaggtgggtggatcacgaggtcaggagattgaggccatcctggctaacacggtgaaaccccatctctataaaaatacaaaaattagcagggcgtggtggcgggcacctgtantcccagctacttggaggctgaggcaggagaatcgcttgaacctgggaggcggaggttgcagtgaaccaagattgtgccattgcactccagcctgggtgacagagctagatgtcatctc

SEQ ID NO: 7552 - DNA, 287 bp, Homo sapiens
cagcctccaaggcaggactctgacaccagggttataaatgcatctgtctgggcacattatctaaattgttatgtatcaccctgggtaatggcaaaagtaaaaaccgctgttagctcagtgaataaatccttggtgctgatcaatcattgcacgacatagactcttttaataggcacaatttacacagaggcttggcagactgcttcgtcttctaattgccgatggaaaatggatgccgatctctgctgtgccgtaaaaatgtaaactataaatgacttaaaaacttg

SEQ ID NO: 7553 - DNA, 500 bp, Homo sapiens
tatctagagatcctagctgttcttatgtcgccagccagcaagcacccagcctctgtaaggaggatgtcaggcctccagccagtggcccatcactcctgtaaaggacttcccagacccagaccagagtcctacagcctccttcccattttgactcaaggaccccagcagtatggcctggccctgtagctgtccaacagagggcagcagctcccgagctgatggggatggtgaggcagggacacctggagctaccaggctgctatgcaccggtcctcacctcgctctccctgccaccctgcagagtacacggtggcagtgcccaagtccatgttccccgggctcttcatgctggggacattcctctggagcctcatcgagtacctcatccaccgcttcctgttccacatgaagccccccagcgacagctattacctcatcatgctgcacttcgtcatgcacggccagcaccacaagagcaggagactgaggcctaggaggac

SEQ ID NO: 7554 - DNA, 2420 bp, Homo sapiens
agaggcgctcagggtggcagcagagcagacgccgggctgcgcgctgggagctgcggtctccggccatggcccccgctccgccccccgccgcctccttctcgccctccgaggtccagcggcgcctggcggccggcgcgtgctgggtccgccgcggggcccgcctctacgacctctccagcttcgtgcggcaccacccggggggcgagcagctgctgcgggccagggcgggccaggacatcagcgccgacctggacgggccgccgcacaggcactcggccaacgcgcgccgctggctggagcagtactacgtgggagagctccgcggggagcagcagggctccatggagaacgagcctgtagcccttgaggaaactcagaagacagatcctgctatggaaccacggttcaaagtggtggattgggacaaggacctggtggactggcgaaagcctctcctgtggcaggtgggccacttgggagagaagtacgatgagtgggttcaccagccggtgaccaggcccatccgcctcttccactcagacctcattgagggcctctctaagactgtctggtacagtgtccccatcatctgggtgcccctggtgctgtatctcagctggtcctactaccgaacctttgcccagggcaacgtccgactcttcacgtcatttacaacagagtacacggtggcagtgcccaagtccatgttccccgggctcttcatgctggggacattcctctggagcctcatcgagtacctcatccaccgcttcctgttccacatgaagccccccagcgacagctattacctcatcatgctgcacttcgtcatgcacggccagcaccacaaggcacccttcgacggctcccgcctggtcttcccccctgtgccagcctccctggtgatcggcgtcttctacttgtgcatgcagctcatcctgcccgaggcagtagggggcactgtgtttgcggggggcctcctgggctacgtcctctatgacatgacccattactacctgcactttggctcgccgcacaagggctcctacctgtacagcctgaaggcccaccacgtcaagcaccactttgcacatcagaagtcaggatttggtatcagcactaaattgtgggattactgtttccacaccctcactccagagaaaccccacctgaagacgcagtgacaactcccaccccctccgtcctgccctcagcccggccctggccccttcccgacccccacccgccattcagaccccattaagaaggttggcttggccaggcaggatgggctgtgtccggccctgcagcctagtggaaggtgctgagggggccctgaggcaggaccgccctcctgacccctggtaggagggtcacatccacttggtggccaggtggcccttggtgacccacttcttcctggagcgtccctgcctagagctcagcccacaggactgcttcaggccgtggccacaggtagcagccgcaaggggaaatgaagaaaactgagccctcgtggccacctgtgtcacccttgtgccttagcctcatgggctgcctaggagctgcctgcacggcacagctcgctttcacagtcagaagtgggtctgtgggatctgtggtccctgtcctccctgctgtcccttctggggaggctttggtggctctgaggtggacaaagagctctcgcaagaagagacagcgtgatgcctcccacagtccaccccagaccctggggcagcccctctggccctgccagctgcctgcgtcgttgggcccagggtggctggcaggagtcccagctgcttgctttaggacctcgcagcttttcttgccgtccctcccctgcctccagaatcacagcccttctccccaagggaggctgaggaggcttctccaccagtggcagccccaccccgtccctggccattcttggcctccaccccgctcaggcccctactcgggcgctcccagaaggagccacctctcagtgcctcacctccccctgcctcccagcctccgcagatgaggttcctgccccttcctcctcgtaaccaaaaccctcactgctcccaggacggtcttatttataaaccagatacatgttcttagtctggtcccagaccaaggagctggtcagacggccctttctaatcctacatgttgagcttatgtaaaaaatgttgtttcctcctgtttttggttcctttcttacccacaaaccattactacttgaaacttaaaaaactcgccaagtgtaaaggctaaagagaagcagtttgacggaccttgtgatttgtactgtttgctgcggagctatttaaagattttggaataaatatacaaaactacggttgtgaaataaaaacttaaattgtatattttgaaaaataaaacactgaaaagaaaccaacaaaaat

SEQ ID NO: 7555 - DNA, 2097 bp, Homo sapiens
gtagttagaggatcccctggagctggttttctccaatgtccttggggcaaggtcacccttccaggtaaaggcccagccccagccacagccactcctcccacagcctctgtaaggaggatgtcaggcctccagccagtggcccatcactcctgtaaaggacttcccagacccagaccagagtcctacagcctccttcccattttgactcaaggaccccagcagtatggcctggccctgtagctgtccaacagagggcagcagctcccgagctgatggggatggtgaggcagggacacctggagctaccaggctgctatgcaccggtcctcacctcgctctccctgccaccctgcagagtacacggtggcagtgcccaagtccatgttccccgggctcttcatgctggggacattcctctggagcctcatcgagtacctcatccaccgcttcctgttccacatgaagccccccagcgacagctattacctcatcatgctgcacttcgtcatgcacggccagcaccacaaggcacccttcgacggctcccgcctggtcttcccccctgtgccagcctccctggtgatcggcgtcttctacttgtgcatgcagctcatcctgcccgaggcagtagggggcactgtgtttgcggggggcctcctgggctacgtcctctatgacatgacccattactacctgcactttggctcgccgcacaagggctcctacctgtacagcctgaaggcccaccacgtcaagcaccactttgcacatcagaagtcaggatttggtatcagcactaaattgtgggattactgtttccacaccctcactccagagaaaccccacctgaagacgcagtgacaactcccaccccctccgtcctgccctcagcccggccctggccccttcccgacccccacccgccattcagaccccattaagaaggttggcttggccaggcaggatgggctgtgtccggccctgcagcctagtggaaggtgctgagggggccctgaggcaggaccgccctcctgacccctggtaggagggtcacatccacttggtggccaggtggcccttggtgacccacttcttcctggagcgtccctgcctagagctcagcccacaggactgcttcaggccgtggccacaggtagcagccgcaaggggaaatgaagaaaactgagccctcgtggccacctgtgtcacccttgtgccttagcctcatgggctgcctaggagctgcctgcacggcacagctcgctttcacagtcagaagtgggtctgtgggatctgtggtccctgtcctccctgctgtcccttctggggaggctttggtggctctgaggtggacaaagagctctcgcaagaagagacagcgtgatgcctcccacagtccaccccagaccctggggcagcccctctggccctgccagctgcctgcgtcgttgggcccagggtggctggcaggagtcccagctgcttgctttaggacctcgcagcttttcttgccgtccctcccctgcctccagaatcacagcccttctccccaagggaggctgaggaggcttctccaccagtggcagccccaccccgtccctggccattcttggcctccaccccgctcaggcccctactcgggcgctcccagaaggagccacctctcagtgcctcacctccccctgcctcccagcctccgcagatgaggttcctgccccttcctcctcgtaaccaaaaccctcactgctcccaggacggtcttatttataaaccagatacatgttcttagtctggtcccagaccaaggagctggtcagacggccctttctaatcctacatgttgagcttatgtaaaaaatgttgtttcctcctgtttttggttcctttcttacccacaaaccattactacttgaaacttaaaaaactcgccaagtgtaaaggctaaagagaagcagtttgacggaccttgtgatttgtactgtttgctgcggagctatttaaagattttggaataaatatacaaaactacggttgtgaaataaaaacttaaattgtatattttgaaaaataaaacactgaaaagaaaccaacaaaaat

SEQ ID NO: 7556 - DNA, 2075 bp, Homo sapiens
gacacctctagtgacacttccgggtcatcccgccacagaggctgcattaacctcagttgccctcagtgccttgctctcccagacaacatcaggcctcagtctaggtgccctgtctccagaatgcccctctagccaggggcacggcatttagggatgggatacctgtctagcacctgacaaattccagagtcacagtggcctctataagatgggctctgagccgccagcacaccccacccatcctgcccatcctgcccatcccgcccatcccatgttcctttgcaatctgccaggtcccttcctggctcacaaatgggaagtaagacagtctctccagatcttccagacgtggtggcccgccctccccaaagccaccaaaggtgccaagcctacgcagtggaatgtctgggccgctgtgcccctgtcctctgcagggagtggccagggtttggccagctgccggggcccctggctgcctcctgatgcccaagcctctccatctgcaggcacccttcgacggctcccgcctggtcttcccccctgtgccagcctccctggtgatcggcgtcttctacttgtgcatgcagctcatcctgcccgaggcagtagggggcactgtgtttgcggggggcctcctgggctacgtcctctatgacatgacccattactacctgcactttggctcgccgcacaagggctcctacctgtacagcctgaaggcccaccacgtcaagcaccactttgcacatcagaagtcaggatttggtatcagcactaaattgtgggattactgtttccacaccctcactccagagaaaccccacctgaagacgcagtgacaactcccaccccctccgtcctgccctcagcccggccctggccccttcccgacccccacccgccattcagaccccattaagaaggttggcttggccaggcaggatgggctgtgtccggccctgcagcctagtggaaggtgctgagggggccctgaggcaggaccgccctcctgacccctggtaggagggtcacatccacttggtggccaggtggcccttggtgacccacttcttcctggagcgtccctgcctagagctcagcccacaggactgcttcaggccgtggccacaggtagcagccgcaaggggaaatgaagaaaactgagccctcgtggccacctgtgtcacccttgtgccttagcctcatgggctgcctaggagctgcctgcacggcacagctcgctttcacagtcagaagtgggtctgtgggatctgtggtccctgtcctccctgctgtcccttctggggaggctttggtggctctgaggtggacaaagagctctcgcaagaagagacagcgtgatgcctcccacagtccaccccagaccctggggcagcccctctggccctgccagctgcctgcgtcgttgggcccagggtggctggcaggagtcccagctgcttgctttaggacctcgcagcttttcttgccgtccctcccctgcctccagaatcacagcccttctccccaagggaggctgaggaggcttctccaccagtggcagccccaccccgtccctggccattcttggcctccaccccgctcaggcccctactcgggcgctcccagaaggagccacctctcagtgcctcacctccccctgcctcccagcctccgcagatgaggttcctgccccttcctcctcgtaaccaaaaccctcactgctcccaggacggtcttatttataaaccagatacatgttcttagtctggtcccagaccaaggagctggtcagacggccctttctaatcctacatgttgagcttatgtaaaaaatgttgtttcctcctgtttttggttcctttcttacccacaaaccattactacttgaaacttaaaaaactcgccaagtgtaaaggctaaagagaagcagtttgacggaccttgtgatttgtactgtttgctgcggagctatttaaagattttggaataaatatacaaaactacggttgtgaaataaaaacttaaattgtatattttgaaaaataaaacactgaaaagaaaccaacaaaaat

SEQ ID NO: 7557 - DNA, 381 bp, Homo sapiens
gagtcacttgaaccccagaggcagaggttgcagtgagccgaaatcacgccattgcactccagcctgggcaacaagagtgaaactccgtctcaaaaaaaaaaagaaagctgtactctgtcaagctcctgtgcatgtatctctctcaccctgatggccttcctgcaggtacagtgtccccatcatctgggtgcccctggtgctgtatctcagctggtcctactaccgaacctttgcccagggcaacgtccgactcttcacgtcatttacaacaggtaatgccagtttctttcctgacttgccctgaggatcctagagggaggagacctcagtgctttccctggcccagagtttctgagagcacagaaccccaaactacatcac

SEQ ID NO: 7558 - DNA, 2441 bp, Homo sapiens
gggggcggaaatattgctaggtcaggctggtgtgaatggcgaggagcagacgccgggctgcgcgctgggagctgcggtctccggccatggcccccgctccgccccccgccgcctccttctcgccctccgaggtccagcggcgcctggcggccggcgcgtgctgggtccgccgcggggcccgcctctacgacctctccagcttcgtgcggcaccacccggggggcgagcagctgctgcgggccagggcgggccaggacatcagcgccgacctggacgggccgccgcacaggcactcggccaacgcgcgccgctggctggagcagtactacgtgggagagctccgcggggagcagcagggctccatggagaacgagcctgtagcccttgaggaaactcagaagacagatcctgctatggaaccacggttcaaagtggtggattgggacaaggacctggtggactggcgaaagcctctcctgtggcaggtgggccacttgggagagaagtacgatgagtgggttcaccagccggtgaccaggcccatccgcctcttccactcagacctcattgagggcctctctaagactgtctggtacagtgtccccatcatctgggtgcccctggtgctgtatctcagctggtcctactaccgaacctttgcccagggcaacgtccgactcttcacgtcatttacaacagagtacacggtggcagtgcccaagtccatgttccccgggctcttcatgctggggacattcctctggagcctcatcgagtacctcatccaccgcttcctgttccacatgaagccccccagcgacagctattacctcatcatgctgcacttcgtcatgcacggccagcaccacaaggcacccttcgacggctcccgcctggtcttcccccctgtgccagcctccctggtgatcggcgtcttctacttgtgcatgcagctcatcctgcccgaggcagtagggggcactgtgtttgcggggggcctcctgggctacgtcctctatgacatgacccattactacctgcactttggctcgccgcacaagggctcctacctgtacagcctgaaggcccaccacgtcaagcaccactttgcacatcagaagtcaggatttggtatcagcactaaattgtgggattactgtttccacaccctcactccagagaaaccccacctgaagacgcagtgacaactcccaccccctccgtcctgccctcagcccggccctggccccttcccgacccccacccgccattcagaccccattaagaaggttggcttggccaggcaggatgggctgtgtccggccctgcagcctagtggaaggtgctgagggggccctgaggcaggaccgccctcctgacccctggtaggagggtcacatccacttggtggccaggtggcccttggtgacccacttcttcctggagcgtccctgcctagagctcagcccacaggactgcttcaggccgtggccacaggtagcagccgcaaggggaaatgaagaaaactgagccctcgtggccacctgtgtcacccttgtgccttagcctcatgggctgcctaggagctgcctgcacggcacagctcgctttcacagtcagaagtgggtctgtgggatctgtggtccctgtcctccctgctgtcccttctggggaggctttggtggctctgaggtggacaaagagctctcgcaagaagagacagcgtgatgcctcccacagtccaccccagaccctggggcagcccctctggccctgccagctgcctgcgtcgttgggcccagggtggctggcaggagtcccagctgcttgctttaggacctcgcagcttttcttgccgtccctcccctgcctccagaatcacagcccttctccccaagggaggctgaggaggcttctccaccagtggcagccccaccccgtccctggccattcttggcctccaccccgctcaggcccctactcgggcgctcccagaaggagccacctctcagtgcctcacctccccctgcctcccagcctccgcagatgaggttcctgccccttcctcctcgtaaccaaaaccctcactgctcccaggacggtcttatttataaaccagatacatgttcttagtctggtcccagaccaaggagctggtcagacggccctttctaatcctacatgttgagcttatgtaaaaaatgttgtttcctcctgtttttggttcctttcttacccacaaaccattactacttgaaacttaaaaaactcgccaagtgtaaaggctaaagagaagcagtttgacggaccttgtgatttgtactgtttgctgcggagctatttaaagattttggaataaatatacaaaactacggttgtgaaataaaaacttaaattgtatattttgaaaaataaaacactgaaaagaaaccaacaaaaat

SEQ ID NO: 7559 - DNA, 2205 bp, Homo sapiens
gggggcggaaatattgctaggtcaggctggtgtgaatggcgaggagcagacgccgggctgcgcgctgggagctgcggtctccggccatggcccccgctccgccccccgccgcctccttctcgccctccgaggtccagcggcgcctggcggccggcgcgtgctgggtccgccgcggggcccgcctctacgacctctccagcttcgtgcggcaccacccggggggcgagcagctgctgcgggccagggcgggccaggacatcagcgccgacctggacgggccgccgcacaggcactcggccaacgcgcgccgctggctggagcagtactacgtgggagagctccgcggggagcagcagggctccatggagaacgagcctgtagcccttgaggaaactcagaagacagatcctgctatggaaccacggttcaaagtggtggattgggacaaggacctggtggactggcgaaagcctctcctgtggcaggtgggccacttgggagagaagtacgatgagtgggttcaccagccggtgaccaggcccatccgcctcttccactcagacctcattgagggcctctctaagactgtctggtacagtgtccccatcatctgggtgcccctggtgctgtatctcagctggtcctactaccgaacctttgcccagggcaacgtccgactcttcacgtcatttacaacagagtacacggtggcagtgcccaagtccatgttccccgggctcttcatgctggggacattcctctggagcctcatcgagtacctcatccaccgcttcctgttccacatgaagccccccagcgacagctattacctcatcatgctgcacttcgtcatgcacggccagcaccacaaggcacccttcgacggctcccgcctggtcttcccccctgtgccagcctccctggtgatcggcgtcttctacttgtgcatgcagctcatcctgcccgaggcagtagggggcactgtgtttgcggggggcctcctgggctacgtcctctatgacatgacccattactacctgcactttggctcgccgcacaagggctcctacctgtacagcctgaaggcccaccacgtcaagcaccactttgcacatcagaagtcaggatttggtatcagcactaaattgtgggattactgtttccacaccctcactccagagaaaccccacctgaagacgcagtgacaactcccaccccctccgtcctgccctcagcccggccctggccccttcccgacccccacccgccattcagaccccattaagaaggttggcttggccaggcaggatgggctgtgtccggccctgcagcctagtggaaggtgctgagggggccctgaggcaggaccgccctcctgacccctggtaggagggtcacatccacttggtggccaggtggcccttggtgacccacttcttcctggagcgtccctgcctagagctcagcccacaggactgcttcaggccgtggccacaggtagcagccgcaaggggaaatgaagaaaactgagccctcgtggccacctgtgtcacccttgtgccttagcctcatgggctgcctaggagctgcctgcacggcacagctcgctttcacagtcagaagtgggtctgtgggatctgtggtccctgtcctccctgctgtcccttctggggaggcttctccaccagtggcagccccaccccgtccctggccattcttggcctccaccccgctcaggcccctactcgggcgctcccagaaggagccacctctcagtgcctcacctccccctgcctcccagcctccgcagatgaggttcctgccccttcctcctcgtaaccaaaaccctcactgctcccaggacggtcttatttataaaccagatacatgttcttagtctggtcccagaccaaggagctggtcagacggccctttctaatcctacatgttgagcttatgtaaaaaatgttgtttcctcctgtttttggttcctttcttacccacaaaccattactacttgaaacttaaaaaactcgccaagtgtaaaggctaaagagaagcagtttgacggaccttgtgatttgtactgtttgctgcggagctatttaaagattttggaataaatatacaaaactacggttgtgaaataaaaacttaaattgtatattttgaaaaataaaacactgaaaagaaaccaacaaaaat

SEQ ID NO: 7560 - DNA, 2154 bp, Homo sapiens
tccagtcttccaacctgggcgacacagagataccttgtctcaagataataataacaacgccctggctcaggagtgtcgccttctcttctccaatgtccttggggcaaggtcacccttccaggtaaaggcccagccccagccacagccactcctcccacagcctctgtaaggaggatgtcaggcctccagccagtggcccatcactcctgtaaaggacttcccagacccagaccagagtcctacagcctccttcccattttgactcaaggaccccagcagtatggcctggccctgtagctgtccaacagagggcagcagctcccgagctgatggggatggtgaggcagggacacctggagctaccaggctgctatgcaccggtcctcacctcgctctccctgccaccctgcagagtacacggtggcagtgcccaagtccatgttccccgggctcttcatgctggggacattcctctggagcctcatcgagtacctcatccaccgcttcctgttccacatgaagccccccagcgacagctattacctcatcatgctgcacttcgtcatgcacggccagcaccacaaggcacccttcgacggctcccgcctggtcttcccccctgtgccagcctccctggtgatcggcgtcttctacttgtgcatgcagctcatcctgcccgaggcagtagggggcactgtgtttgcggggggcctcctgggctacgtcctctatgacatgacccattactacctgcactttggctcgccgcacaagggctcctacctgtacagcctgaaggcccaccacgtcaagcaccactttgcacatcagaagtcaggatttggtatcagcactaaattgtgggattactgtttccacaccctcactccagagaaaccccacctgaagacgcagtgacaactcccaccccctccgtcctgccctcagcccggccctggccccttcccgacccccacccgccattcagaccccattaagaaggttggcttggccaggcaggatgggctgtgtccggccctgcagcctagtggaaggtgctgagggggccctgaggcaggaccgccctcctgacccctggtaggagggtcacatccacttggtggccaggtggcccttggtgacccacttcttcctggagcgtccctgcctagagctcagcccacaggactgcttcaggccgtggccacaggtagcagccgcaaggggaaatgaagaaaactgagccctcgtggccacctgtgtcacccttgtgccttagcctcatgggctgcctaggagctgcctgcacggcacagctcgctttcacagtcagaagtgggtctgtgggatctgtggtccctgtcctccctgctgtcccttctggggaggctttggtggctctgaggtggacaaagagctctcgcaagaagagacagcgtgatgcctcccacagtccaccccagaccctggggcagcccctctggccctgccagctgcctgcgtcgttgggcccagggtggctggcaggagtcccagctgcttgctttaggacctcgcagcttttcttgccgtccctcccctgcctccagaatcacagcccttctccccaagggaggctgaggaggcttctccaccagtggcagccccaccccgtccctggccattcttggcctccaccccgctcaggcccctactcgggcgctcccagaaggagccacctctcagtgcctcacctccccctgcctcccagcctccgcagatgaggttcctgccccttcctcctcgtaaccaaaaccctcactgctcccaggacggtcttatttataaaccagatacatgttcttagtctggtcccagaccaaggagctggtcagacggccctttctaatcctacatgttgagcttatgtaaaaaatgttgtttcctcctgtttttggttcctttcttacccacaaaccattactacttgaaacttaaaaaactcgccaagtgtaaaggctaaagagaagcagtttgacggaccttgtgatttgtactgtttgctgcggagctatttaaagattttggaataaatatacaaaactacggttgtgaaataaaaacttaaattgtatattttgaaaaataaaacactgaaaagaaaccaacaaaaat

SEQ ID NO: 7561 - DNA, 975 bp, Homo sapiens
gggggcggaaatattgctaggtcaggctggtgtgaatggcgaggagcagacgccgggctgcgcgctgggagctgcggtctccggccatggcccccgctccgccccccgccgcctccttctcgccctccgaggtccagcggcgcctggcggccggcgcgtgctgggtccgccgcggggcccgcctctacgacctctccagcttcgtgcggcaccacccggggggcgagcagctgctgcgggccagggcgggccaggacatcagcgccgacctggacgggccgccgcacaggcactcggccaacgcgcgccgctggctggagcagtactacgtgggagagctccgcggggagcagcagggctccatggagaacgagcctgtagcccttgaggaaactcagaagacagatcctgctatggaaccacggttcaaagtggtggattgggacaaggacctggtggactggcgaaagcctctcctgtggcaggtgggccacttgggagagaagtacgatgagtgggttcaccagccggtgaccaggcccatccgcctcttccactcagacctcattgagggcctctctaagactgtctggtacagtgtccccatcatctgggtgcccctggtgctgtatctcagctggtcctactaccgaacctttgcccagggcaacgtccgactcttcacgtcatttacaacaggtaatgccagtttctttcctgacttgccctgaggatcctagagggaggagacctcagtgctttccctggcccagagtttctgagagcacagaaccccaaactacatcacagacatttttggtgaagcctctctgtagaaatagtcttccaaagaagaattttgtctgactcccatctaccccccaaatggatacaaaacccaacaacacatcagcagaaactaaatggaatcatcgggtggcatagcaataaaaaaagagagagagagagattgag

SEQ ID NO: 7562 - DNA, 2400 bp, Homo sapiens
  misc_feature (280)..(280): n is a, c, g, or t
  misc_feature (354)..(355): n is a, c, g, or t
  misc_feature (423)..(424): n is a, c, g, or t
  misc_feature (467)..(467): n is a, c, g, or t
  misc_feature (485)..(486): n is a, c, g, or t
  misc_feature (515)..(515): n is a, c, g, or t
  misc_feature (552)..(552): n is a, c, g, or t
  misc_feature (559)..(559): n is a, c, g, or t
  misc_feature (696)..(696): n is a, c, g, or t
atcacccattttctgcatcagtcacactgggagctgcagaccggagctgttcctatttgcccatcctctccctgctttctttacctctgaggttggattctccctgtggatcctgcaatccttctgccccaaaaaactattatagcaggagggaacctgttcctgctcactctttgccttctccttctcatcctagacagcctgaccgtgccctagttttcagaggagtgattgattctggggtgcggagaggatgaggaaactcaggctcagagagggntttccacctaatgtgcctggaaaccatgggtagctacccaataaggcctttctatgttagaaggtcatggaccnngagtgttggtatcggagctttgtagagacagtttgaccctgtacttagagcagagggtgtgtttgccnnggagagtgtgtgtgggcagctgtgtgtaagcctgtgtgagttntgtgtatgttcctgtgtnnatatatgtgtgtgctccttcatggacacngcatgcatgtagtgggcatagcaaggcagagagaaancaggagnctaggggcacagcccagtaggaagatagtatcttcctactgggcaggacttgaggtgtgcaaaggtgtgcatgagtactgcaaaagcagttcaaagagcagagaggtggggccagaataatatgttgcagaaaggcngtcatcagggaggaaagtgaggattccctgccaaaatgcctgagggcttccctgcctaccacagccctctgtgttcttaaatcctcctgtctgaacagaggccagactctggtttcccccacagcctgtctgtgtctgtcctctgcaaagccatgtggctctacctggcggttttcgtgggcctgtactaccttctgcactggtaccgggagaggcaggtgctgagccacctgagagataagtatgtgttcatcacgggctgtgactctggcttcgggaaactgctggccagacagctggatgcacgaggcttgcgggtgctggctgcatgtctgacggagaaaggagccgagcagctgaggggccagacttcagacaggctggagacggtgaccctggatgttaccaagacagagagcgttgctgcagccgcccagtgggtgaaggagtgcgtgagagacaaaggactctggggcctggtgaataatgctggcatctccttgcccacggctcccaatgagttgctcaccaagcaggacttcgtgaccatactggacgtgaacttgttgggggtgattgatgtgactctgagcctgctgcccttagtgaggaaggccaggggccgtgtggtcaacgtctccagtgtcatgggccgggtgtcactttttggtggaggctactgcatctccaagtatggcgtggaagccttctctgactccctcaggagggaactctcctactttggggtgaaggtggctatgattgaacctggctatttcaagactgctgtgaccagtaaggagagattcttaaagagcttcctggagatttgggaccggtccagtccagaggtcaaggaggcctatggcgagaagtttgttgcagactataagaaatcagctgaacaaatggagcagaagtgcacacaggatctgtcgttggtgaccaactgcatggagcatgcgctgattgcctgccacccccgtactcgctactcagctggctgggatgccaagcttctctacctccccatgagctacatgcccaccttcctggtggatgccattatgtactgggtctctccaagcccggccaaggctctatgaagctaaggttggatgcatggttgcatggatttggggtgtgctatgaggggtggtgtatccttgggagagatataaagtggagggagggagccgtccggtcagtagggcaccaatcccacctccttcattacctcctggccatgattctcctgggagataattctgctctctggagatgttggtaggaaagtttcaagttacgcagctgagaaacagggaccaaatagtgctcctgggtgcattgtcaccgtgggtggccactcaagggtccaagcctctagggccatccttgggctaacaactggggtgggtgtgagcaggtggaaggagcctcagcccatgccattacctcctgcttccttatcaggctgtgtgttaattctgggccagtctacaccctcccacggggtggaaatggcctggaggatgtgagggcacccctcctctgaagatccctgtacacgtggtgttgggactggaaccattatgcggccccataggcctcaggagtcatcccagaagcagtggctgggaggtggtgtcctaagtaaggatctgtgcagaggacaaataaatcagtttttgatttgtcttgaaa

SEQ ID NO: 7563 - DNA, 2614 bp, Homo sapiens
  misc_feature (280)..(280): n is a, c, g, or t
  misc_feature (354)..(355): n is a, c, g, or t
  misc_feature (423)..(424): n is a, c, g, or t
  misc_feature (467)..(467): n is a, c, g, or t
  misc_feature (485)..(486): n is a, c, g, or t
  misc_feature (515)..(515): n is a, c, g, or t
  misc_feature (552)..(552): n is a, c, g, or t
  misc_feature (559)..(559): n is a, c, g, or t
  misc_feature (696)..(696): n is a, c, g, or t
  misc_feature (2614)..(2614): n is a, c, g, or t
atcacccattttctgcatcagtcacactgggagctgcagaccggagctgttcctatttgcccatcctctccctgctttctttacctctgaggttggattctccctgtggatcctgcaatccttctgccccaaaaaactattatagcaggagggaacctgttcctgctcactctttgccttctccttctcatcctagacagcctgaccgtgccctagttttcagaggagtgattgattctggggtgcggagaggatgaggaaactcaggctcagagagggntttccacctaatgtgcctggaaaccatgggtagctacccaataaggcctttctatgttagaaggtcatggaccnngagtgttggtatcggagctttgtagagacagtttgaccctgtacttagagcagagggtgtgtttgccnnggagagtgtgtgtgggcagctgtgtgtaagcctgtgtgagttntgtgtatgttcctgtgtnnatatatgtgtgtgctccttcatggacacngcatgcatgtagtgggcatagcaaggcagagagaaancaggagnctaggggcacagcccagtaggaagatagtatcttcctactgggcaggacttgaggtgtgcaaaggtgtgcatgagtactgcaaaagcagttcaaagagcagagaggtggggccagaataatatgttgcagaaaggcngtcatcagggaggaaagtgaggattccctgccaaaatgcctgagggcttccctgcctaccacagccctctgtgttcttaaatcctcctgtctgaacagaggccagactctggtttcccccacagcctgtctgtgtctgtcctctgcaaagccatgtggctctacctggcggttttcgtgggcctgtactaccttctgcactggtaccgggagaggcaggtgctgagccacctgagagataagtatgtgttcatcacgggctgtgactctggcttcgggaaactgctggccagacagctggatgcacgaggcttgcgggtgctggctgcatgtctgacggagaaaggagccgagcagctgaggggccagacttcagacaggctggagacggtgaccctggatgttaccaagacagagagcgttgctgcagccgcccagtgggtgaaggagtgcgtgagagacaaaggactctggggcctggtgaataatgctggcatctccttgcccacggctcccaatgagttgctcaccaagcaggacttcgtgaccatactggacgtgaacttgttgggggtgattgatgtgactctgagcctgctgcccttagtgaggaaggccaggggccgtgtggtcaacgtctccagtgtcatgggccgggtgtcactttttggtggaggctactgcatctccaagtatggcgtggaagccttctctgactccctcaggagggaactctcctactttggggtgaaggtggctatgattgaacctggctatttcaagactgctgtgaccagtaaggagagattcttaaagagcttcctggagatttgggaccggtccagtccagaggtcaaggaggcctatggcgagaagtttgttgcagactataagaaatcagctgaacaaatggagcagaagtgcacacaggatctgtcgttggtgaccaactgcatggagcatgcgctgattgcctgccacccccgtactcgctactcagctggctgggatgccaagcttctctacctccccatgagctacatgcccaccttcctggtggatgccattatgtactgggtctctccaagcccggccaaggctctatgaagctaaggttggatgcatggttgcatggatttggggtgtgctatgaggggtggtgtatccttgggagagatataaagtggagggagggagccgtccggtcagtagggcaccaatcccacctccttcattacctcctggccatgattctcctgggagataattctgctctctggagatgttggtaggaaagtttcaagttacgcagctgagaaacagggaccaaatagtgctcctgggtgcattgtcaccgtgggtggccactcaagggtccaagcctctagggccatccttgggctaacaactggggtgggtgtgagcaggtggaaggagcctcagcccatgccattacctcctgcttccttatcaggctgtgtgttaattctgggccagtctacaccctcccacggggtggaaatggcctggaggatgtgagggcacccctcctctgaagatccctgtacacgtggtgttgggactggaaccattatgcggccccataggcctcaggagtcatcccagaagcagtggctgggaggtggtgtcctaagtaaggatctgtgcagaggacaaataaatcagtttttgatttgtcttgaaaaaaatgaactaaaaaaaactctaggtctaccggatcgataagcttgatatcgaattcggcacgaggataaatgtaacttcaagtcctgggctactgcttggtaattgtgcaatattgggcaggtccaggagagtctgattcagtgggaccgagttggcctctaaggaacctatgttttaagccgtgttcttatttatgacaatgcacttgatcn

SEQ ID NO: 7564 - DNA, 2560 bp, Homo sapiens
  misc_feature (280)..(280): n is a, c, g, or t
  misc_feature (354)..(355): n is a, c, g, or t
  misc_feature (423)..(424): n is a, c, g, or t
  misc_feature (467)..(467): n is a, c, g, or t
  misc_feature (485)..(486): n is a, c, g, or t
  misc_feature (515)..(515): n is a, c, g, or t
  misc_feature (552)..(552): n is a, c, g, or t
  misc_feature (559)..(559): n is a, c, g, or t
  misc_feature (696)..(696): n is a, c, g, or t
  misc_feature (2560)..(2560): n is a, c, g, or t
atcacccattttctgcatcagtcacactgggagctgcagaccggagctgttcctatttgcccatcctctccctgctttctttacctctgaggttggattctccctgtggatcctgcaatccttctgccccaaaaaactattatagcaggagggaacctgttcctgctcactctttgccttctccttctcatcctagacagcctgaccgtgccctagttttcagaggagtgattgattctggggtgcggagaggatgaggaaactcaggctcagagagggntttccacctaatgtgcctggaaaccatgggtagctacccaataaggcctttctatgttagaaggtcatggaccnngagtgttggtatcggagctttgtagagacagtttgaccctgtacttagagcagagggtgtgtttgccnnggagagtgtgtgtgggcagctgtgtgtaagcctgtgtgagttntgtgtatgttcctgtgtnnatatatgtgtgtgctccttcatggacacngcatgcatgtagtgggcatagcaaggcagagagaaancaggagnctaggggcacagcccagtaggaagatagtatcttcctactgggcaggacttgaggtgtgcaaaggtgtgcatgagtactgcaaaagcagttcaaagagcagagaggtggggccagaataatatgttgcagaaaggcngtcatcagggaggaaagtgaggattccctgccctgtctgaacagaggccagactctggtttcccccacagcctgtctgtgtctgtcctctgcaaagccatgtggctctacctggcggttttcgtgggcctgtactaccttctgcactggtaccgggagaggcaggtgctgagccacctgagagataagtatgtgttcatcacgggctgtgactctggcttcgggaaactgctggccagacagctggatgcacgaggcttgcgggtgctggctgcatgtctgacggagaaaggagccgagcagctgaggggccagacttcagacaggctggagacggtgaccctggatgttaccaagacagagagcgttgctgcagccgcccagtgggtgaaggagtgcgtgagagacaaaggactctggggcctggtgaataatgctggcatctccttgcccacggctcccaatgagttgctcaccaagcaggacttcgtgaccatactggacgtgaacttgttgggggtgattgatgtgactctgagcctgctgcccttagtgaggaaggccaggggccgtgtggtcaacgtctccagtgtcatgggccgggtgtcactttttggtggaggctactgcatctccaagtatggcgtggaagccttctctgactccctcaggagggaactctcctactttggggtgaaggtggctatgattgaacctggctatttcaagactgctgtgaccagtaaggagagattcttaaagagcttcctggagatttgggaccggtccagtccagaggtcaaggaggcctatggcgagaagtttgttgcagactataagaaatcagctgaacaaatggagcagaagtgcacacaggatctgtcgttggtgaccaactgcatggagcatgcgctgattgcctgccacccccgtactcgctactcagctggctgggatgccaagcttctctacctccccatgagctacatgcccaccttcctggtggatgccattatgtactgggtctctccaagcccggccaaggctctatgaagctaaggttggatgcatggttgcatggatttggggtgtgctatgaggggtggtgtatccttgggagagatataaagtggagggagggagccgtccggtcagtagggcaccaatcccacctccttcattacctcctggccatgattctcctgggagataattctgctctctggagatgttggtaggaaagtttcaagttacgcagctgagaaacagggaccaaatagtgctcctgggtgcattgtcaccgtgggtggccactcaagggtccaagcctctagggccatccttgggctaacaactggggtgggtgtgagcaggtggaaggagcctcagcccatgccattacctcctgcttccttatcaggctgtgtgttaattctgggccagtctacaccctcccacggggtggaaatggcctggaggatgtgagggcacccctcctctgaagatccctgtacacgtggtgttgggactggaaccattatgcggccccataggcctcaggagtcatcccagaagcagtggctgggaggtggtgtcctaagtaaggatctgtgcagaggacaaataaatcagtttttgatttgtcttgaaaaaaatgaactaaaaaaaactctaggtctaccggatcgataagcttgatatcgaattcggcacgaggataaatgtaacttcaagtcctgggctactgcttggtaattgtgcaatattgggcaggtccaggagagtctgattcagtgggaccgagttggcctctaaggaacctatgttttaagccgtgttcttatttatgacaatgcacttgatcn

SEQ ID NO: 7565 - DNA, 1608 bp, Homo sapiens
  misc_feature (1608)..(1608): n is a, c, g, or t
gacagatgcttcttagaggacagctgccatcacccagctcagaggccagggagattcctggggcaggaaaacgagggaggggactgaggactggagaggaggcaaaatgtgggaattctggtgatccactggatgtgagggacataggaggagacagcactaaggtgctgccttgctttggaattggtaggatttagggctagtaagctcaggtgtgtaaaatatggaaactccatacagagggaatgccaccatgataattatgaccccttgattgctggaaattaaatattccaagctttctattttacccattgtcctcatatgttgtgatatcatagttttacttttattgtttgtgttttaccttccaagacccccgaagtttttcccctctgcttctctgtcttgcaggagggaactctcctactttggggtgaaggtggctatgattgaacctggctatttcaagactgctgtgaccagtaaggagagattcttaaagagcttcctggagatttgggaccggtccagtccagaggtcaaggaggcctatggcgagaagtttgttgcagactataagaaatcagctgaacaaatggagcagaagtgcacacaggatctgtcgttggtgaccaactgcatggagcatgcgctgattgcctgccacccccgtactcgctactcagctggctgggatgccaagcttctctacctccccatgagctacatgcccaccttcctggtggatgccattatgtactgggtctctccaagcccggccaaggctctatgaagctaaggttggatgcatggttgcatggatttggggtgtgctatgaggggtggtgtatccttgggagagatataaagtggagggagggagccgtccggtcagtagggcaccaatcccacctccttcattacctcctggccatgattctcctgggagataattctgctctctggagatgttggtaggaaagtttcaagttacgcagctgagaaacagggaccaaatagtgctcctgggtgcattgtcaccgtgggtggccactcaagggtccaagcctctagggccatccttgggctaacaactggggtgggtgtgagcaggtggaaggagcctcagcccatgccattacctcctgcttccttatcaggctgtgtgttaattctgggccagtctacaccctcccacggggtggaaatggcctggaggatgtgagggcacccctcctctgaagatccctgtacacgtggtgttgggactggaaccattatgcggccccataggcctcaggagtcatcccagaagcagtggctgggaggtggtgtcctaagtaaggatctgtgcagaggacaaataaatcagtttttgatttgtcttgaaaaaaatgaactaaaaaaaactctaggtctaccggatcgataagcttgatatcgaattcggcacgaggataaatgtaacttcaagtcctgggctactgcttggtaattgtgcaatattgggcaggtccaggagagtctgattcagtgggaccgagttggcctctaaggaacctatgttttaagccgtgttcttatttatgacaatgcacttgatcn

SEQ ID NO: 7566 - DNA, 348 bp, Homo sapiens
tagcttattgtctttcaggcagtaggctggtccatgaagagtaaatggagaaagacctgggttttgtggcccaccagctgctgaatgctcagcccccacccctgtgatactgtggtgtttgttataccctcctccccatcccacacctgtcagtctgccctcactttattgggatgtgatttgcaccctaactctgtccacctgcacaggcacaacacagtgatgctctctcatcttcccactgtcccaggactctggggcctggtgaataatgctggcatctccttgcccacggctcccaatgagttgctcaccaagcaggacttcgtgaccatactggacgtgaac

SEQ ID NO: 7567 - DNA, 352 bp, Homo sapiens
gcattttatttggaatgggaagtaggttctaaagtcaatcactaaggcaaaatttctgtatagtcaaaattactcttggaaatccttttcagatctcagcattggagaaaattgctgttttctgggtgtagcaccagatgaagtagctggcttatatttagggccatattatgttaaaaaatccttcaaatgcaagaatcaggctgggtgtggtggcttgagcctgtaattcttgctactcaggaggctgaggcaggaagatcgcttgagcacaggagttcaaggctgcagtgagctgtgatcctgccactgaagtcctgcctggacaacagagcaagatcgtctcttaaaa

SEQ ID NO: 7568 - DNA, 342 bp, Homo sapiens
aaaatgattaaaagttcaaagtgcgtggctggggcttgtcatctgtgggtttcactgtagggcgatttggctgggctgtgtagttggggaaacctggtatttgtctttcttcttgggttgattagatccccagaaaaggctctaccaatctttccagcctggatgataaaggctggctgtcagcttgatggaagccgagttggggaagagaccgtctctgaatctggcaggctagtaccctccttatctccttattttcagttggtcccttatccttgtgctgtgactaatgatccccaatctagagaccttctgttccacccactccggagaataaacctc

SEQ ID NO: 7569 - DNA, 482 bp, Homo sapiens
catccaaagtgttcatttttttttaagaacctacagttacgagaagtaactgaagaagtgggaaatctggagaccaatatgcagaagaaggaaaaagacaaagactcatcctccaaattggatatttaaaccagaatttgtcatcctcagcaatattgatatattgggccagataattctttgtggagggttctcttggtgtgttgtcgggcatttagtaacattccctctacccacagaatgccaatgagacctcccgaccatgaccagttgtgaccacaaaaatgtctccagatatttccaaacgtcccataggaggcaaaatactcctgcagttgaaaattactgtgtaaaccagatctacatcctagatcttagaaaaaagatgtaaagcttcccaactcagccctgcatacccttgatactgaaataacagccttaaaggaaacaaacaaaactataatcttatttaatacagaagt

SEQ ID NO: 7570 - DNA, 348 bp, Homo sapiens
agtagacattctggcagctacatagtgacagctacatgggagactgaggtgggaggtttgagttcaggggtttgaagctgcaatgagctgtgatcaggccactgtgttccagcctgggcaacagaacaagactgttaatataatgaatgcatttggtaagggactgaaattgatagaaaactttaatgatcattacaattgatagattatcatggaaataactttcttgtttaaaaaaataaaactggcctggcatggtggctcatgcctgtactatcaccactttgggaagatgaggcaagaggattgcttgagactagcctgggcaacatggtaagacccgtcttt

SEQ ID NO: 7571 - DNA, 337 bp, Homo sapiens
gggaaagcaaacatgtccttcttcacatggcggcagcaaggggaagaatgagcaaaagaagaaaaagccccttataaaaccatcagattttgtgagaactcattcactatcataagaacagcatgaagataactgcccccatgattaaattacctcccactgggtcccttccatgacacatggggattgtgggaactacaattcaagatgagatttgggtggggacacagccaaaccatgtcaacctgtgtcacccttgagggacttgggggtcaaagggaactggtgcagacatgaagctcaagcttcctgttgtaccatgaaaaataaagtcctt

SEQ ID NO: 7572 - DNA, 634 bp, Homo sapiens
ttataaaagttaatgagttttggggaggaggacataggcttatcacaataataaaaaccactaacaaaccctttttgagcagctacaatgtattattctaagtacgttttatgtattaactcattccaccttcctaaaggtcctatgagtgttactcttaatcccacactgaagaaaaagcacacagggattacgtaatttggccaaagtcacaaagtacataaatagccaaaccaggaaatgtaaattaacacagtcctttcaatggcaatttggcaatagtcatcaacaaccttaaaatgtgctactcttgacttggaaatctcagtgctaagaatccactttaaaaaaacaggtttggacactatcttgatgcccaataacagatttactattctgaactgaacacaggcattcctctccactccttccccaaataccactaaaatgaaacttacaggatgaaaaagatataacgcggccgggcgcggtggctcacgcctgtaatcccaacacttggggaggctggggcgggtggatcacctaagtcaggagaccaggccggccaacatggtgaaatcccgtctctactaaaaatacaaaattagccgggtgtggtgtcgacgcctgtaat

SEQ ID NO: 7573 - DNA, 327 bp, Homo sapiens
atgttcatctcagaaatatgccttatgttaaaatagaatgaaagcaactgtatcttgtaccttctcagccaaagagctatgatcatttcactgtacttttctcagtgtgaatgatacacacagtgtgtttgtttactctgcttctcttctatgccattacccatttacccatggtcatgttaccatttcctcccacctgaaatactgtgataaccctctaactgtctttcctactattccaccttccaaaaccatggcctgttctgcaatcataattatatagttgtaaaaaatcacacctgatcatgttacctgcttgctgaaaac

SEQ ID NO: 7574 - DNA, 280 bp, Homo sapiens
tttcatgatactgcttgctaagttttttctgtttgcttcaccatattttgaacaattttctattaaattaggatattttaaaagtttgccttttcaatgtcttatttagataaattctgtagttccaaagttatatattttcaaagcctgatgcctttgatgtttgatgatgttaacaatatactattttcaaagccagtttgttatttctacactgatattgggaaaagaataaagtgatgaagtcaacaggtgttattaaaaatgtgaataacaggta

SEQ ID NO: 7575 - DNA, 471 bp, Homo sapiens
agtttaagcacagcacagtagtttcagtattgaacccaatgctttattttgactgcttgctaaatattcctcacccacttgcatgttttctgtaattcttaccatgtttgatagatctgtcactcctgtgacaaatgtatatgacagtcatatagtgaattggataacaaaggagtaatttggtgctgaaattattcaaataattgccattctgtatatgttacaattcagatcatcaaacaccccaagagttggagaggggaagatctgcatcattctagatcagctctggccaatggaaatatcatgtgagccacatatgtaattttaagttgtctgtagccacagtgaagaaaaaagcagaagtaggtgaaattaattttaataatatattttgtttaacccagtttcttcaaattattctttcaaaatataatcagtgtaaacattgttgagatattttactttctt

SEQ ID NO: 7576 - DNA, 514 bp, Homo sapiens
ccctcattacaacctaatgaagataaccatgtattatcttttcttaacaattcttcatagattatattttctccagcaaatttgtttgctgaaattatatcgtatatagggaaaagtcatttctcttttatatcatatattttcttttaatgaaatctgactgaaatgaggaataattttcactcctcttgctttatgacagtgaagtatctttcaagaacaaagttgggatatttgactttcattgtcctgagtaaaatagtgcctaagtcaaatagtacataaattatatttaaagaagtatagacaatatctagactcaagttctaaaataatgatagtcttctaaaaatgatttgctggaagaataattctgtaatcccagcttcttgggaggctgaggtgtgagaattgcttgaagctgggaggcagaggttgcagtgaaatgagatcaagccactgcagtccatcctgggcaacagaacaaaactctctctccaggaaaaaaaaaaaa

SEQ ID NO: 7577 - DNA, 779 bp, Homo sapiens
ccctcattacaacctaatgaagataaccatgtattatcttttcttaacaattcttcatagattatattttctccagcaaatttgtttgctgaaattatatcgtatatagggaaaagtcatttctcttttatatcatatattttcttttaatgaaatctgactgaaatgaggaataattttcactcctcttgctttatgacagtgaagtatctttcaagaacaaagttgggatatttgactttcattgtcctgagtaaaatagtgcctaagtcaaatagtacataaattatatttaaagaagtatagacaatatctagactcaagttctaaaataatgatagtcttctaaaaatgatttgctggaagaataattctgtaattgataaattctcttttaaagtgagcatgattcatagcttagatgagtgctgattttcaattatgaaggacagcagcatctctatttagaaataaaatcaaggccgggcacagtggctcacgcctgtaatcccagcactttggaaggctaaggccagtggattgcttgaggacaggagttcgagacctgcctggccatcatggcaaaaccccatctctactaaaaatacaaaaaattagccgggtgtggtggcacatgcctgtaatcccagcttcttgggaggctgaggtgtgagaattgcttgaagctgggaggcagaggttgcagtgaaatgagatcaagccactgcagtccatcctgggcaacagaacaaaactctctctccaggaaaaaaaaaaaa

SEQ ID NO: 7578 - DNA, 406 bp, Homo sapiens
aacacttgttttttaaatgattactggtagcatagttgacgccaactgatagtatctttttttgaattccacgtggtatcatcctgcctattattttattcttcggttttttcaatttttttatttctatttttgtttgtgtttttatttttattttcttttttgtaaaaaagcagacttttgacatcagagcttgtttagggattattgtggtataatattctggggatgacagaactgttttataccttaattttacctatgtaactttatatatgtcagaattcacaggggccaggcaggtgactgacacctgtaatcccaacactttgggaggccaaggtggcagatcacctgaggtcaggagtttgagaccagcctgggcaacatggtgaaacctcctatt

SEQ ID NO: 7579 - DNA, 330 bp, Homo sapiens
acttataagcccatatctgagtaacatcaaaacccattcttttaaccgttatactgtatttcctcccaccaatggcagctcctcacaagttgattgccattctcaccacaacacaggtttggtgtttgctgcctacctgacctccttctaggcactacaaactggagctttcagagtatgcacgctgtcattttgacttgatttgattaatgggcatctaaaccaatctggttggtggcaagctgccatagaaaaaaaccctatgcatataaaacagaaaatcagattttgccacatcctgactgggtgaatttgagattatgtcacacc

SEQ ID NO: 7580 - DNA, 382 bp, Homo sapiens
aactataaactaaacatctcccaaagttagcttagcctaagcccaggaataattaagggcagttgaagactaaaggcgaaagggggattggccagatcagatctcctccagagccataattttctcaatgatataattttttgcaaaggcaattacaataaggataatagtaatatccttacatgttccacataccacgacaagcatttcctatgcattgcttcagttaattttcatatcaatcttatgaaacaggatcctagagatgaaagccaaggtcctgctgaatgggaagccaggttgagaacttagtcctttctgacttcaaagcttgtgctttcactcctgtgttatgttggaatgcgagctttgaggatctctg

SEQ ID NO: 7581 - DNA, 346 bp, Homo sapiens
tggtaccatacatattcatgttaggtctttattgtgaattacagattttagaattaaaaaggagatttgggccgggcacagtggctcacgcctgtaatcccaacactttgggaggccgaggtgggcagatcacctgaagtcaggagtttgagaccagcctgcccagcatggtgaaaccctgtctctactaaaaaaaaataccaaaaattagccaagtgtggtgtcaggcgccataatcccagctactcaggaggttaaggcaggagaatcacttgaacctgagagacggaggttgtggtaagccaagatcgccccattgtactttagcctggacaacaagaacgac

SEQ ID NO: 7582 - DNA, 895 bp, Homo sapiens
gacctcagctttgtctgtctgaagctgcaggaggcccctgaggggtgggggagatggcaggcccaccagcgtaccctgtgctgatcatccctcttctctcttcttcagggctcctgcactgactcctgagactattttaactgggattggttatcacttttctgtaacgcctgcttgtccctgcccagaattcccagctgcctgtgtcagcctgtccccctgagatcagagtcctacagtggctgtcacgcagccaccaggtcatctcctttcatccccaccctaagggggatggctgtgaccctgcttcctgcactgacccacagcctctgcctgtgcacggccagctgcgtctactgaggccccaaggggtttctgtttctattctctcctcagactgctcaagagaagcacatgaaaaccattacctgactttagagcttttttacataattaaacatgatcctgagttatctgtattctgaacttccttaattgagcagaggcaggaaatcactgcagaatgaaggaacataccttgaggtgacccagccaacctgtgcccagaaggagggttgtaccttgaaaagacactgaaagaatttggggtgcaaagtcagggtgggcagaggaggtagaagatcaactcagttgttgcatcattcatggttctttcatattgatgctcagtgcagtggcctgagaatatcccagcctctcttctggtttggtgagtgctatataagtaagcatggtggaattgtttgggggcagatatagtgacccttggtcactggtgtttcaaacattctggcaagtcacatcaatcaagaataatttttacttttaagaaagcataaccagcaataaaagtactatttttgattctaaaaaa

SEQ ID NO: 7583 - DNA, 909 bp, Homo sapiens
ttttttaaatcttttttttagatgccacttgtttgttaaactcgggagttgttcatttaacttgtactggctttcagaaggagactttgacttttttaaagaaatcaggtccatcactcaatgaactcattcctgatggttataatcgatgtcttgtagctggccttctttccccaagatttgttgatgttcagccttccagtttaagccaagaagaacagttagaagctatattgtcagcagcaattcagactagttccctgggacttttgactggttatatccgaagatggataacagaagaacaaccaaattctgccactaatttgcgctttgttcttgaatggacgtggaataaagtggttctcacaaaagaggaatttgacagactatgtgtgccattatttgatggttcgtgtcatttcatggatccacaaactatacagtctatccagcaatgctatttgcttcttagcaatcttaatatagtcttgagctgttttgcatcagaagcccgagagatcactgagagaggactgatagacttaagcaataagtttgtggtttcccacctcatctgtcagtatgcacaagtggttctttggttctctcattctgggcttttaccagaaggcatagatgattctgtgcagttgtcaaggttatgctacaactaccctgtaattcagaactactacaccagtcgtcgacagaagtttgagcgtttatcaagagggaagtggaatcccgattgcttgatgattgatggactggtttctcagttaggagagcgaattgagaagttgtggatacgagatgaaggaggcacaggaaaatatcctcctgctagtctgcatcgtatcttgatatgtacctattagaccgcgattcatgacgaggtacgctgaa

SEQ ID NO: 7584 - DNA, 251 bp, Homo sapiens
ctcctgccttggcctcccaaatcactgggattacagacataagccaccatgcccagcctcttctctctttgatagttgggattattacttttaatattttgatgctggttgctttgatattaattaacagtgatattaaataagtcttaatttttccctgattgcagagggaagtggaatcccgattgcttgatgattgatggactggtttctcagttaggagagcgaattgagaagttgtggatacgaga

SEQ ID NO: 7585 - DNA, 303 bp, Homo sapiens
attgagcattgattgatgccttactaatttatctgttacagactttgacttttttaaagaaatcaggtccatcactcaatgaactcattcctgatggttataatcgatgtcttgtagctggccttctttccccaagatttgttgatgttcagccttccagtttaagccaagtgagatgatttttaactctattgtttcttttggttggatcacgttattagctttctattacagtaaaaatgtattagataatttctgcaaaaataggtgaagtagtgtaatgctgactctgggtgatcagca

SEQ ID NO: 7586 - DNA, 388 bp, Homo sapiens
tttctttttcttttttaggtgagtattttaatttaaagttcaaaacaagttcagcagattagaatcccagattttttttagtgggggtattatcctcattttattattaaagggtgaaattaagccatagaatttcttcttaggaagctccctcctaggtaatgcagctgtcaagctatggacaaaccatttcacgtggttatttctttaacagtataaagtacacaagtgattcagctggggctttattcttgcctgcgtttctagaatgcttctaacctaaggcagcatttaaggtgttttatcccaacatctggaagtcatcatctaaacactcataccattaccccatgtctaatcttttgttctgctccttcatttgtttatg

SEQ ID NO: 7587 - DNA, 346 bp, Homo sapiens
ggcttttaaacaaaagcactgtatcatctgtgccaaatgtattccctgactaattactgagtacagtcacatagttatagtacactaataatacaggctggaaactgaagctcatagaagtatgtagtttccccaagagtgcagagctagtaagtggaagagtcaggattcaaacccagagcccctttctgaaatcctcagaggtgttcaacagcatgatcctcccttcctcttgacagctcgtatcctcctcctgaggtttagggcttcactctacctgacctgtgaagatttgaaagcacatatctaggacaagtattagaaagtcttcatacttcaggaaagg

SEQ ID NO: 7588 - DNA, 455 bp, Homo sapiens
tgttgcccagggtggagtgcagtggtgtgatctcggctcattgcaacctccgcctccttaggcaggaggattacttgagcccaggatttcgaggctgcagtgagctatgatcacaccactgcactccagcctgagttacagagtgagaccctgtctccaaaaaaaaaaaaaaccacctttttattaattttatcatttcgcatctattttcagatgcgagagtgtagtaattttctagataacttgcctttgaaagatacagtggccagaagacctgtttatttgaattctgcagttaccttagccttctcttttactttttttttttttgaagaaaaagttttttttctcatgactactagtgagttaatctgtcctggtattattttctgtgttaccagatagcatactggtctgagagagctctgtaaatatatatatttaaaaacccacct

SEQ ID NO: 7589 - DNA, 355 bp, Homo sapiens
aagatttgatctgcaattataagtaatctgccttttgaaattagcttcctgagactcagtcctgattggagaactgttaaagtgtttcagaggagcaggggttgtctatccgagcagtgtctcctgaatcatactgaatacttgagaaaatcagaccagctttatttgaactcaaatagtgacttgcttctcagcttccttcaatctcctgatgagagaaataggaaaacaggaaaaccttttgaaatcacattcaggcaaatttgcttggcttgtttcaaatcaaaccaaagtctggaactgatccccatgcaggagcgctaagcctctgcatagcaactaagccgcgttaaaa

SEQ ID NO: 7590 - DNA, 687 bp, Homo sapiens
ttttagttaaatctgtcttactacagtttgctaaattcatttttattttacttttagttaagcaatctaaacttagcattccctctgaatttcactataatcagattaaccatctcatatgttaactggaacaaccaaatacttactgagtgcctagtatgtgggccagggactttccagatgcttgggacagattgaataagataagatttctgctctcatagggctgagagctgtgtatctgtttagaagaagatgttaacttcccaggagaactcaagtaaaatgtgaaatagaataaggccacttggtcatgaggtcacaaactttgtgccaggcacactgctaaattggggcacaatacatggacatgtattgtaataaagaggacatgacccaaatgtttcagaaaatttaagcttataaaatttgatgccagtaaactcttggaattgtttaaatatagtagacttttcttatttttctcaatagtttattgaaaagttggtagataactttaaatgcttaaaatttcttaacagctaagaaagatatgaattgaaagatgtcattcatgatctttgttgcctttggtgtaggtatgaataacactagcatttgtgagggaaaagtgaatatgtacatttttattcataaaataaaaaaaattgcaaacaaccagttaag

SEQ ID NO: 7591 - DNA, 352 bp, Homo sapiens
tggaatttgaaattaaaaacacaataccatttatattagcaccaaaaaattaaatacttaggtataacataacaaaatatgtgttatatctcaatatctatatgcagagaactacaaaactctgatgaaataaatcaaagatctaaatggagatcctttgagctgcaaggtaaaaaatttaataaaaataaataaatacatgaagagagattctatgttcacgaataggaagactcaatattgtttagatgtcacttcttcccaacttgacctgtagattgaatgcaattcccatcaaaatccctgcaaatcattttgtggaagtcaactaactgattttaaagtttatata

SEQ ID NO: 7592 - DNA, 478 bp, Homo sapiens
tagagacatcttcagtttttatgtgggtagttacattaggcaccaagaagcaataacagtggaaaactgcaaaccgaatgcaagtatggggcagtttcttaatttggggtcagtggagcgctttgtggaatcaagtacaatcttgtgatcttgggtggcctgcctcactgtggtcaaacataaaacaggaataaaagtttctatttcacaggattctaagaggattaaacaagatagtttatgtgaagacactcatcaaggtccctgtcttctgataattaaacgtgaattcagtgtggatccctgtttatgttactgggatgtaagctgaaaggagttaggtaggaggctgttagcagtcacttggtatatttcacttgaacctgttccagtcgcaacacaccatggtaggtgtaaatatgggcatttctcaactggtttaggtcatgtaggaaataggtgctatcatcagattaac

SEQ ID NO: 7593 - DNA, 662 bp, Homo sapiens
ccagtctcccaggagaggtgtagacatgctttggtttctctctgatatgtatttattattgatcttcagtaaatttgactctgatctgttaacatggggctaatgatacctgcattgcagggttgctttaaaaggattaataatttgtaaaatgtgtagcccagaccccgccgtccactaagagctcagtaggtgtcactattatcattgatgccacttagcaaatatgagctctttaaatcattatgacaactttgaggggaagatacccttagtccattgtacagatgaagaaactgaggcttagtgaggagaatggatggcccctgggtcccatctcccgtcgctagagaactggggagcaagaattggagttctggccgggcatggtggctcacacctgtaatcccagtactttgggaggtcgaggcaggaggatcacctgagcccaggagttcaagaccagcctggacaacatggcgaaacgccacatctacaaaaagttttaaaaattagccgggtgtggtagcacgtgcctgtggtccctgttgcttgggaggctgaagtgagaggatcatttgagcccaggaggttgaggctacagtgagctgtcattgcaccactgctctctagcctgggcagcggtgtgagaccctgtctca

SEQ ID NO: 7594 - DNA, 394 bp, Homo sapiens
gaatgaggcagacaggtggggtggggagctttgagtcagtgttaaaattaaactaaggccactttctgtgggtatacactgtaagggaaaaatggattattttgtgaactctgttagaaaaaaaaatacatcttaagttgtgacaactggaaaagaatagattttactctctctgtgaagctgaaaatgaattctctatatggtaaaccttgaaagtagagatgtagtaacattattagtctttaccggtgccgtcttataacagaggctgcacagattagcagagaccatgagggtttcaacgaaaaagtatattcaagtcttaatgcaaaatataataatgtttatcagtaaaaagaattactaaaaatatgtactgcacacggtcactgta

SEQ ID NO: 7595 - DNA, 238 bp, Homo sapiens
gtcctcaaatatagatgatatatagaaatacattgaacaaatgagaaacaggttgtgaaaatagaagcaaggaaaaaataaagaacagaaaattaggtgaagcgagctagaaatggtgctgaaaatcacatcgataaatccctgtgcagttgcaaaggtggccccaactgggggcctgcactttccaacagccaggatctgttgggaaacattatcagttgccagattgatgacattc

SEQ ID NO: 7596 - DNA, 886 bp, Homo sapiens
tgagtgaacaactctcagttctaaccatgccctttgcttccttcctttgaagcccagccctacgaaccatctctcttcaattcataacaagcacgtttgaatccaagagcctaagccccagttttctacacgtatctgtgctgactgcattactgaggtcaaccttaatcaccctgggactgtcaaactattgatgtccataaggattctctgtgctggcattccacacacacgcagcaaggttcaatgagccacagtacttactctctgacctctattatttcaaccatttaaaaattgtggccacgggaggctgaggtgggaggatcgcttgagccctggaggtcgaggctgcagtgagctataatcccagcactgcactccaacctgggcgaaagagcgagaccctgtctcaaaaattaaattaattaattaattaattaaaaaacaaaaaaaaaagccgtggccagcaaaagaagtagattatgatctccaggacaatatgttttgtacataaaatgtatttggagttttttgttttcattaaagttgaggtccctccctactgtgatgtcaaacccaacaatgggtcaccccacaggacaccacccctgctcgcacctgtaatcccagtcctttgggatggcgcaggtaggtggatcacttgagcccaggagttcaagaccagcctgggcaacgtggcgaaaccctatctccacaaaaaacagaaaaattagctaggtgtggtggtgtgtgctagtagtcccagctacttggggggctgagtcaggaagatcgcttgagccagggaggtcgaggctgcagtgagctatgacagctccactgctctctagccttggccacagagcaaggccctaattaaaaa

SEQ ID NO: 7597 - DNA, 383 bp, Homo sapiens
aaggagatgtgagatacacaaaagttaatggccacaagaagccctaatgtctccaacttggttagctgcagagatgccagttgctttaaaatcatgctaacctcttcctcctttctacaaccccaaggagcgtttctcgaaggagcctcaaagctccatttttcgctgcaaagggaatatcttttaactttgagggaggaagtatgaactaagttatttattctctttaattccataacctttgccaaggagaaatgatatactcattatctcaggagttcagctggtcactgtcttgccttgaaaaatcgctggctcagctcctgtcagataaagactttggtgtactcagggtttaatgagattaacggcttttatagtac

SEQ ID NO: 7598 - DNA, 372 bp, Homo sapiens
ctagaggattcccgggcagagtcatggagcccctaatgtctccaacttggttagctgcagagatgccagttgctttaaaatcatgctaacctcttcctcctttctacaaccccaaggagcgtttctcgaaggagcctcaaagctccatttttcgctgcaaagggaatatcttttaactttgagggaggaagtatgaactaagttatttattctctttaattccataacctttgccaaggagaaatgatatactcattatctcaggagttcagctggtcactgtcttgccttgaaaaatcgctggctcagctcctgtcagataaagactttggtgtactcagggtttaatgagattaacggcttttatagtac

SEQ ID NO: 7599 - DNA, 433 bp, Homo sapiens
gccttacgatccccgtttactggggagtagggaggctgctgttacaaatctcaatgtcccgaccaacccctacctgttgagctcttcaggaggggccaggcatggatgctgccttcaaagctccctgctgatacataccgctaagctgaagacttttgctccagtttcaccatacaaatgcatctacaaacaaaatcttatttccgtagggtttaagtcaagtcaaaatcacttgtcctatatattagaaagtcctagaggagaagaacacaaggaaagcgtggactataataaagacaactcacgtgtccacatttctggggtctggggaaaaaaggcaatttgttttgtataggacacacataagccaccaggcatcaaaagaggccaaataaaactccaactgaggccgagtgcggtggctcacacctgt

SEQ ID NO: 7600 - DNA, 485 bp, Homo sapiens
gagagcattaaagagggtgaaaaatttgactagagtctgttggtttttttcccctttccctggaacaaatggttatatttgttttgtgtaccattttatttcatttttcttcaataagttataccattaaaacagaatacatgggctaggaaatgcaagttggcttctgctggtaaggatgcagtcccagttttcttagtgaggaaagacagttttcatgattttacatacttatgttttccttttatgggcagcataatttaaacctttggaattttttttttttttcaaattagttttttttcctgcaagcagtactgcctgttttatctgattgtggcccaaagcatcgaattgctacttaatgaatgtttattaattaaaaaaagttttgttaagatttctcaaaattcagttcagtttaaaaatatcgtggccaggcacagtggttcacacctggaatcccagcactttgggaggccaag

SEQ ID NO: 7601 - DNA, 926 bp, Homo sapiens
ccttgttggaccctaattctgccaaggcctcttgattgtaaaccacacacctgctgcattgccaacagatcctgttccgtacctgtgtccaaaaacatttgtaaaaaccctttgagtttaatatttgtaatttttaatttccactcttttattactgatcttagcttaatacaatatttttatacaggattatttcttcagtatcctactgtgtgattttaaaaaaagatgcagcaaccttaatatatctccatatcttgtgctactgtgattgttcaagcaaaagtggagagaagaaaagctgctgcaaaagacaactgtgaaactgtgatattttataaaatagaagaaattcaagtgctttctttttcctatatgtttttttttttttatctgaattctcagatactgcctcctaactgtgtccaaacttcttgtgtaataaagagattctgttttcgatcctaagttctttgggatgccaacattcacagtcaagtcttgaggaggtgtgatgatggcatcatgcctatttttttggaaagctgttgtttttaaaacaggccaacacctcttttatactgttgtatcagccttttaaaaagtctatttttcaatgcctgaaactgcattttaatgcattttcttccacctgagcactgagcacaccaaactggaatccatttgaaaatgacagtgtgtgaagtgtatgatttacattaaaagaggggagggagttgccatacatattaaaaatttttaaaaggtttatagttaccaccaaacactgatgaatgtgtgacctttgccagagctgtcaagctaggataaaaaaggtcaaggacctaggacaataactcttagtcgatttattttcggttggtacaacacatctcctgtgcaaaatgtagtccatcagaaacatc

SEQ ID NO: 7602 - DNA, 377 bp, Homo sapiens
gactttcttatatccttctctcagcaaaatcaggatgtttattagaacaaaactagaattagcttatttccctaccctgaagcaaagtcacatatagtatgttctaagtgctgggtctcaggataatgccattgtgctgttagtctgagtgtgtcagatctgggtacatgatagctgtcctcccgtctgtaaagtactgtggaagctccaggcagagctaggaccagaacccagatcttctaactcctcaccccagcattctttctccttacgcatgctgcttcatggaactcagagatgaaatcacataaagcaaatactcaggaatagccttcagttcctcaccactcagaaaataggaaagaaagacaggatgg

SEQ ID NO: 7603 - DNA, 149 bp, Homo sapiens
taatgtgcatttgattatgatgatggcaacactgtatgctgactcggggcatgcataattaattggaagcgagttccacgatcagattaatatttcatttcccctctcagaaggaaggctatctcagtgagatataacctcttctgctt

SEQ ID NO: 7604 - DNA, 730 bp, Homo sapiens
agtttccttatctttaaatggaggtaatcacagtacctacctcagtgttgttgtgaagatttaatgagataataacctgcagagcacttgagagtctcaagaaatatgagctcttataacattattgctattgtaaaacattgctattacttctgtcccaatttggcagtttcaggaaattgagaaggaatgtcactgaatctttaatgccagttacacagagctcagtaggtgtccgcacagccctttagatgcacgtagcctatttgatcttcgtatcagccctgtaaggttgggcttaagaatgacccagcatggaagtactcttgggaccacaggggaagcaacagtccttgtaagctgtttgtcagtgggccttagcaaccaagccccaagtggacagaaagatggggttctgtgagcatccattccaagggtcactttaggggtgcaatcttctgggctctgagaatggattcacagcagcatctctatctggaaatacctttgctttgtccaagtaacctcctcccacacagagtacccgaatcagctcagattttttttccttaatattggcaacacttaatgctacttctttgttcgtaacatttcatttaattatttaaaaatctgcaaatgttgtgtatattttaccgcaatttttaaacaaactccagtgtagaccgtgctctagcatttctaaaaataaaagtaaatatgttaaaat

SEQ ID NO: 7605 - DNA, 440 bp, Homo sapiens
gttttctcagacaggatcctaggatgtgtctggaagcctgcggagtgaaggtagacatgcaggtgtgatgttctgcctgatagtgcctctctccaggcattaactacaaggctgggtgggggcttacggtaaggcatcgagtccctaagcatttatacagtcccaattgtgcatcagtgcagtgctggttataacagggaagaatttgtggaggggagggcacaggctgaaattggcccattcctacacatgctcttgacctagacctagagtaagtgacattgaccccaaccgtccccctacccacctccagcttgtgccagacatcactaatcagtcacagcgcttctttccagctgaatccagactcagaatcctcattagagctcattgttagcacgtcttcctgaagtgcaacccatttgccattccttccctgg

SEQ ID NO: 7606 - DNA, 765 bp, Homo sapiens
ataaaggagcttccaattgccaaatccgggacaatttgagaaagaaaataaataatgactgtaatgagttatatagcccacagaatcaattaatatgaatgtgttcatagtatataaataattgggtaaacatgtcagtggtgggagggagagctcttccctactcattctgactaatgtagaagaaatgatgggaacggaaaattgctgtttgacaaaccacagtggtaatgggtacagacaagaacactcagtggacactaaagttagggggcaatgtgtgttgtgaaacggggtatctgcagagtcttgagaacctcccctgaagatgcttagtgactccccaagggaacagtagtaacctcacagtagacacccacccctagctatgcggtcatcacccagatatgtgcatgcagctcgtagccctgatatcatgcactgagaactcggcatcactgctgtggttttcttgcccaaaatgtctcttgtccaagtactaaccaggctcgaccttgcttagcttccaaaatcagacaagatcgggtgtgttcagggtgatgtggctgtagactcttgcccaaaatgtgtagcctgaatctgatcatgaggaaacatcagacagaccaaagggccatgctacaaaataattgccagcacccttcaaaagtgttatgtaagatgttatctaggggaactggttatacaaactctgtcctatttttccaactttttggaagcctgaaattatttggaaatgaaaag

SEQ ID NO: 7607 - DNA, 368 bp, Homo sapiens
  misc_feature (169)..(169): n is a, c, g, or t
  misc_feature (198)..(198): n is a, c, g, or t
atcatctatcctgtatgattgtcccaataattaataataaagtactatagtagcaacttgtactctcttgatcctaacaaaaccctgtaatgggcacttaagtccctgggcaatccttgcttaatgcttttgttgactcaacgagggcccgaggcttgagggtttctantaaggtacgggccctaggcatgcaggctngatggcattcaagacccgggctcaaataactagcctcaatgtattaagtaaggcactaatgaggggcattgcatattaagtaaagccctaggaaaggcattgagatagaggttctgaggacaaagagggctctaaatcaacaatcttaaccgaaaaatacacaaaaaact

SEQ ID NO: 7608 - DNA, 389 bp, Homo sapiens
tccacataccgaccattgcagcaacacatggctacctagggagaccttagcttttgttcggcttcttccaggaaactcaaaccagatcagggaagaggcagaggaggttaggaagtgagaaagccgataatagaaagggaacaaaatgatacgtattgctcagcatcctgttggtgatcctcttctgtcagagcactaagacaaaacaacggaagggttggagacagagaacacctttaatttgatgaagacatgattattgtctacgtggaaaatcaggagaacctctagaaatattagcaccaatacaagagtttttttgcaagtccgtgtatataaaattaacatacgtaaattagtaacattcctgtgccatagaaataaccaat

SEQ ID NO: 7609 - DNA, 1446 bp, Homo sapiens
ctaagtaataaaacacatagcatgattctctctccctctctctctctctctctgcccaccccctgctagtttccaggagaatacttctctaaaattcatttttttctattttggaataaattatctttatacagtaattcaaacactgatttccattaacctttggccctgagttttcttctaacatagaagagttcattttgagaggcactcagttaccattcaatctgtgctgtaagtatgggactttgtacaaatgccctttttgagggccaaaaatttcaatacactttgttctactttgtgaaccaggtctggatctgcacagagaaagtaatgctgagctgtccaaagagtccgctcaggtctccctcctaaccctcctctgccttcccctagtttgcttatcctcacgtctgacactgaggagtgcatagtcttcaactgaaatggcactacagttagttctcattggaaacaaacaagtgtatttctggaacctgctcgtctaaaatagtcaatgcctttgtaaagactcagcatattcaatatctattgtatggtagctagctatatacatagattgactatttttagtcctggtttgtgtattgttgagctatagtagtttgctttatccatttgtgggattaaacaatactgtttaatggttgtaaacttttataaaatctctttgggttttttgtttgacccaaacataatgtaagtcttaatgacaaaatacacaaagttaaccagaggtgagtgaaaatatagcccttccccagttttgtctgcccctataatgcacgtgcattgctttgtaatatgctctcgctagcatgaatgtgctatgactacttcatgaggttttgtttcacctataattgtgatggaaaatgctgtattgctgacaacaatgaactgtaaccacagttatttactgcataaactatttgtgtactaaccactcatggctctgtttctttaagaataccaacaacaatgggccgggcatggtggctcatgcctgtaatcccagcactttgggaggcgaagcaggcggatcacctgaggtcaggagttggagaccagcctggccaactggcgaaaccctgtctctactaaaaatacaaaaattagcctggtgtcatggcacgcacctgtaatcccagctcctcgggaggctgaggcaggagaattgcttgaatccaagacttggaggttgcagtgagccgagatcatgctactgcactccagcctggacgacagagtgagattccatctcaaaaaacaaaacaaagaaacaaaaaacaacaacaacaaaagccatgccacacatacatatacatatactacatatactctagtttgctcctaaagtattagatttatgtccttgcgacttatattttgagattaaaaactataaaggcagggatttcc

SEQ ID NO: 7610 - DNA, 250 bp, Homo sapiens
caaactgtgaaaatttattatatagaacccttttttatttccatattttagtttcaaaatatacctgaacaaatgcataaataaccaatcctctgttatttaaatatataaccatgctatgttataataagagcacttgtagaattttagtaactataaaaatatttcagtagcaaagccaagattataaatgttttgatcccctacagaatggagtaaaagtgatgaattgcattgtatgagaatcagt

SEQ ID NO: 7611 - DNA, 345 bp, Homo sapiens
aatatttaaaaatgtttttaaacatttgctcccaagaaaagaagttaatagtagggataagcccagaggaattataagtgactacatttccatctatgtaagaacttgtgattttctttctgtttgaattggattgcatttgcctaggaagttaatgacattttagtagcaatagaatgttaagaatgcctatgaacagttcttaattgtggggaagcaatacttcattttttacacttagtatataaaaatagttaatttttataaaaatactttatataatacttttaatttagtataagcatttttcatagtagggataaggaaatcttttgtttttataag

SEQ ID NO: 7612 - DNA, 1499 bp, Homo sapiens
ctcagtgcccttctggggaaggacatgtccagtgaagctgaccaagagtgacctggacaccctgctgagcatggagatgaagctgcggctcctggacctggagaacatccagattcccgaagccccaccccccatccccaaggagcccagcagctatgactttgtctatcactatggctgagcctggagccagaaacgacggtacccaggagaagggattttgggcccaggagaaacacttacattctggtgccttgtcttttgcttgtacagaatctgtagtgattttggtggccagtaaatgccagccatttctcaaacccacctcggaccacccagagtttcctcttggtccctgtctactaagagtcatgaaggcagggtgctctgcccactccatcaccatgaagcctgggattgggccacgaggaacaaacagcagatgcccttgccttccagtccaagaaactgcttcttgaaatggatttaacaacagccactcaccttttcctcctgagcctgctctctgatcagctggatccccacgtgagcaacagctggcccaggaaaggctgcctgcagaggacaggtgtgttgggcgtgttgagagccttgaagtgactacctgtatcttagatctgagtacaagcctgaggcttttgcttttgtcttttttgatgagggctcactccagcttcatatggtgccaagacgttgctgcttctgaggttggctctaacatctctggtctttagagccaccagatctctctggcccatacagatatcagagcagacggaaatttctccctgcaagcgctcagtctcatcccagcaagtcaaagacctcctggccaagtcctgccctcttaagtctccaggaacgctgcagggaaaacccagctgaggcctgggcctagactgtggtgaggtcactagattctactgctcttcccccacattaataccttttccttcctcagagagaaatctcccctaacctgaattgcagccccctccagtttgctttcctttggccttccagaccccaggaagttggccttcccttcctagtgctatggtttctgccattggccatgatttcagggagctggctgaggccggctgaggccacacctgtgccagtggggcttccctggtgctgcagcacttgtaaaccacacacacagcctctctccctggacatacgttagcacattggcattcagtattggtggcctggcatggtaggtactacccaatgaagagtgtactatatattttcattactataggccatacttatacagacgtgtatatatatttatataagatctacctatcttaggatggaaccttggggaaaaataaaattgaggggaagtaaaaagtatgtaacacttccagttgtgagccaagattgtaaccagagagcagccaggagcttcctgtcagtaaccatgttttcaataaatactctttcatgtacaaaaaaaaaaa

SEQ ID NO: 7613 - DNA, 558 bp, Homo sapiens
ctcagtgcccttctggggaaggacatgtccagtgaagctgaccaagagtgacctggacaccctgctgagcatggagatgaagctgcggctcctggacctggagaacatccagattcccgaagccccaccccccatccccaaggagcccagcagctatgactttgtctatcactatggctgagcctggagccagaaacgacggtacccaggagaagggattttgggcccaggagaaacacttacattctggtgccttgtcttttgcttgtacagaatctgtagtgattttggtggccagtaaatgccagccatttctcaaacccacctcggaccacccagagtttcctcttggtccctgtctactaagagtcatgaaggcagggtgctctgcccactccatcaccatgaagcctgggattgggccacgaggaacaaacagcagatgcccttgccttccagtccaagaaactgcttcttgaaatggatttaacaacagccagagcttcctgtcagtaaccatgttttcaataaatactctttcatgtacaaaaaaaaaaa

SEQ ID NO: 7614 - DNA, 422 bp, Homo sapiens
aattcaaggcctgagagttctatggtggaagaagagtccagtttagcctcttcacctggcccacatctccctcttgggcctggcattttctaagtgcctgctctgcctggtaccatgttggttgttcctaaagcatcatcttactcaatattcacaacctcccagaggcccagctcaggaggatactgccagaataggccttttccttctcactcgtcaaggtctcagctagggtgttgtaggcttaaagggaagaactggaggcctaggtagccccgaggagcacacagtcattccctcaaaacaaacagcctggaggctcacgtcatcaccagctctgggcaacagctgacagaccactgctttcctccaccaccactccccatgctggctgctggcctcttgacaggttgatggcttgg

SEQ ID NO: 7615 - DNA, 212 bp, Homo sapiens
gcttcatttaaaacaaagtaagctgaaggaaggaaataaaactgagtaaaaatcagctaattaaagataaaacatgcaagagtgaaaatcaacaaagacaaatgttggttctttgaaatattaataacatatgcagtgaattttattttatttttttttacatggagtctcactcttttctccaggctgaagtgcagtggcactatcttggc

SEQ ID NO: 7616 - DNA, 1002 bp, Homo sapiens
ggggagtggaaacctggtgccaagccccaaagactcattgcagtaaagccactccgtcctctctgagtccacaggggaagctggccaaggtcacagaccctagctgccttgtggacaggacaagagtgcacacagtgcaaggcccagcctgaccttagctacggggagggcagcctgctttgcgggggagaatgagctgagggacgagggagataccttgggtaatctgtgcccgttggggcagaggctctgtggtggcaggctccggggaggccctgacctaccgccatgccggttcagcatctgttttctgacttgaaggaggaaggatgtgccgagcagctgaggaatgacactcagtgcctggcattttggaggtgccctgacactgggtggggctcagtgcacaaacagcagggtaccgggttcctggggccagtggcctctgctgcttatgccccatgtctcagggtccaggacgcaccaccagctctaggcttctttctctgtgttcatttccggagctgtggcaggtggcttagaggggtctaggccatgagaggacatggaatcttgcttctgcttggcaggaaagttcaataggagcgtcttggctctgtgacctctgatgagatgattttattgtgagctttctgttcacccctcgccagtgctgcctgaggtcacattccctgatgggaaagtagaggagacgaaagtagagggttctgcaggcccatggtgtggggggtatgagggtgtgtcccccagcacctgctcagtggggatcagaggcccctccctacccaccttatccctgggctggcacagccccacacacacaccctgagccctggctcaggactctgggaaaaccttaagctgatataggctcctgaagtccatcaccaaccctgatgaggaagcctgtcatagattcagatcagaatgatacttgagcactgctggcttaattaagctccagaatcaattttttcaaaa

SEQ ID NO: 7617 - DNA, 817 bp, Homo sapiens
ggggagtggaaacctggtgccaagccccaaagactcattgcagtaaagccactccgtcctctctgagtccacaggggaagctggccaaggtcacagaccctagctgccttgtggacaggacaagagtgcacacagtgcaaggcccagcctgaccttagctacggggagggcagcctgctttgcgggggagaatgagctgagggacgagggagataccttgggtaatctgtgcccgttggggcagaggctctgtggtggcaggctccggggaggccctgacctaccgccatgccggttcagcatctgttttctgacttgaaggaggaaggatgtgccgagcagctgaggaatgacactcagtgcctggcattttggaggtgccctgacactgggtggggctcagtgcacaaacagcagggtaccgggttcctggggccagtggcctctgctgcttatgccccatgtctcagggtccaggacgcaccaccagctctaggcttctttctctgtgttcatttccggagctgtggcaggtggcttagaggggtctaggccatgagaggacatggaatcttgcttctgcttggcaggaaagttcaataggagcgtcttggctctgtgacctctgatgagatgattttattgtgagctttctgttcacccctcgccagtgctgcctgaggtcacattccctgatgggaaagtagaggagacgaaagtagagggttctgcagggcagagtaggtgagacctcgcatcttcctggggctgtgtcttgcccagttgtcaggcagcaaacagcgctgagttgctacca

SEQ ID NO: 7618 - DNA, 318 bp, Homo sapiens
agaaacttctacactcaaccacataaacctcataattcagagtagttgaggctgtattcattgtggcattcttcttccacctcattaaataccaggcaggcccctttgatcaggtctccatggcagtgctgcccctggtacacaagtgtgtacccatttaggaaaagacagtaactgcttacctgcacaacctaattatatggagatatggtctcagtcctttaacagtgagacagaaacagaaatccaagctccagggacaggaaagtctactgagatcaaaaccccttcttttgccccacaaaaacaaaacaaaac

SEQ ID NO: 7619 - DNA, 239 bp, Homo sapiens
gaggatttttgttaaactttagccggattcttgctcaaactggattctgtaaggacagagagggaagcccagggtcaggcccatttgagcagggggcttatggagatctgattagagttagtttaatgagagtctttgtcacctgctgaaaagaattcgtttttatggctcagaataatagtgtaatcatagcaagagatgacttgtctatgtccattttataataattcaaaaatctc

SEQ ID NO: 7620 - DNA, 430 bp, Homo sapiens
tattattatatattttacatttatgtattttgcaaacaaaaaatttacgcatttattactttatgtaatttttgatctattaaaatgtggagagaagaaaggagataaagtacatacttacagagctgggtatattagcttttaggttctctttatttttcctgtgaactcattataatctgacatcgttttcttattccaacacagttttgtccctactaattttttcatgatgttattgtcaaatgtgcttgatttctatatgttttagccccaatggtaaaattatatacaaattgttttatgtagttttcaaataagctaaaagaagacatgcacttatactatattttaaaattagcaaaatatttgccttcactgatgttccttttttttttttttgcctgtggacctaatatagtattaaatg

SEQ ID NO: 7621 - DNA, 320 bp, Homo sapiens
ccagttaggtttcattttattttgataggactcaggtttttcatcctttaaatgagaagctttaaccttaaagtaggagcatctttaaagtttttcaggtctagaatactgtgttctaaattggtatagtattttattgcatcatttaactctttgttgatgtactatgggattattctttcagtaacatttgatccagactgtctttgtttctccttttagtgatctagtaaattatgaaatatgttctttaatatactttgctttttaaggaaagttgaagaaaattgatcatttgttcgttcatttaaaaaatacaa

SEQ ID NO: 7622 - DNA, 361 bp, Homo sapiens
tttcatctttgttgttgttgttaaatagaggcagggtctctcactctgtcatccaggctggagtgtggtggcatcatcatagctcactgcagccttgaacttttgggctcaagtgatcctcctgccttggcctcccaaagtgctgggattacaggtgtagccaccacactcagcttctttcatccttttgctgactaatcagtttagtatttttttttaaacatttccattacaaggtaacctaggaagagatgactgaaatcataggcttatatgtttgccagccccctcttccaaagaaactttaaaaagaattggtgtctcataaaaatctactatgtatcatctcttccgtcgacgc

SEQ ID NO: 7623 - DNA, 148 bp, Homo sapiens
catattctttgatgcttttctgtttatgaaattgtgttacagactgcgagtaacatagcttaaatgagaagataagtaattactgcctttcaactgatacatatttctgttgaaaggcagtaattacttatcttctcatttaaggtcg

SEQ ID NO: 7624 - DNA, 396 bp, Homo sapiens
ggagaaagagaagatgctggtcaacaggtacaaagcttcagttaagcaggagggataagatctggtgttctatatactggatcgtgactatagctactaataatgcactgtaggccaggcaagatggctcacacctgtaatcctagcactttgggagaccgagacagcagatcacttgaggtgaggagttcgagaccagcccggccaacatggtgaaaccccatctctactacaactacaaaaaaaattagccaggcatggtggtgcatgcctgtagtcccatctactcaggagcgctgaggcaggagaatcgcttgaacccaggaggtggaggctagagtcagccgagattgtgccactgcactccagcctggttgacagagtgagactccatct

SEQ ID NO: 7625 - DNA, 188 bp, Homo sapiens
ttccaactgcgggacttgcctcatccccactcacagggaagtcacatcctgaagatgccacaaacagctggagacattcggaccgtatggagtcttgcaattggatgccagtcccaccagtcttgcaatcttcccacatccagaacctttccatcctctgtctaaaaatagcagttgtactctccaca

SEQ ID NO: 7626 - DNA, 600 bp, Homo sapiens
ctgagcttcacaccttgggtcagatgtgtgttgtcagctgagaaactgagctgcattcttgagcatgagccagacgccttgacagatggttattcttttctgcttgacctcgagttacagagatgcagatgaagtcaaagaggataccagatgcagccagtctgctggggaggcacgtacgtctgagcgggcccagcacagctgttctccagggcaaggcttggccatggcagctgccccagcgcccgcattcagcccaacccaccaggtcaccccagtccagtccgtggtgctcagatccccaagcaatcacaggtcagaggcggaaagaactacgtgaatgtgtacagtgatattgggcacatgctctgaaggaagggaaaccgaagaacgtcaaggggcagcgttcagaggaggggaaagaatgcagagtctgggtgtgatccctacctggactctcttagaagctccactatcctcttctctaatgatctgtcttcccattccagaatttcttaccttaacctacttagcctgagttaaataagcatctgcatgcagaaataaataagtgagggaatttgtacttttctgcaatta

SEQ ID NO: 7627 - DNA, 300 bp, Homo sapiens
gctgagtggcagagtaacagacagttcatcaaccttatttcacagagacagccaaccaaaatgagaagcattacttgttctgtgataaaaagccaaatggaagaagataatatagaaagacattggtgaagcaaggaggtggaatacctgtgtcagtggctagacaagaagcaccataagatgctgaaaaggtgagaggccaagagacgcgtttcttaagaagcgtggtcagttcaggctgcggtaactccatactgggctgcggggctttgtcttgttttgtttgagccatgatagtga

SEQ ID NO: 7628 - DNA, 761 bp, Homo sapiens
cagtcacggtactcgtttccagacagaagtcatgaggaacaagagggaaggtgctttcccgtgtgcagcgcttggggagactcacacagacagaggatctggcatgacagggaaaggaggaaatggcttctgttaatctctccttcagcttctcccgcccttcccatgcactcttcctgtttccctttccagttctcacggtgactcaaggaacaacgtgtgaaatgaaagacctcaggtgctgtattggctcttgacagctcttcagaagaaaatacctcctgcctgttctgttcagtcctggtgcaggtggtcctggacaacactttgaaaaatgctggggcagaaacaagccagcaagcatatgggattcatctgctgtgagtgataatttatctagtttctaaaaatagtgttataggctggactgtgtccccttcctgtgccccgccgccatgcatatatggacgcctagtacctcagaatgtgactgtatttggaaacagggcctttgaagaagtaattaagttaaaatgaggtcattagggtgggcagtaatacagtataactggtgtccttataagaagagattaggacacagatgcacacagagggaagaccatatgaacacagagggagaagacagccacctgcaagccacagagagagcccttcaaagaaaccaaccctgcagacaatttgatctcaggtttctggcctccagaattgtgagaaaataaatttctgttgtttaagtcaac

SEQ ID NO: 7629 - DNA, 377 bp, Homo sapiens
tgagatggagtctcactctgtcaccaggctggagtgcagtgtgcactggcacaatcttggctcactgcaacctccgcctctcgggttcaagcaattctcctgccactgcaacctccgcctctcgggttcaagcaattctcctgcctcagcctccctagtagctgggactacaggtacgtgccaccatacccagctaatttttgtattgttagtagagatggggtttcaccatgttggccaggctggtcttgatgtcttgacctcgtgatctgcccgcctcagcctccctgggattacaggcgtgagctggcgcccagcctgccccaactctctataggcaggaaggaggctgagaaatttgctcaaccatcaaaagc

SEQ ID NO: 7630 - DNA, 422 bp, Homo sapiens
gaaaagttgtggtccccagaatttctgtcctccctatgctagcacgaagggataattgatcttcagacattgaaaagagatagcaggcaaaacaccggggctggaacaacacagcaggatacccagggatcccaaaaggaagtcaaagaagagattggagaaaagcagtggtgaggaaaagggcattgcccccaaaaagtaatgtctcccatgcagagaagactagcattacataaatgtgtcactgagagagttaccttaccctgactctgtcaccaaattttattaaatgcctctcctatttcatccttgttggtgaacttcccagttcttctcttattttatgggcataagagcttatactttgcagtttagttagttaatttatttaaatagcattatcaagttggctctagactaaa

SEQ ID NO: 7631 - DNA, 394 bp, Homo sapiens
ctggaaccacaggtgtgtgctaccgtgcctggcacttttttgccttcttaatggagatattcagttttctttttttcatttaaacaaagaaaaaaaatgtatctactctaccttccctctgctctcctccctccctatcctactctggaaaaaaaaacaaaagatatactttcaatcttcaaaagttagctggagacattatggaaaagaacatttgtggttcattagatcgcttcaactttattgtttctactctgtgaatttttagtaggaatagcactttgttatttaagaggtgctttacttttatatgaacaagggtctcctaggactgaagaaaatggaagataaatatgtgaaaccacttactcagtacgagccttttgactaagta

SEQ ID NO: 7632 - DNA, 412 bp, Homo sapiens
gatctcaggacagggagcccacagaggcctggggaaggttctggatgggcttgacagctgtgcttcccaaagctcactgcacatcagagtcctctggggaactttttcaaagatacagcttcctggccgggcgtggtggctcacgcctgtaatcccagcactttgggagggcaagacaggtggatcacctgaacccaggagtttgagaccagccatggtcaacatggcaaaaccctgtctctactaaaaatacaaaaattaaccgggtgtggtggcgcacacctgtagtcccagctactcaggagtgagtagctgaggcacgagaattgcttgaacccgggaggcggaggttgcagtgagccgagatcgtgccactgcactccagtctgggtgacagagcaagactccatct

SEQ ID NO: 7633 - DNA, 810 bp, Homo sapiens
gagacagaatctctctgtcatccaggctagagtgcagtggcacgactcttggcttactgcaacctccacctcccaggttcaagcaattctctgtctcagcctcccgagtagctgggattacaggcatgcaccaccacgcctggctaatttttgtatatttaagtagagacaaggtttcgctatgttggccaggctggtcttgaactcctgacctcgtgatccacctgccttggccacccaaagtgttgggattataggcatgagccaccgtgcctggctgatgctggagcttttatgtgacatggtgactcttaaaactggggagggacgtagagatgagagtttcacacaccagcccataggtgggatgtcaagacccatcggaagtgtcgctggcctaagagaagagcacttatttctcaccatggctgatctagaattgttccctgattctgaaagaagtttacactacactggtaagcagtactattagactactgactgtggccttctgtgcatatggaataatgatttctcagatttgtaggcttgaatgtgaatgttattttatcagtaatcagaataaattgcttatattcaggagttattttaaatatttaaatgaaatttattttaggcaccaagcaccacataaactcataataactatttgcaatgcattagcatcactcacggggtaatgaaaacataccttagctgctgtaaaagcaaagtcttccgtgtccgggtgggctgaaagtttttaataaaattttagctaaacatttgtttaagtgaatactaaggatg

SEQ ID NO: 7634 - DNA, 1248 bp, Homo sapiens
gagacagaatctctctgtcatccaggctagagtgcagtggcacgactcttggcttactgcaacctccacctcccaggttcaagcaattctctgtctcagcctcccgagtagctgggattacaggcatgcaccaccacgcctggctaatttttgtatatttaagtagagacaaggtttcgctatgttggccaggctggtcttgaactcctgacctcgtgatccacctgccttggccacccaaagtgttgggattataggcatgagccaccgtgcctggctgatgctggagcttttatgtgacatggtgactcttaaaactggggagggacgtagagatgagagtttcacacaccagcccataggtgggatgtcaagacccatcggaagtgtcgctggcctaagagaagagcacttatttctcaccatggctgatctagaattgttccctgattctgaaagaagtttacactacactggtaagcagtactattagactactgactgtggccttctgtgcatatggaataatgatttctcagatttgtaggcttgaatgtgaatgttattttatcagtaatcagaataaattgcttatattcaggagttattttaacataaacaaaaaaaaacaaaaaaaaaaacaacaaaaaaaaaaaaaaaaaaaaagcaaaacacacaaaacgcaaacaaaacaaacccaaaggagagcgaagagcggagggacgagcggcaggacgagacgcggaggcagaggggacgagcagaccgaacgcgcggagcgcagacacggccaccgcggggccgccaacgggaacggcgcggcaccaagagaggaggaccggcgcagcgggcggagcggcggcgagggagagagagggaagaccgggcggacccagagggcggcgcagcgccgggaggccacagcggcggagcagcggcggcgcgcggcgggcagccgggggcacgcagtaccgccggcgtcgggcgcacaggcgccgagcgcgaacagacgcgggacgaaccgtcgcgaggcagagaagcgcgaggagaggacagcaaacgggagcacgcgaggcgcgaaggacgggacagcacgaggcgcgcagccgaggagagaccggccgcggaccgcccgcggcaccggcggccgctggggcgcacgccgcgccgcggcccgcccccgcgccgcccgccccgcccccgcccccccccgcgcgacccccccgggcgggacgacgggcgacgaca

SEQ ID NO: 7635 - DNA, 346 bp, Homo sapiens
ctgaggcaggagaatcaggcagggaggttgcagtgagccgagatggcggcagtacagttcagcctcggcttggcatcagagggagactgtgtaaaggggagaagagggagagggagaccgtggaaaggggagacaagagtgagagggagctgaaatttttttttaattcttgtgaacacatggttctaaatgctaaattttatagtaatcttttcccagcaatcttttggtaaaaatcaatgaaattgggacccttataggtcaaaataaatgttcaagaataaaaatggtcaccaaggatcatgagtcatttcaggaaagcctttatcctaaaagtgaccaacac

SEQ ID NO: 7636 - DNA, 1182 bp, Homo sapiens
ataggcttgccttatctttgtctgatctcttaatcacttgggaatgaaaatatgataatataggtggcggctcactaattcttattcattctattcttaatttatttttattattaaaaaaatgtgttgcctaggctggacttgaactcctgggctcaagcgatcttcccacctcagcctcctgagtgactagctacaagtgtgccaccgtacctggcttcattctgtttaacatttcttaaaaacactcttcctttcttttccatttgggaattaattttctgtttttagtttcatgttccttagaaaccatctttcacatggttgtcacaaaaacttttttttgatacacattcacttatctgcttaaacacctttctcttaaagtattctttctgtgaaatatttcatattcaagatgctccctaaatggtgagttcacagtttgcatgtaagtttggtaattttcaggtgattctttgttccctaaacatttcgcgatattctataactctgcctaagttgttcccctcagtctggaattcctttggtgttcactactcataatcagttccttttttataggcttctagaattcacagatggtttttaacatatctgtttataagttcattttgtgggccaggctgagtcgttctgtggctgcatttgctgaatacacctctgagaatgccccctacagtcgagtcatattttgttaaaaatgcttcctccacactatctgagacctattgactgggaaccttttcagagtgaaatctgggaatgtgaatttttaaatgcacccccagtgcccaaattgcagcacctctgctgtacagtagtggcaggaacttactcttcttcctaagtgtcaggcccccagtaaactagaaaaaaacatactaaataaattggagagaacaataaaactagattcaaaaaataggtccaataaattcagaatgccactaggtatatactaaaattgatttgggattgtgggttaatgtgactaaatgtcccttgtgttctttttaaaaactgtcaaggctaggtacagtgggtcacaactttaatcccagcactttgggaggctgacgtggaaggattgcctgaggccagtagttcaagaccagactaggcaatgtaggaagaccccatctctacagtcaaataata

SEQ ID NO: 7637 - DNA, 432 bp, Homo sapiens
ggaggcggtggcattttttaaaaagcaagcacattggagagaaagaaaaagaaaaacaaaaccaaaacaaaacccaggcaccagacagccagaacatttttttttcacccttcctgaaaacaaacaaacaaacaaacaatcatcaaaacagtcaccaccaacatcaaaactgttaacatagcggcggcggcggcaaacgtcaccctgcagccacggcgtccgcctaaagggatggttttctcggcagagcagctcttcgccgaccaccttcttcactcgtgctgagcgggatttttgggctctccggggttcgggctgggagcagcttcatgactacgcggagcgggagagcggccacaccatgcgaggtaagcgagtctgcgggcaccgaggctccccgagtccggccaactccagccagacggggagatg

SEQ ID NO: 7638 - DNA, 2632 bp, Homo sapiens
ctcgctgctcccttcctccctgtaactgaacagtgaaaattcacattgtggatccgctaacaggcacagatgtcatgtgaaaacgcacatgctctgccatccacaccgcctttctttcttttctttctgtttccttttttcccccttgttccttctccctcttctttgtaactaacaaaaccaccaccaactcctcctcctgctgctgcccttcctcctcctcctcagtccaagtgatcacaaaagaaatcttctgagccggaggcggtggcattttttaaaaagcaagcacattggagagaaagaaaaagaaaaacaaaaccaaaacaaaacccaggcaccagacagccagaacatttttttttcacccttcctgaaaacaaacaaacaaacaaacaatcatcaaaacagtcaccaccaacatcaaaactgttaacatagcggcggcggcggcaaacgtcaccctgcagccacggcgtccgcctaaagggatggttttctcggcagagcagctcttcgccgaccaccttcttcactcgtgctgagcgggatttttgggctctccggggttcgggctgggagcagcttcatgactacgcggagcgggagagcggccacaccatgcgagcacaaattgaagtgataccatgcaaaatttgtggcgataagtcctctgggatccactacggagtcatcacatgtgaaggctgcaagggattctttaggaggagccagcagaacaatgcttcttattcctgcccaaggcagagaaactgtttaattgacagaacgaacagaaaccgttgccaacactgccgactgcagaagtgtcttgccctaggaatgtcaagagatgctgtgaagtttgggaggatgtccaagaagcaaagggacagcctgtatgctgaggtgcagaagcaccagcagcggctgcaggaacagcggcaggagcagagtggggaggcagaacgccttgccagggtgtacagcagcagcattagcaacggcctgagcaacctgaacaacgagaccagcggcacttatgccaacgggcagcgtcattgacctgcccaagtctgagggttattacaacgtcgtttccggtcagccgtcccctgatcagtcaggacttgacatgactggaatcaaacagataaagcaagaacctatctatgacctcacatccgtacccaacttgtttacctatagctctttcaacaatgggcagttagcaccagggataaccatgactgaaatcgaccgaattgcacagaacatcattaagtcccatttggagacatgtcaatacaccatggaagagctgcaccagctggcgtggcagacccacacctatgaagaaattaaagcatatcaaagcaagtccagggaagcactgtggcaacaatgtgccatccagatcactcacgccatccaatacgtggtggagtttgcaaagcggataacaggcttcatggagctctgtcaaaatgatcaaattctacttctgaagtcaggttgcttggaagtggttttagtgagaatgtgccgtgccttcaacccattaaacaacactgttctgtttgaaggaaaatatggaggaatgcaaatgttcaaagccttaggttctgatgacctagtgaatgaagcatttgactttgcaaagaatttgtgttccttgcagctgaccgaggaggagatcgctttgttctcatctgctgttctgatatctccagaccgagcctggcttatagaaccaaggaaagtccagaagcttcaggaaaaaatttattttgcacttcaacatgtgattcagaagaatcacctggatgatgagaccttggcaaagttaatagccaagataccaaccatcacggcagtttgcaacttgcacggggagaagctgcaggtatttaagcaatctcatccagagatagtgaatacactgtttcctccgttatacaaggagctctttaatcctgactgtgccaccggctgcaaatgaaggggacaagagaactgtctcatagtcatggaatgcatcaccattaagacaaaagcaatgtgttcatgaagacttaagaaaaatgtcactactgcaacattaggaatgtcctgcacttaatagaattatttttcaccgctacagtttgaagaatgtaaatatgcacctgagtggggctcttttatttgtttgtttgtttttgaaatgaccataaatatacaaatataggacactgggtgttatcctttttttaattttattcgggtatgttttgggagacaactgtttatagaattttattgtagatatatacaagaaaagagcggtactttacatgattacttttcctgttgattgttcaaatataatttaagaaaattccacttaataggcttacctatttctatgtttttaggtagttgatgcatgtgtaaatttgtagctgtcttggaaagtactgtgcatgtatgtaataagtatataatatgtgagaatattatatatgactattacttatacatgcacatgcactgtggcttaaataccatacctactagcaatggaggttcagtcaggctctcttctatgatttaccttctgtgttatatgttacctttatgttagacaatc

SEQ ID NO: 7639 - DNA, 4407 bp, Homo sapiens
acgagatggctgtgtgcgcaggcgcaagactagcgctcttgggaccggaagttaaggcgttcgcggcgtgtgaatccaggcctgaaaacccagaatgaacttgtgtccatcccagagatcactgcagatgtcatgaggtaccctttgtgtcaccagctcaagcaggcctctggccactttatcatctgtggtggtcctgtcccgtgaccaggaggaaaaattagctctttgaagagaaagtagttctctattgcaggcactggcctcttaaattgttgcaggtggggaatggatgagaatatttgttttgggtgatcagaactgagactcctattgtggattagtaacatgcctcctcctagaacaagggagggcagggatcgccgagaccaccaccgggctcccagcgaggaagaggccttggagaaatgggactggaattgtccagagacgcgtcgcctcttggaagatgccttcttccgtgaagaggattacatccgtcagggttctgaggaatgtcagaagttttggaccttctttgaacgcctgcagagattccagaatctcaagacctccaggaaggaggagaaagaccctggacagcccaagcacagcatcccagcgctggccgacctacctcgcacttacgacccacgttaccgcatcaacctctctgttcttggccctgccacgcggggctctcagggactgggcaggcacttgcccgcggagagagtggctgagttccgccgagccctgttgcactacctggactttggccagaagcaggcatttgggcgtctggccaagctgcagcgtgagcgggcagccctccccatcgcccagtatgggaaccgcatcctgcagacgctgaaggagcaccaggtggtggtagtggccggtgacaccggctgtggcaagtccactcaggtgccccagtacctgctggctgctggcttcagtcatgtggcgtgcacccagccccggcggatcgcctgcatctcactggccaagcgtgtgggctttgagagcctcagtcagtatggctcacaggtcggctaccagatccgctttgagagcacacgttcggcggccaccaagattgtattcctgacagtggggctgctcctgcgacaaatccagcgggaacccagcctgccccagtatgaggtcctgattgtggatgaagtccatgagcggcatctccacaacgatttcctcctgggcgtcctccagcgcctgttgcccacgcggcctgacctcaaggtcatcctcatgtcggccaccatcaacatctcgctcttctccagctatttcagcaatgcccctgtggtacaggtgcctgggaggctgttccccatcacggtatttgatgtggcaccccctggagtccggaaatgcatcctctccaccaacattgctgagacctcagtcaccattgacgggatccgcttcgtagtagattccggaaaggtgaaggagatgagctacgatccgcaggccaagctgcaacggctgcaggagttctggattagtcaggccagcgcagagcagcggaagggccgggcgggccgcacgggccccggagtctgcttccgcctctatgccgaatcggactatgatgccttcgccccctaccccgtcccagaaattcggagggtggccctggactcgttggtgctgcagatgaagagcatgagtgtgggggacccccgaaccttccccttcatcgagcccccaccaccagccagcctggaaaccgccatcctctacctccgggaccagggggccctggacagctcagaggccctcacacccattgggtccctgctagcccagctgcctgtggacgttgtgattgggaagatgctgatcctgggctccatgttcagcctggtggagcctgtgctcaccatcgcagccgcacttagcgtccagtcgcccttcacccgcagcgcccagagcagcccagagtgctgcaccccacctgcgtcttcgctggcagccccgaggtgctgcacgcacaggagctggaggccagcaactgcgacggaagccgagacgacaaggacaagatgagcagcaaacaccagctcctcagcttcgtgtccctgctggagaccaacaagccgtacctggtgaactgcgtccgcatccctgccctccagtccctcctgctttttagccggtctttggacaccaatggtgactgctcccgcctggtggccgatggctggctggagctgcagctagcagacagtgaaagtgccatccgactcctggcggcttccctgcggctccgtgcccgctgggaaagtgccctggaccggcagctggcgcaccaggcccagcagcagctggaggaggaggaggaggatacgccagtcagccccaaggaggtggccaccctgagcaaggaactcctgcaattcacggcatccaagattccttacagcctccggcggctcacagggctagaagtccagaacatgtatgtgggaccccagaccatcccagccaccccccatcttcctggcctctttggcagctccaccctgtccccccaccccacaaaggggggctacgcagtcactgacttcctcacctacaactgcctcacgaatgacacagacctgtacagcgactgtctccgaaccttctggacctgcccccactgtggcctgcatgcgcccctcacgcccctggagcgcatcgcccatgagaacacctgcccccaggccccacaggatgggcccccaggggctgaggaagctgccctcgaaaccctccagaagacatctgtcctgcagaggccctaccactgcgaggcctgcgggaaggacttcctctttacacccacagaggtgctgcgccaccggaagcagcacgtgtgagctgggccaggagccctgcccacctccgtgcagctgacctgccctccagcccaggactaggggcaggactcttgcctgaacccccagcctgggcttagccctgtggtcctgtcccagtgcagagggcctggagcacggattgtgaataaagcctcacatgctgatacacactgttaggcctgcacctgcccatccagaaagcagcagctgccttgttagtcctccccagggtctagctttccttcttcctgctgcagggtgctgcctgaggggtcctgggtaggaggggcgttagagccagcagggacctcccatgtctccagattccaggtgcaggttcttagcacctccgcagccgctctctcttgagtccatcctcagtctctcctaccccttgaagtagggggaccctgaatttgcccatccacctgggtcactttgagagttgtgcaggggggctgggagcactggtgttcacgtgggaccacaggctgcaccataagacccactcacaataaaaaaataaaaggccgagccgggcatggttgctcactcccgtaataaaaaaataaaagaacatgctgggattacaggcgtgagccactgcacccggccgtgaccaacattcttaatctgtcctctagtgctggccactctaaaacttcacaagaatgtgctgtctgtgtctagcttcttttacccaacatgaggttgcatgggcttggttcattcattctgttccatgaattcatcacaatatatccattcttttgtccaggggcatttggcttccagaaacctacccctaacaccagcccttccctccctctgcagaacaaaggccccatcagaggggacgtgctgggtgtcagcgtcagcttctgggaggaggaaggtcagagctaaggcctgaaggatgatgaggtatcaggtgggtggaggggagacgctcaggaggtgggaaaggcggaggtgcacaggcttggttccaggtacaaataacgttactaggagcacacagtacctggattttgatgaatacattgtacatttctgtcctgtatgtatccagggttataggacgtgattataggacacgcatatatgtttggttttagtggactcttaaaaattgttttccaggggccgggcacagtggcttacgcctgtaatcccagcactttgggaggcctaggcgggcagatcacctgaggtcaggagttcaagatcagcctgaccaacatggagaaaccccgtctctattgggaggccgaggcgggaggatcacaaagtcaggagatcgagaccatcctggctaacacggtgaaaccccgtctctactaaaaatgcaaaaaaattggctgggcgtggtggcgggcgcctgtggtcccagctactcgggaggctgaggcaggagaatggagtgagcccgggaggcagagcttgcagtgagccaagatcgtgccactgcactccagcctggttgacagagcaagactccgtctcaaaaaag

SEQ ID NO: 7640 - DNA, 387 bp, Homo sapiens
attcggcacgagggcgactgtctccgaaccttctgcacctgcccatccagaaagcagcagctgccttgttagtcctccccagggtctagctttccttcttcctgctgcagggtgctgcctgaggggtcctgggtaggaggggcgttagagccagcagggacctcccatgtctccagattccaggtgcaggttcttagcacctccgcagccgctctctcttgagtccatcctcagtctctcctaccccttgaagtagggggaccctgaatttgcccatccacctgggtcactttgagagttgtgcaggggggctgggagcactggtgttcacgtgggaccacaggctgcaccataagacccactcacaataaaaaaataaaaggccga

SEQ ID NO: 7641 - DNA, 464 bp, Homo sapiens
gtccggaattcccgggtcgactactactactaaattcgcggccgcgtcgacgggggctgggagcactggtgttcacgtgggaccacaggctgcaccataagacccactcacaataaaaaaataaaaggccgagccgggcatggttgctcactcccgtaataaaaaaataaaagaacaggctgagccgggcatggttgctcactcccgtaatcccagcactttgggaggctgaggcgggtggatcgcctgaggtcaggagttcgagaccagcctggccaacatagtgaaaccctgtctctactagaaatacaaaaacttagctgggtgtggtggtgggcatctttaatcccagctactggggaggctgaggcaggggaatcacttgaacctgggaggcagaggttgcaatgagctgagatcatgccattgcactccagcctgggcgacaagagtgaaactccatc

SEQ ID NO: 7642 - DNA, 386 bp, Homo sapiens
atacggaaggatggagacagttgaaataggaagaaccccacaaaagctggagataatggagaacgatgctgaggggctgaggaagctgccctcgaaaccctccagaagacatctgtcctgcagaggccctaccactgcgaggcctgcgggaaggacttcctctttacacccacagaggtgctgcgccaccggaagcagcacgtgtgagctgggccaggagccctgcccacctccgtgcagctgacctgccctccagcccaggactaggggcaggactcttgcctgaacccccagcctgggcttagccctgtggtcctgtcccagtgcagagggcctggagcacggattgtgaataaagcctcacatgctgatacacactgttaggc

SEQ ID NO: 7643 - DNA, 615 bp, Homo sapiens
atcccctcgctctctctctctcttttttttaaattagggtctcgctcctgttgcccaggctgagtgcagtggcacaatcacaggtcactgcagcctcgatctcctgggttcaagcgattctcctgcctcagcctcccgagtagctgggattacagtcatgcaccaccactaatttttgtatttttagtagagacggggtttcaccatgttggccaggatggtcttgaactcctgacctcaagtgatccgcttgccttggcctttcaaagtgctgggattacaggcatgagccacaacgcccggccaacactaggaattttaaaacgtcatgaatttgtgatctctgagccccgctgtgctgcacagtggctcttgtgttccccaatcttgggggttttgcttctcattctagatgaagagcatgagtgtgggggacccccgaaccttccccttcatcgagcccccaccaccagccagcctggaaaccgccatcctctacctccgggaccagggggccctggacagctcagaggccctcacacccattgggtccctgctagcccagctgcctgtggacgttgtgattggtgagtacccacccccctcctgatcact

SEQ ID NO: 7644 - DNA, 4034 bp, Homo sapiens
acgagatggctgtgtgcgcaggcgcaagactagcgctcttgggaccggaagttaaggcgttcgcggcgtgtgaatccaggcctgaaaacccagaatgaacttgtgtccatcccagagatcactgcagatgtcatgaggtaccctttgtgtcaccagctcaagcaggcctctggccactttatcatctgtggtggtcctgtcccgtgaccaggaggaaaaattagctctttgaagagaaagtagttctctattgcaggcactggcctcttaaattgttgcaggtggggaatggatgagaatatttgttttgggtgatcagaactgagactcctattgtggattagtaacatgcctcctcctagaacaagggagggcagggatcgccgagaccaccaccgggctcccagcgaggaagaggccttggagaaatgggactggaattgtccagagacgcgtcgcctcttggaagatgccttcttccgtgaagaggattacatccgtcagggttctgaggaatgtcagaagttttggaccttctttgaacgcctgcagagattccagaatctcaagacctccaggaaggaggagaaagaccctggacagcccaagcacagcatcccagcgctggccgacctacctcgcacttacgacccacgttaccgcatcaacctctctgttcttggccctgccacgcggggctctcagggactgggcaggcacttgcccgcggagagagtggctgagttccgccgagccctgttgcactacctggactttggccagaagcaggcatttgggcgtctggccaagctgcagcgtgagcgggcagccctccccatcgcccagtatgggaaccgcatcctgcagacgctgaaggagcaccaggtggtggtagtggccggtgacaccggctgtggcaagtccactcaggtgccccagtacctgctggctgctggcttcagtcatgtggcgtgcacccagccccggcggatcgcctgcatctcactggccaagcgtgtgggctttgagagcctcagtcagtatggctcacaggtcggctaccagatccgctttgagagcacacgttcggcggccaccaagattgtattcctgacagtggggctgctcctgcgacaaatccagcgggaacccagcctgccccagtatgaggtcctgattgtggatgaagtccatgagcggcatctccacaacgatttcctcctgggcgtcctccagcgcctgttgcccacgcggcctgacctcaaggtcatcctcatgtcggccaccatcaacatctcgctcttctccagctatttcagcaatgcccctgtggtacaggtgcctgggaggctgttccccatcacggttgtgtaccagccgcaggaggcggagccgaccacgtccaagtcagagaagctggacccgcggcctttcctgagggtgctggagtccattgaccacaagtacccgcctgaggagcggggtgacctcctcgtcttcctcagcggcatggcggagatcagcgccgtgctggaggctgcccagacctatgccagccacacccagcgctgggtggtactgccactgcacagcgccctgtctgtggccgaccaggacaaggtatttgatgtggcaccccctggagtccggaaatgcatcctctccaccaacattgctgagacctcagtcaccattgacgggatccgcttcgtagtagattccggaaaggtgaaggagatgagctacgatccgcaggccaagctgcaacggctgcaggagttctggattagtcaggccagcgcagagcagcggaagggccgggcgggccgcacgggccccggagtctgcttccgcctctatgccgaatcggactatgatgccttcgccccctaccccgtcccagaaattcggagggtggccctggactcgttggtgctgcagatgaagagcatgagtgtgggggacccccgaaccttccccttcatcgagcccccaccaccagccagcctggaaaccgccatcctctacctccgggaccagggggccctggacagctcagaggccctcacacccattgggtccctgctagcccagctgcctgtggacgttgtgattgggaagatgctgatcctgggctccatgttcagcctggtggagcctgtgctcaccatcgcagccgcacttagcgtccagtcgcccttcacccgcagcgcccagagcagcccagagtgcgcggcagcacggcggccgctggagagcgaccagggtgaccccttcacgctcttcaacgtcttcaacgcctgggtgcaggtgaaatctgaacggagcagaaactctcgcaagtggtgccgccgccggggcatagaggagcatcgactgtacgaaatggccaaccttcggcgccagttcaaggagctgttggaggaccacgggctgctggctggggcccaggccgcgcaggtaggggacagctacagtcggttgcagcagcgccgggagcgccgggccctgcaccagctgaaacgccagcacgaggagggcgcggggcgcaggcgcaaggtgctgcggctgcaggaggagcaggacggcggctccagtgacgaggacagggctggcccagcccccccaggggccagtgatggcgtggacatccaggatgtgaagttcaagcttcggcatgacctggcgcagctgcaggccgctgccagctcagcccaggacctgagccgcgagcagctggctctgctgaagctggtgctgggccggggcctgtacccacagctggccgtccccgacgccttcaacagcagccgaaaggactcagaccagattttccacacgcaggccaagcagggcgccgtgctgcaccccacctgcgtcttcgctggcagccccgaggtgctgcacgcacaggagctggaggccagcaactgcgacggaagccgaggcatggctgcgtgctgggagtcacattcagatttggctgaccttcttgtctgagccaggccaccaaagccatgccacgacaaggacaagatgagcagcaaacaccagctcctcagcttcgtgtccctgctggagaccaacaagccgtacctggtgaactgcgtccgcatccctgccctccagtccctcctgctttttagccggtctttggacaccaatggtgactgctcccgcctggtggccgatggctggctggagctgcagctagcagacagtgaaagtgccatccgactcctggcggcttccctgcggctccgtgcccgctgggaaagtgccctggaccggcagctggcgcaccaggcccagcagcagctggaggaggaggaggaggatacgccagtcagccccaaggaggtggccaccctgagcaaggaactcctgcaattcacggcatccaagattccttacagcctccggcggctcacagggctagaagtccagaacatgtatgtgggaccccagaccatcccagccaccccccatcttcctggcctctttggcagctccaccctgtccccccaccccacaaaggggggctacgcagtcactgacttcctcacctacaactgcctcacgaatgacacagacctgtacagcgactgtctccgaaccttctggacctgcccccactgtggcctgcatgcgcccctcacgcccctggagcgcatcgcccatgagaacacctgcccccaggccccacaggatgggcccccaggggctgaggaagctgccctcgaaaccctccagaagacatctgtcctgcagaggccctaccactgcgaggcctgcgggaaggacttcctctttacacccacagaggtgctgcgccaccggaagcagcacgtgtgagctgggccaggagccctgcccacctccgtgcagctgacctgccctccagcccaggactaggggcaggactcttgcctgaacccccagcctgggcttagccctgtggtcctgtcccagtgcagagggcctggagcacggattgtgaataaagcctcacatgctgatacacactgttaggc

SEQ ID NO: 7645 - DNA, 4171 bp, Homo sapiens
acgagatggctgtgtgcgcaggcgcaagactagcgctcttgggaccggaagttaaggcgttcgcggcgtgtgaatccaggcctgaaaacccagaatgaacttgtgtccatcccagagatcactgcagatgtcatgaggtaccctttgtgtcaccagctcaagcaggcctctggccactttatcatctgtggtggtcctgtcccgtgaccaggaggaaaaattagctctttgaagagaaagtagttctctattgcaggcactggcctcttaaattgttgcaggtggggaatggatgagaatatttgttttgggtgatcagaactgagactcctattgtggattagtaacatgcctcctcctagaacaagggagggcagggatcgccgagaccaccaccgggctcccagcgaggaagaggccttggagaaatgggactggaattgtccagagacgcgtcgcctcttggaagatgccttcttccgtgaagaggattacatccgtcagggttctgaggaatgtcagaagttttggaccttctttgaacgcctgcagagattccagaatctcaagacctccaggaaggaggagaaagaccctggacagcccaagcacagcatcccagcgctggccgacctacctcgcacttacgacccacgttaccgcatcaacctctctgttcttggccctgccacgcggggctctcagggactgggcaggcacttgcccgcggagagagtggctgagttccgccgagccctgttgcactacctggactttggccagaagcaggcatttgggcgtctggccaagctgcagcgtgagcgggcagccctccccatcgcccagtatgggaaccgcatcctgcagacgctgaaggagcaccaggtggtggtagtggccggtgacaccggctgtggcaagtccactcaggtgccccagtacctgctggctgctggcttcagtcatgtggcgtgcacccagccccggcggatcgcctgcatctcactggccaagcgtgtgggctttgagagcctcagtcagtatggctcacaggtcggctaccagatccgctttgagagcacacgttcggcggccaccaagattgtattcctgacagtggggctgctcctgcgacaaatccagcgggaacccagcctgccccagtatgaggtcctgattgtggatgaagtccatgagcggcatctccacaacgatttcctcctgggcgtcctccagcgcctgttgcccacgcggcctgacctcaaggtcatcctcatgtcggccaccatcaacatctcgctcttctccagctatttcagcaatgcccctgtggtacaggtgcctgggaggctgttccccatcacggttgtgtaccagccgcaggaggcggagccgaccacgtccaagtcagagaagctggacccgcggcctttcctgagggtgctggagtccattgaccacaagtacccgcctgaggagcggggtgacctcctcgtcttcctcagcggcatggcggagatcagcgccgtgctggaggctgcccagacctatgccagccacacccagcgctgggtggtactgccactgcacagcgccctgtctgtggccgaccaggacaaggtatttgatgtggcaccccctggagtccggaaatgcatcctctccaccaacattgctgagacctcagtcaccattgacgggatccgcttcgtagtagattccgatgaagagcatgagtgtgggggacccccgaaccttccccttcatcgagcccccaccaccagccagcctggaaaccgccatcctctacctccgggaccagggggccctggacagctcagaggccctcacacccattgggtccctgctagcccagctgcctgtggacgttgtgattgggaagatgctgatcctgggctccatgttcagcctggtggagcctgtgctcaccatcgcagccgcacttagcgtccagtcgcccttcacccgcagcgcccagagcagcccagagtgcgcggcagcacggcggccgctggagagcgaccagggtgaccccttcacgctcttcaacgtcttcaacgcctgggtgcaggtgaaatctgaacggagcagaaactctcgcaagtggtgccgccgccggggcatagaggagcatcgactgtacgaaatggccaaccttcggcgccagttcaaggagctgttggaggaccacgggctgctggctggggcccaggccgcgcaggtaggggacagctacagtcggttgcagcagcgccgggagcgccgggccctgcaccagctgaaacgccagcacgaggagggcgcggggcgcaggcgcaaggtgctgcggctgcaggaggagcaggacggcggctccagtgacgaggacagggctggcccagcccccccaggggccagtgatggcgtggacatccaggatgtgaagttcaagcttcggcatgacctggcgcagctgcaggccgctgccagctcagcccaggacctgagccgcgagcagctggctctgctgaagctggtgctgggccggggcctgtacccacagctggccgtccccgacgccttcaacagcagccgaaaggactcagaccagattttccacacgcaggccaagcagggcgccgtgctgcaccccacctgcgtcttcgctggcagccccgaggtgctgcacgcacaggagctggaggccagcaactgcgacggaagccgaggcatggctgcgtgctgggagtcacattcagatttggctgaccttcttgtctgagccaggccaccaaagccatgccacgacaaggacaagatgagcagcaaacaccagctcctcagcttcgtgtccctgctggagaccaacaagccgtacctggtgaactgcgtccgcatccctgccctccagtccctcctgctttttagccggtctttggacaccaatggtgactgctcccgcctggtggccgatggctggctggagctgcagctagcagacagtgaaagtgccatccgactcctggcggcttccctgcggctccgtgcccgctgggaaagtgccctggaccggcagctggcgcaccaggcccagcagcagctggaggaggaggaggaggatacgccagtcagccccaaggaggtggccaccctgagcaaggaactcctgcaattcacggcatccaagattccttacagcctccggcggctcacagggctagaagtccagaacatgtatgtgggaccccagaccatcccagccaccccccatcttcctggcctctttggcagctccaccctgtccccccaccccacaaaggggggctacgcagtcactgacttcctcacctacaactgcctcacgaatgacacagacctgtacagcgactgtctccgaaccttctggacctgcccccactgtggcctgcatgcgcccctcacgcccctggagcgcatcgcccatgagaacacctgcccccaggccccacaggatgggcccccaggggctgaggaagctgccctcgaaaccctccagaagacatctgtcctgcagaggccctaccactgcgaggcctgcgggaaggacttcctctttacacccacagaggtgctgcgccaccggaagcagcacgtgtgagctgggccaggagccctgcccacctccgtgcagctgacctgccctccagcccaggactaggggcaggactcttgcctgaacccccagcctgggcttagccctgtggtcctgtcccagtgcagagggcctggagcacggattgtgaataaagcctcacatgctgatacacactgttaggcctgcacctgcccatccagaaagcagcagctgccttgttagtcctccccagggtctagctttccttcttcctgctgcagggtgctgcctgaggggtcctgggtaggaggggcgttagagccagcagggacctcccatgtctccagattccaggtgcaggttcttagcacctccgcagccgctctctcttgagtccatcctcagtctctcctaccccttgaagtagggggaccctgaatttgcccatccacctgggtcactttgagagttgtgcaggggggctgggagcactggtgttcacgtgggaccacaggctgcaccataagacccactcacaataaaaaaataaaaggccga

SEQ ID NO: 7646 - DNA, 3092 bp, Homo sapiens
acgagatggctgtgtgcgcaggcgcaagactagcgctcttgggaccggaagttaaggcgttcgcggcgtgtgaatccaggcctgaaaacccagaatgaacttgtgtccatcccagagatcactgcagatgtcatgaggtaccctttgtgtcaccagctcaagcaggcctctggccactttatcatctgtggtggtcctgtcccgtgaccaggaggaaaaattagctctttgaagagaaagtagttctctattgcaggcactggcctcttaaattgttgcaggtggggaatggatgagaatatttgttttgggtgatcagaactgagactcctattgtggattagtaacatgcctcctcctagaacaagggagggcagggatcgccgagaccaccaccgggctcccagcgaggaagaggccttggagaaatgggactggaattgtccagagacgcgtcgcctcttggaagatgccttcttccgtgaagaggattacatccgtcagggttctgaggaatgtcagaagttttggaccttctttgaacgcctgcagagattccagaatctcaagacctccaggaaggaggagaaagaccctggacagcccaagcacagcatcccagcgctggccgacctacctcgcacttacgacccacgttaccgcatcaacctctctgttcttggccctgccacgcggggctctcagggactgggcaggcacttgcccgcggagagagtggctgagttccgccgagccctgttgcactacctggactttggccagaagcaggcatttgggcgtctggccaagctgcagcgtgagcgggcagccctccccatcgcccagtatgggaaccgcatcctgcagacgctgaaggagcaccaggtggtggtagtggccggtgacaccggctgtggcaagtccactcaggtgccccagtacctgctggctgctggcttcagtcatgtggcgtgcacccagccccggcggatcgcctgcatctcactggccaagcgtgtgggctttgagagcctcagtcagtatggctcacaggtcggctaccagatccgctttgagagcacacgttcggcggccaccaagattgtattcctgacagtggggctgctcctgcgacaaatccagcgggaacccagcctgccccagtatgaggtcctgattgtggatgaagtccatgagcggcatctccacaacgatttcctcctgggcgtcctccagcgcctgttgcccacgcggcctgacctcaaggtcatcctcatgtcggccaccatcaacatctcgctcttctccagctatttcagcaatgcccctgtggtacaggtgcctgggaggctgttccccatcacggttgtgtaccagccgcaggaggcggagccgaccacgtccaagtcagagaagctggacccgcggcctttcctgagggtgctggagtccattgaccacaagtacccgcctgaggagcggggtgacctcctcgtcttcctcagcggcatggcggagatcagcgccgtgctggaggctgcccagacctatgccagccacacccagcgctgggtggtactgccactgcacagcgccctgtctgtggccgaccaggacaaggtatttgatgtggcaccccctggagtccggaaatgcatcctctccaccaacattgctgagacctcagtcaccattgacgggatccgcttcgtagtagattccggaaaggtgaaggagatgagctacgatccgcaggccaagctgcaacggctgcaggagttctggattagtcaggccagcgcagagcagcggaagggccgggcgggccgcacgggccccggagtctgcttccgcctctatgccgaatcggactatgatgccttcgccccctaccccgtcccagaaattcggagggtggccctggactcgttggtgctgcagatgaagagcatgagtgtgggggacccccgaaccttccccttcatcgagcccccaccaccagccagcctggaaaccgccatcctctacctccgggaccagggggccctggacagctcagaggccctcacacccattgggtccctgctagcccagctgcctgtggacgttgtgattgggaagatgctgatcctgggctccatgttcagcctggtggagcctgtgctcaccatcgcagccgcacttagcgtccagtcgcccttcacccgcagcgcccagagcagcccagagtgcgcggcagcacggcggccgctggagagcgaccagggtgaccccttcacgctcttcaacgtcttcaacgcctgggtgcaggtgaaatctgaacggagcagaaactctcgcaagtggtgccgccgccggggcatagaggagcatcgactgtacgaaatggccaaccttcggcgccagttcaaggagctgttggaggaccacgggctgctggctggggcccaggccgcgcaggtaggggacagctacagtcggttgcagcagcgccgggagcgccgggccctgcaccagctgaaacgccagcacgaggagggcgcggggcgcaggcgcaaggtgctgcggctgcaggaggagcaggacggcggctccagtgacgaggacagggctggcccagcccccccaggggccagtgatggcgtggacatccaggatgtgaagttcaagcttcggcatgacctggcgcagctgcaggccgctgccagctcagcccaggacctgagccgcgagcagctggctctgctgaagctggtgctgggccggggcctgtacccacagctggccgtccccgacgccttcaacagcagccgaaaggactcagaccagatttccacacgcaggcaagcacgcgcgtgctgaccactgcgtttcgtggcgcccgaggtgtggcgccagagctggggcagatgggaggagcgggaccgaaggagttggcgaacagctcacgtcggttcgcgggcacagcgctgggaggtcgcccgcccaccccggttacggtggccactgggcccccgggggggggggccaaagaagaacaggggcccctaaacagaaggacatggaaaaagcagaaacagagaaacgcacag

SEQ ID NO: 7647 - DNA, 4353 bp, Homo sapiens
cggacgcgtgggtcgacccacgcgtcgcggcgtgtgaatccaggcctgaaaacccagaatgaacttgtgtccatcccagagatcactgcagatgtcatgaggtaccctttgtgtcaccagctcaagcaggcctctggccactttatcatctgtggtggtcctgtcccgtgaccaggaggaaaaattagctctttgaagagaaagtagttctctattgcaggcactggcctcttaaattgttgcaggtggggaatggatgagaatatttgttttgggtgatcagaactgagactcctattgtggattagtaacatgcctcctcctagaacaagggagggcagggatcgccgagaccaccaccgggctcccagcgaggaagaggccttggagaaatgggactggaattgtccagagacgcgtcgcctcttggaagatgccttcttccgtgaagaggattacatccgtcagggttctgaggaatgtcagaagttttggaccttctttgaacgcctgcagagattccagaatctcaagacctccaggaaggaggagaaagaccctggacagcccaagcacagcatcccagcgctggccgacctacctcgcacttacgacccacgttaccgcatcaacctctctgttcttggccctgccacgcggggctctcagggactgggcaggcacttgcccgcggagagagtggctgagttccgccgagccctgttgcactacctggactttggccagaagcaggcatttgggcgtctggccaagctgcagcgtgagcgggcagccctccccatcgcccagtatgggaaccgcatcctgcagacgctgaaggagcaccaggtggtggtagtggccggtgacaccggctgtggcaagtccactcaggtgccccagtacctgctggctgctggcttcagtcatgtggcgtgcacccagccccggcggatcgcctgcatctcactggccaagcgtgtgggctttgagagcctcagtcagtatggctcacaggtcggctaccagatccgctttgagagcacacgttcggcggccaccaagattgtattcctgacagtggggctgctcctgcgacaaatccagcgggaacccagcctgccccagtatgaggtcctgattgtggatgaagtccatgagcggcatctccacaacgatttcctcctgggcgtcctccagcgcctgttgcccacgcggcctgacctcaaggtcatcctcatgtcggccaccatcaacatctcgctcttctccagctatttcagcaatgcccctgtggtacaggtgcctgggaggctgttccccatcacggttgtgtaccagccgcaggaggcggagccgaccacgtccaagtcagagaagctggacccgcggcctttcctgagggtgctggagtccattgaccacaagtacccgcctgaggagcggggtgacctcctcgtcttcctcagcggcatggcggagatcagcgccgtgctggaggctgcccagacctatgccagccacacccagcgctgggtggtactgccactgcacagcgccctgtctgtggccgaccaggacaaggtatttgatgtggcaccccctggagtccggaaatgcatcctctccaccaacattgctgagacctcagtcaccattgacgggatccgcttcgtagtagattccggaaaggtgaaggagatgagctacgatccgcaggccaagctgcaacggctgcaggagttctggattagtcaggccagcgcagagcagcggaagggccgggcgggccgcacgggccccggagtctgcttccgcctctatgccgaatcggactatgatgccttcgccccctaccccgtcccagaaattcggagggtggccctggactcgttggtgctgcagatgaagagcatgagtgtgggggacccccgaaccttccccttcatcgagcccccaccaccagccagcctggaaaccgccatcctctacctccgggaccagggggccctggacagctcagaggccctcacacccattgggtccctgctagcccagctgcctgtggacgttgtgattgggaagatgctgatcctgggctccatgttcagcctggtggagcctgtgctcaccatcgcagccgcacttagcgtccagtcgcccttcacccgcagcgcccagagcagcccagagtgcgcggcagcacggcggccgctggagagcgaccagggtgaccccttcacgctcttcaacgtcttcaacgcctgggtgcaggtgaaatctgaacggagcagaaactctcgcaagtggtgccgccgccggggcatagaggagcatcgactgtacgaaatggccaaccttcggcgccagttcaaggagctgttggaggaccacgggctgctggctggggcccaggccgcgcaggtaggggacagctacagtcggttgcagcagcgccgggagcgccgggccctgcaccagctgaaacgccagcacgaggagggcgcggggcgcaggcgcaaggtgctgcggctgcaggaggagcaggacggcggctccagtgacgaggacagggctggcccagcccccccaggggccagtgatggcgtggacatccaggatgtgaagttcaagcttcggcatgacctggcgcagctgcaggccgctgccagctcagcccaggacctgagccgcgagcagctggctctgctgaagctggtgctgggccggggcctgtacccacagctggccgtccccgacgccttcaacagcagccgaaaggactcagaccagattttccacacgcaggccaagcagggcgccgtgctgcaccccacctgcgtcttcgctggcagccccgaggtgctgcacgcacaggagctggaggccagcaactgcgacggaagccgaggcatggctgcgtgctgggagtcacattcagatttggctgaccttcttgtctgagccaggccaccaaagccatgccacgacaaggacaagatgagcagcaaacaccagctcctcagcttcgtgtccctgctggagaccaacaagccgtacctggtgaactgcgtccgcatccctgccctccagtccctcctgctttttagccggtctttggacaccaatggtgactgctcccgcctggtggccgatggctggctggagctgcagctagcagacagtgaaagtgccatccgactcctggcggcttccctgcggctccgtgcccgctgggaaagtgccctggaccggcagctggcgcaccaggcccagcagcagctggaggaggaggaggaggatacgccagtcagccccaaggaggtggccaccctgagcaaggaactcctgcaattcacggcatccaagattccttacagcctccggcggctcacagggctagaagtccagaacatgtatgtgggaccccagaccatcccagccaccccccatcttcctggcctctttggcagctccaccctgtccccccaccccacaaaggggggctacgcagtcactgacttcctcacctacaactgcctcacgaatgacacagacctgtacagcgactgtctccgaaccttctggacctgcccccactgtggcctgcatgcgcccctcacgcccctggagcgcatcgcccatgagaacacctgcccccaggccccacaggatgggcccccaggggctgaggaagctgccctcgaaaccctccagaagacatctgtcctgcagaggccctaccactgcgaggcctgcgggaaggacttcctctttacacccacagaggtgctgcgccaccggaagcagcacgtgtgagctgggccaggagccctgcccacctccgtgcagctgacctgccctccagcccaggactaggggcaggactcttgcctgaacccccagcctgggcttagccctgtggtcctgtcccagtgcagagggcctggagcacggattgtgaataaagcctcacatgctgatacacactgttaggcctgcacctgcccatccagaaagcagcagctgccttgttagtcctccccagggtctagctttccttcttcctgctgcagggtgctgcctgaggggtcctgggtaggaggggcgttagagccagcagggacctcccatgtctccagattccaggtgcaggttcttagcacctccgcagccgctctctcttgagtccatcctcagtctctcctaccccttgaagtagggggaccctgaatttgcccatccacctgggtcactttgagagttgtgcaggggggctgggagcactggtgttcacgtgggaccacaggctgcaccataagacccactcacaataaaaaaataaaaggccga

SEQ ID NO: 7648 - DNA, 2328 bp, Homo sapiens
aggctgggtgtaaatcggacgaggctagcccagctgcctgtggacgttgtgattgggaagatgctgatcctgggctccatgttcagcctggtggagcctgtgctcaccatcgcagccgcacttagcgtccagtcgcccttcacccgcagcgcccagagcagcccagagtgcgcggcagcacggcggccgctggagagcgaccagggtgaccccttcacgctcttcaacgtcttcaacgcctgggtgcaggtgaaatctgaacggagcagaaactctcgcaagtggtgccgccgccggggcatagaggagcatcgactgtacgaaatggccaaccttcggcgccagttcaaggagctgttggaggaccacgggctgctggctggggcccaggccgcgcaggtaggggacagctacagtcggttgcagcagcgccgggagcgccgggccctgcaccagctgaaacgccagcacgaggagggcgcggggcgcaggcgcaaggtgctgcggctgcaggaggagcaggacggcggctccagtgacgaggacagggctggcccagcccccccaggggccagtgatggcgtggacatccaggatgtgaagttcaagcttcggcatgacctggcgcagctgcaggccgctgccagctcagcccaggacctgagccgcgagcagctggctctgctgaagctggtgctgggccggggcctgtacccacagctggccgtccccgacgccttcaacagcagccgaaaggactcagaccagattttccacacgcaggccaagcagggcgccgtgctgcaccccacctgcgtcttcgctggcagccccgaggtgctgcacgcacaggagctggaggccagcaactgcgacggaagccgaggcatggctgcgtgctgggagtcacattcagatttggctgaccttcttgtctgagccaggccaccaaagccatgccacgacaaggacaagatgagcagcaaacaccagctcctcagcttcgtgtccctgctggagaccaacaagccgtacctggtgaactgcgtccgcatccctgccctccagtccctcctgctttttagccggtctttggacaccaatggtgactgctcccgcctggtggccgatggctggctggagctgcagctagcagacagtgaaagtgccatccgactcctggcggcttccctgcggctccgtgcccgctgggaaagtgccctggaccggcagctggcgcaccaggcccagcagcagctggaggaggaggaggaggatacgccagtcagccccaaggaggtggccaccctgagcaaggaactcctgcaattcacggcatccaagattccttacagcctccggcggctcacagggctagaagtccagaacatgtatgtgggaccccagaccatcccagccaccccccatcttcctggcctctttggcagctccaccctgtccccccaccccacaaaggggggctacgcagtcactgacttcctcacctacaactgcctcacgaatgacacagacctgtacagcgactgtctccgaaccttctggacctgcccccactgtggcctgcatgcgcccctcacgcccctggagcgcatcgcccatgagaacacctgcccccaggccccacaggatgggcccccaggggctgaggaagctgccctcgaaaccctccagaagacatctgtcctgcagaggccctaccactgcgaggcctgcgggaaggacttcctctttacacccacagaggtgctgcgccaccggaagcagcacgtgtgagctgggccaggagccctgcccacctccgtgcagctgacctgccctccagcccaggactaggggcaggactcttgcctgaacccccagcctgggcttagccctgtggtcctgtcccagtgcagagggcctggagcacggattgtgaataaagcctcacatgctgatacacactgttaggcctgcacctgcccatccagaaagcagcagctgccttgttagtcctccccagggtctagctttccttcttcctgctgcagggtgctgcctgaggggtcctgggtaggaggggcgttagagccagcagggacctcccatgtctccagattccaggtgcaggttcttagcacctccgcagccgctctctcttgagtccatcctcagtctctcctaccccttgaagtagggggaccctgaatttgcccatccacctgggtcactttgagagttgtgcaggggggctgggagcactggtgttcacgtgggaccacaggctgcaccataagacccactcacaataaaaaaataaaaggccga

SEQ ID NO: 7649 - DNA, 1521 bp, Homo sapiens
ggggtgatctagaggatcccggctgatggcagacagattttccacacgcaggccaagcagggcgccgtgctgcaccccacctgcgtcttcgctggcagccccgaggtgctgcacgcacaggagctggaggccagcaactgcgacggaagccgagacgacaaggacaagatgagcagcaaacaccagctcctcagcttcgtgtccctgctggagaccaacaagccgtacctggtgaactgcgtccgcatccctgccctccagtccctcctgctttttagccggtctttggacaccaatggtgactgctcccgcctggtggccgatggctggctggagctgcagctagcagacagtgaaagtgccatccgactcctggcggcttccctgcggctccgtgcccgctgggaaagtgccctggaccggcagctggcgcaccaggcccagcagcagctggaggaggaggaggaggatacgccagtcagccccaaggaggtggccaccctgagcaaggaactcctgcaattcacggcatccaagattccttacagcctccggcggctcacagggctagaagtccagaacatgtatgtgggaccccagaccatcccagccaccccccatcttcctggcctctttggcagctccaccctgtccccccaccccacaaaggggggctacgcagtcactgacttcctcacctacaactgcctcacgaatgacacagacctgtacagcgactgtctccgaaccttctggacctgcccccactgtggcctgcatgcgcccctcacgcccctggagcgcatcgcccatgagaacacctgcccccaggccccacaggatgggcccccaggggctgaggaagctgccctcgaaaccctccagaagacatctgtcctgcagaggccctaccactgcgaggcctgcgggaaggacttcctctttacacccacagaggtgctgcgccaccggaagcagcacgtgtgagctgggccaggagccctgcccacctccgtgcagctgacctgccctccagcccaggactaggggcaggactcttgcctgaacccccagcctgggcttagccctgtggtcctgtcccagtgcagagggcctggagcacggattgtgaataaagcctcacatgctgatacacactgttaggcctgcacctgcccatccagaaagcagcagctgccttgttagtcctccccagggtctagctttccttcttcctgctgcagggtgctgcctgaggggtcctgggtaggaggggcgttagagccagcagggacctcccatgtctccagattccaggtgcaggttcttagcacctccgcagccgctctctcttgagtccatcctcagtctctcctaccccttgaagtagggggaccctgaatttgcccatccacctgggtcactttgagagttgtgcaggggggctgggagcactggtgttcacgtgggaccacaggctgcaccataagacccactcacaataaaaaaataaaaggccga

SEQ ID NO: 7650 - DNA, 330 bp, Homo sapiens
ccgcttcgtagtagattccggtaaggaccaccatgagcccctacccaccacccccaaggacttaggagcatggggtccggaggtgtgcgtgtgtggcaggggcgcaccagcttggattgggaagtacagttgactttcccatatccaaaatgcttgcttgcaaccagaagtgtttggaatttcgggtttttttgaatttggaatatttgtatcaattttattatttgagtatgtcaaatccagaaatctgaaatcctccagtgagcatttcattggagggtcacgttagtgctgaaaacatttcagattttcgagcatttcagactttgg

SEQ ID NO: 7651 - DNA, 376 bp, Homo sapiens
tgcagggagacagaccactgatgtgacagtgacaacccagagagggctggaatggggagtccagggggctgggacaacccagcggggcatctaacccagtttgtgggtagtctgggagggcttcccataggagggggcactggggctgagacctggaagcaggagagcaggtgtccctgagggatgcccattttggggctctgggtgctcggtcagcccctccctccccgcactggccaggccctgacaccctggcgtctgctcctccacccaggtgaaatctgaacggagcagaaactctcgcaagtggtgccgccgccggggcatagaggagcatcgactgtacgaaatggccaaccttcggcgccagttcaag

SEQ ID NO: 7652 - DNA, 505 bp, Homo sapiens
agaccatcccagccaccccccatcttcctggcctctttggcagctccaccctgtccccccaccccacaaaggggggctacgcagtcactgacttcctcacctacaactgcctcacggtaagcatgaaccctccttccctgaaggtgggatttcaggaagaccccaccaccccgtttcaccttagtccagggacatagttcccaagtggggcccgtggccctgagggcttctgggaagggtcccgggggggcacttgggtggtgggtggcacttggcgggggcccagccctgacagctggcctgccacagaatgacacagacctgtacagcgactgtctccgaaccttctggacctgcccccactgtggcctgcatgcgcccctcacgcccctggagcgcatcgcccatgagaacacctgcccccaggccccacaggatgggcccccagggtaagcacaggactgtggggacccggccacctctgcccagccgtctgcccatccca

SEQ ID NO: 7653 - DNA, 748 bp, Homo sapiens
ctctgtgttgctgtctttgtctctgtttctgtctctctgtggctatgtctcttgttatttttctctgtcctgcagctatctctgccttggtcacctccaccctgttgtcacccagggatgccacacactggggttcagtgggggagatagcactggggccacatgcctccatccccggctggctgtgtctgcctctcagtctccatgtctctccttgtgtctttctctctgtctctctcactggcagggatgcggagtaaagacagacctgtgtatttttattaatctgggagggcttcctggaggaggcaaaactgggttctccaaaggccaggagagaacctgagccccacaggtgcctggcatttgggtgcgggtagacctgtgcactggaacacgcccctcacagcctcctccttttcctcccttaggggcgggctgaggaagctgccctcgaaaccctccagaagacatctgtcctgcagaggccctaccactgcgaggcctgcgggaaggacttcctctttacacccacagaggtgctgcgccaccggaagcagcacgtgtgagctgggccaggagccctgcccacctccgtgcagctgacctgccctccagcccaggactaggggcaggactcttgcctgaacccccagcctgggcttagccctgtggtcctgtcccagtgcagagggcctggagcacggattgtgaataaagcctcacatgctgatacacactgttaggc

SEQ ID NO: 7654 - DNA, 4389 bp, Homo sapiens
acgagatggctgtgtgcgcaggcgcaagactagcgctcttgggaccggaagttaaggcgttcgcggcgtgtgaatccaggcctgaaaacccagaatgaacttgtgtccatcccagagatcactgcagatgtcatgaggtaccctttgtgtcaccagctcaagcaggcctctggccactttatcatctgtggtggtcctgtcccgtgaccaggaggaaaaattagctctttgaagagaaagtagttctctattgcaggcactggcctcttaaattgttgcaggtggggaatggatgagaatatttgttttgggtgatcagaactgagactcctattgtggattagtaacatgcctcctcctagaacaagggagggcagggatcgccgagaccaccaccgggctcccagcgaggaagaggccttggagaaatgggactggaattgtccagagacgcgtcgcctcttggaagatgccttcttccgtgaagaggattacatccgtcagggttctgaggaatgtcagaagttttggaccttctttgaacgcctgcagagattccagaatctcaagacctccaggaaggaggagaaagaccctggacagcccaagcacagcatcccagcgctggccgacctacctcgcacttacgacccacgttaccgcatcaacctctctgttcttggccctgccacgcggggctctcagggactgggcaggcacttgcccgcggagagagtggctgagttccgccgagccctgttgcactacctggactttggccagaagcaggcatttgggcgtctggccaagctgcagcgtgagcgggcagccctccccatcgcccagtatgggaaccgcatcctgcagacgctgaaggagcaccaggtggtggtagtggccggtgacaccggctgtggcaagtccactcaggtgccccagtacctgctggctgctggcttcagtcatgtggcgtgcacccagccccggcggatcgcctgcatctcactggccaagcgtgtgggctttgagagcctcagtcagtatggctcacaggtcggctaccagatccgctttgagagcacacgttcggcggccaccaagattgtattcctgacagtggggctgctcctgcgacaaatccagcgggaacccagcctgccccagtatgaggtcctgattgtggatgaagtccatgagcggcatctccacaacgatttcctcctgggcgtcctccagcgcctgttgcccacgcggcctgacctcaaggtcatcctcatgtcggccaccatcaacatctcgctcttctccagctatttcagcaatgcccctgtggtacaggtgcctgggaggctgttccccatcacggttgtgtaccagccgcaggaggcggagccgaccacgtccaagtcagagaagctggacccgcggcctttcctgagggtgctggagtccattgaccacaagtacccgcctgaggagcggggtgacctcctcgtcttcctcagcggcatggcggagatcagcgccgtgctggaggctgcccagacctatgccagccacacccagcgctgggtggtactgccactgcacagcgccctgtctgtggccgaccaggacaaggtatttgatgtggcaccccctggagtccggaaatgcatcctctccaccaacattgctgagacctcagtcaccattgacgggatccgcttcgtagtagattccggaaaggtgaaggagatgagctacgatccgcaggccaagctgcaacggctgcaggagttctggattagtcaggccagcgcagagcagcggaagggccgggcgggccgcacgggccccggagtctgcttccgcctctatgccgaatcggactatgatgccttcgccccctaccccgtcccagaaattcggagggtggccctggactcgttggtgctgcagatgaagagcatgagtgtgggggacccccgaaccttccccttcatcgagcccccaccaccagccagcctggaaaccgccatcctctacctccgggaccagggggccctggacagctcagaggccctcacacccattgggtccctgctagcccagctgcctgtggacgttgtgattgggaagatgctgatcctgggctccatgttcagcctggtggagcctgtgctcaccatcgcagccgcacttagcgtccagtcgcccttcacccgcagcgcccagagcagcccagagtgcgcggcagcacggcggccgctggagagcgaccagggtgaccccttcacgctcttcaacgtcttcaacgcctgggtgcaggtgaaatctgaacggagcagaaactctcgcaagtggtgccgccgccggggcatagaggagcatcgactgtacgaaatggccaaccttcggcgccagttcaaggagctgttggaggaccacgggctgctggctggggcccaggccgcgcaggtaggggacagctacagtcggttgcagcagcgccgggagcgccgggccctgcaccagctgaaacgccagcacgaggagggcgcggggcgcaggcgcaaggtgctgcggctgcaggaggagcaggacggcggctccagtgacgaggacagggctggcccagcccccccaggggccagtgatggcgtggacatccaggatgtgaagttcaagcttcggcatgacctggcgcagctgcaggccgctgccagctcagcccaggacctgagccgcgagcagctggctctgctgaagctggtgctgggccggggcctgtacccacagctggccgtccccgacgccttcaacagcagccgaaaggactcagaccagattttccacacgcaggccaagcagggcgccgtgctgcaccccacctgcgtcttcgctggcagccccgaggtgctgcacgcacaggagctggaggccagcaactgcgacggaagccgaggcatggctgcgtgctgggagtcacattcagatttggctgaccttcttgtctgagccaggccaccaaagccatgccacgacaaggacaagatgagcagcaaacaccagctcctcagcttcgtgtccctgctggagaccaacaagccgtacctggtgaactgcgtccgcatccctgccctccagtccctcctgctttttagccggtctttggacaccaatggtgactgctcccgcctggtggccgatggctggctggagctgcagctagcagacagtgaaagtgccatccgactcctggcggcttccctgcggctccgtgcccgctgggaaagtgccctggaccggcagctggcgcaccaggcccagcagcagctggaggaggaggaggaggatacgccagtcagccccaaggaggtggccaccctgagcaaggaactcctgcaattcacggcatccaagattccttacagcctccggcggctcacagggctagaagtccagaacatgtatgtgggaccccagaccatcccagccaccccccatcttcctggcctctttggcagctccaccctgtccccccaccccacaaaggggggctacgcagtcactgacttcctcacctacaactgcctcacgaatgacacagacctgtacagcgactgtctccgaaccttctggacctgcccccactgtggcctgcatgcgcccctcacgcccctggagcgcatcgcccatgagaacacctgcccccaggccccacaggatgggcccccaggggctgaggaagctgccctcgaaaccctccagaagacatctgtcctgcagaggccctaccactgcgaggcctgcgggaaggacttcctctttacacccacagaggtgctgcgccaccggaagcagcacgtgtgagctgggccaggagccctgcccacctccgtgcagctgacctgccctccagcccaggactaggggcaggactcttgcctgaacccccagcctgggcttagccctgtggtcctgtcccagtgcagagggcctggagcacggattgtgaataaagcctcacatgctgatacacactgttaggcctgcacctgcccatccagaaagcagcagctgccttgttagtcctccccagggtctagctttccttcttcctgctgcagggtgctgcctgaggggtcctgggtaggaggggcgttagagccagcagggacctcccatgtctccagattccaggtgcaggttcttagcacctccgcagccgctctctcttgagtccatcctcagtctctcctaccccttgaagtagggggaccctgaatttgcccatccacctgggtcactttgagagttgtgcaggggggctgggagcactggtgttcacgtgggaccacaggctgcaccataagacccactcacaataaaaaaataaaaggccga

SEQ ID NO: 7655 - DNA, 4721 bp, Homo sapiens
acgagatggctgtgtgcgcaggcgcaagactagcgctcttgggaccggaagttaaggcgttcgcggcgtgtgaatccaggcctgaaaacccagaatgaacttgtgtccatcccagagatcactgcagatgtcatgaggtaccctttgtgtcaccagctcaagcaggcctctggccactttatcatctgtggtggtcctgtcccgtgaccaggaggaaaaattagctctttgaagagaaagtagttctctattgcaggcactggcctcttaaattgttgcaggtggggaatggatgagaatatttgttttgggtgatcagaactgagactcctattgtggattagtaacatgcctcctcctagaacaagggagggcagggatcgccgagaccaccaccgggctcccagcgaggaagaggccttggagaaatgggactggaattgtccagagacgcgtcgcctcttggaagatgccttcttccgtgaagaggattacatccgtcagggttctgaggaatgtcagaagttttggaccttctttgaacgcctgcagagattccagaatctcaagacctccaggaaggaggagaaagaccctggacagcccaagcacagcatcccagcgctggccgacctacctcgcacttacgacccacgttaccgcatcaacctctctgttcttggccctgccacgcggggctctcagggactgggcaggcacttgcccgcggagagagtggctgagttccgccgagccctgttgcactacctggactttggccagaagcaggcatttgggcgtctggccaagctgcagcgtgagcgggcagccctccccatcgcccagtatgggaaccgcatcctgcagacgctgaaggagcaccaggtggtggtagtggccggtgacaccggctgtggcaagtccactcaggtgccccagtacctgctggctgctggcttcagtcatgtggcgtgcacccagccccggcggatcgcctgcatctcactggccaagcgtgtgggctttgagagcctcagtcagtatggctcacaggtcggctaccagatccgctttgagagcacacgttcggcggccaccaagattgtattcctgacagtggggctgctcctgcgacaaatccagcgggaacccagcctgccccagtatgaggtcctgattgtggatgaagtccatgagcggcatctccacaacgatttcctcctgggcgtcctccagcgcctgttgcccacgcggcctgacctcaaggtcatcctcatgtcggccaccatcaacatctcgctcttctccagctatttcagcaatgcccctgtggtacaggtgcctgggaggctgttccccatcacggttgtgtaccagccgcaggaggcggagccgaccacgtccaagtcagagaagctggacccgcggcctttcctgagggtgctggagtccattgaccacaagtacccgcctgaggagcggggtgacctcctcgtcttcctcagcggcatggcggagatcagcgccgtgctggaggctgcccagacctatgccagccacacccagcgctgggtggtactgccactgcacagcgccctgtctgtggccgaccaggacaaggtatttgatgtggcaccccctggagtccggaaatgcatcctctccaccaacattgctgagacctcagtcaccattgacgggatccgcttcgtagtagattccggaaaggtgaaggagatgagctacgatccgcaggccaagctgcaacggctgcaggagttctggattagtcaggccagcgcagagcagcggaagggccgggcgggccgcacgggccccggagtctgcttccgcctctatgccgaatcggactatgatgccttcgccccctaccccgtcccagaaattcggagggtggccctggactcgttggtgctgcagatgaagagcatgagtgtgggggacccccgaaccttccccttcatcgagcccccaccaccagccagcctggaaaccgccatcctctacctccgggaccagggggccctggacagctcagaggccctcacacccattgggtccctgctagcccagctgcctgtggacgttgtgattgggaagatgctgatcctgggctccatgttcagcctggtggagcctgtgctcaccatcgcagccgcacttagcgtccagtcgcccttcacccgcagcgcccagagcagcccagagtgcgcggcagcacggcggccgctggagagcgaccagggtgaccccttcacgctcttcaacgtcttcaacgcctgggtgcaggtgaaatctgaacggagcagaaactctcgcaagtggtgccgccgccggggcatagaggagcatcgactgtacgaaatggccaaccttcggcgccagttcaaggagctgttggaggaccacgggctgctggctggggcccaggccgcgcaggtaggggacagctacagtcggttgcagcagcgccgggagcgccgggccctgcaccagctgaaacgccagcacgaggagggcgcggggcgcaggcgcaaggtgctgcggctgcaggaggagcaggacggcggctccagtgacgaggacagggctggcccagcccccccaggggccagtgatggcgtggacatccaggatgtgaagttcaagcttcggcatgacctggcgcagctgcaggccgctgccagctcagcccaggacctgagccgcgagcagctggctctgctgaagctggtgctgggccggggcctgtacccacagctggccgtccccgacgccttcaacagcagccgaaaggactcagaccagattttccacacgcaggccaagcagggcgccgtgctgcaccccacctgcgtcttcgctggcagccccgaggtgctgcacgcacaggagctggaggccagcaactgcgacggaagccgaggcatggctgcgtgctgggagtcacattcagatttggctgaccttcttgtctgagccaggccaccaaagccatgccacgacaaggacaagatgagcagcaaacaccagctcctcagcttcgtgtccctgctggagaccaacaagccgtacctggtgaactgcgtccgcatccctgccctccagtccctcctgctttttagccggtctttggacaccaatggtgactgctcccgcctggtggccgatggctggctggagctgcagctagcagacagtgaaagtgccatccgactcctggcggcttccctgcggctccgtgcccgctgggaaagtgccctggaccggcagctggcgcaccaggcccagcagcagctggaggaggaggaggaggatacgccagtcagccccaaggaggtggccaccctgagcaaggaactcctgcaattcacggcatccaagattccttacagcctccggcggctcacagggctagaagtccagaacatgtatgtgggaccccagaccatcccagccaccccccatcttcctggcctctttggcagctccaccctgtccccccaccccacaaaggggggctacgcagtcactgacttcctcacctacaactgcctcacgaatgacacagacctgtacagcgactgtctccgaaccttctggacctgcccccactgtggcctgcatgcgcccctcacgcccctggagcgcatcgcccatgagaacacctgcccccaggccccacaggatgggcccccaggggctgaggaagctgccctcgaaaccctccagaagacatctgtcctgcagaggccctaccactgcgaggcctgcgggaaggacttcctctttacacccacagaggtgctgcgccaccggaagcagcacgtgtgagctgggccaggagccctgcccacctccgtgcagctgacctgccctccagcccaggactaggggcaggactcttgcctgaacccccagcctgggcttagccctgtggtcctgtcccagtgcagagggcctggagcacggattgtgaataaagcctcacatgctgatacacactgttaggcctgcacctgcccatccagaaagcagcagctgccttgttagtcctccccagggtctagctttccttcttcctgctgcagggtgctgcctgaggggtcctgggtaggaggggcgttagagccagcagggacctcccatgtctccagattccaggtgcaggttcttagcacctccgcagccgctctctcttgagtccatcctcagtctctcctaccccttgaagtagggggaccctgaatttgcccatccacctgggtcactttgagagttgtgcaggggggctgggagcactggtgttcacgtgggaccacaggctgcaccataagacccactcacaataaaaaaataaaaggccgagccgggcatggttgctcactcccgtaataaaaaaataaaagaacaggctgagccgggcatggttgctcactcccgtaatcccagcactttgggaggctgaggcgggtggatcgcctgaggtcaggagttcgagaccagcctggccaacatagtgaaaccctgtctctactagaaatacaaaaacttagctgggtgtggtggtgggcatctttaatcccagctactggggaggctgaggcaggggaatcacttgaacctgggaggcagaggttgcaatgagctgagatcatgccattgcactccagcctgggcgacaagagtgaaactccatc

SEQ ID NO: 7656 - DNA, 3170 bp, Homo sapiens
acgagatggctgtgtgcgcaggcgcaagactagcgctcttgggaccggaagttaaggcgttcgcggcgtgtgaatccaggcctgaaaacccagaatgaacttgtgtccatcccagagatcactgcagatgtcatgaggtaccctttgtgtcaccagctcaagcaggcctctggccactttatcatctgtggtggtcctgtcccgtgaccaggaggaaaaattagctctttgaagagaaagtagttctctattgcaggcactggcctcttaaattgttgcaggtggggaatggatgagaatatttgttttgggtgatcagaactgagactcctattgtggattagtaacatgcctcctcctagaacaagggagggcagggatcgccgagaccaccaccgggctcccagcgaggaagaggccttggagaaatgggactggaattgtccagagacgcgtcgcctcttggaagatgccttcttccgtgaagaggattacatccgtcagggttctgaggaatgtcagaagttttggaccttctttgaacgcctgcagagattccagaatctcaagacctccaggaaggaggagaaagaccctggacagcccaagcacagcatcccagcgctggccgacctacctcgcacttacgacccacgttaccgcatcaacctctctgttcttggccctgccacgcggggctctcagggactgggcaggcacttgcccgcggagagagtggctgagttccgccgagccctgttgcactacctggactttggccagaagcaggcatttgggcgtctggccaagctgcagcgtgagcgggcagccctccccatcgcccagtatgggaaccgcatcctgcagacgctgaaggagcaccaggtggtggtagtggccggtgacaccggctgtggcaagtccactcaggtgccccagtacctgctggctgctggcttcagtcatgtggcgtgcacccagccccggcggatcgcctgcatctcactggccaagcgtgtgggctttgagagcctcagtcagtatggctcacaggtcggctaccagatccgctttgagagcacacgttcggcggccaccaagattgtattcctgacagtggggctgctcctgcgacaaatccagcgggaacccagcctgccccagtatgaggtcctgattgtggatgaagtccatgagcggcatctccacaacgatttcctcctgggcgtcctccagcgcctgttgcccacgcggcctgacctcaaggtcatcctcatgtcggccaccatcaacatctcgctcttctccagctatttcagcaatgcccctgtggtacaggtgcctgggaggctgttccccatcacggttgtgtaccagccgcaggaggcggagccgaccacgtccaagtcagagaagctggacccgcggcctttcctgagggtgctggagtccattgaccacaagtacccgcctgaggagcggggtgacctcctcgtcttcctcagcggcatggcggagatcagcgccgtgctggaggctgcccagacctatgccagccacacccagcgctgggtggtactgccactgcacagcgccctgtctgtggccgaccaggacaaggtatttgatgtggcaccccctggagtccggaaatgcatcctctccaccaacattgctgagacctcagtcaccattgacgggatccgcttcgtagtagattccggaaaggtgaaggagatgagctacgatccgcaggccaagctgcaacggctgcaggagttctggattagtcaggccagcgcagagcagcggaagggccgggcgggccgcacgggccccggagtctgcttccgcctctatgccgaatcggactatgatgccttcgccccctaccccgtcccagaaattcggagggtggccctggactcgttggtgctgcagatgaagagcatgagtgtgggggacccccgaaccttccccttcatcgagcccccaccaccagccagcctggaaaccgccatcctctacctccgggaccagggggccctggacagctcagaggccctcacacccattgggtccctgctagcccagctgcctgtggacgttgtgattgggaagatgctgatcctgggctccatgttcagcctggtggagcctgtgctcaccatcgcagccgcacttagcgtccagtcgcccttcacccgcagcgcccagagcagcccagagtgcgcggcagcacggcggccgctggagagcgaccagggtgaccccttcacgctcttcaacgtcttcaacgcctgggtgcaggtgaaatctgaacggagcagaaactctcgcaagtggtgccgccgccggggcatagaggagcatcgactgtacgaaatggccaaccttcggcgccagttcaaggagctgttggaggaccacgggctgctggctggggcccaggccgcgcaggtaggggacagctacagtcggttgcagcagcgccgggagcgccgggccctgcaccagctgaaacgccagcacgaggagggcgcggggcgcaggcgcaaggtgctgcggctgcaggaggagcaggacggcggctccagtgacgaggacagggctggcccagcccccccaggggccagtgatggcgtggacatccaggatgtgaagttcaagcttcggcatgacctggcgcagctgcaggccgctgccagctcagcccaggacctgagccgcgagcagctggctctgctgaagctggtgctgggccggggcctgtacccacagctggccgtccccgacgccttcaacagcagccgaaaggactcagaccagattttccacacgcaggccaagcagggcgccgtgctgcaccccacctgcgtcttcgctggcagccccgaggtgctgcacgcacaggagctggaggccagcaactgcgacggaagccgaggtacagtgagcccaggcggaaggaatccccatccgggatgtgaggggcagggataccgtgaactcccaggcccctctggctggggctcccacaccggcccaggctggtattgacgggggcccacaggaggggaagttccagggccaggcctccctgggtagccttgggtgactcacccctgctgggcctcaccttccgcatggtggtgatagtcaacctaagc

SEQ ID NO: 7657 - DNA, 2695 bp, Homo sapiens
acgagatggctgtgtgcgcaggcgcaagactagcgctcttgggaccggaagttaaggcgttcgcggcgtgtgaatccaggcctgaaaacccagaatgaacttgtgtccatcccagagatcactgcagatgtcatgaggtaccctttgtgtcaccagctcaagcaggcctctggccactttatcatctgtggtggtcctgtcccgtgaccaggaggaaaaattagctctttgaagagaaagtagttctctattgcaggcactggcctcttaaattgttgcaggtggggaatggatgagaatatttgttttgggtgatcagaactgagactcctattgtggattagtaacatgcctcctcctagaacaagggagggcagggatcgccgagaccaccaccgggctcccagcgaggaagaggccttggagaaatgggactggaattgtccagagacgcgtcgcctcttggaagatgccttcttccgtgaagaggattacatccgtcagggttctgaggaatgtcagaagttttggaccttctttgaacgcctgcagagattccagaatctcaagacctccaggaaggaggagaaagaccctggacagcccaagcacagcatcccagcgctggccgacctacctcgcacttacgacccacgttaccgcatcaacctctctgttcttggccctgccacgcggggctctcagggactgggcaggcacttgcccgcggagagagtggctgagttccgccgagccctgttgcactacctggactttggccagaagcaggcatttgggcgtctggccaagctgcagcgtgagcgggcagccctccccatcgcccagtatgggaaccgcatcctgcagacgctgaaggagcaccaggtggtggtagtggccggtgacaccggctgtggcaagtccactcaggtgccccagtacctgctggctgctggcttcagtcatgtggcgtgcacccagccccggcggatcgcctgcatctcactggccaagcgtgtgggctttgagagcctcagtcagtatggctcacaggtcggctaccagatccgctttgagagcacacgttcggcggccaccaagattgtattcctgacagtggggctgctcctgcgacaaatccagcgggaacccagcctgccccagtatgaggtcctgattgtggatgaagtccatgagcggcatctccacaacgatttcctcctgggcgtcctccagcgcctgttgcccacgcggcctgacctcaaggtcatcctcatgtcggccaccatcaacatctcgctcttctccagctatttcagcaatgcccctgtggtacaggtgcctgggaggctgttccccatcacggttgtgtaccagccgcaggaggcggagccgaccacgtccaagtcagagaagctggacccgcggcctttcctgagggtgctggagtccattgaccacaagtacccgcctgaggagcggggtgacctcctcgtcttcctcagcggcatggcggagatcagcgccgtgctggaggctgcccagacctatgccagccacacccagcgctgggtggtactgccactgcacagcgccctgtctgtggccgaccaggacaaggtatttgatgtggcaccccctggagtccggaaatgcatcctctccaccaacattgctgagacctcagtcaccattgacgggatccgcttcgtagtagattccggaaaggtgaaggagatgagctacgatccgcaggccaagctgcaacggctgcaggagttctggattagtcaggccagcgcagagcagcggaagggccgggcgggccgcacgggccccggagtctgcttccgcctctatgccgaatcggactatgatgccttcgccccctaccccgtcccagaaattcggagggtggccctggactcgttggtgctgcagatgaagagcatgagtgtgggggacccccgaaccttccccttcatcgagcccccaccaccagccagcctggaaaccgccatcctctacctccgggaccagggggccctggacagctcagaggccctcacacccattgggtccctgctagcccagctgcctgtggacgttgtgattgggaagatgctgatcctgggctccatgttcagcctggtggagcctgtgctcaccatcgcagccgcacttagcgtccagtcgcccttcacccgcagcgcccagagcagcccagagtgcgcggcagcacggcggccgctggagagcgaccagggtgaccccttcacgctcttcaacgtcttcaacgcctgggtgcaggtgaaatctgaacggagcagaaactctcgcaagtggtgccgccgccggggcatagaggagcatcgactgtacgaaatggccaaccttcggcgccagttcaaggagctgttggaggaccacgggctgctggctggggcccaggccgcgcaggtaggggacagctacagtcggttgcagcagcgccgggagcgccgggccctgcaccagctgaaacgccagcacgaggagggcgcggggcgcaggcgcaaggtgctgcggctgcaggaggagcaggacggcggctccagtgacgaggacagggctggcccagcccccccaggggccagtgatggcgtggacatccaggtgggcgccatgggctgtggggtgtgggggtttaccaagg

SEQ ID NO: 7658 - DNA, 2587 bp, Homo sapiens
aagcaattctcctgcctcagcttcatgagtagctaaaattacaggctcacgccaccacgcctggctaatttttgtatttttagtagagacggggtttcatcatgttggccaggctggtctcgaagtcctgacctcaagtgatctgcccacctcagcctcccaaagtgctgggattacaggcatgagccactgcgcccggccaatatttgtttttttagtagtgtcaaggtttcaccatgtcggccgtgctggtcttgaactcctgactttaagtgatctgcccacttcggcctttcaaactgctgggattacagggaagatgctgatcctgggctccatgttcagcctggtggagcctgtgctcaccatcgcagccgcacttagcgtccagtcgcccttcacccgcagcgcccagagcagcccagagtgcgcggcagcacggcggccgctggagagcgaccagggtgaccccttcacgctcttcaacgtcttcaacgcctgggtgcaggtgaaatctgaacggagcagaaactctcgcaagtggtgccgccgccggggcatagaggagcatcgactgtacgaaatggccaaccttcggcgccagttcaaggagctgttggaggaccacgggctgctggctggggcccaggccgcgcaggtaggggacagctacagtcggttgcagcagcgccgggagcgccgggccctgcaccagctgaaacgccagcacgaggagggcgcggggcgcaggcgcaaggtgctgcggctgcaggaggagcaggacggcggctccagtgacgaggacagggctggcccagcccccccaggggccagtgatggcgtggacatccaggatgtgaagttcaagcttcggcatgacctggcgcagctgcaggccgctgccagctcagcccaggacctgagccgcgagcagctggctctgctgaagctggtgctgggccggggcctgtacccacagctggccgtccccgacgccttcaacagcagccgaaaggactcagaccagattttccacacgcaggccaagcagggcgccgtgctgcaccccacctgcgtcttcgctggcagccccgaggtgctgcacgcacaggagctggaggccagcaactgcgacggaagccgaggcatggctgcgtgctgggagtcacattcagatttggctgaccttcttgtctgagccaggccaccaaagccatgccacgacaaggacaagatgagcagcaaacaccagctcctcagcttcgtgtccctgctggagaccaacaagccgtacctggtgaactgcgtccgcatccctgccctccagtccctcctgctttttagccggtctttggacaccaatggtgactgctcccgcctggtggccgatggctggctggagctgcagctagcagacagtgaaagtgccatccgactcctggcggcttccctgcggctccgtgcccgctgggaaagtgccctggaccggcagctggcgcaccaggcccagcagcagctggaggaggaggaggaggatacgccagtcagccccaaggaggtggccaccctgagcaaggaactcctgcaattcacggcatccaagattccttacagcctccggcggctcacagggctagaagtccagaacatgtatgtgggaccccagaccatcccagccaccccccatcttcctggcctctttggcagctccaccctgtccccccaccccacaaaggggggctacgcagtcactgacttcctcacctacaactgcctcacgaatgacacagacctgtacagcgactgtctccgaaccttctggacctgcccccactgtggcctgcatgcgcccctcacgcccctggagcgcatcgcccatgagaacacctgcccccaggccccacaggatgggcccccaggggctgaggaagctgccctcgaaaccctccagaagacatctgtcctgcagaggccctaccactgcgaggcctgcgggaaggacttcctctttacacccacagaggtgctgcgccaccggaagcagcacgtgtgagctgggccaggagccctgcccacctccgtgcagctgacctgccctccagcccaggactaggggcaggactcttgcctgaacccccagcctgggcttagccctgtggtcctgtcccagtgcagagggcctggagcacggattgtgaataaagcctcacatgctgatacacactgttaggcctgcacctgcccatccagaaagcagcagctgccttgttagtcctccccagggtctagctttccttcttcctgctgcagggtgctgcctgaggggtcctgggtaggaggggcgttagagccagcagggacctcccatgtctccagattccaggtgcaggttcttagcacctccgcagccgctctctcttgagtccatcctcagtctctcctaccccttgaagtagggggaccctgaatttgcccatccacctgggtcactttgagagttgtgcaggggggctgggagcactggtgttcacgtgggaccacaggctgcaccataagacccactcacaataaaaaaataaaaggccga

SEQ ID NO: 7659 - DNA, 1103 bp, Homo sapiens
ctctgtgttgctgtctttgtctctgtttctgtctctctgtggctatgtctcttgttatttttctctgtcctgcagctatctctgccttggtcacctccaccctgttgtcacccagggatgccacacactggggttcagtgggggagatagcactggggccacatgcctccatccccggctggctgtgtctgcctctcagtctccatgtctctccttgtgtctttctctctgtctctctcactggcagggatgcggagtaaagacagacctgtgtatttttattaatctgggagggcttcctggaggaggcaaaactgggttctccaaaggccaggagagaacctgagccccacaggtgcctggcatttgggtgcgggtagacctgtgcactggaacacgcccctcacagcctcctccttttcctcccttaggggcgggctgaggaagctgccctcgaaaccctccagaagacatctgtcctgcagaggccctaccactgcgaggcctgcgggaaggacttcctctttacacccacagaggtgctgcgccaccggaagcagcacgtgtgagctgggccaggagccctgcccacctccgtgcagctgacctgccctccagcccaggactaggggcaggactcttgcctgaacccccagcctgggcttagccctgtggtcctgtcccagtgcagagggcctggagcacggattgtgaataaagcctcacatgctgatacacactgttaggcctgcacctgcccatccagaaagcagcagctgccttgttagtcctccccagggtctagctttccttcttcctgctgcagggtgctgcctgaggggtcctgggtaggaggggcgttagagccagcagggacctcccatgtctccagattccaggtgcaggttcttagcacctccgcagccgctctctcttgagtccatcctcagtctctcctaccccttgaagtagggggaccctgaatttgcccatccacctgggtcactttgagagttgtgcaggggggctgggagcactggtgttcacgtgggaccacaggctgcaccataagacccactcacaataaaaaaataaaaggccga

SEQ ID NO: 7660 - DNA, 527 bp, Homo sapiens
aaggctttcattttggttcttctgattggtgttacctactgcctaatatgtgttcattttttgacagagaggcagactattgaaaaagtctgtgtatatacatactgagtggggaaggatgggggttggcaggggttgagggaggtgggaacaaacagtgagtatgggaacaggcagtcacctcgagtgtgggaggtcacctgggtccgtcgtcttccttctgtatggtgttgggtttatgtacacactataacacttcctgtgtgagttcatgtacctgtctgtgagtgctttggtgtattgagcctcagtacactccaagggcattaaagtcaagaactagaacctgggtgctgtgcctttcttttttagagatgtgctctcatctcttctctgacccccactttgccagcaaatattttttatttctgcttaaaatgtggtgtgtttggggatgccccacacaacaagacaggcttttccctgagaccagcagctgaatttctgccctgaaagggaggtgggcc

SEQ ID NO: 7661 - DNA, 608 bp, Homo sapiens
atacctaatattatacctaataatagtaattatagttgcttactgataacaacaactaataacacttattgaggccctactctgtgccagggattttctaatcacttaattccctaacacattatgaggttttattgttttctccaattttacagacagggaaactgagacatggagtagttaagttcatttacccagtgtaacacagctggcagtctggttttagattttgtccaatgcacactgtgtggcactgcccaggagcataagctccttgtcacctgggtccgtcgtcttccttctgtatggtgttgggtttatgtacacactataacacttcctgtgtgagttcatgtacctgtctgtgagtgctttggtgtattgagcctcagtacactccaagggcattaaagtcaagaactagaacctgggtgctgtgcctttcttttttagagatgtgctctcatctcttctctgacccccactttgccagcaaatattttttatttctgcttaaaatgtggtgtgtttggggatgccccacacaacaagacaggcttttccctgagaccagcagctgaatttctgccctgaaagggaggtgggcc

SEQ ID NO: 7662 - DNA, 1983 bp, Homo sapiens
aaggctttcattttggttcttctgattggtgttacctactgcctaatatgtgttcattttttgacagagaggcagactattgaaaaagtctgtgtgaacagagagcagttcattaagcccattgctttcagtaatgtggccttgaccccttctgcttcccccttctcccatggagcatggcagggcttggttatttagagtccatacatgcaagccattgagagacttgtttgctcaaatgcaagtttgctcaaaaacaggtcctgaaggcttgcttaggattacagggatgctgggtaagaacaccgttcctctctctcgctggagaaatccctgtttctctgactccctttgtgatcctcacagtaatgtattctgtgccactgtaggacacaaggctctgggccagtagaacaggcagagaggtgacactgggcagcaagctgagagctctttctaaatggagtgaaggaattcagtggcctagtttcgccattctctaatgagaaaccaaggccaggctgaaaagtgcaattagatgtggtggattgtggtaacggcctccagataaaggggttatccctgtggaagtgacttttccccatttgatcccttttcaactctaaatggccaggcccagagcagaagaagggttgggtctggaaggaaggctccaaaggatgaaagcttctccctgatcataaggaagtgcatctttatagaattgttgtgcataatgtcagtaaatccctctcacttgacaagggactggattcatcttgccttgagacgggccagtagttatcagtgagtcaaagcaaagtgaaagtttcaggagatgggaccaatggtgcaatgctcgccataacaaaattccttaaaaataaaaaagctaatgttatagcaacaaaaaaagactgaagcaaaaccacactgaaatgcatcccactccaggagaggaattcttagcgtaacactctaaataaatggaaggaatcatcaccttccttattttacccctgccttgttcaccaggctgcccagtgcttaccatgcagaaagcagtcagctgtactctggaagtttctgttcttctttcctggggcttaggatattctgggagctgtctgagccttgtgcctaaggcttatcaggtgatataatcttcctgttctgggctgcttgctggaggaataggaagtgacatttataagacacaggcggtgtgagcatccatgtgtggtcttggtctaaaccagctcttgaacaggttaaagcaaacagcaataacaaaacaaaaactactgatgctgagcgttttgatcctagtaatatttcaaatattgtccttctgcatatgttctatccatatttgattccaatatacattattaagctttcttgggtactattttgctggggctcttgcgtgaaggtggtacctgtctcatgatccttaaaagagagaggcttttttcatccaaagctgtagtgttgggaactggggtgggagaggcactttttggaattctgaaagaatcatatctgtgtatatacatactgagtggggaaggatgggggttggcaggggttgagggaggtgggaacaaacagtgagtatgggaacaggcagtcacctcgagtgtgggaggtcacctgggtccgtcgtcttccttctgtatggtgttgggtttatgtacacactataacacttcctgtgtgagttcatgtacctgtctgtgagtgctttggtgtattgagcctcagtacactccaagggcattaaagtcaagaactagaacctgggtgctgtgcctttcttttttagagatgtgctctcatctcttctctgacccccactttgccagcaaatattttttatttctgcttaaaatgtggtgtgtttggggatgccccacacaacaagacaggcttttccctgagaccagcagctgaatttctgccctgaaagggaggtgggcc

SEQ ID NO: 7663 - DNA, 1427 bp, Homo sapiens
aaggctttcattttggttcttctgattggtgttacctactgcctaatatgtgttcattttttgacagagaggcagactattgaaaaagtctgtgtgaacagagagcagttcattaagcccattgctttcagtaatgtggccttgaccccttctgcttcccccttctcccatggagcatggcagggcttggttatttagagtccatacatgcaagccattgagagacttgtttgctcaaatgcaagtttgctcaaaaacaggtcctgaaggcttgcttaggattacagggatgctgggtaagaacaccgttcctctctctcgctggagaaatccctgtttctctgactccctttgtgatcctcacagtaatgtattctgtgccactgtaggacacaaggctctgggccagtagaacaggcagagaggtgacactgggcagcaagctgagagctctttctaaatggagtgaaggaattcagtggcctagtttcgccattctctaatgagaaaccaaggccaggctgaaaagtgcaattagatgtggtggattgtggtaacggcctccagataaaggggttatccctgtggaagtgacttttccccatttgatcccttttcaactctaaatggccaggcccagagcagaagaagggttgggtctggaaggaaggctccaaaggatgaaagcttctccctgatcataaggaagtgcatctttatagaattgttgtgcataatgtcagtaaatccctctcacttgacaagggactggattcatcttgccttgagacgggccagtagttatcagtgagtcaaagcaaagtgaaagtttcaggagatgggaccaatggtgcaatgctcgccataacaaaattccttaaaaataaaaaagctaatgttatagcaacaaaaaaagactgaagcaaaaccacactgaaatgcatcccactccaggagaggcactttttggaattctgaaagaatcatatctgtgtatatacatactgagtggggaaggatgggggttggcaggggttgagggaggtgggaacaaacagtgagtatgggaacaggcagtcacctcgagtgtgggaggtcacctgggtccgtcgtcttccttctgtatggtgttgggtttatgtacacactataacacttcctgtgtgagttcatgtacctgtctgtgagtgctttggtgtattgagcctcagtacactccaagggcattaaagtcaagaactagaacctgggtgctgtgcctttcttttttagagatgtgctctcatctcttctctgacccccactttgccagcaaatattttttatttctgcttaaaatgtggtgtgtttggggatgccccacacaacaagacaggcttttccctgagaccagcagctgaatttctgccctgaaagggaggtgggcc

SEQ ID NO: 7664 - DNA, 1630 bp, Homo sapiens
cgcccccctccggccagcccgcagccggccgcgtcatgccaggcgctgctcggcggtagggagtgcccggggccgccgcctccgcccgcccgaagccgcgcccactgcccagagccagagggatggtggtagtcacggggcgggagccagacagccgtcgtcaggacggtgccatgtccagctctgacgccgaagacgactttctggagccggccacgccgacggccacgcaggcggggcacgcgctgcccctgctgccacaggagtttcctgaggttgttccccttaacatcggaggggctcacttcactacacgcctgtccacactgcggtgctacgaagacaccatgttggcagccatgttcagtgggcggcactacatccccacggactccgagggccggtacttcatcgaccgagatggcacacactttggagatgtgctgaatttcctgcgctcaggggacctcccacccagggagcgtgttcgagctgtgtacaaagaggcccagtactatgccatcgggcccctcctggagcagctggagaacatgcagccactgaagggcgagaaggtgcgccaagcgtttctgggactcatgccctattacaaagaccacttggagcggattgtggagatcgcccggctgcgtgcggtccagcggaaggcccgctttgccaagctcaaggtctgtgtcttcaaggaggagatgcccatcaccccctatgagtgtccgctcctcaactccctgcgatttgagcggagtgagagtgacgggcagctttttgagcaccactgtgaagtggatgtgtcttttgggccctgggaggctgtggctgatgtttatgacctgctgcactgcctggtcacggacctctcggcccagggtctcaccgtggaccaccagtgcatcggggtgtgtgacaagcacctcgtgaaccactactactgcaagcgccccatctatgagttcaagatcacatggtggtgagtagccccggtaggcgagagtcccatcagggaggatgtccaccttgcttggtggctctgggagtaagatccctgaaggggctgctgactgccccagaatctgccgaggtgagaacagcatcctgaggcacagctcccaggggacagaggtgtagctccaatctccctgactgcacctcagggttgggctcagggcttgcggcctgcaggcactccagccagcgctcacctggcctttcctcaaggcatggtagtctttccttgaggctgatagctagggcttgaccaggaagtcccgagaagttttgtcacctgggtccgtcgtcttccttctgtatggtgttgggtttatgtacacactataacacttcctgtgtgagttcatgtacctgtctgtgagtgctttggtgtattgagcctcagtacactccaagggcattaaagtcaagaactagaacctgggtgctgtgcctttcttttttagagatgtgctctcatctcttctctgacccccactttgccagcaaatattttttatttctgcttaaaatgtggtgtgtttggggatgccccacacaacaagacaggcttttccctgagaccagcagctgaatttctgccctgaaagggaggtgggcc

SEQ ID NO: 7665 - DNA, 417 bp, Homo sapiens
tggtgtggcaccaatcagaccccagggattgaagatggagcagccccagctctcattccccgttgcctgcctgagagccctggtgatttctttccagtttcctgaggttgttccccttaacatcggaggggctcacttcactacacgcctgtccacactgcggtgctacgaagacaccatgttggcagccatgttcagtgggcggcactacatccccacggactccgagggccggtacttcatcgaccgagatggcacacactttgggtatgtctctccctctacaatcaactttgtagtcctagcaggtgattagcgtaggcttgagtatgggaccttgatatcttccatagtacctagaagaggagatagcatattgatgaaatttaataaatgggtttattgaaagagatcaat

SEQ ID NO: 7666 - DNA, 1440 bp, Homo sapiens
cgcccccctccggccagcccgcagccggccgcgtcatgccaggcgctgctcggcggtagggagtgcccggggccgccgcctccgcccgcccgaagccgcgcccactgcccagagccagagggatggtggtagtcacggggcgggagccagacagccgtcgtcaggacggtgccatgtccagctctgacgccgaagacgactttctggagccggccacgccgacggccacgcaggcggggcacgcgctgcccctgctgccacaggagtttcctgaggttgttccccttaacatcggaggggctcacttcactacacgcctgtccacactgcggtgctacgaagacaccatgttggcagccatgttcagtgggcggcactacatccccacggactccgagggccggtacttcatcgaccgagatggcacacactttggagatgtgctgaatttcctgcgctcaggggacctcccacccagggagcgtgttcgagctgtgtacaaagaggcccagtactatgccatcgggcccctcctggagcagctggagaacatgcagccactgaagggcgagaaggtgcgccaagcgtttctgggactcatgccctattacaaagaccacttggagcggattgtggagatcgcccggctgcgtgcggtccagcggaaggcccgctttgccaagctcaaggtctgtgtcttcaaggaggagatgcccatcaccccctatgagtgtccgctcctcaactccctgcgatttgagcggagtgagagtgacgggcagctttttgagcaccactgtgaagtggatgtgtcttttgggccctgggaggctgtggctgatgtttatgacctgctgcactgcctggtcacggacctctcggcccagggtctcaccgtggaccaccagtgcatcggggtgtgtgacaagcacctcgtgaaccactactactgcaagcgccccatctatgagttcaagatcacatggtggtgagtagccccggtaggcgagagtcccatcagggaggatgtccaccttgcttggtggctctgggagtaagatccctgaaggggctgctgactgccccagaatctgccgaggtgagaacagcatcctgaggcacagctcccaggggacagaggtgtagctccaatctccctgactgcacctcagggttgggctcagggcttgcggcctgcaggcactccagccagcgctcacctggcctttcctcaaggcatggtagtctttccttgaggctgatagctagggcttgaccaggaagtcccgagaagttttgtcaccttcttgaccttgcaagagagtttctgcccattttagagccacgttaccaaatcgatgtaggcctaatcacttcctcaaccctgttcaagcgtccctcccttgtgctcagtatattggtgtgaacacggaacatgat

SEQ ID NO: 7667 - DNA, 473 bp, Homo sapiens
tgaaattcagtttgaaaattttattttctgtgatcatacatttctacaaattactgaaaggaagtaatattaaatgagaacatgtttctgaaagttttacttataatgttaaaaaaattggtaataaaagggaaatggttaagtaaattatgataaatttttccttttttatacagtcattaaaatgtttaaaagtttatataatgaggctgggtgcggtggctcacacctataatcccagcactttgggaggcggagtcaggcagatcacttgaggtcaggagttcgagaccagcctggccaacatggtgaaaccctgtctctaccaaaaattagccatatgtggtggtgtccacctgtaatcccagctactcaggaggctgagacaggagaattgcttgaacccaggaggtggaggttgcagtgagctgagatcgtgccactgcaccccagcctgggtgacagagtgagac

SEQ ID NO: 7668 - DNA, 469 bp, Homo sapiens
gtggcaaccatataaaggctttgtcacgttttatacatttctagggtttcacactagtataacttttttttttaatgtattgcaaagttggaggtgtttgtacaagtactgtcacatctttcaggtttgtagagttccttttcagcatgaattatcgtttgtctcttaagaattgagaacttatgactaggcatggtggctcatgcctgtaatcccagcactttaggagactgaggcaagtggatcatctgaggtcaggagtttgagactagcacggccaacaaggtgaaaccccctctctactaaaaacacaaaaattagccaggcatagtggtgggcacctgcaatcccagctacttgggaggccgaggcaggagaatggcttgaacccaggaggcggaggttgcagtgaggtgaaatcatgccattgccctccaacctgggtgataagagcaaaactctgtctcaa

SEQ ID NO: 7669 - DNA, 510 bp, Homo sapiens
gttggcacggaactgagggaggaaactgggactacccgcctgatgttgcagcttttttattctcccctcgtcactgtgagaggtctggacttcttctgacataaacagcctcctttcatcaaaggatcgtgccatcctttctattttctaagcattaaaaggcagtttaagcagatcagtgaattaggcaaacgtttatattctcccttgcccttttctttttgcatctggtagaatttctcctgttctattgttgatctctttgtaaaagcccgtacattcttagctgccagggcatgtctttggaagcattaccacatacctgtgaatgattaataagctgtgtttggttaataagcaacattcagctctcatattaatcacagatttttaaagttagacacagctggtgacaatttagtgacacagggtcagcttagcttttcttgagcattagctgggaggagaggctgaacgctgccagatgtcaccaaccaaaaaaaaaaaaac

SEQ ID NO: 7670 - DNA, 925 bp, Homo sapiens
gcaccacactatccactagctgtacaatttacagagaagcacaagattcatcttgtcacctacaattcgtcttgaacatgttcatatttagtactcagaaactgtgtaagctcctcccaatacagaaaatattttttaaggcagcatatgtatttctgatttactaaaaacgattgtcattctcctctcattcttctttttggtatgaaccaaaagcggctaggagcaatgcctcaaataaccagaaatgaccttttgttgatacaaattgtatctctttttttcctgattgtatagaaacaaatgtacaaaactcatctgaagctaggtttggcactgaattttcaccatgaggtttgtggcactgtgtgtcacagggaagtagctcaggggttgtgagggagcttttatttctaaagggcagtagtaatttatagacaaaaacaatttttcaaggcctctttattaccactgcacagctatcatgtgtaaaatttcaagcattatattgcataagttctctttagcctattaaatttaatatgtccttgcaaaagggattttgtgtaaaaagtgtcagtgttagtgactcatctgcaagaatctacaaatggagctatacaactatgaatacataaatacagcatggttcctagttattagagaaacattttctttatattgaggtctacgcacttcttgactttccattttgtctgtaattataaaacagcaaataacaaagaagcattgggaccccctcggctgccttgataataaaatcaagcttccttcatgggactaagcatgtgtccttcaggatacttacctctaagcactcagcaggggttactacaaagcgttttgtgtggttttcaaaaaacagtgtattttgcaagaggtgctttgtaattttaattatttc

SEQ ID NO: 7671 - DNA, 232 bp, Homo sapiens
ttctaaaacaaatgaaagcaaaaaacttctcgcccctgaactccatccctggctgttacccttcattctctgttcttactctttcctaagcaagtaagatatgacatttattcatcagagcattttatggttaattcactgttcaattttctaaaataccatttggcttcttacctacagagctatagcaccagaattcactcggtatatgtgtaagaatgactgcttccat

SEQ ID NO: 7672 - DNA, 931 bp, Homo sapiens
gtaaaatgagaacagaggagttttgagtatttattactgtcattttaaacatttgtttcattgtaagttctataatgtaattttaaaataatggctatgtttaaaaatcagcttgcaaaattcttgaaaatttagcaattggctttgtgagagggtgagggctttcatcttccctggggaaaatatgatcccagcccatgtgggcgacacatctcaccaaaccccaggccctgggggtgagcgctgcacgtggtaagggcatgggagggtcttgtgagcatcagaagtcttaaacttgaagaaagaagcctcttgtgtgtagcagaggccccaaccccacctgttgactagaaaattgccatgcactgtggtcaccatgtgggagtaaaaccatgaacttccacccaccataggcagaagtgaatcattcagacagagccatccagaaggcacagatggcttcctgaccccatttgacctgggctgggtactccatggagctcaagctcaaggtcggctctgtcagccccaaaccccagctttctgctttggaagtaccagcttatatccccaccctttcccccagcccaggaagggagtaaagccaaaggggttccaggggaacctaagaccttggcctgggaaggtgatggttgggacccatgtgactgggcatgaccagaacgaattggtgttttccctaaggaaatcccttgccccaaactctcccctgccagctgctctgtggccttggagacaagctatttctctggttatttgctccaagttcacccagagctggaagacaagtgtggctgaggcacctgcatgaaacagcagggagagaacaggtgctcaggagtcactgggctgggttcccatcttgccatcacctctgcatgtgtgaccttgggcttgtcacttaatctct

SEQ ID NO: 7673 - DNA, 322 bp, Homo sapiens
tttatttaagatgaagacagtgacacttaagttactttcaagtttaaagagatatttataaagtacttcgaacttttttgtgggagcagtactatataaataaaatactgccattcaaatacagcccccgccccaggtttgaatgtagaggtcaatgaactatagagaaaatggtaacaaataagatatgaccaaaaagtggcaataaataacacggggtcataaaaatttcataaaatcctcttttaaatatgaagggggattttttttttcattacatccctgggtgtttcagctcctgactatccagctagtagaatat

SEQ ID NO: 7674 - DNA, 266 bp, Homo sapiens
tgtggactttggtcagtgtacagacacaggtgaatgctgctaaagacaaaactggagctgctcccaccattgatgtggtgtgatcaggctactacaaagttctggagttctgggaaacggaaatctaccaaagcaacctgtcatcatgaaggccaaattcttcagcagaagagctgaggagaggattaagggtgttggaggtggggcttgagtcctggtggtatgaaaccacatggatggaggtttgttaaatgctaacaactgct

SEQ ID NO: 7675 - DNA, 543 bp, Homo sapiens
ggtcgacatttatttgtccattagcatgttaattatttttttttttgagacggtgtttcactctgtcgcccaggctggagcgcagtggcacaatctcagctcacggcaacctctgcctcccaggttcaaagcaattctccctgcctcagctacttgagaggctgaggcaggagaatcgcgtgaactcgggaggtggaggttgcagtgagcggagattgcaccattgcactacagcttggaaactctgtttcaaaaaaaaaaagaagtcatctagctgttttgtttcctttaccactgttcaaaaaacattaaagaggaaggtgtaatttagcctcaaccatcttggagaccaaagactttcagaagaaacaggtccaagttataatgtgggctttcttagcagtcacagattttgtacacattgcctaattttaacaatttcaatgaatgagtgacctctattctggactgattaattgagaggccaacagattattagcatttcacaaaaagaaagacaaaggaaacccatgaaattagcat

SEQ ID NO: 7676 - DNA, 427 bp, Homo sapiens
agctgggcatggtggcgcacctgctaatcccagctacttgagaggctgaggcaggagaatcgcgtgaactcgggaggtggaggttgcagtgagcggagattgcaccattgcactacagcttggaaactctgtttcaaaaaaaaaaagaagtcatctagctgttttgtttcctttaccactgttcaaaaaacattaaagaggaaggtgtaatttagcctcaaccatcttggagaccaaagactttcagaagaaacaggtccaagttataatgtgggctttcttagcagtcacagattttgtacacattgcctaattttaacaatttcaatgaatgagtgacctctattctggactgattaattgagaggccaacagattattagcatttcacaaaaagaaagacaaaggaaacccatgaaattagcat

SEQ ID NO: 7677 - DNA, 250 bp, Homo sapiens
cttgacttctatcatctatcaaatattcatgtaacagatgtgaatgtattttatgtgtcagggactgtgctgggcactagtgtgagaaaaacacatttcctgctttcacagtaatcacagggatatagatgttcatcagttaattacactaatgaatgtagattactgatgtctgttgatgaaatgagcatagaaggatagaaatcaggatggcagaatagttacccactattaagagtggaaaggatta

SEQ ID NO: 7678 - DNA, 357 bp, Homo sapiens
ggagcctcagtttcaccatctgtaaagtgagattaatgaaagggacccacagagggctgttagagccagtaggcggccaggcgcggtggctcacgcctgtaatcccagcactttgggaggctgaggtgggcggatcacgaggtcaggagatcgagaccatcctggctaacacggagaaaccccgtctctactaaaaatacaaaaaattagcctggcgtggtggcgggcacctgtagtcccagctactggggaggctgaggcaggagaatggcgtgaacccgggaggcggagcttgcagtgagccaagattgtgccactgctctctagcctgggcaacagagcaagactccatctcaa

SEQ ID NO: 7679 - DNA, 656 bp, Homo sapiens
aggatgagcagggcttccttcaactcagggttcctgtgaaattaaaaagaattctcatcttgactcaggattgttgaacactattgatatttcttccaaggtctcacaagagtttgcctcctctcattgccatgtgaagacctctgtgggggaacaatgcatgggttcttggggtattataggggactacagagaagtgtcacctccacccaacagcctgattcagtctactcctcaggaggaacacaaagtggtctctctagtgccatgaaaccccaaaaagtgtcaaccagtattaaaggcctgcctgatatacaaccctcgaatgcaacacagtgtccttctgaggccactctaaaggccaggaaaggtttgctaagaagtctgtgctgttaaaaacagaagaaaaagacccttatcccattgctctgtgtctggtggctatagggatagtatttcataaaaaaagaaaggcaaaaataattttcaaaaatgattcaagaaatgctgtcaaagatagcaaagaacagagtcctcagagaacagtgcccaggacaggataagcactcaataacatataacactgtgtagtgctgttgagtgctggctgttgttgagtgctagctattgttgagtgcttgttgttgagtgctagc

SEQ ID NO: 7680 - DNA, 358 bp, Homo sapiens
ctggcagggaaaagtcatattctaaagggtgctacactcagactgctcaccaagtgctcctcagcccttgaatcactttgaagaaatcaaaacgagatcgcagcgggatgctgcgatgtggctgatgtcagacggtcagcacagacctccctgaccccgtgtcggctgagcggaagtgctgagagccagcaaggatgggtcgttcggatttgggaaaaattagcatgcattgtgcagtcctggggaaacatcatctatgggacaactggctctgcgagttacttacattgaaatgtatggcatgtatgtatcatttggaaagattcttcgccttaatggacttttttgatgaaccact

SEQ ID NO: 7681 - DNA, 233 bp, Homo sapiens
ctgttgaaagaagagaaatacccagaaagcatgaataatgatttaggcaagattaattaattaattaaggtcatttccacatttgattattttaagacattctcccttgactaggaggagttggtgaagcacagtaaatgaaaatactttttttctgcattttcgcttttttccacaagggatccaggtacacctaaactgtttagattttgctatctctaaacagaacagcc

SEQ ID NO: 7682 - DNA, 704 bp, Homo sapiens
tgagacagagtcttgctatgtcagccaggttggagtgcagtggtgtgatcttggcttgctgcaacctccaccttctgggttcaagcagttctcctgcctcagcctcccaagttgctgggattactagcgtgcgccaccatgcccggctgttttgtatttttagtagagatggggtttcaccatgtgggccaggctggtttccaactcctgacctccagtgacccaccctcctcagcctcccaaagtgctgggattacagggatgagccaccatgcctggccaagccaatactttttaattcaagtacaaatcaaactacatcactgagaggaatgttccccaatccagttacactaccctactatccattatcactgttgctgtgaataattagtacccccttccagggagtggggggtacagaccacgtgacagtgggtgtcactgtggtgacaagactgtttgagagtgggaggtgggagcaatcatttatgctggtaatttgccttaagatgttattcccaaacatccttccatgatcctttggattgagataccttaatcccaactgccttcatgtccaaggtcaccacacacacacacacacacacacacacacacacacacacacacacacatcttccttccatgatcctttggattgagataccttaatcccaactgccatcatgtccaaggtcaac

SEQ ID NO: 7683 - DNA, 651 bp, Homo sapiens
ttgcgatggagtcttgctctgttgcccaggctggagcgtagtcattagatcttggctcactgcaacctctgcttcctgggttcaagcgattctcctgcctcagcctcccaagtagctgggattataggtgtgagccaccacgcctggctaatttttgtattttcagtagagatggggcttcatcatgttggccaggtggtcctgaactcctgacctcaagtaatctgcctgccttggccttccaaaatgcttgggattacaggcgtgagccactgcgcctggtccctattttctttttacaacagaccttgggaaatattttcttcccccaagaggttgaggcccatggaatgcattaggggcaggtggggtggtggtgctctgtagcctttaggacttctagaatcaggcttctgggccaccttcttagcaggtgtatacctctttgttccagactgactttctgtctcacaatatcttcactatttccacagttgcagccaagacaggaaactgaaagctgaggccagaagggtggtgtactggggggaggggaaaattgagtgtcactttggaaaactggggcccccatctaaggattgctgcctctgtagattcaaaagcaataaaacagcagctcattaactctta

SEQ ID NO: 7684 - DNA, 633 bp, Homo sapiens
  misc_feature (569)..(569): n is a, c, g, or t
ttgcgatggagtcttgctctgttgcccaggctggagcgtagtcattagatcttggctcactgcaacctctgcttcctgggttcaagcgattctcctgcctcagcctcccaagtagctgggattataggtgtgagccaccacgcctggctaatttttgtattttcagtagagatggggcttcatcatgttggccaggtggtcctgaactcctgacctcaagtaatctgcctgccttggccttccaaaatgcttgggattacaggcgtgagccactgcgcctggtccctattttctttttacaacagaccttgggaaatattttcttcccccaagaggttgaggcccatggaatgcattaggggcaggtggggtggtggtgctctgtagcctttaggacttctagaatcaggcttctgggccaccttcttagcaggtgtatacctctttgttccagactgactttctgtctcacaatatcttcactatttccacagttgcagccaagacaggaaactgaaagctgaggccagaagggtggtgtactggggggaggggaaaatatttgtgtntttatttaaaatatgagtccttatattaaagtttttgtgattatgtatatttttaggtttttaa

SEQ ID NO: 7685 - DNA, 551 bp, Homo sapiens
aatgtacttggctcagtgtggcaaaagcactgggctagcagcagtcagatgtgggttcaaagcaaggcacaatcatttattagctataaatttgggcaagtcacttcttgagaataagtttcttcatctgtaaacagaagtaataccttccttatatcttaaattggtgtggaagtaaatgagtaaaaacctcagggtttttctgagtttaaatgagacaattcatgtaacgtgcttagcacaatacctggtacccagtaggtactctgcagtatttattgatgatgatgatgatgatgatgatgatgatgatgacaaagaaatacaaggaaatgtcaacaccttaacagtgcattcatagatctacaaaatgcttaatctcagtgttctggcaaccactaaatacataaagataatctaagacatcaagatttcaacatataaaaataaatataaaaacaagtgaacaataatcatttatatgtagtttcatgactggaaaaaataataacctagattttttcttaacctagaaaatctagattaaaaaa

SEQ ID NO: 7686 - DNA, 359 bp, Homo sapiens
atcactatcatttatctatcattgaacacttctcactttcttaagtcagggtggaaatggcatagaaaattggttgatattggccaggcgcagtggctcacgcctgtaatcccagcactatgggaggccgaggtgggcagatcacaaggtcaggagatctagaccatcctggctaacacggtgaaaccccgtctctactaaacaaaatacaaaaaattagccgggtatggtggcaggcacctgtagtcccagctacttgggaggctgaggcaggagaatggcgtgaatccagaaggtggagcttgcagtgagctgagatggcgccactgcactccagcctgggtgagactctgtctcca

SEQ ID NO: 7687 - DNA, 425 bp, Homo sapiens
acagccaacatcagcattgtccttgcctgaatggatcattcaagtctgcagaagttttgttttattgtctcttcatacatgtctgtagtggatactctgggtataacccaactctcatttcaaggaaagacttggtgtcccagttgctgggagtgctgacagtagacagctttcagatgtcagcacttcagggaattgtctcagcttcagaaagccactttccgcgaggttatgtccttcctgggatggctcacgtgcagtctagacaactctggatggccattctaactcaagaactgcccaggctgacactgatattgggactgcaggtagcttcacttcctactctgcccaatcctgctttcttcccttcccttccacaagtgttagtggatgctcaactgtgtgctcaactgttttcaaat

SEQ ID NO: 7688 - DNA, 315 bp, Homo sapiens
ctgaagcagagaattgagatgcctcagctatcaagttgttacatatagaagtgttcctgtggttgatgagttactagaattattgacccatttctggacttttcatttaaaaagttgtaagtagggaattttggagatcatgagttatatttattttatccctgtatcttcagcccttattagcatggaacctggcacatagtaattgatatgtattatctattacagcaacctataaaagtaagtatttgtcttgttttatggatgagcattctgagacttcaaggggttaaatagcttgctagtaagtggtgg

SEQ ID NO: 7689 - DNA, 825 bp, Homo sapiens
ctgtagtgctattccctaatgagcaactaagagaagacacaacaataaaccatggaagtgttgggaggccatggaaatgatttagaggtataaaatattcccaagtttttattataaatttttattcataggttaaaacatataagcataagtgattgtacaggtgtgactcccttttctaggagagaaaatagctttatttgaaaactccaaaagctacttaatcttaccagaggtttttaataggggaactgggtttacttacaatgaaagcatattttcattctgctatagaaaaacatatccctgctcattcagtaaatctaagattggaatgctttctagaactatgcaatatttgaataatttctagaaatgtctaagaaacaaccttttttattttaaatcatcacttacaaacgtagtctgagactgcaaactagttttcacttgactaatccattcattatagattagttaccatttgctctatataatctattgaagaaactattgttattcatattttgattaattttactagcaacaaatttttattttagtagcattgcatttaccttaaatatgtaaaaatgaagttgtaacaggatcaaatatggaaatggcaatggtaactctgcctagaacatagttgaatgtccttggttgtcggtaagatgcaaagatctatacaaattttatcataggtcaaaattatttctaaatatacaaacagtttcaactatttctttctccctaaaactaaaaccaaaccaaacccaaatgaagaaacctaaacttcttttcatctaatagttataccca

SEQ ID NO: 7690 - DNA, 468 bp, Homo sapiens
aacacgattgctccttgccagtgcaggatagcagaccccagccttcactagaaaactcagactctgtcgtttagcataagtcccttcacagcctagacctgtccaccttttccaaccttttctcccaaattctgagcaagaaccctctgctttattcaggcagtgctctctattgaccacacatttgatatgcccatcctcacctgtgtactttgttctgtgtttctcctgcttattattaacataggagcaaggctcaatgcctataatcccagcactttgggaggcctaggcaggcagatcacctgaggggagctcgagccagcctgaccaacatggggttttaccatgttggccaggctggtcttgaacttctgacctcaagtgatccacctgctccgcctcccaaagtgtttgggattacaggcttgagccaccatgcctggcctacactgtgttaattttctt

SEQ ID NO: 7691 - DNA, 1341 bp, Homo sapiens
gcgcgcggcggcgacggcgcgccgtaggtgtcatgcggaagatggcggcgtccaagggaggttgagggctctgaggaggcgttgagaggtttccgtacagcccgaccgtgcggctttggggatcccatcgctctgtgtttcctgctccaggtttcgcgtctcgcatcttcccagaccctcgggcgcgatgtggaggagctgcctccggctgcgggacgggggacgccgtctcctgaatcggccggcgggtggccccagcgcttctatgagtccggggccaaccatcccgtctccagcccgggcttacgccccgccgacagaaaggaagaggttttatcagaatgtcagcatcacacagggtgaaggtggctttgagataaacctggaccacaggaagctgaaaactccccaagccaagctctttaccgtccccagcgaggccctggccattgcagtggctactgagtgggattcccagcaggataccatcaagtactacaccatgcacctgaccacattgtgcaacacatcattggacaacccaacccagagaaacaaggatcagctgatccgggcagccgtgaagtttctggacaccgacaccatctgctacagggtggaggagcccgagacattagtggaacttcaaaggaatgagtgggatccaatcatcgaatgggctgagaaaagatacggcgtggagatcagctcctccaccagcataatgggacccagcatccctgccaaaactcgggaggtgctcgtcagccacctggcatcttacaacacatgggctttacaagggattgagtttgtagctgcccagctcaagtccatggtgctaaccttgggcctgattgacctgcgcctgacagtggagcaggccgtgctgctgtcacgcctggaggaggagtaccagatccagaagtggggcaacattgagtgggcccatgactatgagctgcaggagctgcgggcccgcaccgccgccggcaccctcttcatccatctctgctccgagagcaccacagtcaagcacaagctcctgaaggagtgaggcctgggcagagcacactcagcaggatagaggcagtgcagccacagctcccccggccttcagggctccccagcctgtggggctggcttccttggcttttggggactcggcctcagcgtcaccctgagattccccccgagacacagtgcgctagtacggctgtccggaggtcagcctgatttcaacccaggtgcccctggcctggccagcagtgaatgtaggagatgaattgtgcaagtgactttctctcgactctgattttattaaatatttctccaccctgg

SEQ ID NO: 7692 - DNA, 806 bp, Homo sapiens
gcgcgcggcggcgacggcgcgccgtaggtgtcatgcggaagatggcggcgtccaagggaggttgagggctctgaggaggcgttgagaggtttccgtacagcccgaccgtgcggctttggggatcccatcgctctgtgtttcctgctccaggtttcgcgtctcgcatcttcccagaccctcgggcgcgatgtggaggagctgcctccggctgcgggacgggggacgccgtctcctgaatcggccggcgggtggccccagcgcttctatgagtccggggccaaccatcccgtctccagcccgggcttacgccccgccgacagaaaggaagaggttttatcagaatgtcagcatcacacagggtgaaggtggctttgagataaacctggaccacaggaagctgaaaactccccaagccaagctctttaccgtccccagcgaggccctggccattgcagtggctactgagtgggattcccagcaggataccatcaagtactacaccatgcacctggtaacaagttcacagtgtgaacctggaccctgagacccacccagggcttcgtagggtagaccctttaccaaattccgacaaggccctgggggctggtcctttgcctgtctggcccccagggattcacctcctctcaagtcactaacgtgctaaactctttccttgtctggcccggctacttgcagctctctctcctaggaacactgtgctggatggctggtttctcctttggtttcaggacagatgtcaccttcattgactgcccagctctcttattttctatgacagcagctgg

SEQ ID NO: 7693 - DNA, 604 bp, Homo sapiens
gcgcgcggcggcgacggcgcgccgtaggtgtcatgcggaagatggcggcgtccaagggaggttgagggctctgaggaggcgttgagaggtttccgtacagcccgaccgtgcggctttggggatcccatcgctctgtgtttcctgctccaggtttcgcgtctcgcatcttcccagaccctcgggcgcgatgtggaggagctgcctccggctgcgggacgggggacgccgtctcctgaatcggccggcgggtggccccagcgcttctatgagtccggggccaaccatcccgtctccagcccgggcttacgccccgccgacagaaaggaagaggttttatcagaatgtcagcatcacacagggtgaaggtggctttgagataaacctggaccacaggaagctgaaaactccccaagccaagctctttaccgtccccagcgaggccctggccattgcagtggctactgagtgggattcccagcaggataccatcaagtactacaccatgcacctggtaacaagttcacagtgtgaacctggaccctgatatgaatccgacaggctggggctggatcgtgctaactctttcttgtctgcccgcacaacc

SEQ ID NO: 7694 - DNA, 1117 bp, Homo sapiens
agagcctggtaataaaaggcatgtgaccatgggggaggttcactaatcctggggctgctgcaagcttccctcgagtcctgtgagcgtcaacacaaagcatttggcatggagcctggttgtggcacactctcagtagctgtgctgctgctccggtaatgcagacgcctctggtggagggctgtgctgtggtgctgtctgctatgtgtcagatgtggtgtcctcaggaaagcagggcttttgcctgagccccgcaggcagtgacagggtggtttttgcctttgattcagaccacattgtgcaacacatcattggacaacccaacccagagaaacaaggatcagctgatccgggcagccgtgaagtttctggacaccgacaccatctgctacagggtggaggagcccgagacattagtggaacttcaaaggaatgagtgggatccaatcatcgaatgggctgagaaaagatacggcgtggagatcagctcctccaccagcataatgggacccagcatccctgccaaaactcgggaggtgctcgtcagccacctggcatcttacaacacatgggctttacaagggattgagtttgtagctgcccagctcaagtccatggtgctaaccttgggcctgattgacctgcgcctgacagtggagcaggccgtgctgctgtcacgcctggaggaggagtaccagatccagaagtggggcaacattgagtgggcccatgactatgagctgcaggagctgcgggcccgcaccgccgccggcaccctcttcatccatctctgctccgagagcaccacagtcaagcacaagctcctgaaggagtgaggcctgggcagagcacactcagcaggatagaggcagtgcagccacagctcccccggccttcagggctccccagcctgtggggctggcttccttggcttttggggactcggcctcagcgtcaccctgagattccccccgagacacagtgcgctagtacggctgtccggaggtcagcctgatttcaacccaggtgcccctggcctggccagcagtgaatgtaggagatgaattgtgcaagtgactttctctcgactctgattttattaaatatttctccaccctgg

SEQ ID NO: 7695 - DNA, 470 bp, Homo sapiens
tgtgaatggttgggaacatttttcatcttcagctggtttcatggtgcgattatccttcctgctttttgtgagatatatttctgtaagggactcagagttggctttgtctgcaccaattcaagtggctaaatataggaatggtcacttgattccacttaacaaatccctgagagtttttcatttgatctttcaaggtggctttgagataaacctggaccacaggaagctgaaaactccccaagccaagctctttaccgtccccagcgaggccctggccattgcagtggctactgagtgggattcccagcaggataccatcaagtactacaccatgcacctggtaacaagttcacagtgtgaacctggaccctgagacccacccagggcttcgtagggtagaccctttaccaaattccgacaaggccctgggggctggtcctttgcctgtctggcccccagggattcacctc

SEQ ID NO: 7696 - DNA, 1868 bp, Homo sapiens
gcgcgcggcggcgacggcgcgccgtaggtgtcatgcggaagatggcggcgtccaagggaggttgagggctctgaggaggcgttgagaggtttccgtacagcccgaccgtgcggctttggggatcccatcgctctgtgtttcctgctccaggtttcgcgtctcgcatcttcccagaccctcgggcgcgatgtggaggagctgcctccggctgcgggacgggggacgccgtctcctgaatcggccggcgggtggccccagcgcttctatgagtccggggccaaccatcccgtctccagcccgggcttacgccccgccgacagaaaggaagaggttttatcagaatgtcagcatcacacagggtgaagaccacattgtgcaacacatcattggacaacccaacccagagaaacaaggatcagctgatccgggcagccgtgaagtttctggacaccgacaccatctgcttacagggtgggaggagcccgagacattagtgggaatttcaaaggaatgagtgggatccaattcattcgaatggggttgagaaaagggattgagtttgtagctgcccagctcaagtccatggtgctaaccttgggcctgattgacctgcgcctgacagtggagcaggccgtgctgctgtcacgcctggaggaggagtaccagggaggatttccatgtcagctagaaaagttcatccagcctgctaggatggcttgggattgactcaccctgtctattaaacgtgtacaccaagagttgattctggtcaccagctcatcttctcgattgtcaatcttcaggaggtggatgtcgtgcgatgccccgacagcattaacaatcgtatctttatcgacaaaaagctggtgagtgaaaagaatccaatgagaaagtgtgtgtcattataccgtgaacacaaagggagctgaacagagaaggagcatttggaagtcccctggctgtgcaggccacactcagagcagagcccacctttgtatcagcgcactctgccgattcatctgtgaattcatctgtgacagccgcttccccaactgcacagggcaggtgttgtggggaaagggccaaccagggtgttactttgcagtccccgctggaagcatgtttcctccagggtgaaggcagatggctgcccagggggcacctcacccaggacatctgttctcacaatgcttctctctcaattactctcaagtctaacttgcccaaaacctctgcctgctgggtggaagcatgaggctggctgagggtctcgaggctgctctgaagacagcaggccctacaaactcatgggtgttcaccccacagttgtctctccactgccactcatgtcaacaaaaccaaactttggattccatttggagtatccttctgccttctcttgttcctgactttgctgtcttgtaaaaagttgttagaaacaaccaccttctaataggcctcactggttctaggtgttgacactgtggctattgttgcctgggatggttgaaatggagtcatttcccagagcagggcaaggccactgaagcactcagtaagcagttgcttccaccttgaagcagaggcgcttggtaaggcagagcacctgaatgctctgtattgcagggaggatttgcaagtggagtgtgcattttttgttctttcctgtagtggcagttaacttaatggtctctaaaacgttctgtgcaatcttaagatgttaatatttctgccaaaaaaagtattctttggtcaaatacatttgggaaagccagcacatcctaggcccctcctaaagatttgctgggcacaaagtattctgaaggctctacaaagtcctgtggaaaataaaccctttaagctttgtc

SEQ ID NO: 7697 - DNA, 1554 bp, Homo sapiens
gcgcgcggcggcgacggcgcgccgtaggtgtcatgcggaagatggcggcgtccaagggaggttgagggctctgaggaggcgttgagaggtttccgtacagcccgaccgtgcggctttggggatcccatcgctctgtgtttcctgctccaggtttcgcgtctcgcatcttcccagaccctcgggcgcgatgtggaggagctgcctccggctgcgggacgggggacgccgtctcctgaatcggccggcgggtggccccagcgcttctatgagtccggggccaaccatcccgtctccagcccgggcttacgccccgccgacagaaaggaagaggttttatcagaatgtcagcatcacacagggtgaaggtggctttgagataaacctggaccacaggaagctgaaaactccccaagccaagctctttaccgtccccagcgaggccctggccattgcagtggctactgagtgggattcccagcaggataccatcaagtactacaccatgcacctgaccacattgtgcaacacatcattggacaacccaacccagagaaacaaggatcagctgatccgggcagccgtgaagtttctggacaccgacaccatctgctacagggtggaggagcccgagacattagtggaacttcaaaggaatgagtgggatccaatcatcgaatgggctgagaaaagatacggcgtggagatcagctcctccaccagcataatgggacccagcatccctgccaaaactcgggaggtgctcgtcagccacctggcatcttacaacacatgggctttacaagggattgagtttgtagctgcccagctcaagtccatggtgctaaccttgggcctgattgacctgcgccctgaacaagtgggaagcaagtgcacctgaacatgcgcacatcaacagacctggacacgcaggaaagaaaccacagaatccacagacaagattcgggccaaaacacatatgacgatgcgagcacctacatgaccataaatggaagaccatcgccacaacgaagccatggcagggagcacacaacaagaccgacacagacagggaccagaccccttcacgaacacatccccaaaatacataccatcagacatcccaggagaaaagacaacacaaacaagagaccagaagcccacgacaggccatcgcccctggaaacacggcaaatgcagaggaccaagagagccaaaaaaaccaacaaaacagtcaaacccagacaaaatgaaaggtgcaacgagagacaacaccaccaccagagagtgcccccacggggaagacagatccaagagggaacgaacacacaaaagagaccgattgagtgaggaaaacaggcgcgatacacactaggaggaaagtagaagggagacgcaaaccgggacgccgaggatagaaggaatcagaagaccaagaaaagaaaatgtcacccgcaccaggagagagaacgacaacagggaggcggaacaatacgaaaaaacagagatgagaaaagaagggaacaaaacacaaaaaccgaagacactaaacagaac

SEQ ID NO: 7698 - DNA, 1436 bp, Homo sapiens
gcgcaggaggcgcgcggcggcgacggcgcgccgtttcgcgtctcgcatcttcccagaccctcgggcgcgatgtggaggagctgcctccggctgcgggacgggggacgccgtctcctgaatcggccggcgggtggccccagcgcttctatgagtccggggccaaccatcccgtctccagcccgggcttacgccccgccgacagaaaggaagaggttttatcagaatgtcagcatcacacagggtgaaggtggctttgagataaacctggaccacaggaagctgaaaactccccaagccaagctctttaccgtccccagcgaggccctggccattgcagtggctactgagtgggattcccagcaggataccatcaagtactacaccatgcacctgaccacattgtgcaacacatcattggacaacccaacccagagaaacaaggatcagctgatccgggcagccgtgaagtttctggacaccgacaccatctgctacagggtggaggagcccgagacattagtggaacttcaaaggaatgagtgggatccaatcatcgaatgggctgagaaaagatacggcgtggagatcagctcctccaccagcataatgggacccagcatccctgccaaaactcgggaggtgctcgtcagccacctggcatcttacaacacatgggctttacaagggattgagtttgtagctgcccagctcaagtccatggtgctaaccttgggcctgattgacctgcgccctgaacaagtgggaagcaagtgcacctgaacatgcgcacatcaacagacctggacacgcaggaaagaaaccacagaatccacagacaagattcgggccaaaacacatatgacgatgcgagcacctacatgaccataaatggaagaccatcgccacaacgaagccatggcagggagcacacaacaagaccgacacagacagggaccagaccccttcacgaacacatccccaaaatacataccatcagacatcccaggagaaaagacaacacaaacaagagaccagaagcccacgacaggccatcgcccctggaaacacggcaaatgcagaggaccaagagagccaaaaaaaccaacaaaacagtcaaacccagacaaaatgaaaggtgcaacgagagacaacaccaccaccagagagtgcccccacggggaagacagatccaagagggaacgaacacacaaaagagaccgattgagtgaggaaaacaggcgcgatacacactaggaggaaagtagaagggagacgcaaaccgggacgccgaggatagaaggaatcagaagaccaagaaaagaaaatgtcacccgcaccaggagagagaacgacaacagggaggcggaacaatacgaaaaaacagagatgagaaaagaagggaacaaaacacaaaaaccgaagacactaaacagaac

SEQ ID NO: 7699 - DNA, 1491 bp, Homo sapiens
gacaacatagtgagacatggtctctgcaaaaaaatagaaaaatcagcagggtgtggtggcatgcacgtatactcccagctactcaggaagttgagtgagaggattgcctgagcccaggagtacaagactgctgtgagctatgatcatgccactatactccagcctgcgcaacacagtgagaccctgtctggaggggtggggggagaaaaaaaacaccatagaaacatcccaaatgtccaataacaaattgtagtccatccatacaatggactactactcagccatgaaaaggaatacagcactcacatatgctacatgtgaatgaaccctggaagcattatgctcagtgtaagaacccagacataaaaggtcacacattttatgattccacctatatgaaatatccagaagaggtaaacctataaaaataaaatgtatatttatagctgccgggggcttcagggtgaaggcataggaagaaactgtttaatgggtacggagttttatcttgcagcggtggaaatgttttggaactaaagtcgtggttctacaacattgcaaatgcactcgatgccactgaactgttcactttaagatggttcgttatgtaaatttcatcttaataaatgcatgaagaaagggatttgtatgtatcaactacagtgtctcatgaagcaaagattataattattccatttacctggtgtttccctatccaataattcccatttcctccaaaaaaacaaataataggaacctcatgggttgaaagagagcccataatgaagattagaaaatacactcctatagatgaatagcaaaggccgggcacagtggctcacgcctgtaatcccagcactttgggaagtcaaggtgggcggatcacgaggtcaggagatcgagaccatcctggccaacatggtgaaaccccgtctctactaaaaatacaaaaattagctgggtgtggtggcacatgcctgtaatcccagctactcgggaggctgagacatgccagcactccagcctggcaacagagtgagattttgtctccaaaaaaaaaaaaaaaaaaaaaaagatgaatagcaaaaaacaaacaaaaaaaaaaaaacaaaaaacatattttggggccgccctagggccccgtaaaagaaagttctcttacacaaccctttttgtgtgtgggaggccccggcgttccccatatgtgctgtaatctgacacaatgtgtgtgctaagacacgcttgttctccctagagacaacctggtggatataaaaaaatagggacgtaggcagcgtattcctcccacccaaatgttaaaaaaaccgccgccgggtggagtaagacaacccaaaaggcgtcttagtgaaaacaactctcctccacatgtagtaggtttcgcagagagacataacatcacgggggactgcttatcacaacaaggcggatgtccacaagaagacattgagaatatatacaattattgcgccg

SEQ ID NO: 7700 - DNA, 1049 bp, Homo sapiens
agcgtccggcggtcgcagagccaggaggcggaggcgcgcgggccagcctgggccccagcccacaccttcaccagggcccaggagccaccatgtggcgatgtccactggggctactgctgttgctgccgctggctggccacttggctctgggtgcccagcagggtcgtgggcgccgggagctagcaccgggtctgcacctgcggggcatccgggacgcgggaggccggtactgccaggagcaggacctgtgctgccgcggccgtgccgacgactgtgccctgccctacctgggcgccatctgttactgtgacctcttctgcaaccgcacggtctccgactgctgccctgacttctgggacttctgcctcggcgtgccacccccttttcccccgatccaaggtgggcactaagatggccaggagggtgggtcactttgtccacctcagactcagcaaggctcaagagcaaagctgatggatgcactgacatttccaggggaagctctgtagaatctgggactcttccctgcccctctgggaactttactctccagcaagactgaagaagctccttggttagaattctaatttggcccagggaaagggcaacctcccacattttctcccaatcctgtctcttttccagacacggaaggtgctggccgcacctgctgactcactcttgggctgataaggcacatatgggttggtgagggtcatcttagccatttttctgcctttgctgaggattctaggatcctgtgccccgagatggctgctcatacctgggagatgggtcaaatcttttcctgctttcagcctcaccatcatccttttccatgcacttgcccctgtccaataggagaatcacttgcgttccttcccacagttccatggggcttgggccggcagactgcatacctgagctgtcatctcaagagtgctgtgttatcttaggacggttgcttaccttctctgggccttggcttccccatgctcctcccactccccatctccaagccctaacttatttaaatggaaaaggatccc

SEQ ID NO: 7701 - DNA, 725 bp, Homo sapiens
tgttataagcgtgttgatggccctgtctgctgctagtggtcttttgctccacgtgatattgactatgatcatctggagggtccgtggttccagtgacttagcatcaaagacggcctaacacacacgtctggtgcctctgctgggatggctgaagcagccggaggctggccaggtatctctctcctcatggtcccccatcaaggtagcctggtcactttacacagtggtgcagggttccaaaatagagcattcaaagaggacaatacccaatgtgcaagggtttgtcttcttgcatcatgctccacaggccaagataaatcacatgtccgagcccaagggcaaggtgggaagggaccatacaaaagcatggatactgggaggcataggtcattgcggaccgcccacgtaagcctaccacaatcttttgtccattttcaaatgcattgtcttttccaaattgctttagctcttttttatttatttatttttttttttgagacaaagtttctgtcttgttgcctaggctagagtgcaatggctcaatctcaactcactgcaacctctgcctccggggttcaagcgattctcttgccttggcctcccgagcagctgggattacagaagcccgcctccacgggcggctaatttttgtattttttagtagagacagggtttcaccgcattggccaggatggtcttgaactcctgacctcaggtgatccacc

SEQ ID NO: 7702 - DNA, 117 bp, Homo sapiens
aattcaagcttctaacgatgtacggggcatgagccactgcacccagccctgtattcttattcttcagatatttatttttcttttcactgttttaaaataaaaccaaagtattgataa

SEQ ID NO: 7703 - DNA, 1875 bp, Homo sapiens
agcgtccggcggtcgcagagccaggaggcggaggcgcgcgggccagcctgggccccagcccacaccttcaccaggatgtatgcatggaggtcgtatctatccagtcttgggaacgtactgggacaactgtaaccgttgcacctgccaggagaacaggcagtggcagtgtgaccaagaaccatgcctggtggatccagacatgatcaaagccatcaaccagggcaactatggctggcaggctgggaaccacagcgccttctggggcatgaccctggatgagggcattcgctaccgcctgggcaccatccgcccatcttcctcggtcatgaacatgcatgaaatttatacagtgctgaacccaggggaggtgcttcccacagccttcgaggcctctgagaagtggcccaacctgattcatgagcctcttgaccaaggcaactgtgcaggctcctgggccttctccacagcagctgtggcatccgatcgtgtctcaatccattctctgggacacatgacgcctgtcctgtcgccccagaacctgctgtcttgtgacacccaccagcagcagggctgccgcggtgggcgtctcgatggtgcctggtggttcctgcgtcgccgaggggtggtgtctgaccactgctaccccttctcgggccgtgaacgagacgaggctggccctgcgcccccctgtatgatgcacagccgagccatgggtcggggcaagcgccaggccactgcccactgccccaacagctatgttaataacaatgacatctaccaggtcactcctgtctaccgcctcggctccaacgacaaggagatcatgaaggagctgatggagaatggccctgtccaagccctcatggaggtgcatgaggacttcttcctatacaagggaggcatctacagccacacgccagtgagccttgggaggccagagagataccgccggcatgggacccactcagtcaagatcacaggatggggagaggagacgctgccagatggaaggacgctcaaatactggactgcggccaactcctggggcccagcctggggcgagaggggccacttccgcatcgtgcgcggcgtcaatgagtgcgacatcgagagcttcgtgctgggcgtctggggccgcgtgggcatggaggacatgggtcatcactgaggctgcgggcaccacgcggggtccggcctgggatccaggctaagggccggcggaagaggccccaatggggcggtgaccccagcctcgcccgacagagcccggggcgcaggcgggcgccagggcgctaatcccggcgcgggttccgctgacgcagcgccccgcctgggagccgcgggcaggcgagactggcggagcccccagacctcccagtggggacggggcagggcctggcctgggaagagcacagctgcagatcccaggcctctggcgcccccactcaagactaccaaagccaggacacctcaagtctccagccccactaccccaccccactcctgtattcttttttttttttttttagacagggtcttgctccgttgcccaggttggagtgcagtggcccatcagggctcactgtaacctccgactcctgggttcaagtgaccctcccacctcagcctctcaagtagctgggactacaggtgcaccaccacacctggctaatttttgtattttttgtaaagaggggggtctcactgtgttgcccaggctggtctcgaactcctgggctcaagcggtccacctgcctccgcctcccaaagtgctgggattgcaggcatgagccactgcacccagccctgtattcttattcttcagatatttatttttcttttcactgttttaaaataaaaccaaagtattgataa

SEQ ID NO: 7704 - DNA, 2677 bp, Homo sapiens
agcgtccggcggtcgcagagccaggaggcggaggcgcgcgggccagcctgggccccagcccacaccttcaccagggcccaggagccaccatgtggcgatgtccactggggctactgctgttgctgccgctggctggccacttggctctgggtgcccagcagggtcgtgggcgccgggagctagcaccgggtctgcacctgcggggcatccgggacgcgggaggccggtactgccaggagcaggacctgtgctgccgcggccgtgccgacgactgtgccctgccctacctgggcgccatctgttactgtgacctcttctgcaaccgcacggtctccgactgctgccctgacttctgggacttctgcctcggcgtgccacccccttttcccccgatccaaggatgtatgcatggaggtcgtatctatccagtcttgggaacgtactgggacaactgtaaccgttgcacctgccaggagaacaggcagtggcagtgtgaccaagaaccatgcctggtggatccagacatgatcaaagccatcaaccagggcaactatggctggcaggctgggaaccacagcgccttctggggcatgaccctggatgagggcattcgctaccgcctgggcaccatccgcccatcttcctcggtcatgaacatgcatgaaatttatacagtgctgaacccaggggaggtgcttcccacagccttcgaggcctctgagaagtggcccaacctgattcatgagcctcttgaccaaggcaactgtgcaggctcctgggccttctccacagcagctgtggcatccgatcgtgtctcaatccattctctgggacacatgacgcctgtcctgtcgccccagaacctgctgtcttgtgacacccaccagcagcagggctgccgcggtgggcgtctcgatggtgcctggtggttcctgcgtcgccgaggggtggtgtctgaccactgctaccccttctcgggccgtgaacgagacgaggctggccctgcgcccccctgtatgatgcacagccgagccatgggtcggggcaagcgccaggccactgcccactgccccaacagctatgttaataacaatgacatctaccaggtcactcctgtctaccgcctcggctccaacgacaaggagatcatgaaggagctgatggagaatggccctgtccaagccctcatggaggtgcatgaggacttcttcctatacaagggaggcatctacagccacacgccagtgagccttgggaggccagagagataccgccggcatgggacccactcagtcaagatcacaggatggggagaggagacgctgccagatggaaggacgctcaaatactggactgcggccaactcctggggcccagcctggggcgagaggggccacttccgcatcgtgcgcggcgtcaatgagtgcgacatcgagagcttcgtgctgggcgtctggggccgcgtgggcatggaggacatgggtcatcactgaggctgcgggcaccacgcggggtccggcctgggatccaggctaagggccggcggaagaggccccaatggggcggtgaccccagcctcgcccgacagagcccggggcgcaggcgggcgccagggcgctaatcccggcgcgggttccgctgacgcagcgccccgcctgggagccgcgggcaggcgagactggcggagcccccagacctcccagtggggacggggcagggcctggcctgggaagagcacagctgcagatcccaggcctctggcgcccccactcaagactaccaaagccaggacacctcaagtctccagccccactaccccaccccactcctgtattcttttttttttttttttagacagggtcttgctccgttgcccaggttggagtgcagtggcccatcagggctcactgtaacctccgactcctgggttcaagtgaccctcccacctcagcctctcaagtagctgggactacaggtgcaccaccacacctggctaatttttgtattttttgtaaagaggggggtctcactgtgttgcccaggctggtctcgaactcctgggctcaagcggtccacctgcctccgcctcccaaagtgctgggattgcaggcatgagccactgcacccagccctgtattcttattcttcagatatttatttttcttttcactgttttaaaataaaaccaaagtattgataaaaaaaaaaaaaaaaaaaaaaaaaaaaaaaaaaaaaaaaaaaaaaaaaaaaaaaggagggggggcgcgcgccaaaaaaatctccccccggggggcccacaataagcacccacccatcatgtttttgtaacacaacagggggcccccaatatagagggtgctctctatataaacaagacatgaccagcggacgcgcgtattaaacacagctgttgagagagagcaacaacatggtgtaatgagaaatattcttgtgagacgcaacccaatatcggggggaggagcaaacaaatatatgggacacaacacacctccacaagagataattataccagccgcgcgaggagacatacacattcaaccttgagatgtgtttatatcgtggttgaaacacaacagctgcataatatgcaggtctcgatcagaaaaaaaaattacacgcacagataatattataactaagaaaattttatacagcg

SEQ ID NO: 7705 - DNA, 2047 bp, Homo sapiens
gctgggaagtgaccacggatagagaagagacaaagtcacagaaaccaagagagataggatttcactgtgttgtccaagctggagtgcagtggctcaatcacaggtcatggcagcctcgacctcctggggttcaggtgatcctcccatctcagcctcccgagtagctggggctacaggtcttttgctccacgtgatattgactatgatcatctggagggtccgtggttccagtgacttagcatcaaagacggcctaacacacacgtctggtgcctctgctgggatggctgaagcagccggaggctggccagcacctgccaggagaacaggcagtggcagtgtgaccaagaaccatgcctggtggatccagacatgatcaaagccatcaaccagggcaactatggctggcaggctgggaaccacagcgccttctggggcatgaccctggatgagggcattcgctaccgcctgggcaccatccgcccatcttcctcggtcatgaacatgcatgaaatttatacagtgctgaacccaggggaggtgcttcccacagccttcgaggcctctgagaagtggcccaacctgattcatgagcctcttgaccaaggcaactgtgcaggctcctgggccttctccacagcagctgtggcatccgatcgtgtctcaatccattctctgggacacatgacgcctgtcctgtcgccccagaacctgctgtcttgtgacacccaccagcagcagggctgccgcggtgggcgtctcgatggtgcctggtggttcctgcgtcgccgaggggtggtgtctgaccactgctaccccttctcgggccgtgaacgagacgaggctggccctgcgcccccctgtatgatgcacagccgagccatgggtcggggcaagcgccaggccactgcccactgccccaacagctatgttaataacaatgacatctaccaggtcactcctgtctaccgcctcggctccaacgacaaggagatcatgaaggagctgatggagaatggccctgtccaagccctcatggaggtgcatgaggacttcttcctatacaagggaggcatctacagccacacgccagtgagccttgggaggccagagagataccgccggcatgggacccactcagtcaagatcacaggatggggagaggagacgctgccagatggaaggacgctcaaatactggactgcggccaactcctggggcccagcctggggcgagaggggccacttccgcatcgtgcgcggcgtcaatgagtgcgacatcgagagcttcgtgctgggcgtctggggccgcgtgggcatggaggacatgggtcatcactgaggctgcgggcaccacgcggggtccggcctgggatccaggctaagggccggcggaagaggccccaatggggcggtgaccccagcctcgcccgacagagcccggggcgcaggcgggcgccagggcgctaatcccggcgcgggttccgctgacgcagcgccccgcctgggagccgcgggcaggcgagactggcggagcccccagacctcccagtggggacggggcagggcctggcctgggaagagcacagctgcagatcccaggcctctggcgcccccactcaagactaccaaagccaggacacctcaagtctccagccccactaccccaccccactcctgtattcttttttttttttttttagacagggtcttgctccgttgcccaggttggagtgcagtggcccatcagggctcactgtaacctccgactcctgggttcaagtgaccctcccacctcagcctctcaagtagctgggactacaggtgcaccaccacacctggctaatttttgtattttttgtaaagaggggggtctcactgtgttgcccaggctggtctcgaactcctgggctcaagcggtccacctgcctccgcctcccaaagtgctgggattgcaggcatgagccactgcacccagccctgtattcttattcttcagatatttatttttcttttcactgttttaaaataaaaccaaagtattgataa

SEQ ID NO: 7706 - DNA, 2285 bp, Homo sapiens
cacagtctcactctcctgcagccgcccaagtcgatcacctctcacctggattcctgctgtggcctcctcactgtgggtgctccatgcatctgccccttgccctgcttcccagggtatttttaaggtagacccataggatatgcggatgaactggatcagcatgggaaaggaagtcagcggggactgccaggtttggggcccaaactccaggaaggatagagttgccgttttctgagaactgtagggggaataagtgaggggggtcaggaattcggttcagggagtgttttggttcagggtagtgatgttgagtagccgtgagatccttgactctggtgttcaggcagagatctgggccacagatataaacttgagaatcatgaactagacgttgacatttaaagccaccaggctggatgggatcacctagagattctcccacagtcacttgcacagactccctggcccatgttaacctccgaggccacattccttcaaagtatccccagtcccccacttaccctttccttctctccttttctcaccagcacctgccaggagaacaggcagtggcagtgtgaccaagaaccatgcctggtggatccagacatgatcaaagccatcaaccagggcaactatggctggcaggctgggaaccacagcgccttctggggcatgaccctggatgagggcattcgctaccgcctgggcaccatccgcccatcttcctcggtcatgaacatgcatgaaatttatacagtgctgaacccaggggaggtgcttcccacagccttcgaggcctctgagaagtggcccaacctgattcatgagcctcttgaccaaggcaactgtgcaggctcctgggccttctccacagcagctgtggcatccgatcgtgtctcaatccattctctgggacacatgacgcctgtcctgtcgccccagaacctgctgtcttgtgacacccaccagcagcagggctgccgcggtgggcgtctcgatggtgcctggtggttcctgcgtcgccgaggggtggtgtctgaccactgctaccccttctcgggccgtgaacgagacgaggctggccctgcgcccccctgtatgatgcacagccgagccatgggtcggggcaagcgccaggccactgcccactgccccaacagctatgttaataacaatgacatctaccaggtcactcctgtctaccgcctcggctccaacgacaaggagatcatgaaggagctgatggagaatggccctgtccaagccctcatggaggtgcatgaggacttcttcctatacaagggaggcatctacagccacacgccagtgagccttgggaggccagagagataccgccggcatgggacccactcagtcaagatcacaggatggggagaggagacgctgccagatggaaggacgctcaaatactggactgcggccaactcctggggcccagcctggggcgagaggggccacttccgcatcgtgcgcggcgtcaatgagtgcgacatcgagagcttcgtgctgggcgtctggggccgcgtgggcatggaggacatgggtcatcactgaggctgcgggcaccacgcggggtccggcctgggatccaggctaagggccggcggaagaggccccaatggggcggtgaccccagcctcgcccgacagagcccggggcgcaggcgggcgccagggcgctaatcccggcgcgggttccgctgacgcagcgccccgcctgggagccgcgggcaggcgagactggcggagcccccagacctcccagtggggacggggcagggcctggcctgggaagagcacagctgcagatcccaggcctctggcgcccccactcaagactaccaaagccaggacacctcaagtctccagccccactaccccaccccactcctgtattcttttttttttttttttagacagggtcttgctccgttgcccaggttggagtgcagtggcccatcagggctcactgtaacctccgactcctgggttcaagtgaccctcccacctcagcctctcaagtagctgggactacaggtgcaccaccacacctggctaatttttgtattttttgtaaagaggggggtctcactgtgttgcccaggctggtctcgaactcctgggctcaagcggtccacctgcctccgcctcccaaagtgctgggattgcaggcatgagccactgcacccagccctgtattcttattcttcagatatttatttttcttttcactgttttaaaataaaaccaaagtattgataa

SEQ ID NO: 7707 - DNA, 1783 bp, Homo sapiens
  misc_feature (1562)..(1562): n is a, c, g, or t
agcgtccggcggtcgcagagccaggaggcggaggcgcgcgggccagcctgggccccagcccacaccttcaccagggcccaggagccaccatgtggcgatgtccactggggctactgctgttgctgccgctggctggccacttggctctgggtgcccagcagggtcgtgggcgccgggagctagcaccgggtctgcacctgcggggcatccgggacgcgggaggccggtactgccaggagcaggacctgtgctgccgcggccgtgccgacgactgtgccctgccctacctgggcgccatctgttactgtgacctcttctgcaaccgcacggtctccgactgctgccctgacttctgggacttctgcctcggcgtgccacccccttttcccccgatccaaggatgtatgcatggaggtcgtatctatccagtcttgggaacgtactgggacaactgtaaccgttgcacctgccaggagaacaggcagtggcagtgtgaccaagaaccatgcctggtggatccagacatgatcaaagccatcaaccagggcaactatggctggcaggctgggaaccacagcgccttctggggcatgaccctggatgagggcattcgctaccgcctgggcaccatccgcccatcttcctcggtcatgaacatgcatgaaatttatacagtgctgaacccaggggaggtgcttcccacagccttcgaggcctctgagaagtggcccaacctgattcatgagcctcttgaccaaggcaactgtgcaggctcctgggccttctccacagcagctgtggcatccgatcgtgtctcaatccattctctgggacacatgacgcctgtcctgtcgccccagaacctgctgtcttgtgacacccaccagcagcagggctgccgcggtgggcgtctcgatggtgcctggtggttcctgcgtcgccgaggggtggtgtctgaccactgctaccccttctcgggccgtgaacgagacgaggctggccctgcgcccccctgtatgatgcacagccgagccatgggtcggggcaagcgccaggccactgcccactgccccaacagctatgttaataacaatgacatctaccaggtcactcctgtctaccgcctcggctccaacgacaaggagatcatgaaggagctgatggagaatggccctgtccaagccctcatggaggtgcatgaggacttcttcctatacaagggaggcatctacagccacacgccagtgagccttgggaggccagagagataccgccggcatgggacccactcagtcaagatcacaggatggggagaggagacgctgccagatggaaggacgctcaaatactggactgcggccaactcctggggcccagcctggggcgagaggggccacttccgcatcgtgcgcggcgtcaatgagtgcgacatcgagagcttcgtgctgggcgtctggggccgcgtgggcatggaggacatgggtcatcactgaggctgcgggcaccacgcggggtccggcctgggatcagctaggcgcgagaggccatgggcggtgacccgnctcgccgaagagccggcggagcggcgcaggccctaaccgggcggtccgctgaccagccgctggagcgcggcggagattgtgggccaacccaggggggccggcgcggggagacagggtcagctgggcccccaaaagggcattcccacccccgtttttttggcgccccgggggcgcaggccagccccctccacttggtggcccgatttttcttgtattactat

SEQ ID NO: 7708 - DNA, 542 bp, Homo sapiens
aagctgtacggccggaatctaggatgcggcccccagacctcccagtggggacggggcagggcctggcctgggaagagcacagctgcagatcccaggcctctggcgcccccactcaagactaccaaagccaggacacctcaagtctccagccccactaccccaccccactcctgtattcttttttttttttttttagacagggtcttgctccgttgcccaggttggagtgcagtggcccatcagggctcactgtaacctccgactcctgggttcaagtgaccctcccacctcagcctctcaagtagctgggactacaggtgcaccaccacacctggctaatttttgtattttttgtaaagaggggggtctcactgtgttgcccaggctggtctcgaactcctgggctcaagcggtccacctgcctccgcctcccaaagtgctgggattgcaggcatgagccactgcacccagccctgtattcttattcttcagatatttatttttcttttcactgttttaaaataaaaccaaagtattgataa

SEQ ID NO: 7709 - DNA, 2200 bp, Homo sapiens
agcgtccggcggtcgcagagccaggaggcggaggcgcgcgggccagcctgggccccagcccacaccttcaccagggcccaggagccaccatgtggcgatgtccactggggctactgctgttgctgccgctggctggccacttggctctgggtgcccagcagggtcgtgggcgccgggagctagcaccgggtctgcacctgcggggcatccgggacgcgggaggccggtactgccaggagcaggacctgtgctgccgcggccgtgccgacgactgtgccctgccctacctgggcgccatctgttactgtgacctcttctgcaaccgcacggtctccgactgctgccctgacttctgggacttctgcctcggcgtgccacccccttttcccccgatccaaggatgtatgcatggaggtcgtatctatccagtcttgggaacgtactgggacaactgtaaccgttgcacctgccaggagaacaggcagtggcagtgtgaccaagaaccatgcctggtggatccagacatgatcaaagccatcaaccagggcaactatggctggcaggctgggaaccacagcgccttctggggcatgaccctggatgagggcattcgctaccgcctgggcaccatccgcccatcttcctcggtcatgaacatgcatgaaatttatacagtgctgaacccaggggaggtgcttcccacagccttcgaggcctctgagaagtggcccaacctgattcatgagcctcttgaccaaggcaactgtgcaggctcctgggccttctccacagcagctgtggcatccgatcgtgtctcaatccattctctgggacacatgacgcctgtcctgtcgccccagaacctgctgtcttgtgacacccaccagcagcagggctgccgcggtgggcgtctcgatggtgcctggtggttcctgcgtcgccgaggggtggtgtctgaccactgctaccccttctcgggccgtgaacgagacgaggctggccctgcgcccccctgtatgatgcacagccgagccatgggtcggggcaagcgccaggccactgcccactgccccaacagctatgttaataacaatgacatctaccaggtcactcctgtctaccgcctcggctccaacgacaaggagatcatgaaggagctgatggagaatggccctgtccaagccctcatggaggtgcatgaggacttcttcctatacaagggaggcatctacagccacacgccagtgagccttgggaggccagagagataccgccggcatgggacccactcagtcaagatcacaggatggggagaggagacgctgccagatggaaggacgctcaaatactggactgcggccaactcctggggcccagcctggggcgagaggggccacttccgcatcgtgcgcggcgtcaatgagtgcgacatcgagagcttcgtgctgggcgtctggggccgcgtgggcatggaggacatgggtcatcactgaggctgcgggcaccacgcggggtccggcctgggatccaggctaagggccggcggaagaggccccaatggggcggtgaccccagcctcgcccgacagagcccggggcgcaggcgggcgccagggcgctaatcccggcgcgggttccgctgacgcagcgccccgcctgggagccgcgggcaggcgagactggcggagcccccagacctcccagtggggacggggcagggcctggcctgggaagagcacagctgcagatcccaggcctctggcgcccccactcaagactaccaaagccaggacacctcaagtctccagccccactaccccaccccactcctgtattcttttttttttttttttagacagggtcttgctccgttgcccaggttggagtgcagtggcccatcagggctcactgtaacctccgactcctgggttcaagtgaccctcccacctcagcctctcaagtagctgggactacaggtgcaccaccacacctggctaatttttgtattttttgtaaagaggggggtctcactgtgttgcccaggctggtctcgaactcctgggctcaagcggtccacctgcctccgcctcccaaagtgctgggattgcaggcatgagccactgcacccagccctgtattcttattcttcagatatttatttttcttttcactgttttaaaataaaaccaaagtattgataa

SEQ ID NO: 7710 - DNA, 2190 bp, Homo sapiens
agggctgtacgcccggaagttcgggatgcgcgggccagcctgggcccagcccacaccttcaccaggcccaggagccaccatgtggcgatgtccactggggctactgctgttgctgccgctggctggccacttggctctgggtgcccagcagggtcgtgggcgccgggagctagcaccgggtctgcacctgcggggcatccgggacgcgggaggccggtactgccaggagcaggacctgtgctgccgcggccgtgccgacgactgtgccctgccctacctgggcgccatctgttactgtgacctcttctgcaaccgcacggtctccgactgctgccctgacttctgggacttctgcctcggcgtgccacccccttttcccccgatccaaggatgtatgcatggaggtcgtatctatccagtcttgggaacgtactgggacaactgtaaccgttgcacctgccaggagaacaggcagtggcagtgtgaccaagaaccatgcctggtggatccagacatgatcaaagccatcaaccagggcaactatggctggcaggctgggaaccacagcgccttctggggcatgaccctggatgagggcattcgctaccgcctgggcaccatccgcccatcttcctcggtcatgaacatgcatgaaatttatacagtgctgaacccaggggaggtgcttcccacagccttcgaggcctctgagaagtggcccaacctgattcatgagcctcttgaccaaggcaactgtgcaggctcctgggccttctccacagcagctgtggcatccgatcgtgtctcaatccattctctgggacacatgacgcctgtcctgtcgccccagaacctgctgtcttgtgacacccaccagcagcagggctgccgcggtgggcgtctcgatggtgcctggtggttcctgcgtcgccgaggggtggtgtctgaccactgctaccccttctcgggccgtgaacgagacgaggctggccctgcgcccccctgtatgatgcacagccgagccatgggtcggggcaagcgccaggccactgcccactgccccaacagctatgttaataacaatgacatctaccaggtcactcctgtctaccgcctcggctccaacgacaaggagatcatgaaggagctgatggagaatggccctgtccaagccctcatggaggtgcatgaggacttcttcctatacaagggaggcatctacagccacacgccagtgagccttgggaggccagagagataccgccggcatgggacccactcagtcaagatcacaggatggggagaggagacgctgccagatggaaggacgctcaaatactggactgcggccaactcctggggcccagcctggggcgagaggggccacttccgcatcgtgcgcggcgtcaatgagtgcgacatcgagagcttcgtgctgggcgtctggggccgcgtgggcatggaggacatgggtcatcactgaggctgcgggcaccacgcggggtccggcctgggatccaggctaagggccggcggaagaggccccaatggggcggtgaccccagcctcgcccgacagagcccggggcgcaggcgggcgccagggcgctaatcccggcgcgggttccgctgacgcagcgccccgcctgggagccgcgggcaggcgagactggcggagcccccagacctcccagtggggacggggcagggcctggcctgggaagagcacagctgcagatcccaggcctctggcgcccccactcaagactaccaaagccaggacacctcaagtctccagccccactaccccaccccactcctgtattcttttttttttttttttagacagggtcttgctccgttgcccaggttggagtgcagtggcccatcagggctcactgtaacctccgactcctgggttcaagtgaccctcccacctcagcctctcaagtagctgggactacaggtgcaccaccacacctggctaatttttgtattttttgtaaagaggggggtctcactgtgttgcccaggctggtctcgaactcctgggctcaagcggtccacctgcctccgcctcccaaagtgctgggattgcaggcatgagccactgcacccagccctgtattcttattcttcagatatttatttttcttttcactgttttaaaataaaaccaaagtattgataa

SEQ ID NO: 7711 - DNA, 1832 bp, Homo sapiens
taccggtgttatcgatgcacccccccgatcagatgtatgcatggaggtcgtatctatccagtcttgggaacgtactgggacaactgtaaccgttgcacctgccaggagaacaggcagtggcagtgtgaccaagaaccatgcctggtggatccagacatgatcaaagccatcaaccagggcaactatggctggcaggctgggaaccacagcgccttctggggcatgaccctggatgagggcattcgctaccgcctgggcaccatccgcccatcttcctcggtcatgaacatgcatgaaatttatacagtgctgaacccaggggaggtgcttcccacagccttcgaggcctctgagaagtggcccaacctgattcatgagcctcttgaccaaggcaactgtgcaggctcctgggccttctccacagcagctgtggcatccgatcgtgtctcaatccattctctgggacacatgacgcctgtcctgtcgccccagaacctgctgtcttgtgacacccaccagcagcagggctgccgcggtgggcgtctcgatggtgcctggtggttcctgcgtcgccgaggggtggtgtctgaccactgctaccccttctcgggccgtgaacgagacgaggctggccctgcgcccccctgtatgatgcacagccgagccatgggtcggggcaagcgccaggccactgcccactgccccaacagctatgttaataacaatgacatctaccaggtcactcctgtctaccgcctcggctccaacgacaaggagatcatgaaggagctgatggagaatggccctgtccaagccctcatggaggtgcatgaggacttcttcctatacaagggaggcatctacagccacacgccagtgagccttgggaggccagagagataccgccggcatgggacccactcagtcaagatcacaggatggggagaggagacgctgccagatggaaggacgctcaaatactggactgcggccaactcctggggcccagcctggggcgagaggggccacttccgcatcgtgcgcggcgtcaatgagtgcgacatcgagagcttcgtgctgggcgtctggggccgcgtgggcatggaggacatgggtcatcactgaggctgcgggcaccacgcggggtccggcctgggatccaggctaagggccggcggaagaggccccaatggggcggtgaccccagcctcgcccgacagagcccggggcgcaggcgggcgccagggcgctaatcccggcgcgggttccgctgacgcagcgccccgcctgggagccgcgggcaggcgagactggcggagcccccagacctcccagtggggacggggcagggcctggcctgggaagagcacagctgcagatcccaggcctctggcgcccccactcaagactaccaaagccaggacacctcaagtctccagccccactaccccaccccactcctgtattcttttttttttttttttagacagggtcttgctccgttgcccaggttggagtgcagtggcccatcagggctcactgtaacctccgactcctgggttcaagtgaccctcccacctcagcctctcaagtagctgggactacaggtgcaccaccacacctggctaatttttgtattttttgtaaagaggggggtctcactgtgttgcccaggctggtctcgaactcctgggctcaagcggtccacctgcctccgcctcccaaagtgctgggattgcaggcatgagccactgcacccagccctgtattcttattcttcagatatttatttttcttttcactgttttaaaataaaaccaaagtattgataa

SEQ ID NO: 7712 - DNA, 2626 bp, Homo sapiens
agctgacatgccctgtaggggagcgggagggagggacacaccatcaacaagtaaatcagtgagaggatgaaagatggcgatgggtgccgggaaggaacaaggagacagcgactggagagggtggtcaggagttgccagtggagggaagacctgaagggtgagagggacggggaaagacaccctaggaagagggagcagcgtcacaaaggccctgagaggctgaaaggtttgggcgggttccaggaacacaggcggccagggaggtggagcccacacctcaacacacaactacccgtgaagaacgtggagcgatccgtgtagatccttgtagaaggttctctcagagggccatgtcactgacctgtcagtcagcccacagcctcctcccagtccccagatagctgaccactccctccttgaaattctctcctctctcagcttgtgcaacaccaacctccggtggcaggaaaaactattattattctcttgtgaaaattaaaacttaaccatcaacatagagctgttactggtttgaaggaagccattgacgctgtgtcaaaggctagagcagaaaacagtggcatgcagtgtcaaaggtcaaagtcaacacttctcggactggcacagggaagataggatttcactgtgttgtccaagctggagtgcagtggctcaatcacaggtcatggcagcctcgacctcctggggttcaggtgatcctcccatctcagcctcccgagtagctggggctacaggtcttttgctccacgtgatattgactatgatcatctggagggtccgtggttccagtgacttagcatcaaagacggcctaacacacacgtctggtgcctctgctgggatggctgaagcagccggaggctggccagcacctgccaggagaacaggcagtggcagtgtgaccaagaaccatgcctggtggatccagacatgatcaaagccatcaaccagggcaactatggctggcaggctgggaaccacagcgccttctggggcatgaccctggatgagggcattcgctaccgcctgggcaccatccgcccatcttcctcggtcatgaacatgcatgaaatttatacagtgctgaacccaggggaggtgcttcccacagccttcgaggcctctgagaagtggcccaacctgattcatgagcctcttgaccaaggcaactgtgcaggctcctgggccttctccacagcagctgtggcatccgatcgtgtctcaatccattctctgggacacatgacgcctgtcctgtcgccccagaacctgctgtcttgtgacacccaccagcagcagggctgccgcggtgggcgtctcgatggtgcctggtggttcctgcgtcgccgaggggtggtgtctgaccactgctaccccttctcgggccgtgaacgagacgaggctggccctgcgcccccctgtatgatgcacagccgagccatgggtcggggcaagcgccaggccactgcccactgccccaacagctatgttaataacaatgacatctaccaggtcactcctgtctaccgcctcggctccaacgacaaggagatcatgaaggagctgatggagaatggccctgtccaagccctcatggaggtgcatgaggacttcttcctatacaagggaggcatctacagccacacgccagtgagccttgggaggccagagagataccgccggcatgggacccactcagtcaagatcacaggatggggagaggagacgctgccagatggaaggacgctcaaatactggactgcggccaactcctggggcccagcctggggcgagaggggccacttccgcatcgtgcgcggcgtcaatgagtgcgacatcgagagcttcgtgctgggcgtctggggccgcgtgggcatggaggacatgggtcatcactgaggctgcgggcaccacgcggggtccggcctgggatccaggctaagggccggcggaagaggccccaatggggcggtgaccccagcctcgcccgacagagcccggggcgcaggcgggcgccagggcgctaatcccggcgcgggttccgctgacgcagcgccccgcctgggagccgcgggcaggcgagactggcggagcccccagacctcccagtggggacggggcagggcctggcctgggaagagcacagctgcagatcccaggcctctggcgcccccactcaagactaccaaagccaggacacctcaagtctccagccccactaccccaccccactcctgtattcttttttttttttttttagacagggtcttgctccgttgcccaggttggagtgcagtggcccatcagggctcactgtaacctccgactcctgggttcaagtgaccctcccacctcagcctctcaagtagctgggactacaggtgcaccaccacacctggctaatttttgtattttttgtaaagaggggggtctcactgtgttgcccaggctggtctcgaactcctgggctcaagcggtccacctgcctccgcctcccaaagtgctgggattgcaggcatgagccactgcacccagccctgtattcttattcttcagatatttatttttcttttcactgttttaaaataaaaccaaagtattgataa

SEQ ID NO: 7713 - DNA, 1897 bp, Homo sapiens
agcgtccggcggtcgcagagccaggaggcggaggcgcgcgggccagcctgggccccagcccacaccttcaccagggcccaggagccaccatgtggcgatgtccactggggctactgctgttgctgccgctggctggccacttggctctgggtgcccagcagggtcgtgggcgccgggagctagcaccgggtctgcacctgcggggcatccgggacgcgggaggccggtactgccaggagcaggacctgtgctgccgcggccgtgccgacgactgtgccctgccctacctgggcgccatctgttactgtgacctcttctgcaaccgcacggtctccgactgctgccctgacttctgggacttctgcctcggcgtgccacccccttttcccccgatccaaggatgtatgcatggaggtcgtatctatccagtcttgggaacgtactgggacaactgtaaccgttgcacctgccaggagaacaggcagtggcagtgtgaccaagaaccatgcctggtggatccagacatgatcaaagccatcaaccagggcaactatggctggcaggctgggaaccacagcgccttctggggcatgaccctggatgagggcattcgctaccgcctgggcaccatccgcccatcttcctcggtcatgaacatgcatgaaatttatacagtgctgaacccaggggaggtgcttcccacagccttcgaggcctctgagaagtggcccaacctgattcatgagcctcttgaccaaggcaactgtgcaggctcctgggccttctccacagcagctgtggcatccgatcgtgtctcaatccattctctgggacacatgacgcctgtcctgtcgccccagaacctgctgtcttgtgacacccaccagcagcagggctgccgcggtgggcgtctcgatggtgcctggtggttcctgcgtcgccgaggggtggtgtctgaccactgctaccccttctcgggccgtgaacgagacgaggctggccctgcgcccccctgtatgatgcacagccgagccatgggtcggggcaagcgccaggccactgcccactgccccaacagctatgttaataacaatgacatctaccaggtcactcctgtctaccgcctcggctccaacgacaaggagatcatgaaggagctgatggagaatggccctgtccaagccctcatggaggtgcatgaggacttcttcctatacaagggaggcatctacagccacacgccagtgagccttgggaggccagagagataccgccggcatgggacccactcagtcaagatcacaggatggggagaggagacgctgccagatggaaggacgctcaaatactggactgcggccaactcctggggcccagcctggggcgagaggggccacttccgcatcgtgcgcggcgtcaatgagtgcgacatcgagagcttcgtgctgggcgtctggggccgcgtgggcatggaggacatgggtcatcactgaggctgcgggcaccacgcggggtccggcctgggatccaggctaagggccggcggaagaggccccaatggggcggtgaccccagcctcgcccgacagagcccggggcgcaggcgggcgccagggcgctaatcccggcgcgggttccgctgacgcagcgccccgcctgggagccgcgggcaggcgagactggcggagcccccagacctcccagtggggacggggcagggcctggcctgggaagagcacagctgcagatcccaggcctctggcgcccccactcaagactaccaaagccaggacacctcaagtctccagccccactaccccaccccacccctgtattcttattcttcagatatttatttttcttttcactgttttaaaataaaaccaaagtattgataa

SEQ ID NO: 7714 - DNA, 2085 bp, Homo sapiens
agcgtccggcggtcgcagagccaggaggcggaggcgcgcgggccagcctgggccccagcccacaccttcaccagggcccaggagccaccatgtggcgatgtccactggggctactgctgttgctgccgctggctggccacttggctctgggtgcccagcagggtcgtgggcgccgggagctagcaccgggtctgcacctgcggggcatccgggacgcgggaggccggtactgccaggagcaggacctgtgctgccgcggccgtgccgacgactgtgccctgccctacctgggcgccatctgttactgtgacctcttctgcaaccgcacggtctccgactgctgccctgacttctgggacttctgcctcggcgtgccacccccttttcccccgatccaaggatgtatgcatggaggtcgtatctatccagtcttgggaacgtactgggacaactgtaaccgttgcacctgccaggagaacaggcagtggcagtgtgaccaagaaccatgcctggtggatccagacatgatcaaagccatcaaccagggcaactatggacagtgctgaacccaggggaggtgcttcccacagccttcgaggcctctgagaagtggcccaacctgattcatgagcctcttgaccaaggcaactgtgcaggctcctgggccttctccacagcagctgtggcatccgatcgtgtctcaatccattctctgggacacatgacgcctgtcctgtcgccccagaacctgctgtcttgtgacacccaccagcagcagggctgccgcggtgggcgtctcgatggtgcctggtggttcctgcgtcgccgaggggtggtgtctgaccactgctaccccttctcgggccgtgaacgagacgaggctggccctgcgcccccctgtatgatgcacagccgagccatgggtcggggcaagcgccaggccactgcccactgccccaacagctatgttaataacaatgacatctaccaggtcactcctgtctaccgcctcggctccaacgacaaggagatcatgaaggagctgatggagaatggccctgtccaagccctcatggaggtgcatgaggacttcttcctatacaagggaggcatctacagccacacgccagtgagccttgggaggccagagagataccgccggcatgggacccactcagtcaagatcacaggatggggagaggagacgctgccagatggaaggacgctcaaatactggactgcggccaactcctggggcccagcctggggcgagaggggccacttccgcatcgtgcgcggcgtcaatgagtgcgacatcgagagcttcgtgctgggcgtctggggccgcgtgggcatggaggacatgggtcatcactgaggctgcgggcaccacgcggggtccggcctgggatccaggctaagggccggcggaagaggccccaatggggcggtgaccccagcctcgcccgacagagcccggggcgcaggcgggcgccagggcgctaatcccggcgcgggttccgctgacgcagcgccccgcctgggagccgcgggcaggcgagactggcggagcccccagacctcccagtggggacggggcagggcctggcctgggaagagcacagctgcagatcccaggcctctggcgcccccactcaagactaccaaagccaggacacctcaagtctccagccccactaccccaccccactcctgtattcttttttttttttttttagacagggtcttgctccgttgcccaggttggagtgcagtggcccatcagggctcactgtaacctccgactcctgggttcaagtgaccctcccacctcagcctctcaagtagctgggactacaggtgcaccaccacacctggctaatttttgtattttttgtaaagaggggggtctcactgtgttgcccaggctggtctcgaactcctgggctcaagcggtccacctgcctccgcctcccaaagtgctgggattgcaggcatgagccactgcacccagccctgtattcttattcttcagatatttatttttcttttcactgttttaaaataaaaccaaagtattgataa

SEQ ID NO: 7715 - DNA, 245 bp, Homo sapiens
gtgattgaaactgagagggtgagaggaatatgcaaggtcagaaagcaacgggtcacccaaattacatgtgccttcttggctattgcaaggcctctgaggacaatcttttattcatagagaaatggagaaaaactggagaatcgcttgaacctgagaggccaaggttgcagtgagctgagatcgtgacattgcactttagcctcctggagacagagcgagactccctccctccccccaaaaaaaaa

SEQ ID NO: 7716 - DNA, 428 bp, Homo sapiens
cattcaatcacacaaaatagaattaacattacattaatattgattgatttaattttagcatatttatgatgtttgttaatggtatattaatacttaaccagtcctctattttatttgctttccatcttttgctatttgaaaccatactgaccaggcacagtggctcatgcctgtaatcccagcactttgggaggtcgaggtgggcagctcacctgaggtccggggtttaagaccagcctggcccacatggtgaaaccccatctgtactaaaaatacaaaaattagctggacgtggtggtgcatgcctgtagtcccagctactgaggaggctgaggcaggagaattgcttgaatccaggagatggaggttgcagtgagctgagatcacaccactgcactccaggctgggtgacagagtgagactccaac

SEQ ID NO: 7717 - DNA, 5304 bp, Homo sapiens
ggctgggctgcgaatagcgtgttcctctccggcggaacacacacacccggccttggggctgtctcctgaagctccctcctccacggagagcgctgagcgccgccgggaattccatcccaccgtgggcacgcagtctttggaggtcccgggcgcagcacgctcggtgtccccacactgcagcaagacagagaccccgcgggaaccttgagcttggaacaacccttgagcctctgcagtcggaagagtgggcgcagcagcccagcggaggccaggcgcgcaacctcgggcgccggggcaaggagagagtgcagggaggcgcagctcaggcgcccggctcaggagcgggaggaagttctcgcggcgccgggagcgcggtggacgcgccctgggcgcacgcccaggcagccttctccctggccctcgggactgtcctcgggcggcaaggaggagcttgctggagtcttagaggccatccagagccagcgagcaggagcgctgcgtctcccgcctcagctaggaagggggagtggcgctggcaggctggagctgggaacccagcgagcgcctgaccttcctcctcctcttcctgaccctcttcgcgtcttgggctccggaggaaggttctagcggctgcaggaggtccccagacccattttcctagaaggctggtgatggatctgctgctcctgccgccgccggggcacttggagcgcaccggcggcgcgtgagctgggctttgctctccaccgccctgggcaaaccccgggccagccccgcctggcacctttgcctgagtccctttcggttcccgacccaaagccaccagcgtccagggagggaggaggaggtggtcctcaggtgcagccccgccgagatgtccgcgcagagcctgctccacagcgtcttctcctgttcctcgcccgcttcaagtagcgcggcctcggccaagggcttctccaagaggaagctgcgccagacccgcagcctggacccggccctgatcggcggctgcgggagcgacgaggcgggcgcggagggcagtgcgcggggagccacggcgggccgcctctactccccatcactcccagccgagagtctcggccctcgcttggcgtcctcttcccggggtccgccccccagggccaccaggctaccgcctcctggacctctttgctcgtccttctccacacccagcaccccgcaggagaagtcaccatccggcagctttcactttgactatgaggttcccctgggtcgcggcggcctcaagaagagcatggcctgggacctgccttctgtcctggccgggccagccagtagccgaagcgcttccagcatcctctgttcatccgggggaggccccaatggcatcttcgcttctcctaggaggtggctccagcagaggaagttccagtccccacccgacagtcgcgggcacccctacgtcgtgtggaaatccgagttggagttgtatgatcttcagatcttaggcacaaaaccaccgatgaattccgatacacatcgtaactttgaccccaccgcaacccttagaaatcagggtgatttcacctggaacagcatgtcaggccgcagtgtgcggctgaggtcagtccccatccagagtctctcagagctggagagggcccggctgcaggaagtgcctttttatcagttgcaacaggactgtgacctgagctgtcagatcaccattcccaaagatggacaaaagagaaagaaatctttaagaaagaaactggattcactaggaaaggagaaaaacaaagacaaagaattcatcccacaggcatttggaatgcccttatcccaagtcattgcgaatgacagggcctataaactcaagcaggacttgcagagggacgagcagaaagatgcatctgactttgtggcttccctcctcccatttggaaataaaagacaaaacaaagaactctcaagcagtaactcatctctcagctcaacctcagaaacaccgaatgagtcaacgtccccaaacaccccggaaccggctcctcgggctaggaggaggggtgccatgtcagtggattctatcaccgatcttgatgacaatcagtctcgactactagaagctttacaactttccttgcctgctgaggctcaaagtaaaaaggaaaaagccagagataagaaactcagtctgaatcctatttacagacaggtccctaggctggtggacagctgctgtcagcacctagaaaaacatggcctccagacagtggggatattccgagttggaagctcaaaaaagagagtgagacaattacgtgaggaatttgaccgtgggattgatgtctctctggaggaggagcacagtgttcatgatgtggcagccttgctgaaagagttcctgagggacatgccagacccccttctcaccagggagctgtacacagctttcatcaacactctcttgttggagccggaggaacagctgggcaccttgcagctcctcatataccttctacctccctgcaactgcgacaccctccaccgcctgctacagttcctctccatcgtggccaggcatgccgatgacaacatcagcaaagatgggcaagaggtcactgggaataaaatgacatctctaaacttagccaccatatttggacccaacctgctgcacaagcagaagtcatcagacaaagaattctcagttcagagttcagcccgggctgaggagagcacggccatcatcgctgttgtgcaaaagatgattgaaaattatgaagccctgttcatggttcccccagatctccagaacgaagtgctgatcagcctgttagagaccgatcctgatgtcgtggactatttactcagaagaaaggcttcccaatcatcaacaagttctgtgcttccggctgcagtgcaggcctgcccacagtaccctgccagcatgtttacgccctgacctggagggaccagctaaggaagccctgacatgctgcagtcggaagtttccttttccgtgggagggaggcattcatctacagactccaacaaggcctccagcggagacatctccccttatgacaacaactccccagtgctgtctgagcgctccctgctggctatgcaagaggacgcggccccggggggctcggagaagctttacagagtgccagggcagtttatgctggtgggccacttgtcgtcgtcaaagtcaagggaaagttctcctggaccaaggcttgggaaagatctgtcagaggagcctttcgatatctggggaacttggcattcaacattaaaaagcggatccaaagacccaggaatgacaggttcctctggagacatttttgaaagcagctccctaagagcggggccctgctccctttctcaagggaacctgtccccaaattggcctcggtggcaggggagccccgcagagctggacagcgacacgcagggggctcggaggactcaggccgcagcccccgcgacggagggcagggcccaccctgcggtgtcgcgcgcctgcagcacgccccacgtccaggtggcagggaaagccgagcggcccacggccaggtcggagcagtacttgaccctgagcggcgcccacgacctcagcgagagtgagctggatgtggccgggctgcagagccgggccacacctcagtgccaaagaccccatgggagtgggagggatgacaagcggcccccgcctccatacccgggcccagggaagcccgcggcagcggcagcctggatccaggggcccccggaaggcgtggagacacccacggaccagggaggccaagcagccgagcgagagcagcaggtcacgcagaaaaaactgagcagcgccaactccctgccagcgggcgagcaggacagtccgcgcctgggggacgctggctggctcgactggcagagagagcgctggcagatctgggagctcctgtcgaccgacaaccccgatgccctgcccgagacgctggtctgagcccgcacccagccgagccccccctgccccgagccccccgccctccagcccaggggggaccgtgggtggtggccactggcacacttagtgttcttctttcacacttctcaaaagtgacacaagagaaatccagttcacctacagaggtagagcactcacgcccccgccattgagaataaggttccattgcgtagccagccttaggaaaaacaaacagaacccaaaccagatggcaatgtccaatctaaaaacgtccctcttggctctataatataagatacaactcttgcttggtatagcctaaccgtatttatgtgtcttcggttttgactattgtgtattctgtaacagattatgtataatcatatatgatatattcacaaagagaaaacaaaaggaacttttaaaaaaaaaatcacttcacttatattaagcaatgagatatactaaacaatgagattctatagaatgttctagaatgtgcacaagcgggtttctgtgcttttgccatagctttataactggggataacccttccttcgataccaaacactaacaagaggaagcagaatatgagaagccatatttttacataggagtcagatacaaaaagaaaaatcactgaatgcttttagatattgaatacgttttcaggaaaatgctaaatctgatagattacgaaatatatttttagaacttgtttagaaaggattcagttaaccaaacaagaaaaaggcagtgcctcacaaagaaattaagaagttgtccgtcccacgttacatcaaattcagttttatataggccatatataatatatatttataatgtataatttttatgtatttttcaaaactacaaactggaatccaactataaagtgtttaagaatctacacagaatattcaaattatagaacatgttttttccctttgccccataatcagtatttgccaaattacatgcaattccttaaaaactaaatcacatttggtaaaaggcctacagctttgtacttacattgtgccaaaggctgaggaaatgttttctttcgtaattttatgtgtattgtaaaatgttctaccgtactttagtagtttgaagtttttcaagtgcataactatttttgaccagcagatggcgatacgcttcagtattttatgcaattttttttcacttctgaagggaaagtgtattataaaaaaagattttttttttttttataaaacatgctactcttaattttcatgttggtgatgaaattcccagtggtgtttcttaaggttctatcttgtgccatgatgaataaaaagttaagcaaa

SEQ ID NO: 7718 - DNA, 5118 bp, Homo sapiens
ggctgggctgcgaatagcgtgttcctctccggcggaacacacacacccggccttggggctgtctcctgaagctccctcctccacggagagcgctgagcgccgccgggaattccatcccaccgtgggcacgcagtctttggaggtcccgggcgcagcacgctcggtgtccccacactgcagcaagacagagaccccgcgggaaccttgagcttggaacaacccttgagcctctgcagtcggaagagtgggcgcagcagcccagcggaggccaggcgcgcaacctcgggcgccggggcaaggagagagtgcagggaggcgcagctcaggcgcccggctcaggagcgggaggaagttctcgcggcgccgggagcgcggtggacgcgccctgggcgcacgcccaggcagccttctccctggccctcgggactgtcctcgggcggcaaggaggagcttgctggagtcttagaggccatccagagccagcgagcaggagcgctgcgtctcccgcctcagctaggaagggggagtggcgctggcaggctggagctgggaacccagcgagcgcctgaccttcctcctcctcttcctgaccctcttcgcgtcttgggctccggaggaaggttctagcggctgcaggaggtccccagacccattttcctagaaggctggtgatggatctgctgctcctgccgccgccggggcacttggagcgcaccggcggcgcgtgagctgggctttgctctccaccgccctgggcaaaccccgggccagccccgcctggcacctttgcctgagtccctttcggttcccgacccaaagccaccagcgtccagggagggaggaggaggtggtcctcaggtgcagccccgccgagatgtccgcgcagagcctgctccacagcgtcttctcctgttcctcgcccgcttcaagtagcgcggcctcggccaagggcttctccaagaggaagctgcgccagacccgcagcctggacccggccctgatcggcggctgcgggagcgacgaggcgggcgcggagggcagtgcgcggggagccacggcgggccgcctctactccccatcactcccagccgagagtctcggccctcgcttggcgtcctcttcccggggtccgccccccagggccaccaggctaccgcctcctggacctctttgctcgtccttctccacacccagcaccccgcaggagaagtcaccatccggcagctttcactttgactatgaggttcccctgggtcgcggcggcctcaagaagagcatggcctgggacctgccttctgtcctggccgggccagccagtagccgaagcgcttccagcatcctctgttcatccgggggaggccccaatggcatcttcgcttctcctaggaggtggctccagcagaggaagttccagtccccacccgacagtcgcgggcacccctacgtcgtgtggaaatccgagggtgatttcacctggaacagcatgtcaggccgcagtgtgcggctgaggtcagtccccatccagagtctctcagagctggagagggcccggctgcaggaagtgcctttttatcagttgcaacaggactgtgacctgagctgtcagatcaccattcccaaagatggacaaaagagaaagaaatctttaagaaagaaactggattcactaggaaaggagaaaaacaaagacaaagaattcatcccacaggcatttggaatgcccttatcccaagtcattgcgaatgacagggcctataaactcaagcaggacttgcagagggacgagcagaaagatgcatctgactttgtggcttccctcctcccatttggaaataaaagacaaaacaaagaactctcaagcagtaactcatctctcagctcaacctcagaaacaccgaatgagtcaacgtccccaaacaccccggaaccggctcctcgggctaggaggaggggtgccatgtcagtggattctatcaccgatcttgatgacaatcagtctcgactactagaagctttacaactttccttgcctgctgaggctcaaagtaaaaaggaaaaagccagagataagaaactcagtctgaatcctatttacagacaggtccctaggctggtggacagctgctgtcagcacctagaaaaacatggcctccagacagtggggatattccgagttggaagctcaaaaaagagagtgagacaattacgtgaggaatttgaccgtgggattgatgtctctctggaggaggagcacagtgttcatgatgtggcagccttgctgaaagagttcctgagggacatgccagacccccttctcaccagggagctgtacacagctttcatcaacactctcttgttggagccggaggaacagctgggcaccttgcagctcctcatataccttctacctccctgcaactgcgacaccctccaccgcctgctacagttcctctccatcgtggccaggcatgccgatgacaacatcagcaaagatgggcaagaggtcactgggaataaaatgacatctctaaacttagccaccatatttggacccaacctgctgcacaagcagaagtcatcagacaaagaattctcagttcagagttcagcccgggctgaggagagcacggccatcatcgctgttgtgcaaaagatgattgaaaattatgaagccctgttcatggttcccccagatctccagaacgaagtgctgatcagcctgttagagaccgatcctgatgtcgtggactatttactcagaagaaaggcttcccaatcatcaagccctgacatgctgcagtcggaagtttccttttccgtgggagggaggcattcatctacagactccaacaaggcctccagcggagacatctccccttatgacaacaactccccagtgctgtctgagcgctccctgctggctatgcaagaggacgcggccccggggggctcggagaagctttacagagtgccagggcagtttatgctggtgggccacttgtcgtcgtcaaagtcaagggaaagttctcctggaccaaggcttgggaaagatctgtcagaggagcctttcgatatctggggaacttggcattcaacattaaaaagcggatccaaagacccaggaatgacaggttcctctggagacatttttgaaagcagctccctaagagcggggccctgctccctttctcaagggaacctgtccccaaattggcctcggtggcaggggagccccgcagagctggacagcgacacgcagggggctcggaggactcaggccgcagcccccgcgacggagggcagggcccaccctgcggtgtcgcgcgcctgcagcacgccccacgtccaggtggcagggaaagccgagcggcccacggccaggtcggagcagtacttgaccctgagcggcgcccacgacctcagcgagagtgagctggatgtggccgggctgcagagccgggccacacctcagtgccaaagaccccatgggagtgggagggatgacaagcggcccccgcctccatacccgggcccagggaagcccgcggcagcggcagcctggatccaggggcccccggaaggcgtggagacacccacggaccagggaggccaagcagccgagcgagagcagcaggtcacgcagaaaaaactgagcagcgccaactccctgccagcgggcgagcaggacagtccgcgcctgggggacgctggctggctcgactggcagagagagcgctggcagatctgggagctcctgtcgaccgacaaccccgatgccctgcccgagacgctggtctgagcccgcacccagccgagccccccctgccccgagccccccgccctccagcccaggggggaccgtgggtggtggccactggcacacttagtgttcttctttcacacttctcaaaagtgacacaagagaaatccagttcacctacagaggtagagcactcacgcccccgccattgagaataaggttccattgcgtagccagccttaggaaaaacaaacagaacccaaaccagatggcaatgtccaatctaaaaacgtccctcttggctctataatataagatacaactcttgcttggtatagcctaaccgtatttatgtgtcttcggttttgactattgtgtattctgtaacagattatgtataatcatatatgatatattcacaaagagaaaacaaaaggaacttttaaaaaaaaaatcacttcacttatattaagcaatgagatatactaaacaatgagattctatagaatgttctagaatgtgcacaagcgggtttctgtgcttttgccatagctttataactggggataacccttccttcgataccaaacactaacaagaggaagcagaatatgagaagccatatttttacataggagtcagatacaaaaagaaaaatcactgaatgcttttagatattgaatacgttttcaggaaaatgctaaatctgatagattacgaaatatatttttagaacttgtttagaaaggattcagttaaccaaacaagaaaaaggcagtgcctcacaaagaaattaagaagttgtccgtcccacgttacatcaaattcagttttatataggccatatataatatatatttataatgtataatttttatgtatttttcaaaactacaaactggaatccaactataaagtgtttaagaatctacacagaatattcaaattatagaacatgttttttccctttgccccataatcagtatttgccaaattacatgcaattccttaaaaactaaatcacatttggtaaaaggcctacagctttgtacttacattgtgccaaaggctgaggaaatgttttctttcgtaattttatgtgtattgtaaaatgttctaccgtactttagtagtttgaagtttttcaagtgcataactatttttgaccagcagatggcgatacgcttcagtattttatgcaattttttttcacttctgaagggaaagtgtattataaaaaaagattttttttttttttataaaacatgctactcttaattttcatgttggtgatgaaattcccagtggtgtttcttaaggttctatcttgtgccatgatgaataaaaagttaagcaaa

SEQ ID NO: 7719 - DNA, 3633 bp, Homo sapiens
ggctgggctgcgaatagcgtgttcctctccggcggaacacacacacccggccttggggctgtctcctgaagctccctcctccacggagagcgctgagcgccgccgggaattccatcccaccgtgggcacgcagtctttggaggtcccgggcgcagcacgctcggtgtccccacactgcagcaagacagagaccccgcgggaaccttgagcttggaacaacccttgagcctctgcagtcggaagagtgggcgcagcagcccagcggaggccaggcgcgcaacctcgggcgccggggcaaggagagagtgcagggaggcgcagctcaggcgcccggctcaggagcgggaggaagttctcgcggcgccgggagcgcggtggacgcgccctgggcgcacgcccaggcagccttctccctggccctcgggactgtcctcgggcggcaaggaggagcttgctggagtcttagaggccatccagagccagcgagcaggagcgctgcgtctcccgcctcagctaggaagggggagtggcgctggcaggctggagctgggaacccagcgagcgcctgaccttcctcctcctcttcctgaccctcttcgcgtcttgggctccggaggaaggttctagcggctgcaggaggtccccagacccattttcctagaaggctggtgatggatctgctgctcctgccgccgccggggcacttggagcgcaccggcggcgcgtgagctgggctttgctctccaccgccctgggcaaaccccgggccagccccgcctggcacctttgcctgagtccctttcggttcccgacccaaagccaccagcgtccagggagggaggaggaggtggtcctcaggtgcagccccgccgagatgtccgcgcagagcctgctccacagcgtcttctcctgttcctcgcccgcttcaagtagcgcggcctcggccaagggcttctccaagaggaagctgcgccagacccgcagcctggacccggccctgatcggcggctgcgggagcgacgaggcgggcgcggagggcagtgcgcggggagccacggcgggccgcctctactccccatcactcccagccgagagtctcggccctcgcttggcgtcctcttcccggggtccgccccccagggccaccaggctaccgcctcctggacctctttgctcgtccttctccacacccagcaccccgcaggagaagtcaccatccggcagctttcactttgactatgaggttcccctgggtcgcggcggcctcaagaagagcatggcctgggacctgccttctgtcctggccgggccagccagtagccgaagcgcttccagcatcctctgttcatccgggggaggccccaatggcatcttcgcttctcctaggaggtggctccagcagaggaagttccagtccccacccgacagtcgcgggcacccctacgtcgtgtggaaatccgagggtgatttcacctggaacagcatgtcaggccgcagtgtgcggctgaggtcagtccccatccagagtctctcagagctggagagggcccggctgcaggaagtgcctttttatcagttgcaacaggactgtgacctgagctgtcagatcaccattcccaaagatggacaaaagagaaagaaatctttaagaaagaaactggattcactaggaaaggagaaaaacaaagacaaagaattcatcccacaggcatttggaatgcccttatcccaagtcattgcgaatgacagggcctataaactcaagcaggacttgcagagggacgagcagaaagatgcatctgactttgtggcttccctcctcccatttggaaataaaagacaaaacaaagaactctcaagcagtaactcatctctcagctcaacctcagaaacaccgaatgagtcaacgtccccaaacaccccggaaccggctcctcgggctaggaggaggggtgccatgtcagtggattctatcaccgatcttgatgacaatcagtctcgactactagaagctttacaactttccttgcctgctgaggctcaaagtaaaaaggaaaaagccagagataagaaactcagtctgaatcctatttacagacaggtccctaggctggtggacagctgctgtcagcacctagaaaaacatggcctccagacagtggggatattccgagttggaagctcaaaaaagagagtgagacaattacgtgaggaatttgaccgtgggattgatgtctctctggaggaggagcacagtgttcatgatgtggcagccttgctgaaagagttcctgagggacatgccagacccccttctcaccagggagctgtacacagctttcatcaacactctcttgttggagccggaggaacagctgggcaccttgcagctcctcatataccttctacctccctgcaactgcgacaccctccaccgcctgctacagttcctctccatcgtggccaggcatgccgatgacaacatcagcaaagatgggcaagaggtcactgggaataaaatgacatctctaaacttagccaccatatttggacccaacctgctgcacaagcagaagtcatcagacaaagaattctcagttcagagttcagcccgggctgaggagagcacggccatcatcgctgttgtgcaaaagatgattgaaaattatgaagccctgttcatggttcccccagatctccagaacgaagtgctgatcagcctgttagagaccgatcctgatgtcgtggactatttactcagaagaaaggcttcccaatcatcaagccctgacatgctgcagtcggaagtttccttttccgtgggagggaggcattcatctacagactccaacaaggcctccagcggagacatctccccttatgacaacaactccccagtgctgtctgagcgctccctgctggctatgcaagaggacgcggccccggggggctcggagaagctttacagagtgccagggcagtttatgctggtgggccacttgtcgtcgtcaaagtcaagggaaagttctcctggaccaaggcttgggaaaggtaactggagcctggccagcaggcgctggccaaaacaagcgaccctcctcttgttgcatgtggcatggtgtggggctcttcggaccttctcttcgtctctcccttatttgatgtttctgtaattcaacctgcatttaccgagtacctgctgaacgcctactctaggaagaggaaggtatggcgagcccagtcgttggctgggagggtccctgcaggccacactccaagtctcagatatctgggaaataaacgcatgcccagaggagccactcctattcccagctgattctttttccctccagcatcctaggaactttatgtatactggatttgggttgcatatttgctagtctgaggtgccacccaattactgctgttacatttctaaagaaaacaagctgaacctactatatgtatgaagacaaccttccagaaccaaatagtgttagtatccaatgacaagagagcactatactgggagtcacaaacctgctctgccactttcaacctgcaggatctccagtgagcgattgagcttcccagagtcccatttcctcctgctgtgaaaactcagaatgataac

SEQ ID NO: 7720 - DNA, 371 bp, Homo sapiens
  misc_feature (17)..(18): n is a, c, g, or t
tgactctagcaggatcnnagaggtcgtatagaagcttcatgtaggaggtaaaatgtcaagattgaccctggaggcaggatgaaattctagtagaccaccctctggggtgcagtgctgctcactgaattcattggaagtcaggcagtttcagcaggagtagaaatttgcacaactatgatgtcattttgagtttgtgactccatgtttaaacaaacatgccaaattataattttcattttgttgtcctctaaaccatggtcacattttggagtcacttaattataaagcagtgtccttgctcaagacattaataaaacccttctttatggaattgtgtccctcatgaattcatgtattcataagcatcctca

SEQ ID NO: 7721 - DNA, 935 bp, Homo sapiens
  misc_feature (24)..(24): n is a, c, g, or t
  misc_feature (27)..(27): n is a, c, g, or t
  misc_feature (31)..(31): n is a, c, g, or t
  misc_feature (906)..(906): n is a, c, g, or t
  misc_feature (908)..(908): n is a, c, g, or t
gttatgcgtcactgactctcttanttnccancgctacaggcctccagacagtggggatattccgagttggaagctcaaaaaagagagtgagacaattacgtgaggaatttgaccgtgggattgatgtctctctggaggaggagcacagtgttcatgatgtggcagccttgctgaaagagttcctgagggacatgccagacccccttctcaccagggagctgtacacagctttcatcaacactctcttgttggagccggaggaacagctgggcaccttgcagctcctcatataccttctacctccctgcaactgcgacaccctccaccgcctgctacagttcctctccatcgtggccaggcatgccgatgacaacatcagcaaagatgggcaagaggtcactgggaataaaatgacatctctaaacttagccaccatatttggacccaacctgctgcacaagcagaagtcatcagacaaagaattctcagttcagagttcagcccgggctgaggagagcacggccatcatcgctgttgtgcaaaagatgattgaaaattatgaagccctgttcatggtaggtggcccttctgtggcaggacatcacagcaaactgcctattggtttcctctggaggcaggatgaaattctagtagaccaccctctggggtgcagtgctgctcactgaattcattggaagtcaggcagtttcagcaggagtagaaatttgcacaactatgatgtcattttgagtttgtgactccatgtttaaacaaacatgccaaattataattttcattttgttgtcctctaaaccatggtcacattttggagtcacttaattataaagcagtgtccttgctcaagacattaataaacccatgcggccgttccttaatgagggttantnatgatctgccactgctcctggctcggg

SEQ ID NO: 7722 - DNA, 206 bp, Homo sapiens
gtgcctttttatcagttgcaacaggactgtgacctgagctgtcagatcaccattcccaaaggtaaggcctcttctgcctttctgccggggaacactgcaagtcaaatattggctctgccaaagccgtgagctgtgaactcttctcacacctaatattcacacaggaaggaaactacagcttcttggttgttggctggcattagtgt

SEQ ID NO: 7723 - DNA, 3946 bp, Homo sapiens
gcctgcctctgttctgaaaggacaggaacttctcaatgatccgatgaaaagattgcatatttttggtcccaagattcacagtagcggaggtctctggcaacaaaaggtatcgtgggagtcacagctatgccagctgggccatttctcagacattcaatatgatctgccatttcaggatgcattttttaccaaaaaaataatttttttaaaacagactcaacttcctactgcaagcttagttcagttagattagagaggacagcaaagacgcggctgattataatttatggggtgatttcacctggaacagcatgtcaggccgcagtgtgcggctgaggtcagtccccatccagagtctctcagagctggagagggcccggctgcaggaagtgcctttttatcagttgcaacaggactgtgacctgagctgtcagatcaccattcccaaagatggacaaaagagaaagaaatctttaagaaagaaactggattcactaggaaaggagaaaaacaaagacaaagaattcatcccacaggcatttggaatgcccttatcccaagtcattgcgaatgacagggcctataaactcaagcaggacttgcagagggacgagcagaaagatgcatctgactttgtggcttccctcctcccatttggaaataaaagacaaaacaaagaactctcaagcagtaactcatctctcagctcaacctcagaaacaccgaatgagtcaacgtccccaaacaccccggaaccggctcctcgggctaggaggaggggtgccatgtcagtggattctatcaccgatcttgatgacaatcagtctcgactactagaagctttacaactttccttgcctgctgaggctcaaagtaaaaaggaaaaagccagagataagaaactcagtctgaatcctatttacagacaggtccctaggctggtggacagctgctgtcagcacctagaaaaacatggcctccagacagtggggatattccgagttggaagctcaaaaaagagagtgagacaattacgtgaggaatttgaccgtgggattgatgtctctctggaggaggagcacagtgttcatgatgtggcagccttgctgaaagagttcctgagggacatgccagacccccttctcaccagggagctgtacacagctttcatcaacactctcttgttggagccggaggaacagctgggcaccttgcagctcctcatataccttctacctccctgcaactgcgacaccctccaccgcctgctacagttcctctccatcgtggccaggcatgccgatgacaacatcagcaaagatgggcaagaggtcactgggaataaaatgacatctctaaacttagccaccatatttggacccaacctgctgcacaagcagaagtcatcagacaaagaattctcagttcagagttcagcccgggctgaggagagcacggccatcatcgctgttgtgcaaaagatgattgaaaattatgaagccctgttcatggttcccccagatctccagaacgaagtgctgatcagcctgttagagaccgatcctgatgtcgtggactatttactcagaagaaaggcttcccaatcatcaagccctgacatgctgcagtcggaagtttccttttccgtgggagggaggcattcatctacagactccaacaaggcctccagcggagacatctccccttatgacaacaactccccagtgctgtctgagcgctccctgctggctatgcaagaggacgcggccccggggggctcggagaagctttacagagtgccagggcagtttatgctggtgggccacttgtcgtcgtcaaagtcaagggaaagttctcctggaccaaggcttgggaaagatctgtcagaggagcctttcgatatctggggaacttggcattcaacattaaaaagcggatccaaagacccaggaatgacaggttcctctggagacatttttgaaagcagctccctaagagcggggccctgctccctttctcaagggaacctgtccccaaattggcctcggtggcaggggagccccgcagagctggacagcgacacgcagggggctcggaggactcaggccgcagcccccgcgacggagggcagggcccaccctgcggtgtcgcgcgcctgcagcacgccccacgtccaggtggcagggaaagccgagcggcccacggccaggtcggagcagtacttgaccctgagcggcgcccacgacctcagcgagagtgagctggatgtggccgggctgcagagccgggccacacctcagtgccaaagaccccatgggagtgggagggatgacaagcggcccccgcctccatacccgggcccagggaagcccgcggcagcggcagcctggatccaggggcccccggaaggcgtggagacacccacggaccagggaggccaagcagccgagcgagagcagcaggtcacgcagaaaaaactgagcagcgccaactccctgccagcgggcgagcaggacagtccgcgcctgggggacgctggctggctcgactggcagagagagcgctggcagatctgggagctcctgtcgaccgacaaccccgatgccctgcccgagacgctggtctgagcccgcacccagccgagccccccctgccccgagccccccgccctccagcccaggggggaccgtgggtggtggccactggcacacttagtgttcttctttcacacttctcaaaagtgacacaagagaaatccagttcacctacagaggtagagcactcacgcccccgccattgagaataaggttccattgcgtagccagccttaggaaaaacaaacagaacccaaaccagatggcaatgtccaatctaaaaacgtccctcttggctctataatataagatacaactcttgcttggtatagcctaaccgtatttatgtgtcttcggttttgactattgtgtattctgtaacagattatgtataatcatatatgatatattcacaaagagaaaacaaaaggaacttttaaaaaaaaaatcacttcacttatattaagcaatgagatatactaaacaatgagattctatagaatgttctagaatgtgcacaagcgggtttctgtgcttttgccatagctttataactggggataacccttccttcgataccaaacactaacaagaggaagcagaatatgagaagccatatttttacataggagtcagatacaaaaagaaaaatcactgaatgcttttagatattgaatacgttttcaggaaaatgctaaatctgatagattacgaaatatatttttagaacttgtttagaaaggattcagttaaccaaacaagaaaaaggcagtgcctcacaaagaaattaagaagttgtccgtcccacgttacatcaaattcagttttatataggccatatataatatatatttataatgtataatttttatgtatttttcaaaactacaaactggaatccaactataaagtgtttaagaatctacacagaatattcaaattatagaacatgttttttccctttgccccataatcagtatttgccaaattacatgcaattccttaaaaactaaatcacatttggtaaaaggcctacagctttgtacttacattgtgccaaaggctgaggaaatgttttctttcgtaattttatgtgtattgtaaaatgttctaccgtactttagtagtttgaagtttttcaagtgcataactatttttgaccagcagatggcgatacgcttcagtattttatgcaattttttttcacttctgaagggaaagtgtattataaaaaaagattttttttttttttataaaacatgctactcttaattttcatgttggtgatgaaattcccagtggtgtttcttaaggttctatcttgtgccatgatgaataaaaagttaagcaaa

SEQ ID NO: 7724 - DNA, 3729 bp, Homo sapiens
ggctgggctgcgaatagcgtgttcctctccggcggaacacacacacccggccttggggctgtctcctgaagctccctcctccacggagagcgctgagcgccgccgggaattccatcccaccgtgggcacgcagtctttggaggtcccgggcgcagcacgctcggtgtccccacactgcagcaagacagagaccccgcgggaaccttgagcttggaacaacccttgagcctctgcagtcggaagagtgggcgcagcagcccagcggaggccaggcgcgcaacctcgggcgccggggcaaggagagagtgcagggaggcgcagctcaggcgcccggctcaggagcgggaggaagttctcgcggcgccgggagcgcggtggacgcgccctgggcgcacgcccaggcagccttctccctggccctcgggactgtcctcgggcggcaaggaggagcttgctggagtcttagaggccatccagagccagcgagcaggagcgctgcgtctcccgcctcagctaggaagggggagtggcgctggcaggctggagctgggaacccagcgagcgcctgaccttcctcctcctcttcctgaccctcttcgcgtcttgggctccggaggaaggttctagcggctgcaggaggtccccagacccattttcctagaaggctggtgatggatctgctgctcctgccgccgccggggcacttggagcgcaccggcggcgcgtgagctgggctttgctctccaccgccctgggcaaaccccgggccagccccgcctggcacctttgcctgagtccctttcggttcccgacccaaagccaccagcgtccagggagggaggaggaggtggtcctcaggtgcagccccgccgagatgtccgcgcagagcctgctccacagcgtcttctcctgttcctcgcccgcttcaagtagcgcggcctcggccaagggcttctccaagaggaagctgcgccagacccgcagcctggacccggccctgatcggcggctgcgggagcgacgaggcgggcgcggagggcagtgcgcggggagccacggcgggccgcctctactccccatcactcccagccgagagtctcggccctcgcttggcgtcctcttcccggggtccgccccccagggccaccaggctaccgcctcctggacctctttgctcgtccttctccacacccagcaccccgcaggagaagtcaccatccggcagctttcactttgactatgaggttcccctgggtcgcggcggcctcaagaagagcatggcctgggacctgccttctgtcctggccgggccagccagtagccgaagcgcttccagcatcctctgttcatccgggggaggccccaatggcatcttcgcttctcctaggaggtggctccagcagaggaagttccagtccccacccgacagtcgcgggcacccctacgtcgtgtggaaatccgagttggagttgtatgatcttcagatcttaggcacaaaaccaccgatgaattccgatacacatcgtaactttgaccccaccgcaacccttagaaatcagggtgatttcacctggaacagcatgtcaggccgcagtgtgcggctgaggtcagtccccatccagagtctctcagagctggagagggcccggctgcaggaagtgcctttttatcagttgcaacaggactgtgacctgagctgtcagatcaccattcccaaagatggacaaaagagaaagaaatctttaagaaagaaactggattcactaggaaaggagaaaaacaaagacaaagaattcatcccacaggcatttggaatgcccttatcccaagtcattgcgaatgacagggcctataaactcaagcaggacttgcagagggacgagcagaaagatgcatctgactttgtggcttccctcctcccatttggaaataaaagacaaaacaaagaactctcaagcagtaactcatctctcagctcaacctcagaaacaccgaatgagtcaacgtccccaaacaccccggaaccggctcctcgggctaggaggaggggtgccatgtcagtggattctatcaccgatcttgatgacaatcagtctcgactactagaagctttacaactttccttgcctgctgaggctcaaagtaaaaaggaaaaagccagagataagaaactcagtctgaatcctatttacagacaggtccctaggctggtggacagctgctgtcagcacctagaaaaacatggcctccagacagtggggatattccgagttggaagctcaaaaaagagagtgagacaattacgtgaggaatttgaccgtgggattgatgtctctctggaggaggagcacagtgttcatgatgtggcagccttgctgaaagagttcctgagggacatgccagacccccttctcaccagggagctgtacacagctttcatcaacactctcttgttggagccggaggaacagctgggcaccttgcagctcctcatataccttctacctccctgcaactgcgacaccctccaccgcctgctacagttcctctccatcgtggccaggcatgccgatgacaacatcagcaaagatgggcaagaggtcactgggaataaaatgacatctctaaacttagccaccatatttggacccaacctgctgcacaagcagaagtcatcagacaaagaattctcagttcagagttcagcccgggctgaggagagcacggccatcatcgctgttgtgcaaaagatgattgaaaattatgaagccctgttcatggttcccccagatctccagaacgaagtgctgatcagcctgttagagaccgatcctgatgtcgtggactatttactcagaagaaaggcttcccaatcatcaagccctgacatgctgcagtcggaagtttccttttccgtgggagggaggcattcatctacagactccaacaaggcctccagcggagacatctccccttatgacaacaactccccagtgctgtctgagcgctccctgctggctatgcaagaggacgcggccccggggggctcggagaagctttacagagtgccagggcagtttatgctggtgggccacttgtcgtcgtcaaagtcaagggaaagttctcctggaccaaggcttgggaaaggtaactggagcctggccagcaggcgctggccaaaacaagcgaccctcctcttgttgcatgtggcatggtgtggggctcttcggaccttctcttcgtctctcccttatttgatgtttctgtaattcaacctgcatttaccgagtacctgctgaacgcctactctaggaagaggaaggtatggcgagcccagtcgttggctgggagggtccctgcaggccacactccaagtctcagatatctgggaaataaacgcatgcccagaggagccactcctattcccagctgattctttttccctccagcatcctaggaactttatgtatactggatttgggttgcatatttgctagtctgaggtgccacccaattactgctgttacatttctaaagaaaacaagctgaacctactatatgtatgaagacaaccttccagaaccaaatagtgttagtatccaatgacaagagagcactatactgggagtcacaaacctgctctgccactttcaacctgcaggatctccagtgagcgattgagcttcccagagtcccatttcctcctgctgtgaaaactcagaatgataac

SEQ ID NO: 7725 - DNA, 605 bp, Homo sapiens
agcttatggcaaaagcctgtgggcacctcccagcaacaaccactgggactttggactagagaatttccacttgaagggcatttactgactcgcaatgaaacatttactgaagccaccccactgatacctgaaataggcatgctgtctcagatgatgtcagaggaacattctaatggggatggcagtgcccagaagagttccatgacacaatggaaatggtttatagaggatcatgctactcaaggcatgcagagaatttcttttcccctaggactgactctggaactgtgtgagaaactgctggattctacagtgccaaataaacaactttcaactgaccaaacaagagcttcttggtttatggatggcaattccaaggcacaaaatgctaggaagaactgttctgtttctcagtaagagagacagaaactggctatgggaaagatttcctggtgggaaggccctgaacatagctggcaagtgagactgatgctggcagccctgggggactacaaatggaataggaattcttgataggaatagacactgactctagtgcaggctttgcttatccaatggaagatgaaagtgttcagagtgccata

SEQ ID NO: 7726 - DNA, 342 bp, Homo sapiens
cactgaatgagctgtggacacagactagaccttcctgggaccacataccacctccgattgacggatcccattaacaccagcaggcctcttggggcctgccatcaccaaaggcagctgagtgaggagagcctccccaggcttgaaaacacttgggcttgattttgttaaagctgcacatcgaggcacttccccctgagacctgggttatctcatatcctctccaattcggcaagggcccccgttatgctggattgctttggatcatggaggaaaaacaataatgaagccatattttgggcatctggctgagctttgttcttcctttgagaaaggaagccatac

SEQ ID NO: 7727 - DNA, 425 bp, Homo sapiens
actactgggctcgagcgatccactctcatcagtctcccaaagtgctaggattacaggggtaagccactgctcccggtctgttttttgataacttacataaaataatagatcatttaatgggcttcttgatttttttcaagttgtctttgttgcaacaattgtttgtttgtttgttttttgagacaggatctcactcggtctcccagtatggagtgcggtggcacgatctcagctcactgcaacctctgcttcctgggctcaagctatcccccccacctcagcctcctgagtagctgtatttacaggcatgtgccatcatgcctggctaattttttccttttttttcttttcttttttttttttttttttttggtagggacagggttttgcatgtaacccagggtggtctcaaagcccaggtggac

SEQ ID NO: 7728 - DNA, 1164 bp, Homo sapiens
accacgcctcgccgatctttttgctttgttttgtttttagctgctgtgtccccaacacctggaagaactgagcttctggaatctaatagatgctaaataaatatttgttgcatgaatgatagtggtatgagaggaagagggaaaaaaaacggaaaaaggcttcttggaagaggtgacacttgaggatatatttccaattaaatatacctaagtgactgcccacctctgcaacccaatgtcacattcgagtcttactgaactacttgactgcatttcccgagatctcacctcttctcgcctgtaccctgtgcgcggaaagtcagccctccaccttctccctgcttccactcccaaaatacttcgtggttttgcagctctggagtatttaccgtgttggctgtttaaatttctgcctccatcagaaggcagaaactgactcgcgaactattccatccccagccgatagtagacgcttaaaaaagaacgaaagaaggtgggtggaggacttcagtaacatcaggtggcagcctcaattttatcgtttgtgaaacgtggatagtaatccctctatcacgtggctgttgcaggaataaagtgaaaaaacaaaacaggctagcttgttcaataaatgtgagttgaattaaatctgatttgtggtcagtagaaaaagatgtgaatacttggaaaggaagacacatttttttaaatatatgcctggtaaaacggatcagaaggcaggtccccatggagcacaccctcgccctaaacatgctgaacccgggctgccatagcctgcgtggtccctccaaggtgactgctccgacaaaagggtacgctcttcaaacgcatacgtttaaggcaattccagaaaccctcggctgtgccgcgactacacggccattaaagaaaagacgactctatgcccgccgtaatgttctcagatcacagggaccgtatttggagctgggagggagggaagccttttcttcacggggggctaaggcgtcttcgagcccccttccaatcccgggtccggccgggtaatccctgcccagcgttcgggcgtgcctttttttcagccgagacacaaccctgaacgtggggcccgccagcccggcggctgcctcgtggaagtcacgttccttctgcccgtcctctcgggta

SEQ ID NO: 7729 - DNA, 1096 bp, Homo sapiens
tctctacttccattccttgcccctctgcaacccattctccactccgcagccatttttaaaaagatgcccctccctacttatgactctaaaattgctcttctcactcttcccctcaggatatatttccaattaaatatacctaagtgactgcccacctctgcaacccaatgtcacattcgagtcttactgaactacttgactgcatttcccgagatctcacctcttctcgcctgtaccctgtgcgcggaaagtcagccctccaccttctccctgcttccactcccaaaatacttcgtggttttgcagctctggagtatttaccgtgttggctgtttaaatttctgcctccatcagaaggcagaaactgactcgcgaactattccatccccagccgatagtagacgcttaaaaaagaacgaaagaaggtgggtggaggacttcagtaacatcaggtggcagcctcaattttatcgtttgtgaaacgtggatagtaatccctctatcacgtggctgttgcaggaataaagtgaaaaaacaaaacaggctagcttgttcaataaatgtgagttgaattaaatctgatttgtggtcagtagaaaaagatgtgaatacttggaaaggaagacacatttttttaaatatatgcctggtaaaacggatcagaaggcaggtccccatggagcacaccctcgccctaaacatgctgaacccgggctgccatagcctgcgtggtccctccaaggtgactgctccgacaaaagggtacgctcttcaaacgcatacgtttaaggcaattccagaaaccctcggctgtgccgcgactacacggccattaaagaaaagacgactctatgcccgccgtaatgttctcagatcacagggaccgtatttggagctgggagggagggaagccttttcttcacggggggctaaggcgtcttcgagcccccttccaatcccgggtccggccgggtaatccctgcccagcgttcgggcgtgcctttttttcagccgagacacaaccctgaacgtggggcccgccagcccggcggctgcctcgtggaagtcacgttccttctgcccgtcctctcgggta

SEQ ID NO: 7730 - DNA, 2275 bp, Homo sapiens
  misc_feature (323)..(323): n is a, c, g, or t
cggacgcgtgggtggcaattgtccaagaaaagatttcaggtttgtcaagttttggtatagaactcggtttctttgttgaagaatatgctggaagcaaaggaagatttcctccaactaaaagaagggaaaagaaatcactctatattgccactattgaaaaaggacatagcttggtgaactccttgattgaaactggaagaattgacagtctgggtctggttgttgtagacgagttgcacatgattggtgaaggaagccgtggagctacactggaaatgaccctagcaaaaatcctctacactagcaaaacgactcaaattatnggtatgagtgcaacattaaacaatgttgaagacctacaaaagtttcttcaagcagaatattataccagtcaatttagaccagtatgtacctaaggttgagttaaaagaatatctgaaaataaatgatacaatatatgaagttgacagcaaagctgagaatggcatgactttttcacgtcttcttaattataagtattctgataccctaaaaaagatggatcctgatcacttggtagcattggtgacagaagttattcccaattattcctgcttagttttttgtcctagtaagaagaactgtgaaaatgtagcagaaatgatatgcaaatttttaagcaaggaatatctgaaacataaggagaaagaaaaatgtgaggtgattaagaacttgaagaatattggcaatggcaacctgtgtcctgttttaaagcgcactatcccatttggagttgcctatcaccacagtggcttaacaagtgatgaaaggaaactcttggaggaggcctactccacaggagtgctctgtctttttacctgcacatctaccctagcggcaggtgtcaacctaccagctcgaagagttattttaagagctccctatgttgctaaggaatttttaaagaggaatcaatataaacagatgattggcagagctggtcgtgctggaatagatactattggggagagtatcctcatattgcaagaaaaagacaaacaacaggtattggagttaataactaaaccattggaaaactgttacagccatcttgttcaggaattcaccaagggaatccaaacattatttctctctttgattggtttgaagattgcaacgaatcttgatgacatctatcatttcatgaatggtacattttttggtgttcagcaaaaggttttattgaaagaaaaaagtctctgggaaataactgttgaatcacttagatacctgacagaaaaaggactcctacaaaaagacactatttataagtctgaagaagaggtccaatataattttcatattacaaagttgggacgtgcttcatttaagggaactatagatttagcttattgtgacattctgtacagagacttgaagaaaggtcttgaaggacttgtgcttgaaagccttcttcatctaatctacctaacaaccccctatgatctggtttcacagtgtaaccctgattggatgatatacttcaggcagtttagccaactcagtccagcagaacaaaatgtagctgccattcttggagtctctgaaagctttattgggaagaaagcatcaggccaagccatcggaaagaaggtggacaagaacgttgtcaacaggctatatctgtcttttgttctttataccttgctcaaagagaccaacatttggactgtatctgaaaaatttaatatgcctcgaggatatatacaaaatcttctcactggaactgcctcattctcatcttgtgtgttacatttctgtgaggagcttgaggagttttgggtttacagagcccttttggtagaacttaccaagaagctgacttactgtgtaaaggcagaattaatccctctcatggaagttactggagttttagagggtcgagcaaaacagttatacagtgcaggttacaaaagtctaatgcacttagctaatgcaaatcctgaagtgctcgtaaggacaattgatcatttatcaagacgccaagccaagcaaattgtttcatcagcaaagatgctgttgcatgaaaaagcagaagccctgcaagaagaggtagaagagttactaagattgccttctgatttccctggtgctgtggcttcttccactgacaaagcatgaagctatctgatgagaattttcatatatgaattatttattgtacatgtgtgttattaaagataacttatactttataaatgaaaaaatacatttcagttatacattaaaaaacgaa

SEQ ID NO: 7731 - DNA, 2269 bp, Homo sapiens
  misc_feature (323)..(323): n is a, c, g, or t
  misc_feature (2243)..(2243): n is a, c, g, or t
cggacgcgtgggtggcaattgtccaagaaaagatttcaggtttgtcaagttttggtatagaactcggtttctttgttgaagaatatgctggaagcaaaggaagatttcctccaactaaaagaagggaaaagaaatcactctatattgccactattgaaaaaggacatagcttggtgaactccttgattgaaactggaagaattgacagtctgggtctggttgttgtagacgagttgcacatgattggtgaaggaagccgtggagctacactggaaatgaccctagcaaaaatcctctacactagcaaaacgactcaaattatnggtatgagtgcaacattaaacaatgttgaagacctacaaaagtttcttcaagcagaatattataccagtcaatttagaccagtatgtacctaaggttgagttaaaagaatatctgaaaataaatgatacaatatatgaagttgacagcaaagctgagaatggcatgactttttcacgtcttcttaattataagtattctgataccctaaaaaagatggatcctgatcacttggtagcattggtgacagaagttattcccaattattcctgcttagttttttgtcctagtaagaagaactgtgaaaatgtagcagaaatgatatgcaaatttttaagcaaggaatatctgaaacataaggagaaagaaaaatgtgaggtgattaagaacttgaagaatattggcaatggcaacctgtgtcctgttttaaagcgcactatcccatttggagttgcctatcaccacagtggcttaacaagtgatgaaaggaaactcttggaggaggcctactccacaggagtgctctgtctttttacctgcacatctaccctagcggcaggtgtcaacctaccagctcgaagagttattttaagagctccctatgttgctaaggaatttttaaagaggaatcaatataaacagatgattggcagagctggtcgtgctggaatagatactattggggagagtatcctcatattgcaagaaaaagacaaacaacaggtattggagttaataactaaaccattggaaaactgttacagccatcttgttcaggaattcaccaagggaatccaaacattatttctctctttgattggtttgaagattgcaacgaatcttgatgacatctatcatttcatgaatggtacattttttggtgttcagcaaaaggttttattgaaagaaaaaagtctctgggaaataactgttgaatcacttagatacctgacagaaaaaggactcctacaaaaagacactatttataagtctgaagaagaggtccaatataattttcatattacaaagttgggacgtgcttcatttaagggaactatagatttagcttattgtgacattctgtacagagacttgaagaaaggtcttgaaggacttgtgcttgaaagccttcttcatctaatctacctaacaaccccctatgatctggtttcacagtgtaaccctgattggatgatatacttcaggcagtttagccaactcagtccagcagaacaaaatgtagctgccattcttggagtctctgaaagctttattgggaagaaagcatcaggccaagccatcggaaagaaggtggacaagaacgttgtcaacaggctatatctgtcttttgttctttataccttgctcaaagagaccaacatttggactgtatctgaaaaatttaatatgcctcgaggatatatacaaaatcttctcactggaactgcctcattctcatcttgtgtgttacatttctgtgaggagcttgaggagttttgggtttacagagcccttttggtagaacttaccaagaagctgacttactgtgtaaaggcagaattaatccctctcatggaagttactggagttttagagggtcgagcaaaacagttatacagtgcaggttacaaaagtctaatgcacttagctaatgcaaatcctgaagtgctcgtaaggacaattgatcatttatcaagacgccaagccaagcaaattgtttcatcagcaaagatgctgttgcatgaaaaagcagaagccctgcaagaagaggtagaagagttactaagattgccttctgatttccctggtgctgtggcttcttccactgacaaagcatgaagctatctgatgagaattttcatatatgaattatttattgtacatgtgtgttattaaagataactaacccttacatattggcngcattcttatctgttattctttggga

SEQ ID NO: 7732 - DNA, 206 bp, Homo sapiens
gtaagcaaacaaaccattttttaaccttaataatcttgcgtagtgttatttccttgtattatagacatcagaacaaaaacatttcacattgcataactgtttatttctatagatacaaaagtacatactcttatttgtgagtaaaaataatgcatctgttgtgacacaagccttgcaaaacaaaaaaaggacctgctaaaaaataa

SEQ ID NO: 7733 - DNA, 250 bp, Homo sapiens
ttaaaagttataagcaactctttacaaacaaatttcatatgaatatatgcatgttttatatgagcactatatgaagatttacttctctgtcctttttaaaaaaaatctcgaagttgcacatgattggtgaaggaagccgtggagctacactggaaatgaccctagcaaaaatcctctacactagcagtaagtattttttcaaatgaggtcatgaattgatttataatcaagagacttataaaatacttaa

SEQ ID NO: 7734 - DNA, 519 bp, Homo sapiens
ggtattttgattaaaatgaccagaactctttttattgacttatttttcaattttcaatcttttcctcatcctaaaaccagttcctcaaattcctcagggtcctccccatgtttcttcacatctgttttgcttagaatcatctttcatctctggcttaactcaagttccagaacttatgtaaggaacattctctctgagccccctatcacacaaaccaaactttgaaataacttacaaaatttaaattttatatatttctttgtgttctacaggagcttgaggagttttgggtttacagagcccttttggtagaacttaccaagaagctgacttactgtgtaaaggcagaattaatccctctcatggaagttactggagttttagaggtcagtagcttgttggtttcccaattgaaattatgttgaattaatacagaagccaggttttattattttctgaagtcttaatacagaggaagtgatagcaagagccttaattgctcatttgtcatgggaatct

SEQ ID NO: 7735 - DNA, 496 bp, Homo sapiens
atgtttcttcacatctgttttgcttagaatcatctttcatctctggcttaactcaagttccagaacttatgtaaggaacattctctctgagccccctatcacacaaaccaaactttgaaataacttacaaaatttaaattttatatatttctttgtgttctacaggagcttgaggagttttgggtttacagagcccttttggtagaacttaccaagaagctgacttactgtgtaaaggcagaattaatccctctcatggaagttactggagttttagaggtcagtagcttgttggtttcccaattgaaattatgttgaattaatacagaagccaggttttattattttctgaagtcttaatacagaggaagtgatagcaagagccttaattgctcatttgtcatgggaatcttttatttaaaacaaatagctgttatggccttccagaaatccgctgttactagatggcatacctgatgaaaaatctcagttgtga

SEQ ID NO: 7736 - DNA, 1186 bp, Homo sapiens
tctctgttataaacaaggcgcatggacatctctatgtattttggggtacatatggaaatgtttctctggattagattccccaaaatagttggttcagaaggtatgtacttataaagtgttgatgagtactatcaaaatgacctccaatagttatatagtaagatgttataagagattttgaagactttttgctatatttaagcaatttctacacaatatttaaagccatctctttgcccctctggtaattgtgaaagattgaatatttgtatctttcttttaggaactatagatttagcttattgtgacattctgtacagagacttgaagaaaggtcttgaaggacttgtgcttgaaagccttcttcatctaatctacctaacaaccccctatgatctggtttcacagtgtaaccctgattggatgatatacttcaggcagtttagccaactcagtccagcagaacaaaatgtagctgccattcttggagtctctgaaagctttattgggaagaaagcatcaggccaagccatcggaaagaaggtggacaagaacgttgtcaacaggctatatctgtcttttgttctttataccttgctcaaagagaccaacatttggactgtatctgaaaaatttaatatgcctcgaggatatatacaaaatcttctcactggaactgcctcattctcatcttgtgtgttacatttctgtgaggagcttgaggagttttgggtttacagagcccttttggtagaacttaccaagaagctgacttactgtgtaaaggcagaattaatccctctcatggaagttactggagttttagagggtcgagcaaaacagttatacagtgcaggttacaaaagtctaatgcacttagctaatgcaaatcctgaagtgctcgtaaggacaattgatcatttatcaagacgccaagccaagcaaattgtttcatcagcaaagatgctgttgcatgaaaaagcagaagccctgcaagaagaggtagaagagttactaagattgccttctgatttccctggtgctgtggcttcttccactgacaaagcatgaagctatctgatgagaattttcatatatgaattatttattgtacatgtgtgttattaaagataacttatactttataaatgaaaaaatacatttcagttatacattaaaaaacgaa

SEQ ID NO: 7737 - DNA, 1910 bp, Homo sapiens
  misc_feature (323)..(323): n is a, c, g, or t
cggacgcgtgggtggcaattgtccaagaaaagatttcaggtttgtcaagttttggtatagaactcggtttctttgttgaagaatatgctggaagcaaaggaagatttcctccaactaaaagaagggaaaagaaatcactctatattgccactattgaaaaaggacatagcttggtgaactccttgattgaaactggaagaattgacagtctgggtctggttgttgtagacgagttgcacatgattggtgaaggaagccgtggagctacactggaaatgaccctagcaaaaatcctctacactagcaaaacgactcaaattatnggtatgagtgcaacattaaacaatgttgaagacctacaaaagtttcttcaagcagaatattataccagtcaatttagaccagtatgtacctaaggttgagttaaaagaatatctgaaaataaatgatacaatatatgaagttgacagcaaagctgagaatggcatgactttttcacgtcttcttaattataagtattctgataccctaaaaaagatggatcctgatcacttggtagcattggtgacagaagttattcccaattattcctgcttagttttttgtcctagtaagaagaactgtgaaaatgtagcagaaatgatatgcaaatttttaagcaaggaatatctgaaacataaggagaaagaaaaatgtgaggtgattaagaacttgaagaatattggcaatggcaacctgtgtcctgttttaaagcgcactatcccatttggagttgcctatcaccacagtggcttaacaagtgatgaaaggaaactcttggaggaggcctactccacaggagtgctctgtctttttacctgcacatctaccctagcggcaggtgtcaacctaccagctcgaagagttattttaagagctccctatgttgctaaggaatttttaaagaggaatcaatataaacagatgattggcagagctggtcgtgctggaatagatactattggggagagtatcctcatattgcaagaaaaagacaaacaacaggtattggagttaataactaaaccattggaaaactgttacagccatcttgttcaggaattcaccaagggaatccaaacattatttctctctttgattggtttgaagattgcaacgaatcttgatgacatctatcatttcatgaatggtacattttttggtgttcagcaaaaggttttattgaaagaaaaaagtctctgggaaataactgttgaatcacttagatacctgacagaaaaaggactcctacaaaaagacactatttataagtctgaagaagaggtccaatataattttcatattacaaagttgggacgtgcttcatttaagggaactatagatttagcttattgtgacattctgtacagagacttgaagaaaggtcttgaaggacttgtgcttgaaagccttcttcatctaatctacctaacaaccccctatgatctggtttcacagtgtaaccctgattggatgatatacttcaggcaggtgagaatataacgtttttcaacttaggctacttcgtttatgaattattacatgctgttttgttttgttttttagagatgaggctttgccatgttgcccaggctggtctcaaactcctaggctcaagcagtcttcccacattgtcctcccaaagtgctaggattacaagtgtaagccactgtacccggcctattatatgctttttatgaagtgattattcactttttttctctattaaaatatatttggaattggatatttttttctttcagtttttaaaaattataatctggcaacagcatttatggttcgtttaactttaatgttacttttctcttaaatataaacatatttgttattgaaaaaagtaaaggttaaaa

SEQ ID NO: 7738 - DNA, 540 bp, Homo sapiens
tatcattatttagcttataatagagtaacattggtagaacaatgaattgatatatgtagaatgcttagaatagtgtctggcacataaaaggtgctcaagagttatcagctataattattatcattgttactatactgagattttggaattttaccttaaaaacaatgtatcacatatgtaaatataaaggtatcttttctatataaaggtatcttttgggtcacatattcctaatgtttattttctcatgattgatagggtaagccaaagtcaaaagtacctgtggggaaggagaaagctagccagtgagcagggagtgaagtaggacccatggggaaatgtgagactttccaaaggctgtggagggaaaggtggctctcagtgccagtcactgtgaacagcagtagaggcatgccagtgttcactggggtctctgcttcagctgctgccatcctgccaggtgatccaacataggatcataagcaacatgggtcatcttttgtttgtttgtttgagacagggccttgctctgtcacccag

SEQ ID NO: 7739 - DNA, 448 bp, Homo sapiens
ggttgatttgaaccgaaagccacacttattataaattgtctaattaaaaaattttaaaatactaaattgcacatataagctacatttaaaaactattctatttgcatcacttttaacaaaacaaagaatttccttagaataattctgatgcagatgagtatatgcatttatggtgcataggggctaaaataactaaaaacattacctgtgtaaagcaaaaggaagctttgatatcaaatgctttttgccagtgtattaagtggaaaatttgctcacagtgggtctgacttaggggcacattttgtcagttgactatgtagatatagttgataaatttagttttctaacataatgctcagagtgaacatttcaaagaaaaacattttggtaatgttatacattagctctgttggccacgtaatttgtgaattataaatcacaattctgt

SEQ ID NO: 7740 - DNA, 454 bp, Homo sapiens
tttttttcctcagatatacattaattatgtttgccttttctctccagttatctgagaagcattttgataatgcaaaggaacctaaacaaatgaaagtgcctgtcggagaaaaattatctcattaatgagaaaatgaataaagctaatgttaccaccatgtgacttttaaatcagatcttcagaattccttttagtgtttttcccatcaccaaacacatgctaagaaaaatatcacagttataatttatgccttatccaacacatgatagattttgtacactatacataatgtacacttaaatactcaagtcattatgacaatgtgctacaaaaacaatcacttgaaaagaatggatatatttatgagcagctcatatccagataatttaggttgtgtgagtgcataccaaaagcagcttattattcttactcctctagtttaaaacagtctact

SEQ ID NO: 7741 - DNA, 1374 bp, Homo sapiens
gccaaaaaaaagagaaaaggaaaaaggctagtaagctgggttaggttcatgagctcggacgcggagctctggagcttcctctgcagcctcaagcaccagttctccccgcacatcctgcgcagcaaggacgtctacggctactcctcctgccgggccctggtacccgaccccccggggccccctacagcccgcggccaggcgcgccggccggttccgcgcgcagcggccaggaggaggcgccgcggagcccgggcggccgctgcccgcaggaggaagccccggccgccacccccaccgccgccgccccccgaggagagctgcccggccaagcccgtggcccccgggccctgcttcgggggccgcaccttggaggagatctggagggcggccaccccgacgctgaccaccttccccaccatccgcgtcggcagcgacgtgtggggcgagcgcagcctggcggcagcgcggcgcagggcgcgccaggtcctgcgagtgaacctggaacccatggtgaggctccgccgcttcccggtgccccgggcatgaggtgcggcctccagggcgcctcctgccggccccgaccttgggacaggccttccgcccggaggaatgaacaagtgtcagtcgagtgtttacagatccggccaggaccccggcccccaatgcactttacgcgcgaagaagttgccggatggttgtccctgtcccgggccgcggcgcggtcgtcttggacgctggggcaggtgtgccctctgctgcctcccgtacccggcctgcggagggaggggacagctggacccgcaggggaggtccctttcttcctgaccaccgattgagacgtctccaggaccttaggggcagatccgttttctcactgttggactctacctcactggtctggaagtcctccgaagacattatttttccaaaggaatttggtttcgtgcttgtgtaataaagccagaatttacttgttctttatctccccctttttctatttcactgtcacccctctttgtggacagaagttcgaacatgtggtgttgcactagtttgtgctcagggtattctgaagcccactcgtttcctaatttttactggattccaaagctttgatcgaggatattttttaagaggttcaagcttgtgactgttagtagtgcaaggatttgtatgggctcagtgattacaaacaaagacatgcaaaatacaactgtttaaacattttcaaggtatttttaaaggttttgtattgaaacaatgtttatatttactgagctcctaaaaatggtagaatacacatgaaaacttttgtttaggaaaagttaacttgttaaattcttttgaattgaataaaaaaatgcattgaaacca

SEQ ID NO: 7742 - DNA, 1508 bp, Homo sapiens
gaggcgagaaaagtagcgagagacgccagcagcagccgccgccgcggagccaacgcggactgggacggcggcggcagtagtgggacccggcgagcgtgagtggcccggagcggccttcgatgcggcgcagtatgaagaggcggcggcgccggcgcccggtcgccccggccacggccgcccggggcggcgactttagggcagaagacggggctgggttggaggcgcgggaggagaaggtggtgtactcgcggtcgcaactgtcgctggctgacagcaccaaggcgctgggcgacgccttcaagctcttcatgccccgcagcacggagttcatgagctcggacgcggagctctggagcttcctctgcagcctcaagcaccagttctccccgcacatcctgcgcagcaaggacgtctacggctactcctcctgccgggccctggtacccgaccccccggggcccaagcccgtggcccccgggccctgcttcgggggccgcaccttggaggagatctggagggcggccaccccgacgctgaccaccttccccaccatccgcgtcggcagcgacgtgtggggcgagcgcagcctggcggcagcgcggcgcagggcgcgccaggtcctgcgagtgaacctggaacccatggtgaggctccgccgcttcccggtgccccgggcatgaggtgcggcctccagggcgcctcctgccggccccgaccttgggacaggccttccgcccggaggaatgaacaagtgtcagtcgagtgtttacagatccggccaggaccccggcccccaatgcactttacgcgcgaagaagttgccggatggttgtccctgtcccgggccgcggcgcggtcgtcttggacgctggggcaggtgtgccctctgctgcctcccgtacccggcctgcggagggaggggacagctggacccgcaggggaggtccctttcttcctgaccaccgattgagacgtctccaggaccttaggggcagatccgttttctcactgttggactctacctcactggtctggaagtcctccgaagacattatttttccaaaggaatttggtttcgtgcttgtgtaataaagccagaatttacttgttctttatctccccctttttctatttcactgtcacccctctttgtggacagaagttcgaacatgtggtgttgcactagtttgtgctcagggtattctgaagcccactcgtttcctaatttttactggattccaaagctttgatcgaggatattttttaagaggttcaagcttgtgactgttagtagtgcaaggatttgtatgggctcagtgattacaaacaaagacatgcaaaatacaactgtttaaacattttcaaggtatttttaaaggttttgtattgaaacaatgtttatatttactgagctcctaaaaatggtagaatacacatgaaaacttttgtttaggaaaagttaacttgttaaattcttttgaattgaataaaaaaatgcattgaaacca

SEQ ID NO: 7743 - DNA, 1655 bp, Homo sapiens
gaggcgagaaaagtagcgagagacgccagcagcagccgccgccgcggagccaacgcggactgggacggcggcggcagtagtgggacccggcgagcgtgagtggcccggagcggccttcgatgcggcgcagtatgaagaggcggcggcgccggcgcccggtcgccccggccacggccgcccggggcggcgactttagggcagaagacggggctgggttggaggcgcgggaggagaaggtggtgtactcgcggtcgcaactgtcgctggctgacagcaccaaggcgctgggcgacgccttcaagctcttcatgccccgcagcacggagttcatgagctcggacgcggagctctggagcttcctctgcagcctcaagcaccagttctccccgcacatcctgcgcagcaaggacgtctacggctactcctcctgccgggccctggtacccgaccccccggggccccctacagcccgcggccaggcgcgccggccggttccgcgcgcagcggccaggaggaggcgccgcggagcccgggcggccgctgcccgcaggaggaagccccggccgccacccccaccgccgccgccccccgaggagagctgcccggccaagcccgtggcccccgggccctgcttcgggggccgcaccttggaggagatctggagggcggccaccccgacgctgaccaccttccccaccatccgcgtcggcagcgacgtgtggggcgagcgcagcctggcggcagcgcggcgcagggcgcgccaggtcctgcgagtgaacctggaacccatggtgaggctccgccgcttcccggtgccccgggcatgaggtgcggcctccagggcgcctcctgccggccccgaccttgggacaggccttccgcccggaggaatgaacaagtgtcagtcgagtgtttacagatccggccaggaccccggcccccaatgcactttacgcgcgaagaagttgccggatggttgtccctgtcccgggccgcggcgcggtcgtcttggacgctggggcaggtgtgccctctgctgcctcccgtacccggcctgcggagggaggggacagctggacccgcaggggaggtccctttcttcctgaccaccgattgagacgtctccaggaccttaggggcagatccgttttctcactgttggactctacctcactggtctggaagtcctccgaagacattatttttccaaaggaatttggtttcgtgcttgtgtaataaagccagaatttacttgttctttatctccccctttttctatttcactgtcacccctctttgtggacagaagttcgaacatgtggtgttgcactagtttgtgctcagggtattctgaagcccactcgtttcctaatttttactggattccaaagctttgatcgaggatattttttaagaggttcaagcttgtgactgttagtagtgcaaggatttgtatgggctcagtgattacaaacaaagacatgcaaaatacaactgtttaaacattttcaaggtatttttaaaggttttgtattgaaacaatgtttatatttactgagctcctaaaaatggtagaatacacatgaaaacttttgtttaggaaaagttaacttgttaaattcttttgaattgaataaaaaaatgcattgaaacca

SEQ ID NO: 7744 - DNA, 1539 bp, Homo sapiens
tgggcgcttagtggttacgttagccgtgcctgttgggttcgtagcaactttatgaagaggcggcggcgccggcgcccggtcgccccggccacggccgcccggggcggcgactttagggcagaagacggggctgggttggaggcgcgggaggagaaggtggtgtactcgcggtcgcaactgtcgctggctgacagcaccaaggcgctgggcgacgccttcaagctcttcatgccccgcagcacggagttcatgagctcggacgcggagctctggagcttcctctgcagcctcaagcaccagttctccccgcacatcctgcgcagcaaggacgtctacggctactcccctacagcccgcggccaggcgcgccggccggttccgcgcgcagcggccaggaggaggcgccgcggagcccgggcggccgctgcccgcaggaggaagccccggccgccacccccaccgccgccgccccccgaggagagctgcccggccaagcccgtggcccccgggccctgcttcgggggccgcaccttggaggagatctggagggcggccaccccgacgctgaccaccttccccaccatccgcgtcggcagcgacgtgtggggcgagcgcagcctggcggcagcgcggcgcagggcgcgccaggtcctgcgagtgaacctggaacccatggtgaggctccgccgcttcccggtgccccgggcatgaggtgcggcctccagggcgcctcctgccggccccgaccttgggacaggccttccgcccggaggaatgaacaagtgtcagtcgagtgtttacagatccggccaggaccccggcccccaatgcactttacgcgcgaagaagttgccggatggttgtccctgtcccgggccgcggcgcggtcgtcttggacgctggggcaggtgtgccctctgctgcctcccgtacccggcctgcggagggaggggacagctggacccgcaggggaggtccctttcttcctgaccaccgattgagacgtctccaggaccttaggggcagatccgttttctcactgttggactctacctcactggtctggaagtcctccgaagacattatttttccaaaggaatttggtttcgtgcttgtgtaataaagccagaatttacttgttctttatctccccctttttctatttcactgtcacccctctttgtggacagaagttcgaacatgtggtgttgcactagtttgtgctcagggtattctgaagcccactcgtttcctaatttttactggattccaaagctttgatcgaggatattttttaagaggttcaagcttgtgactgttagtagtgcaaggatttgtatgggctcagtgattacaaacaaagacatgcaaaatacaactgtttaaacattttcaaggtatttttaaaggttttgtattgaaacaatgtttatatttactgagctcctaaaaatggtagaatacacatgaaaacttttgtttaggaaaagttaacttgttaaattcttttgaattgaataaaaaaatgcattgaaacca

SEQ ID NO: 7745 - DNA, 1638 bp, Homo sapiens
cggcttcggggaaggtgcggcaggcggtgctgcggcctggcacagcaggtttggggtgcgggaggcgggcggggtaggagcgcggcgggcggggccgggcggcgggcggggctggcggggcggccgggccatgcagggcgcagagccggctaaaccctgctgagacccggctccgtgcgtccaggggcggctaatgcccctcacgctgtctacgctgctgcaaccgggccgcatctggacggggcgccgcgcggcggagccgacgccgggccacaatgctgcttggagcctctctggtgggggtgctgctgttctccaagctggtgctgaaactgccctggacccaggtgggattctccctgttgttcctctacttgggatctggcggctggcgcttcatccgggtcttcatcaagaccatcaggcgcgatatcttgtgatgtgctggtgatggacgagctgggctacctgtacttccgagaccgcactggggacacgttccgctggaaaggtgagaacgtgtccaccaccgaggtggaaggcacactcagccgcctgctggacatggctgacgtggccgtgtatggtgtcgaggtgccaggaaccgagggccgggccggaatggctgctgtggccagccccactggcaactgtgacctggagcgctttgctcaggtcttggagaaggaactgcccctgtatgcgcgccccatcttcctgcgcctcctgcctgagctgcacaaaacaggaacctacaagttccagaagacagagctacggaaggagggctttgacccggctattgtgaaagacccgctgttctatctagatgcccagaagggccgctacgtcccgctggaccaagaggcctacagccgcatccaggcaggcgaggagaagctgtgattccccccatccctctgagggccggcggatgctggatccggagccccaggttccgccccagagcggtcctggacaaggccagaccaaagcaagcagggcctggcacctccatcctgaggtgctgcccctccatccaaaactgccaagtgactcattgccttcccaacccttccagaggctttctgtgaaagtctcatgtccaagttccgtcttctgggctgggcaggccctctggttcccaggctgagactgacgggttttctcaggatgatgtcttgggtgagggtagggagaggacaaggggtcaccgagcccttcccagagagcagggagcttataaatggaaccagagcagaagtccccagactcaggaagtcaacagagtgggcagggacagtggtagcatccatctggtggccaaagagaatcgtagccccagagctgcccaagttcactgggctccacccccacctccaggaggggaggagaggacctgacatctgtaggtggcccctgatgccccatctacagcaggaggtcaggaccacgcccctggcctctccccactcccccatcctcctccctgggtggctgcctgattatccctcaggcagggcctctcagtccttgtgggtctgtgtcacctccatctcagtcttggcctggctatgaggggaggaggaatgggagagggggctcaggggccaataaactctgccttgagtcctccta

SEQ ID NO: 7746 - DNA, 2939 bp, Homo sapiens
cggcttcggggaaggtgcggcaggcggtgctgcggcctggcacagcaggtttggggtgcgggaggcgggcggggtaggagcgcggcgggcggggccgggcggcgggcggggctggcggggcggccgggccatgcagggcgcagagccggctaaaccctgctgagacccggctccgtgcgtccaggggcggctaatgcccctcacgctgtctacgctgctgcaaccgggccgcatctggacggggcgccgcgcggcggagccgacgccgggccacaatgctgcttggagcctctctggtgggggtgctgctgttctccaagctggtgctgaaactgccctggacccaggtgggattctccctgttgttcctctacttgggatctggcggctggcgcttcatccgggtcttcatcaagaccatcaggcgcgatatctttggcggcctggtcctcctgaaggtgaaggcaaaggtgcgacagtgcctgcaggagcggcggacagtgcccattttgtttgcctctaccgttcggcgccaccccgacaagacggccctgatcttcgagggcacagatacccactggaccttccgccagctggatgagtactcaagcagtgtagccaacttcctgcaggcccggggcctggcctcgggcgatgtggctgccatcttcatggagaaccgcaatgagttcgtgggcctatggctgggcatggccaagctcggtgtggaggcagccctcatcaacaccaacctgcggcgggatgctctgctccactgcctcaccacctcgcgcgcacgggcccttgtctttggcagcgaaatggcctcagccatctgtgaggtccatgccagcctggacccctcgctcagcctcttctgctctggctcctgggagcccggtgcggtgcctccaagcacagaacacctggaccctctgctgaaagatgctcccaagcaccttcccagttgccctgacaagggcttcacagataaactgttctacatctacacatccggcaccacagggctgcccaaggccgccatcgtggtgcacagcaggtattaccgcatggctgccctggtgtactatggattccgcatgcggcccaacgacatcgtctatgactgcctccccctctaccactcagcaggaaacatcgtgggaatcggccagtgcctgctgcatggcatgacggtggtgattcggaagaagttctcagcctcccggttctgggacgattgtatcaagtacaactgcacgattgtgcagtacattggtgaactgtgccgctacctcctgaaccagccaccgcgggaggcagaaaaccagcaccaggttcgcatggcactaggcaatggcctccggcagtccatctggaccaacttttccagccgcttccacataccccaggtggctgagttctacggggccacagagtgcaactgtagcctgggcaacttcgacagccaggtgggggcctgtggtttcaatagccgcatcctgtccttcgtgtaccccatccggttggtacgtgtcaacgaggacaccatggagctgatccgggggcccgacggcgtctgcattccctgccagccaggtgagccgggccagctggtgggccgcatcatccagaaagaccccctgcgccgcttcgatggctacctcaaccagggcgccaacaacaagaagattgccaaggatgtcttcaagaagggggaccaggcctaccttactggtgatgtgctggtgatggacgagctgggctacctgtacttccgagaccgcactggggacacgttccgctggaaaggtgagaacgtgtccaccaccgaggtggaaggcacactcagccgcctgctggacatggctgacgtggccgtgtatggtgtcgaggtgccaggaaccgagggccgggccggaatggctgctgtggccagccccactggcaactgtgacctggagcgctttgctcaggtcttggagaaggaactgcccctgtatgcgcgccccatcttcctgcgcctcctgcctgagctgcacaaaacaggaacctacaagttccagaagacagagctacggaaggagggctttgacccggctattgtgaaagacccgctgttctatctagatgcccagaagggccgctacgtcccgctggaccaagaggcctacagccgcatccaggcaggcgaggagaagctgtgattccccccatccctctgagggccggcggatgctggatccggagccccaggttccgccccagagcggtcctggacaaggccagaccaaagcaagcagggcctggcacctccatcctgaggtgctgcccctccatccaaaactgccaagtgactcattgccttcccaacccttccagaggctttctgtgaaagtctcatgtccaagttccgtcttctgggctgggcaggccctctggttcccaggctgagactgacgggttttctcaggatgatgtcttgggtgagggtagggagaggacaaggggtcaccgagcccttcccagagagcagggagcttataaatggaaccagagcagaagtccccagactcaggaagtcaacagagtgggcagggacagtggtagcatccatctggtggccaaagagaatcgtagccccagagctgcccaagttcactgggctccacccccacctccaggaggggaggagaggacctgacatctgtaggtggcccctgatgccccatctacagcaggaggtcaggaccacgcccctggcctctccccactcccccatcctcctccctgggtggctgcctgattatccctcaggcagggcctctcagtccttgtgggtctgtgtcacctccatctcagtcttggcctggctatgaggggaggaggaatgggagagggggctcaggggccaataaactctgccttgagtcctccta

SEQ ID NO: 7747 - DNA, 3194 bp, Homo sapiens
cggcttcggggaaggtgcggcaggcggtgctgcggcctggcacagcaggtttggggtgcgggaggcgggcggggtaggagcgcggcgggcggggccgggcggcgggcggggctggcggggcggccgggccatgcagggcgcagagccggctaaaccctgctgagacccggctccgtgcgtccaggggcggctaatgcccctcacgctgtctacgctgctgcaaccgggccgcatctggacggggcgccgcgcggcggagccgacgccgggccacaatgctgcttggagcctctctggtgggggtgctgctgttctccaagctggtgctgaaactgccctggacccaggtgggattctccctgttgttcctctacttgggatctggcggctggcgcttcatccgggtcttcatcaagaccatcaggcgcgatatctttggcggcctggtcctcctgaaggtgaaggcaaaggtgcgacagtgcctgcaggagcggcggacagtgcccattttgtttgcctctaccgttcggcgccaccccgacaagacggccctgatcttcgagggcacagatacccactggaccttccgccagctggatgagtactcaagcagtgtagccaacttcctgcaggcccggggcctggcctcgggcgatgtggctgccatcttcatggagaaccgcaatgagttcgtgggcctatggctgggcatggccaagctcggtgtggaggcagccctcatcaacaccaacctgcggcgggatgctctgctccactgcctcaccacctcgcgcgcacgggcccttgtctttggcagcgaaatggcctcagccatctgtgaggtccatgccagcctggacccctcgctcagcctcttctgctctggctcctgggagcccggtgcggtgcctccaagcacagaacacctggaccctctgctgaaagatgctcccaagcaccttcccagttgccctgacaagggcttcacagataaactgttctacatctacacatccggcaccacagggctgcccaaggccgccatcgtggtgcacagcaggtattaccgcatggctgccctggtgtactatggattccgcatgcggcccaacgacatcgtctatgactgcctccccctctaccactcagcaggaaacatcgtgggaatcggccagtgcctgctgcatggcatgacggtggtgattcggaagaagttctcagcctcccggttctgggacgattgtatcaagtacaactgcacgattgtgcagtacattggtgaactgtgccgctacctcctgaaccagccaccgcgggaggcagaaaaccagcaccaggttcgcatggcactaggcaatggcctccggcagtccatctggaccaacttttccagccgcttccacataccccaggtggctgagttctacggggccacagagtgcaactgtagcctgggcaacttcgacagccaggtgggggcctgtggtttcaatagccgcatcctgtccttcgtgtaccccatccggttggtacgtgtcaacgaggacaccatggagctgatccgggggcccgacggcgtctgcattccctgccagccaggtgagccgggccagctggtgggccgcatcatccagaaagaccccctgcgccgcttcgatggctacctcaaccagggcgccaacaacaagaagattgccaaggatgtcttcaagaagggggaccaggcctaccttactggtgatgtgctggtgatggacgagctgggctacctgtacttccgagaccgcactggggacacgttccgctggaaaggtgagaacgtgtccaccaccgaggtggaaggcacactcagccgcctgctggacatggctgacgtggccgtgtatggtgtcgaggtgccaggaaccgagggccgggccggaatggctgctgtggccagccccactggcaactgtgacctggagcgctttgctcaggtcttggagaaggaactgcccctgtatgcgcgccccatcttcctgcgcctcctgcctgagctgcacaaaacaggaacctacaagttccagaagacagagctacggaaggagggctttgacccggctattgtgaaagacccgctgttctatctagatgcccagaagggccgctacgtcccgctggaccaagaggcctacagccgcatccaggcaggcgaggagaagctgtgattccccccatccctctgagggccggcggatgctggatccggagccccaggttccgccccagagcggtcctggacaaggccagaccaaagcaagcagggcctggcacctccatcctgaggtgctgcccctccatccaaaactgccaagtgactcattgccttcccaacccttccagaggctttctgtgaaagtctcatgtccaagttccgtcttctgggctgggcaggccctctggttcccaggctgagactgacgggttttctcaggatgatgtcttgggtgagggtagggagaggacaaggggtcaccgagcccttcccagagagcagggagcttataaatggaaccagagcagaagtccccagactcaggaagtcaacagagtgggcagggacagtggtagcatccatctggtggccaaagagaatcgtagccccagagctgcccaagttcactgggctccacccccacctccaggaggggaggagaggacctgacatctgtaggtggcccctgatgccccatctacagcaggaggtcaggaccacgcccctggcctctccccactcccccatcctcctccctgggtggctgcctgattatccctcaggcagggcctctcagtccttgtgggtctgtgtcacctccatctcagtcttggcctggctatgaggggaggaggaatgggagagggggctcaggggccaataaactctgccttgagtcctcctagcctgtgtgcaaaccacccaagcccaccctgaccccagaaccccacagccccactgtggccgcttgatcccccacgccaaccccctggcccattgacccgcctcatctgttcattcacttatctaagctgagggtgtagcaggtaagatgccgcagcccctgcctccaatgtgctggttcagccgggggcagtgcccatgtgaatctggcaaggtgtttaacagtgtgggcttgaaagtccaaaccaaaatgtca

SEQ ID NO: 7748 - DNA, 2858 bp, Homo sapiens
cggcttcggggaaggtgcggcaggcggtgctgcggcctggcacagcaggtttggggtgcgggaggcgggcggggtaggagcgcggcgggcggggccgggcggcgggcggggctggcggggcggccgggccatgcagggcgcagagccggctaaaccctgctgagacccggctccgtgcgtccaggggcggctaatgcccctcacgctgtctacgctgctgcaaccgggccgcatctggacggggcgccgcgcggcggagccgacgccgggccacaatgctgcttggagcctctctggtgggggtgctgctgttctccaagctggtgctgaaactgccctggacccaggtgggattctccctgttgttcctctacttgggatctggcggctggcgcttcatccgggtcttcatcaagaccatcaggcgcgatatctttggcggcctggtcctcctgaaggtgaaggcaaaggtgcgacagtgcctgcaggagcggcggacagtgcccattttgtttgcctctaccgttcggcgccaccccgacaagacggccctgatcttcgagggcacagatacccactggaccttccgccagctggatgagtactcaagcagtgtagccaacttcctgcaggcccggggcctggcctcgggcgatgtggctgccatcttcatggagaaccgcaatgagttcgtgggcctatggctgggcatggccaagctcggtgtggaggcagccctcatcaacaccaacctgcggcgggatgctctgctccactgcctcaccacctcgcgcgcacgggcccttgtctttggcagcgaaatggcctcagccatctgtgaggtccatgccagcctggacccctcgctcagcctcttctgctctggctcctgggagcccggtgcggtgcctccaagcacagaacacctggaccctctgctgaaagatgctcccaagcaccttcccagttgccctgacaagggcttcacagataaactgttctacatctacacatccggcaccacagggctgcccaaggccgccatcgtggtgcacagcaggtattaccgcatggctgccctggtgtactatggattccgcatgcggcccaacgacatcgtctatgactgcctccccctctaccactcagcaggaaacatcgtgggaatcggccagtgcctgctgcatggcatgacggtggtgattcggaagaagttctcagcctcccggttctgggacgattgtatcaagtacaactgcacgattgtgcagtacattggtgaactgtgccgctacctcctgaaccagccaccgcgggaggcagaaaaccagcaccaggttcgcatggcactaggcaatggcctccggcagtccatctggaccaacttttccagccgcttccacataccccaggtggctgagttctacggggccacagagtgcaactgtagcctgggcaacttcgacagccaggtgggggcctgtggtttcaatagccgcatcctgtccttcgtgtaccccatccggttggtacgtgtcaacgaggacaccatggagctgatccgggggcccgacggcgtctgcattccctgccagccaggtgagccgggccagctggtgggccgcatcatccagaaagaccccctgcgccgcttcgatggctacctcaaccagggcgccaacaacaagaagattgccaaggatgtcttcaagaagggggaccaggcctaccttactggtgatgtgctggtgatggacgagctgggctacctgtacttccgagaccgcactggggacacgttccgctggaaaggtgagaacgtgtccaccaccgaggtggaaggcacactcagccgcctgctggacatggctgacgtggccgtgtatggtgtcgaggtgccaggaaccgagggccgggccggaatggctgctgtggccagccccactggcaactgtgacctggagcgctttgctcaggtcttggagaaggaactgcccctgtatgcgcgccccatcttcctgcgcctcctgcctgagctgcacaaaacagatgcccagaagggccgctacgtcccgctggaccaagaggcctacagccgcatccaggcaggcgaggagaagctgtgattccccccatccctctgagggccggcggatgctggatccggagccccaggttccgccccagagcggtcctggacaaggccagaccaaagcaagcagggcctggcacctccatcctgaggtgctgcccctccatccaaaactgccaagtgactcattgccttcccaacccttccagaggctttctgtgaaagtctcatgtccaagttccgtcttctgggctgggcaggccctctggttcccaggctgagactgacgggttttctcaggatgatgtcttgggtgagggtagggagaggacaaggggtcaccgagcccttcccagagagcagggagcttataaatggaaccagagcagaagtccccagactcaggaagtcaacagagtgggcagggacagtggtagcatccatctggtggccaaagagaatcgtagccccagagctgcccaagttcactgggctccacccccacctccaggaggggaggagaggacctgacatctgtaggtggcccctgatgccccatctacagcaggaggtcaggaccacgcccctggcctctccccactcccccatcctcctccctgggtggctgcctgattatccctcaggcagggcctctcagtccttgtgggtctgtgtcacctccatctcagtcttggcctggctatgaggggaggaggaatgggagagggggctcaggggccaataaactctgccttgagtcctccta

SEQ ID NO: 7749 - DNA, 1262 bp, Homo sapiens
atgaaataagctcacactgttacctggtaggtactcaaagggagacatcacagtcagaagacctccgttctggtccccactctgctgtcactcagcatgtgacactaggcaaatagcctcccttctccaggcctgttttcccatctgcaaagtaggggtgggtgggtaactagcagctgtccccatgccccaactttgccacagctgctgtatgaccattctttgcaaactgtaaagggctgtgcctcctcccccacttccctcccctgtttgtcctccagccctgctccctgccttcctcagtactggtggttgggaagctgggagctcgggcccctgccctgcactgagtcttcttccctgctctcccaggaacctacaagttccagaagacagagctacggaaggagggctttgacccggctattgtgaaagacccgctgttctatctagatgcccagaagggccgctacgtcccgctggaccaagaggcctacagccgcatccaggcaggcgaggagaagctgtgattccccccatccctctgagggccggcggatgctggatccggagccccaggttccgccccagagcggtcctggacaaggccagaccaaagcaagcagggcctggcacctccatcctgaggtgctgcccctccatccaaaactgccaagtgactcattgccttcccaacccttccagaggctttctgtgaaagtctcatgtccaagttccgtcttctgggctgggcaggccctctggttcccaggctgagactgacgggttttctcaggatgatgtcttgggtgagggtagggagaggacaaggggtcaccgagcccttcccagagagcagggagcttataaatggaaccagagcagaagtccccagactcaggaagtcaacagagtgggcagggacagtggtagcatccatctggtggccaaagagaatcgtagccccagagctgcccaagttcactgggctccacccccacctccaggaggggaggagaggacctgacatctgtaggtggcccctgatgccccatctacagcaggaggtcaggaccacgcccctggcctctccccactcccccatcctcctccctgggtggctgcctgattatccctcaggcagggcctctcagtccttgtgggtctgtgtcacctccatctcagtcttggcctggctatgaggggaggaggaatgggagagggggctcaggggccaataaactctgccttgagtcctccta

SEQ ID NO: 7750 - DNA, 434 bp, Homo sapiens
gcctgttcccaacagccaaacatgcaggtggaaagaatttactgagtgttgactgctcccagcctcaggctaacaccttctctgcattctttcctttgaagtacagcacagaagagcaatccctggagccagagagcctaggttcaagtccaggctccaccgcgtacttgctgtgggactctggtcaggttacttaacctgccctgcctcagcattcttcaccagtgaaatggggaaaatagtaagaactacttctagaattatagtgagaacattagttgctacatggaaaacccctagaacagtgcccagcacttaataagcacacaataactgttggctattgccattactattcatccacagagtagttatggaagatagagtggatgcttctttatcaagatcaaagggggcttttttttttttgagac

SEQ ID NO: 7751 - DNA, 601 bp, Homo sapiens
aaggcatgccaatagttttctcttgggcattggtttttaaagtataattaaaaaattatggatcagaactgatgaaagatttacaaattctagcaattgaaaaagtatctaagattgggaataaattgtgcaagtgtgttaattgaactgataaattgagctaattgtcttgcccaagatacttaactgaagggtactggagtgaaccaaagggtttagaaaacattggtagaatatgtaatcaagaggatttgcaacaatgtttgaaaaaatattttatattgataagcataaaagattaaaagcaggctgggcgcggtggctcacgcctgtaattctagtactttgggaggccgaggcaggtggatcacctgaggtcaggagttcaagaccagcttggccaacatggcgaaaccccgtctctactaaaaatacaaaaattagccgggcatggtagcaggtacctataatcccagctactcgggaggctgaggcaggaaagttgcttgaaccccgggggcagaggtggcagtgagccgagattgtgccactgcactccagcctgggcgaaagagcgaaactccatctcaaaaaaaaaaaa

SEQ ID NO: 7752 - DNA, 288 bp, Homo sapiens
tcccaaattgtgtcaattaatttgaatactacaaaatcgtgcctgctcaagtaggacagatgttgcatattacaatacacactggctgaaagaatgtcaggcagcctattgtgcgtccttctgcatttatttgtactaaatgaacaggaaacatattagtttatttatttatttatttatttagagacggagtttcactcttgttgcccaggctggagtgcaatggcacgatcctggctcactgcaacctccacctcctgggttcaagtgattctcctgcctcagcct

SEQ ID NO: 7753 - DNA, 592 bp, Homo sapiens
catggcactttccacagctagtgtctctgcatgcattgtcgtttggaagcagaatttaattcacttctgaattactttgcttgatgtaagtatgacttcattcacaggaatcttggctaggtgaggtagtaggaaaaggtaagggtgtaaactgtaaccttcatacattagccattttccccaaaatgtatagatgtactggtattttttgtgtagcagagaacaaccttaggaagtagtattttttaaaaggccttttaacctccaaggtaaaataaaggtgtactataaagccatatggtaatactttacaacagctggactgagacaatgtactgctaatttgcgcagttcttttatgtaggctaaatgtctttcttttgctaaatgcagttctgaaggcaagggtattattaactgctggtgctgccccctggtattccgatattcactgctaattatataagccagtacactagtcttagtgaaccatttttcttctgcttggagatatttgatcagaaggaattccacctctggaacaacttgtactaggttagccccctgggaaaattttaatttacaagatcct

SEQ ID NO: 7754 - DNA, 348 bp, Homo sapiens
ctctatctcaaaaaaaaaaaaataataattatggaaaacaaaatttataaaaatctaaaagatatgtgatataaatgtaactcacttaagaagcatcttagattttgtattccccgtatgtttcagagcaattctattggttttaccttcgtatttttatgttggtgatgagaaaacacttaaccatttgtaggtttcagtaattgaaataatactttctggtagtatttttcaaatagaccccaggacccatttacattcttaaaaattattgaggatcccaggccgggcgcggtggctcacgccggtaatcccagcactttgcgaggccaaggcaggtggatcaca

SEQ ID NO: 7755 - DNA, 616 bp, Homo sapiens
ctctgaaattggaatacatcttacagttgatagtatcttatataataattgccactgtttttctttcttaaatcctgtaaaataatgtatgtttacagttggcagcatcttagatttgatgaaatatggtataataaacaagcacatagaaacaaaactagcatgaaatacatcaaaatgttataaacggtcatctctgggtgctaacagagctataggtgatttttattttcttctgtatgacttttccattttctaaatattttacaataagcctatattacttttataaacaaaaaactaaaaatttattataaaagtgaaaactaaagccgaatatggttgagatgatacgagagcacttaagcagttttaaatgtattcaagttggtgggcccaagtagggcattgaatgtacttgcaaatgagattatggaactacttattggcattaaagtgaaaagctctaaagcatagaggacagaaatactagagagattcaaaaacccaattttcaaattagtatggattctattcactgctaactaatcagcttcatgatgaatcctaaccaagttataaagcaaagtattaaatagtttgtgagcccatgggg

SEQ ID NO: 7756 - DNA, 469 bp, Homo sapiens
aaattaccataatttcccacttttctggaaagaggctcttaaaatatgggtaattttctaatgtcaaccatatcttacattttggtagagggctctctctctctttttttttttttaatctttgcaaataatcctctttctgtcttaacataagtatatgtgtacatcaaaagctttactctcaacaatcattttggaagcaaagaaaatatacattgggaggctgaggtgtgtaaatcacttgagctcaggagtttgagaccagcctcagtaacatggtgaaacgcccgtctttaccacaaacacaaaaaaattagccgggcttcgtggtatgcacctgtggtcccagctactcgggaggctgaggtgggaggatcgagggtcgtttaagtccggaaagcagaggttgcagtgagccgagattgtgccactgcactccagcataggcaccacagtgagaccctgtctc

SEQ ID NO: 7757 - DNA, 1874 bp, Homo sapiens
  misc_feature (787)..(787): n is a, c, g, or t
ctaattcttaggtggggtcaagatgattgcggggggcagtgggggcagcctgtggtcaacgttcaaagccttccagtcatttagaaagttgaaatgtgcttggtgctgggctagaatcattaggaggaaatagctgcaaacctggaaacgtccctggagaatacttaattcaggaataaaggtttggattgatgagggctaaaataaaacttggcagcgacagcattctagtaacttttagccacttctccccatctcactggggtattcctgctggtatattcactagcctgagctctgctcctgagagggctgcaggagctgggtgggttgggagacacaggtgtgtgggaggcgccttcaccaagtgccgcacaattgccgggtacccctctgtgcctttaactggtcggtaaacagaaagcaggatgtgcttatctgaatagtgacaacagttgcaagcactcagtcacaaagttcagcattctggctttagatggaccagcgtggggctctggaagctggtgacttgggagtgcctgccgtacacatgggtggggaagggatggaaagtttagcaaggacttgccgagttattaagcaaagactctgtaagtgcgtcagaatgggaaggcagctcagaacctttccacttcaccctttttgttgttggaaataggtaaactgaggccagtgaacaggaatgtgtatttcaataataccaaagctaacttctatcactgtgagttgtgtgccaggccctgggttcactgccttctgagtgttntctcttttaatctctgccacagctctgtggggtaagcactggtgttatacccatttttcagataaggaaacagagcctcagagagtcaggttacttcctcaaggtcatagaactagtaagtcacagacctagggcacaggagcaggtctgtgtgggggtcagagccacagctgtcccccacacgctgggggcctcctccacaaagtggtttcaggtggggctcagcccacctctgggggaacccattcatatactatgcaaggtttcacaggtgtgtgaattcattttccattgctgcgtaataaattaccacaaacttaatagcttcaaacaacacatatctgtcattccacagtttctgtggaggccaggcctggttttcctgagttctctgctcagagtctcacaaatctgtactcagggggtcagcctgattatggtctcacctgaggcttgggatccccttccaaactcactaactgttggtggaattcaattcatgcagggagagcactgaggctgcaagctcatggagaccacccactgtttcctatgtgtggccctctccacaacacagccctttgcttcttcaaaacccaaccaaagaatctctgtcttcaggaacagcctccgaccctctttgaaggggctcacctaattaggccaggcccacagaggaaaagctctcttttgattaactcagagtcaactgattagggactttatacctgcaaaatctcttttgccacacagcataacttaatcaaaggaatgtattccatcccattcatggatcctgcccatactcaagggaaggccataatacaagcatatggtcattaggggccatcttagtcactactgttcgtggattgttctccagcttcctggaggagaggagagcaggagacagagctaagagtgtttgtaaaatagggcagtgggaaaaggtaggtcttgtgagtagcaggctacttaagatgcctagtgggtctaaatgtcaaatgctattggcagattttccgtgcaaggtatgaccaaaaaataattatttcattaactttgtgcaaaaaaaaaaaaaaaaatg

SEQ ID NO: 7758 - DNA, 375 bp, Homo sapiens
atacatatcaacaagctggataataccacttgaggattaagaatgaggttttttttgcaccaagttttatatatcatctttgaagctggccatatcagaggagaccttctaaatatgctttaaagccatggcagcatcattggagaaacctgtatgtcttcccaagatgattatgttaaaggatagcttttatttggatatttaagttttgatgcatttatttaaaaaacaaaaaacaaaaaaccaatccggtatttggtattcttgccacagatctgtaatcaagacctgataataaggtttatggatttctccaaagcatacattttctttcattgctgacttacattttatttctacctctcatttagcatg

SEQ ID NO: 7759 - DNA, 486 bp, Homo sapiens
tgacatgtgcatgtgtaaaataagtgctgttatctaaaaaatacatcataaaagtttaccgtacagtgtgtgcacccttggacatgaatagaagacaaaagcaataaagccacttagtagtggtttactaagtgttctgccactcttgacagggtcctggtctaaagctggcactgtcagcatgtgaaaggctgcagtctgtaaggacctggggaagagaagacattttctgtatgaacataattgtacagtaatattgagcctgagttgcaggttttataaaggaagaggaggctaagtacttactgaaggaagagctagaccttttctctttattctattatgggagatttttgacattttatgagttagaaaaagttatctttttcattctgatctgttagttttatacctttaatccccaatcttactgtgaattactggagtctatttttaaaatcttggaaattttttatttagtgctgc

SEQ ID NO: 7760 - DNA, 905 bp, Homo sapiens
aaagaagagcacctgtgggtaactccgtactagttgtggggaggattttcccacctttgcttcttgacacttaatctactgagtcctttattgctgagtttatggtgagaacagtgattctcaacaggtgattctcaaaagggaagactgggcagtttcaataatgataatcagtattctaatatttcacattaaggaaaagaaagtctattcattccaccacacacactatagcaggaaaaactaggccaaactcttcttgaccaatatagatatggtagatatggaaaagaactggtgtgggggcaggaatgaagatgggaacacccccacaagaagccagtaacagaatgtccttaggaagaatgagattcttgtccatcaaaaagaagtaggaactaaacaaggtcaagaacatgaggttggaggttacattgtgtggctggaaagaagccacacagagactgagaaactgagaaggcaaggactcttctgacagggcaaggtggaaggtggtggaggaggtgacggtgctattactggctttcacagataaatgatagaataagggatacaattgacaacattgagttgtcaatgagttgcccctcagaggggaaaagaggaatttctctcctagaaacctcagttttgctattgttgtcattattgttgtgttaacttcactccaagaagatcagtgcccatgaacataccttacactggaaaaactgacttgctaaaaagaaactctataaagcagactaactctgagggacttttcctcttgacttttttccttgttgatacgtgaccccatgtcccagcacattgttagggtcctgccattaaaagattgcagaatgtttaataaaaacattttagatctctttaaccatctgctt

SEQ ID NO: 7761 - DNA, 750 bp, Homo sapiens
ggtttgaaatgaggctggtataacagaatagaactttggtttgacagggagtatacagactttaatattaggctggtgcaaaagtaattgcggtttttgccattactttcaatggcaaagtatgtggttgagtatgatatggccttgaagtatttctacatttggattagttaaggttacaagtagtttgcatgggtttagtgcttataagcattgttagacaactgtcgtgatggttacatgttatatagtttcctaatgtctccagactgctccagatatctgggataatctgagaaaaataataatctttcttattattaatgaccaattcatttagcactttatagtagtggtttttattttttggtttttgtcactcgccaacacaaacatctcttttggaattcagtggccactttctgggtgctctagaggaccattgtgaattaacatggcctaaaatcgtattttaagaatatcatgtaatacgtactgaatccagtttaagaagtttgactaaagcaaacaatctaaacaatttaaaatgactttgaatccatccaaaatcacatgtgtatttacctatcagtattctgcaggtcaatgaaattacatatgagtgaggttactccattacaacataggttgtaaaagcaaaagattagaagcaaggctggtatccatctaaagggcactgggtgaataaacaacactgcatctacacaaagaaataatgtacttctcctt

SEQ ID NO: 7762 - DNA, 447 bp, Homo sapiens
ggtgtgagccactgtgccaggcctagatttgggggccaccattcagtcgctgctctcccacacctgcagcagccccagcccgcccgcagggaaccttccttgtggcagagacaacaggaaaaggaaaggaagaggaacccaggcctgggttcccggcagagctgtccgcagagcctgtgcggggctgcaaaggcccctctgttgtcacaacacccctggtccccgtttcagatgaaaccgggagaactttcaactgcaacaaacactcctgggaaaaggagaggccaatccccatggcttccacagagagcacagccagacccctttcatccagggcccacaggcaatgtttgttcgattttgtttctttccttttgaaaaaaaagggtgctggtttggtttccagttttactgcagacacacagagaggcccctctctggctcaga

SEQ ID NO: 7763 - DNA, 242 bp, Homo sapiens
gacagacatcacttgtcagcaaatctaacaaaaaccaaaggtatccttaaaaaatattagagaaacacagtattattgtagtttacataatttccctcaaacatagtaatgtctctttttcaattaaatagcagtaactggggtgctgccaaaatgctctagtatgcagtgttcctatcagcatcagaacagtaattcacctctatcctgtcactaattggcacaagcattcacttctgccc

SEQ ID NO: 7764 - DNA, 516 bp, Homo sapiens
gaaagatctcaaattaataatctaacatcacacctagaggaactagagatacaagaacaaacaaaccccaaagctagcagaagaaatcactaaagccagagcagaatggaatgaaattgagaccaaaaatccataaaaaagatcaacaaaagcttgaaagcttgaaaccttgaaaggaaacgttggttccttgaaaggataaacatgactgatgaacttcaaaagtaaccttggttccttcaaaggataaacatgattgatgaaccactagctagattaacaaagagaaaaaaaagatccaaataagcacaattagaaatgacaaaggtgacattacaactgatcccacagaaatacaaaagatactcagagaccattatgaacaaatctatgcacatcaattagaacatctagaggaaatagataaattcctggaaacacacaacctcccaagattgaattggaaataaaatgaaaccctgaacagaccgataatgagttctgaaattgaattag

SEQ ID NO: 7765 - DNA, 347 bp, Homo sapiens
agacatgagctgtttggagtctctgactttggagaaggcctaagccgtcttttaaaaggctcacctgattaggccaggcccacctggagtgaactctcttttgatctgacttaaagtcaactgattagggacttgaatcccatcggtaaaatctcttcagagcagtacctagatgaattactgggaactgttgtttggcctagccaagttaatgcatcaaaaagccatcacaatgctcaaatgccaaaaaccactccaggctctttccttgtagacattgcctcctctcatatgtcctgcagacaaagccagggttgttttttaagtcatgcttgcacgcattatca

SEQ ID NO: 7766 - DNA, 877 bp, Homo sapiens
gccaagagggaactttttaataaagctagtgggattcccttgacagcagaaccagccttgggacttgatgcttcaccgtgtcagaatccgtccctggtgctgcctttcagagaagaggcttgatgtgtgaggggtcagggggagtgctccagatccctgaaatgcccttcccagaccagtgacaggcatttttgggtgccatcgtgtgaccttcacggcacagcaaacagtgggcactaaccctgttgtcctgtggaaatctgggtctctgaatcctgccatttccttcctggaattggccaggaacttgattttctgggctattgcttgctagtgtcccctgatgcatgaaggatccccccatgtcataggtcccacctgcctgctgtgcatcccgggtggccagactcggcttctccaggtgcacttgtcccaggtggcccggtccgtaggctggaagggcagctgcaggtgcactgcctcgcggacaggttaggatatggccacgcagccatccatcttctacagcacgcacaccccactctctcccccagtcaatatgtctctctccgatgggaaagttaataaattttgctctagattaaaagtattgatcatttcatttgtaaacgataaataaaaagggggaacttttcattgcgccaggggtggcacctggcgtgtgttgcgggggtgattgcgctggctgccggggggtgggcttctcatatgcattctggccggccagctgcattgatttcctattagtctcccagcaccacccagtaacacatcatttcagtacctgctattaatggtcttttgataaataatcacttgtaagtcaataaatttttattaaacagtgaaaaaaatt

SEQ ID NO: 7767 - DNA, 350 bp, Homo sapiens
tgagccgagattataccactgccagcctgggagacagagtgagactgtgtctcaaaaacataaataaaaaataaaaaataagcacataaatatataaatacagatggtaataacacagcaaataagacatttgggaatatgcaatatgtggttgtgaataacaagaatgctagattaattggaccataagtttgtggtgagaaatagtgggaaaagactgcaagagagacaggagacattgtgaaaagcttttaaaagcattgtaaaatgctaacttgaggaatctgcattttcttaggttggtggagggaagctaataaaggtattttgagcaggacagttatatgata

SEQ ID NO: 7768 - DNA, 156 bp, Homo sapiens
ggaggcatatgggctatgacttgagatgctaaaagagccataaaagaaaagcaaggtatcccttttcctccctgctcaccccaccccaaccaataaattagtaagaggatcagataatcagcccttacaatgccggcatgtccctgatttggccag

SEQ ID NO: 7769 - DNA, 312 bp, Homo sapiens
cctccactgagcagctagagggacctctttaaaacatccactggtcaggccgggcacggtggctcatgcctataaccccagcactttgggaggccgaggcgggtgcatcacctgatgtcaggagttcgagaccaccctggtcacatggtgaaaccccatctctactaaaaatccaaaagctagctgggcatagtggtgcatgcctatagtcccagctacttgggaggctgaggcaggagaatcgcttgaacctgggaggtggaggttgcagtgagccgagattgtgccactgcgctccagcctggtgacaga

SEQ ID NO: 7770 - DNA, 788 bp, Homo sapiens
tgagtaattttagcagcctccaaagatgaccaaggaggaattttaagtcattaaatactcatgaatttttagatatctgatgtattttaattctttctcacacacaaattatcccatttttggccagtgggagccccttaatggcagttcttgtgtctttctgatatgaccctaaaactgcctttacaaagttatgacagtaagagaaagctggcatagctgactccatcttgcttctaacctccaagctgtcattgctgggcataggtcaagctaactttgggaggattttagtttacagtttaaccttaaagcaaggatgataatagccactcccaaaattaaaccacctttgtaaaaattaccggaagaccacaaggttagggattatggagaagggcctggaattctggttaaggatacaggcatagttaaacaataaccagccattgttccagaggtcacaatatgtgtaacttctccaattattcctgtagataacatcactatcgtagaacctaagactggccttttgagatgtttttagacttttacatttatggcaaccaactgactctacccagaccatgactcgtgactgaaatggtcctgtggcccccatccagaggctgactcagcacataaggaccatttttccaggctcctatgactgcatccccaactaatcaacatttcccattccctagcctcctgcccaccaaactctccttgaaaaactctaacctccaagccttcaggagactgacttgaataattccgagttcttc

SEQ ID NO: 7771 - DNA, 370 bp, Homo sapiens
gatggagcggggctcctaaggacaaggagcacagtgtctgctttctttgcaagcacagtgctgacaaggaacagaatacccacagcgactgcttccaggaaacggctgcagggcgggcgggactctggcgagacgcgcccttcccagcaagccggcctgcagagttgggattttctgtctccattcggtggtataccaagtgcctgcctcccacacccagctgcccctaatccctgcctgaaaacgtgctcctgggtcacggaattcatgctgagacacgagccacacacagccagggctcaggggtccaccctccagggaacaccaccccgctacagggccacgatcacacacacaccccgcggagcat

SEQ ID NO: 7772 - DNA, 425 bp, Homo sapiens
aaaggttcacatcaaaactcagcgaacattgaaaagggataaatgaaattgttgactctgcagcttcctgaggcaatcaactttggatctttgcctgtgggagcatttcatctgagtgagagaaaaggtgagcaggcatgagacagatgactttcccaggtctaacagttctgccagagttgtgtgtgtgtgtgtgtggttttttgtttatgttttttaatctcagaaggaagttatctttgtggtatctttcattcaaagttcttccaacacatattaagaaaataacaaactagtggattttattttaccagtacatttgtgaagactaatgctgagcctagactaggatactagttgtcatctgaatatgaatgtgtagagaaaatagagatgctatgtcttaatggatagtgaattgaagg

SEQ ID NO: 7773 - DNA, 266 bp, Homo sapiens
gtgaggagagtgtatgtgaccagttgcagcataattaagagggactgtccattgggtgccaaacatccattggggtttctacttaacttttttaaaaagttgtttctataagaagagatgtatacatggaatagtcactgcagcactgtttgtaataacaaaaaactagagacaaactaaatgtctatcactagaaagctgtaatagtaaattatagtacatctatattgtgaaatactatgcagccatcaaaaagaatgaggccc

SEQ ID NO: 7774 - DNA, 714 bp, Homo sapiens
tgagacagggtctcactctgttgcccaggctgtagtgcagtgatgtgatcacatctcactgcaggctcaaccctctgagactgaatcaatactcgcagctcagcctcctgagtagctgggactacaggtgtgcaccaccacacccgtctaatttttgtattttttgtagagatggtgttttgccatgttgcccaggctggtcttgaactcctgggctcaagcaatccatccacaaacgttggcctcccaaggtgctgaaatgacaggtgtgagccaccacacccagccaactgtcttaaggaaaaagaggcacagagaaactaaagtttgtaaagtcatacaacctgtgctcttgccaacagaaataagaatacaaatgagaagtctgagcatatcaactgtcaaaacctgtcacatatgtctctactccaagcaagacaccaggcagagtctttgtcatgactgtactggccaccagagttcacctcacctgccagcccagctgaactgggatggctgcctctaaggctgtgttgaggccatagctgggctcaaggagaaacagtaccggagtcacactgaaactttaggcagcatatacctccatcaatatgatcaatgaggcagtacacgagagcacataggaaactgccaaggactttaccaatgtccgatgatgatgactgtcatctcctcagaacaccagattcaaaa

SEQ ID NO: 7775 - DNA, 441 bp, Homo sapiens
gccacgccacgtaccaaaaggctcgcgaagaaaaacgcgggcgaagttcagcatccccgaacagaaagggaactcattccagaaggggggttcacgggtctgagggtccttgggtggggaaagcagtattggagggagaagacagaagggatggcaagacagaggaaaccacggggacaaaaaggaagggatgaggagccctcttactataaaagggactgacggacgggatgcagagcaatgggcccccctcgaaaaatggactggcaggcccttccgcacccccaaacaacctcgcaccacctgaaagcggggagcttgagtttggggctgcgtagatcaaagcagggtaagacgaagggaaagagggaggggagcttggaagcaaagtgaacaaagaggcaaaagaggcaaagttggaaatggaaacgagaaagggag

SEQ ID NO: 7776 - DNA, 512 bp, Homo sapiens
gtcgacttttttttttttaagacgggagtgtcacttttgttgcccaggctggagtgcagcaagacactgtctaagaaaaaacagttttaaaaggtaaaacaacataaaaagaaatatcctatagtggaaataagagagtcaaatgaggctgagaactttacaaagggatcttacagacatgtcgccaatatcactgcatgagcctaagtataagaacaacctttggggagaaaccatcatttgacagtgaggtacaattccaagtcaggtagtgaaatgggtggaattaaactcaaattaatcctgccagctgaaacgcaagagacactgtcagagagttaaaaagtgagttctatccatgaggtgattccacagtcttctcaagtcaacacatctgtgaactcacagaccaagttcttaaaccactgttcaaactctgctacacatcagaatcacctggagagctttacaaactcccattgccgagggtcgaccggccgcgaatataaaat

SEQ ID NO: 7777 - DNA, 377 bp, Homo sapiens
tttagtcaatccacacagtacctactttgtacaaaatgcctggatgtgcaaaaaattacaggccttacttatccttaagggtaagcttactatatagttgggaaaatagaaatgtaaaaggtagaatagcagtatcagagatgacacttcaaagcagtaagtgattaattggaaaattgaatgggattagctgggtgcagtagcttgttcctgtagtcccagctactagggaaggctgaggtggaaggatcactggaacccaggagtttgagagtttgaggctgtagtgcatcatgatcgtgtctgtgaatagccactacactccagactgggcaacacagtgagacctgtctcaaaaaaaaaaaaaaaacagagtc

SEQ ID NO: 7778 - DNA, 312 bp, Homo sapiens
tagcaaattgaagccacaagtgtataaaaatggtaataacatcctagccagcttgagtctgttacaggagggcaaagtcggttcattagaaaatctgttcatataatttaccacattaacagatgagggaagtcaagttatttgattatctaaattgatgcaggaaaataaataacactgaatatctgttttatgataaaacacttagcaagttaggaacagaaggggacttctttaacttgatgaatggtatctacagactacaatagatttaacagtcagccctctgtatctgtgggttcaaccaactgg

SEQ ID NO: 7779 - DNA, 435 bp, Homo sapiens
gctaggagtgcctccttgctgttcctcttgttgtttccactgacagtggagtggccttgttactgctgggtggtggttgagagttctggctctctactagggaggacacaacctcagtgtagagaggcggggataccttgttactgtcaggcacaggcggaggtccagtctccttactccacctacccaacagggtagcttgaggcacttcattattgcctagtgagagtggaagtttaggccttccactcccttcagtcttttctggccagggtgaagattgggccacagtattttctgtggtgtttggctgaactagaatagttattggctaaaagtttcctgttttatggtctgctcctttcctggtattttggctagagagagccaacttttgcagacacttgtatatttgttgttgttggtggtgctgct

SEQ ID NO: 7780 - DNA, 501 bp, Homo sapiens
agctgcttccagattggcttctagctgccagtgtgaccttgggcagaaccttcaatgtctgtggggctgtgttttcttatctggcaaatgggaattatgctgttgcctcgggaatgttggaaggtcaaagacagtaagaagtacaaaagctgcagagaatcagtgctgcctgcacaagcatgtacaggagagtcccctgtcttatctggagtcagggttctggggatccacctctcgtgcgtgttatcccatctccaagcctgggactcctgggacaatcagaaggtgagctacctgggtgcaccctgctttgggaaaaggctgagtccaaccacctggctcactttttgggtgggacccctagctttttagaagccagaacaaacttttggctttgctggaactcagaccaggagtcactctgggaaatgctgaagccacagtaatcccatgccctgtccccactgggaagcaggggacagaaaatagtcctgagggaga

SEQ ID NO: 7781 - DNA, 516 bp, Homo sapiens
tcaatagtttttccttagcttatgttcagtattttcttcccttaaaaatataggcttctaagtaaattagtgaatatgtttaaaagatactaatcactcttatgcttctttagacggtcacagaggtcctactgctaataaagtgatatttctacttaatgccatgtttgagacctccaattaaacatttagaggccaaaataacaataaaaaaactgatttaaggctgaatttttgagacctaaaaatcatgatgtaaaaccaacatgtcattctacatttttttaaataaaaagaaactaaattcacatatgtcaaagtcattttaaattactataaaaattaagaagaatctcttgtactgaattgcttctcggtgcttaaaacaagtagcaaaggctgggcacggtggctcacgcctgtaatcccagcactttgggaggccgaggcgggtggatcacaaggtcaggagatcaagaccatcctggctaacacggtgaaaccccgtctctacta

SEQ ID NO: 7782 - DNA, 675 bp, Homo sapiens
ggctcggtacccccctaatggaatcttccatttttgcaatttcaaaactctaacttgctgtaaaattcccgaattcttttatcatctggtctcacttcacagaaagctccccgggagccattagccttcagtgaagacaggaggcaagccatcatgcttttggccacacttgggtcagatacttttttgtgaatgtccatctgtatcataaaaggggaaatttttatttcatctttaacttcaatttaagtgaaagaccaggaagtaatgcactctactttgcgtaattgaaggcaataatttaatcatttaccagtgctgtttctctctatactatgaaagtaatctctggaatggtatggctactgcctgatagtgtgcaataggagagagtatgtcagatttaggaccagcactttttatatgctcatttgtaatgggaatactgaagctataaataacaaccaagaatccatccttgtagtgtgttatgtatttcaacatagcatggtgagtagccacagaaaagaaacacttaccctgaaacaaagaatttttgtgatgagaggaaactgatggtaaatggaagagaagagggtgctctctgttgcctttttattcatttgtctagaaatcttgcttggttatctctctaagcaggaaagatgggattcc

SEQ ID NO: 7783 - DNA, 507 bp, Homo sapiens
ctgtatagaaagtgcatgttgtagcaagttcttagctcagaatgcttggcacagtacaaagaatactagctcaagcatgaagagagttgacttctactgccaatctaagattaactcgctattttcttttttttgagacagggtgtcactttgttgcccaggctggagttcagtgatgccgtctctgctcactgcaacttccacctcctgggttcaagcgattttcctgcctgaccctcctgagtaactgagactacaggtgcatgccacctgcccagctattttttgtatgtttagtagagacaggactttgccatgttggccaggctggtctcaaacttctgacctcaagtgatctaccctcctcggcctccgaaagtgctggggttacaggtgtgagccactgtgcctggccaactcagtattttcatttcagcaaattatatcacctttttatgtcttggattcctcttctgaaaaaatgagtatcataataatacgctgttg

SEQ ID NO: 7784 - DNA, 440 bp, Homo sapiens
ctactttgcgtaattgaaggcaataatttaatcatttaccagtgctgtttctctctatactatgaaagtaatctctggaatggtatggctactgcctgatagtgtgcaataggagagagtatgtcagatttaggaccagcactttttatatgctcatttgtaatgggaatactgaagctataaataacaaccaagaatccatccttgtagtgtgttatgtatttcaacatagcatggtgagtagccacagaaaagaaacacttaccctgaaacaaagaatttttgtgatgagaggaaactgatggtaaatggaagagaagagggtgctctctgttgcctttttattcatttgtctagaaatcttgcttggttatctctctaagcaggaaagatgggattcctcttctttagaaaaagtttctacctgatgacttaattgg

SEQ ID NO: 7785 - DNA, 426 bp, Homo sapiens
atcctaaagtatattgattcctgtgaatatttaaactctagacttttagatacctacatcatgccctgcccaataaacatgcttcaatttacccccacagttttagagcaggaactgatttgtacataatttcactgtttacgtttttagcactcctatccctgatcttcatggtgatgcacagaatgtcttagactccaaaaaggaacagcactagaagatgtgagcatatttaatttgtaatgcaaacctgccatttaggagtagaaaatgtatgataaaactcaagtattacatgcagatcattttaattttctactttgctttaatgcaatattgtttattcactccatgtattgtattcagagaaactcctgtattgtttcctactttgtgaaatatatttttataaatactttgttgtca

SEQ ID NO: 7786 - DNA, 354 bp, Homo sapiens
gcaaatcaaagaatcgtgacaataccaagtcctgggaatgacacagagcaatgggaactctcatgcattgcaggggactgaggtggggagcacaaagtggcatgatcagtttggaaaaccattggaaatttcccatcatttaatatacttccacctactgtgagccagcaatcccagtcctagatttttacctacgagaaataagacgacacaaaaacccattcccaaatgtttacagcagctttgttcataatagccagaaacaggaaacaacctaagtggccttcagttgggaaatggaaacaccacactgaggaatgcgtatgcccaggaaggccctgatctcgcctgtgg

SEQ ID NO: 7787 - DNA, 313 bp, Homo sapiens
tagtcagctgatgtgaatatgaatattaatcaatataaactgatccagaaatgtcacagagtatagaattggtagacaaaaacattaaaagttattatacccgcattccatatgttcaagcagctggaaaaaatattgatcatattaagtagagacattaaaaatatctacctgaaatcacattataaagaggaaaactatcattactgagatgaaaaatacactggatgagattaacagccaattagacatcacagaagaaataatttgtaaacctgaaaacatagcaataaaaattgtgcaaaatgaagca

SEQ ID NO: 7788 - DNA, 339 bp, Homo sapiens
atttgtgtgtgtgccttacacactacagtaggatgttcttgaggacaaggacttttcttgaaaattttcccctagcacttcgcagtctctggcttctgttttttcccttttgtcaaaggtaaaaattcaggatttgtttattgctttcatctcgaaaccctcctaatcaagagtgcttggtgactaaataccgaatggaaaattaagaacaaaaaattccagaaaatgttttcagtacaaatattagataatttttaaattttcaattgttttttaataatccaatgtggggcatagggtgtagagtgaaggggaagaaatgaaagaaaaagattgttc

SEQ ID NO: 7789 - DNA, 464 bp, Homo sapiens
tatcccaggctcctccagttctctttcaatcacaagccagactacccaaccacttaactctctaggcccagatatgacttaattctcccactcctgcatgtttgttgccacttccccattttgtgttaacaattaacctgaagtattatgttaacaattaacatgaattgtgttttggtttttaaggtcggagtaactaggattactcaataggatttaaatgttcaattttagcacacatgtacaaggcgctactttgtacatgacaagatgaagtggtttaaaaaaaaaacaaaacataaccacctttcacaaagggttctcattcagcctcctgcttgtgaaagatacgactttgaatagtgaaagtcccaagaagggtaattcaagcaaaactggtttctagtttgccttgattcaaattctttatgctacttgacccatttctcttttcctcttgcttc

SEQ ID NO: 7790 - DNA, 273 bp, Homo sapiens
cctggggcctttccctttactccttggcccccaacagtgtgtgattactcactctgagaagccacagttatcacagagaaagaaaaaaacacttgcccccagttagatcaaattctgagctgattaactctcaaaccagaatcacttggctgcaaggaaaagaacattttcttcatcttattcttcaccagcagttaaaaggacctatagttttgaggctaagtaccgtaattttattacttaaagccagtttaagaagctcagctcttgtaa

SEQ ID NO: 7791 - DNA, 586 bp, Homo sapiens
tattgtaactattagagaatttaaagttatacataggacttgcattatagttctattgcatagtgctactctagatacaactaccaatatacagagggtcatgttaaaagccatgaaagcaatctgcaaaatcagtgacgaactcacagggcaaacttgattttttcaacaaattgtgcacagaaagaaataagaaaaaaacgaaaaaaaaaaaaaggcaaagaagaaaatgtaaactgagacttgagaggtctacttcaatggcagtctgagatccatggacctgctcctcagaacaactgtaatcagtaaaagttactttaaaaaacctagccatttaaagtctccagaaattggctgggtgcagtggcttgaggcctgtaatcccagcactttgggaggcccaggtgggcggatcacttgaggtcaagagtttgacactagccttgccaacatggtgaaaccccatctctactaaaaatacataattagccaggtgtggtggctggtgcctgtagtcccagatactcaggacgctgaggcagaagaatcgcttgaacctgggaggcggaggtggcagtgggcc

SEQ ID NO: 7792 - DNA, 446 bp, Homo sapiens
gggaatgaagagacaagagctctctttatgccacgtgaggatacagcaaggccccaatctgcaagccaggaagagtcgtcacgagaaccagaccatgtaggaactctgatcgtggacatttcaacctccagaactgtgatccaaaatgcatatgtatctttggaagaaactctgaagtaaaggccggaatattctttgtttaaaacattaaaaacaaaacagaccaaagcatcaagcaagaagtttcctggcaataaactaagcacagcattattttttaaggaacacaaattaagtgttcaacctgtggcaaatttgtactttctccctgaattatgttgttatcaaagaaaaaaattgggaagcatggcaaaatatcatcaaaactgaaactagaattaaacaaaactaaattaaaatgaaataaaatgatgtccattcttaat

SEQ ID NO: 7793 - DNA, 471 bp, Homo sapiens
attcacatataagagatcctctataaggcaaccagtggatttatcagcagaaactttgcaggccagaaaacagtgggattatctaattgaagtgatgaaagggaacaagaatgtggttattttgccaagaaagaatactttaactcacaaagatgtccttctgaaatgaaggagaaaaaaagtctttcccagacaaataaagctgaggaaggtcatcatcactggatatgcctttcaagaaatgctaatgggactttttcaaggtgaaaaaaaatggatgataattagtaacatgaaagtacaatactcactagtaagtacaacaaaagacatacagtgactgaatggatgtataaaaataaaaaaaaaaaagacccaaatatatactgcttacaaaagtctcactttacccataaggaacacatagactggaaatgaagggatggattttctgctggagcctatgtgggg

SEQ ID NO: 7794 - DNA, 501 bp, Homo sapiens
ttttttagctcaaaatgtttatctaacagataaatcaaatggagctttctgtacatacctcattacaattctaatttattttcccaacagaatcttcacaattatgtaaaaattggcacggtcctgctagtgacacttcctattctttcataccataaagcctgagcttataaacaagctgcagagagaggcattttcattacatacatcactgcattgtggcggtatctccagaagggcttaaatgcatcatgtacttttacccaaatggtatctgaacaagagtgttggaagagatgtcagttcttgggccctgacaatgttgtttcctagcctaaaaagtctgagaaatgtggaatattcctacctctttctgtgagaagtcagaaaatgaagagacgtattcatctttaagccaaccttccaaatttacctgagcatagagcaccaccccttcaccaccaccctcttttctttcctttggaaattcttattaacatt

SEQ ID NO: 7795 - DNA, 431 bp, Homo sapiens
tgagttaacggtatttcaagccaaaccccagtatatgatgcagaacaaggacccaaagtgaggctgaaaggtgaacttgcaagtacaggcttatcatttcatggaatatgattatttagctattttaaagcagttgcttatctactacaggttacttattgtatggcaaaaatgaaaacacagatctctgtggatccaaaaacattttggaagctatgttaagacatcatttacgttggttttcacgtaagtgctgggctttgaagcattttttatttttttaagacacaggatctcactgcgtacactggcgtaccctggtgtgattatagctcactgcaacctccaactcctgggactaagcaagtctccccgctcagcctgtagctgagctaccacgtctggcctgaagcatttctagttctagtttg

SEQ ID NO: 7796 - DNA, 458 bp, Homo sapiens
taatgagggtgaatggaagctaagagtgcatcccacagcccaggcagttccagacctgagcctgacggcttctgccagggccacataccaggttcttttccttgatctctgcccacgtgtcagcctgggccacttgggctgcggtctgggtaccatccactccctcattaagcaggagccccacccacaaggctcactgcccagattgccccacaccctggcacctggggaaggcagtgttgccgagggcctgattggtgccaggcactgttctaggccctcagggatctggcacttatcaaagtttgcaaaacgccgggtgcagtggttcacacctgtaatcccagcattttgggaggccaaggtgggaggattgctttagtccaggagttcaagaccagcctgggtaacatagagagacccagtctctatttcaaatatatttatattaaaaaaaa

SEQ ID NO: 7797 - DNA, 305 bp, Homo sapiens
gcccttaaaagagccaaagaatcactggtataagctgagtaatttgggggaggcaaagaagattctcagtgccttccttttctacctaaaaaagaaataatatcgatcaatttgggaagttgataaggctagtcaacacagacgaaataaatgagaacttctcattcatcataatgttatggagattatcagcataatgttactaagattatttttaaaagatagttcttgaaagttatgagaaagaggacatgatgagggagtattgcttactgggataaaccatacactagggactcaagcat

SEQ ID NO: 7798 - DNA, 312 bp, Homo sapiens
gtacgacaaaatgactgataagcatctctttctcattcaaaggcaagtagaggtaaatccctctttccagagtgaataaactttttcaacaacctctcacagtagagacttccacttgagtttcattgcccagatgcttatcagtcattttcactaataagtttacaacagtgacaactgtatggcaggtggtatgtaggtctatgaaagcgcaaagggcgtctgacttgggctgggtgcattcttcacctccctttaacaattaagtgttatcaagtactgaagcagttaatctgattagggcataggcag

SEQ ID NO: 7799 - DNA, 926 bp, Homo sapiens
tggaactgtattcagcggcgacagcggcgactgcggcggccgcgggagggcatcccgttggggatccttccgcacactgaagagtacgtcttcgggtctacccctaatcacataatggctgtgtttaatcagaagtctgtctcggatatgattaaagagtttcgaaaaaattggcgtgctctttgtaactctgagagaactactctatgtggtgcagactccatgctcttggcattgcagctttctatggcggagaacaacaaacagcacagtggagaatttacagtctctctcagtgatgttttattgacatggaaatacttgctccatgagaaattgaacttaccagttgaaaacatggacgtgactgaccattatgaggacgttaggaagatttatgatgatttcttgaagaacagtaatatgttagatctgattgatgtttatcaaaaatgtagggctttgacttctaattgtgaaaattataacacagtatctcctgtaagtattttttaaacaattctattttaatcaaattaaaatttagctctatttattttgaattatagtatcaccagttatagtaacttggtaatgtttttgctttgtgaatcatgttaaaaatgggaaaatttagctacctgaaagctacttattacttgaaagaaagatttgtggtaaattttcttggacttgtgttatgtatttagttgctatacggatagcttcttattagatcaaaaattcctaacaaagaaattagtcccaaatgcctgatttctttttgaatcatgtcaaagatggctttggattcactttctggaattaatgtgcatctgttcattggcatatgttgggtaatgatggggtgactttctatggattaataatgttattttactacatataggtatcatttattttat

SEQ ID NO: 7800 - DNA, 2234 bp, Homo sapiens
tggaactgtattcagcggcgacagcggcgactgcggcggccgcgggagggcatcccgttggggatccttccgcacactgaagagtacgtcttcgggtctacccctaatcacataatggctgtgtttaatcagaagtctgtctcggatatgattaaagagtttcgaaaaaattggcgtgctctttgtaactctgagagaactactctatgtggtgcagactccatgctcttggcattgcagctttctatggcggagaacaacaaacagcacagtggagaatttacagtctctctcagtgatgttttattgacatggaaatacttgctccatgagaaattgaacttaccagttgaaaacatggacgtgactgaccattatgaggacgttaggaagatttatgatgatttcttgaagaacagtaatatgttagatctgattgatgtttatcaaaaatgtagggctttgacttctaattgtgaaaattataacacagtatctcctagtcaactactggattttctgtctggcaaacagtatgcagtaggtgatgaaactgatctttctataccaacatcaccaacaagtaaatacaaccgtgataatgaaaaggtgcagctgctagcaaggaaaattatcttttcatatttaaatctgctagtgaattcaaagaatgacctggctgtggcttatattctcaatattcctgatagaggactaggaagagaagccttcactgatttgaaacatgctgctcgagagaaacaaatgtctatctttttggtggccacgtcttttattagaacaatagagcttggagggaaaggatatgcaccaccaccatcagatcctttaaggacacatgtaaagggattgtctaattttattaatttcattgacaaattagatgagattcttggagaaataccaaacccaagcattgcagggggtcaaatactgtcagtgataaagatgcaactgattaaaggccaaaacagcagggatcctttttgcaaagcaatagaggaagttgctcaggatttggatttgaggattaaaaatattatcaattctcaagaaggtgttgtagctcttagcaccactgacatcagtcctgctcggccaaaatctcatgccataaaccatggtactgcatactgtggcagagatactgtgaaagccttattagttcttttggacgaagaagcagctaatgctcctaccaaaaacaaagcagagcttttatatgatgaggaaaacacaatccatcatcatggaacgtctattcttacactttttaggtctcccacacaggtgaataattcgataaaacccctaagagaacgcatctgtgtgtcaatgcaagagaaaaaaattaagatgaagcaaactttaattagatcccaatttgcttgtacttataaagatgactacatgataagcaaggataattggaataatgttaatttagcatcaaagcctttgtgtgttctttacatggaaaatgacctttctgagggtgtaaatccatctgttggaagatcaacaattggaacgagttttggaaatgttcatctggacagaagtaaaaatgaaaaagtatcaagaaaatcaaccagtcagacaggaaataaaagctcaaaaaggaaacaggtggatttggatggtgaaaatattctctgtgataatagaaatgaaccacctcaacataaaaatgctaaaatacctaagaaatcaaatgattcacagaatagattgtacggcaaactagctaaagtagcaaaaagtaataaatgtactgccaaggacaagttgatttctggccaggcaaagttaactcagttttttagactataaatttgtgtcttatatgctttaggtttatgcatctataaaccattcaccaaagacatgcttaatttttaagagatcaaggtgtaaattatgatgatttattattttggtctacagtgtatgtaaggttagtatgttaagcactgtttttgactttttaaaaataccttagatgcaaatttataggagaaaaaacactttcagataagaggtgtttgctgggatggaagaactacctggcatgtaagaaatatcgtcagtcgtcctaatgcatattgtgactgtttgcatatacttctgtttataaaagtatcagttttacttttcagaggatttgtaagaatcatttaaattttcattgaaataaacgacaagtcacattg

SEQ ID NO: 7801 - DNA, 1066 bp, Homo sapiens
  misc_feature (3)..(3): n is a, c, g, or t
  misc_feature (5)..(5): n is a, c, g, or t
  misc_feature (1024)..(1024): n is a, c, g, or t
  misc_feature (1065)..(1065): n is a, c, g, or t
ggngnagcaaagtgccgtgggaccgaggtattatggtgcagtgacttgacgctcgagcctggttgggcctgggggctgtaggcggagttcacagtatctagcgatggagctgataatggctgtgtttaatcagaagtctgtctcggatatgattaaagagtttcgaaaaaattggcgtgctctttgtaactctgagagaactactctatgtggtgcagactccatgctcttggcattgcagctttctatggcggagaacaacaaacagcacagtggagaatttacagtctctctcagtgatgttttattgacatggaaatacttgctccatgagaaattgaacttaccagttgaaaacatggacgtgactgaccattatgaggacgttaggaagatttatgatgatttcttgaagaacagtaatatgttagatctgattgatgtttatcaaaaatgtagggctttgacttctaattgtgaaaattataacacagtatctcctagtcaactactggattttctgtctggcaaacagtatgcagtaggtgatgaaactgatctttctataccaacatcaccaacaagtaaatacaaccgtgataatgaaaaggccctcccagtcctgaagagataactgagagtctagcaccttttaataggaagcatttgccatctattgtttctaagggtggccacctatgagacgtcatctacataataagaaccttggtcttcacaatcccatatcttaaaccagagactcctttctactgattccaggtctttagataataattctttcaaccaattgcttgccaatcagaaaatctttgaatctacctatgacctataagccccatttcaaggtgtcccacctttccaggctgaaccaatctttacctcacatgtactgattgatgtcttatgtctctctaaaacatatattacctcagctacttgggaggctgaggcaggggaattgcttgaaccagggaggtggaggttacagtgagctgagatcacnccactgcactccagcctgagtgacagaggaagactccatcnc

SEQ ID NO: 7802 - DNA, 1241 bp, Homo sapiens
  misc_feature (339)..(339): n is a, c, g, or t
  misc_feature (1016)..(1016): n is a, c, g, or t
tggaactgtattcagcggcgacagcggcgactgcggcggccgcgggagggcatcccgttggggatccttccgcacactgaagagtacgtcttcgggtctacccctaatcacataatggctgtgtttaatcagaagtctgtctcggatatgattaaagagtttcgaaaaaattggcgtgctctttgtaactctgagagaactactctatgtggtgcagactccatgctcttggcattgcagctttctatggcggagaacaacaaacagcactctgagagtccatgatgggcagatcacttaagcccagaagttcaagaccagcctgggcaacatggcganacctcgtctctacaaaaaaatacaaaaattagctgggtgtggtggagtgtgcctgtagtctcagctacttgggagactgagcacagtggagaatttacagtctctctcagtgatgttttattgacatggaaatacttgctccatgagaaattgaacttaccagttgaaaacatggacgtgactgaccattatgaggacgttaggaagatttatgatgatttcttgaagaacagtaatatgttagatctgattgatgtttatcaaaaatgtagggctttgacttctaattgtgaaaattataacacagtatctcctagtcaactactggattttctgtctggcaaacagtatgcagtaggtgatgaaactgatctttctataccaacatcaccaacaagtaaatacaaccgtgataatgaaaaggtgcagctgctagcaaggaaaattatcttttcatatttaaatctgctagtgaattcaaagaatgacctggctgtggcttatattctcaatattcctgatagaggactaggaagagaagccttcactgatttgaaacatgctgctcgagagaaacaaatgtctatctttttggtatggttgtgtgacatgttcaaaattaagactccttgcacagtggatccatgtatcctaatatgcttgtaactaggatgaancaacttttaagtggttaatttatgttctacctctgtatttgaaaatccatggtattttaattttttaccatatcgttcaagtttggtaaaggagaatttctctaaagcagtgtttccttacatatgttctgtatagtgctagccctgataaattctctgtgaataaatgtttccagtgtcaaaacgtttctgttaaatgttctttgaataaatgtttccaagggc

SEQ ID NO: 7803 - DNA, 950 bp, Homo sapiens
tggaactgtattcagcggcgacagcggcgactgcggcggccgcgggagggcatcccgttggggatccttccgcacactgaagagtacgtcttcgggtctacccctaatcacataatggctgtgtttaatcagaagtctgtctcggatatgattaaagagtttcgaaaaaattggcgtgctctttgtaactctgagagaactactctatgtggtgcagactccatgctcttggcattgcagctttctatggcggagaacaacaaacagcacagtggagaatttacagtctctctcagtgatgttttattgacatggaaatacttgctccatgagaaattgaacttaccagttgaaaacatggacgtgactgaccattatgaggacgttaggaagatttatgatgatttcttgaagaacagtaatatgttagatctgattgatgtttatcaaaaatgtagggctttgacttctaattgtgaaaattataacacagtatctcctgggtcaactatacagccaccttcagaaagaggaagcttgctgctgtctaggccagatctcttggctcctggggaagatccaccagtgtcagcctcattgactctggagcggcagaagggagagtccctcttagcatggagctggtccctaaacttcagattgcctgggattcccatcacggtccagaagaagagacgagacctgaagaagctggcagctgtcatgcggcaagtgagacaatgggaaagccacccgcttcagaacattgaagaagccacctggcaccaactcactgtccaagctgagaagaaggaaccagggacccaaggagcttcagtttaatataaaaccaggagcaaacctccgaagtccaggcatctcagagaaatgctttttttgtgtaccatggttaccaaatacagagctagattttatttttgtaaatattt

SEQ ID NO: 7804 - DNA, 2076 bp, Homo sapiens
tggaactgtattcagcggcgacagcggcgactgcggcggccgcgggagggcatcccgttggggatccttccgcacactgaagagtacgtcttcgggtctacccctaatcacataatggctgtgtttaatcagaagtctgtctcggatatgattaaagagtttcgaaaaaattggcgtgctctttgtaactctgagagaactactctatgtggtgcagactccatgctcttggcattgcagctttctatggcggagaacaacaaacagcacagtggagaatttacagtctctctcagtgatgttttattgacatggaaatacttgctccatgagaaattgaacttaccagttgaaaacatggacgtgactgaccattatgaggacgttaggaagatttatgatgatttcttgaagaacagtaatatgttagatctgattgatgtttatcaaaaatgtagggctttgacttctaattgtgaaaattataacacagtatctcctagtcaactactggattttctgtctggcaaacagtatgcagtaggtgatgaaactgatctttctataccaacatcaccaacaagtaaatacaaccgtgataatgaaaaggtgcagctgctagcaaggaaaattatcttttcatatttaaatctgctagtgaattcaaagaatgacctggctgtggcttatattctcaatattcctgatagaggactaggaagagaagccttcactgatttgaaacatgctgctcgagagaaacaaatgtctatctttttggtggccacgtcttttattagaacaatagagcttggagggaaaggatatgcaccaccaccatcagatcctttaaggacacatgtaaagggattgtctaattttattaatttcattgacaaattagatgagattcttggagaaataccaaacccaagcattgcagggggtcaaatactgtcagtgataaagatgcaactgattaaaggccaaaacagcagggatcctttttgcaaagcaatagaggaagttgctcaggatttggatttgaggattaaaaatattatcaattctcaagaaggtgttgtagctcttagcaccactgacatcagtcctgctcggccaaaatctcatgccataaaccatggtactgcatactgtggcagagatactgtgaaagccttattagttcttttggacgaagaagcagctaatgctcctaccaaaaacaaagcagagcttttatatgatgaggaaaacacaatccatcatcatggaacgtctattcttacactttttaggtctcccacacaggtgaataattcgataaaacccctaagagaacgcatctgtgtgtcaatgcaagagaaaaaaattaagagggtgtaaatccatctgttggaagatcaacaattggaacgagttttggaaatgttcatctggacagaagtaaaaatgaaaaagtatcaagaaaatcaaccagtcagacaggaaataaaagctcaaaaaggaaacaggtggatttggatggtgaaaatattctctgtgataatagaaatgaaccacctcaacataaaaatgctaaaatacctaagaaatcaaatgattcacagaatagattgtacggcaaactagctaaagtagcaaaaagtaataaatgtactgccaaggacaagttgatttctggccaggcaaagttaactcagttttttagactataaatttgtgtcttatatgctttaggtttatgcatctataaaccattcaccaaagacatgcttaatttttaagagatcaaggtgtaaattatgatgatttattattttggtctacagtgtatgtaaggttagtatgttaagcactgtgctaaaaatactagttcagtcataattatgcccgaatttgcacaaagtttaatgccacggaagctatcattccgtacgggtctcttaacctaacttcctttaaaccgactttacctcccaagttataacggatggttcccccaagggacaaaggtatttcttgcaaaaatgggccaggttcctgccaggggggaccccccaatggcggggaaaa

SEQ ID NO: 7805 - DNA, 1368 bp, Homo sapiens
tggaactgtattcagcggcgacagcggcgactgcggcggccgcgggagggcatcccgttggggatccttccgcacactgaagagtacgtcttcgggtctacccctaatcacataatggctgtgtttaatcagaagtctgtctcggatatgattaaagagtttcgaaaaaattggcgtgctctttgtaactctgagagaactactctatgtggtgcagactccatgctcttggcattgcagctttctatggcggagaacaacaaacagcacagtggagaatttacagtctctctcagtgatgttttattgacatggaaatacttgctccatgagaaattgaacttaccagttgaaaacatggacgtgactgaccattatgaggacgttaggaagatttatgatgatttcttgaagaacagtaatatgttagatctgattgatgtttatcaaaaatgtagggctttgacttctaattgtgaaaattataacacagtatctcctagtcaactactggattttctgtctggcaaacagtatgcagtaggtgatgaaactgatctttctataccaacatcaccaacaagtaaatacaaccgtgataatgaaaaggtgcagctgctagcaaggaaaattatcttttcatatttaaatctgctagtgaattcaaagaatgacctggctgtggcttatattctcaatattcctgatagaggactaggaagagaagccttcactgatttgaaacatgctgctcgagagaaacaaatgtctatctttttggtggccacgtcttttattagaacaatagagcttggagggaaaggatatgcaccaccaccatcagatcctttaaggacacatgtaaagggattgtctaattttattaatttcattgacaaattagatgagattcttggagaaataccaaacccaagcattgcagggggtcaaatactgtcagtgataaagatgcaactgattaaaggccaaaacagcagggatcctttttgcaaagcaatagaggaagttgctcaggatttggatttgaggattaaaaatattatcaattctcaagaaggtgttgtagctcttagcaccactgacatcagtcctgctcggccaaaatctcatgccataaaccatggtactgcatactgtggcagagatactgtgaaagccttattagttcttttggacgaagaagcagctaatgctcctaccaaaaacaaagcagagcttttatatgatgaggaaaacacaatccatcatcatggaacgtctattcttacactttttaggtctcccacacaggtgaatagacgttccatgatgatggattgtgttttccgttctagatcgcgacggccg

SEQ ID NO: 7806 - DNA, 1397 bp, Homo sapiens
tggaactgtattcagcggcgacagcggcgactgcggcggccgcgggagggcatcccgttggggatccttccgcacactgaagagtacgtcttcgggtctacccctaatcacataatggctgtgtttaatcagaagtctgtctcggatatgattaaagagtttcgaaaaaattggcgtgctctttgtaactctgagagaactactctatgtggtgcagactccatgctcttggcattgcagctttctatggcggagaacaacaaacagcacagtggagaatttacagtctctctcagtgatgttttattgacatggaaatacttgctccatgagaaattgaacttaccagttgaaaacatggacgtgactgaccattatgaggacgttaggaagatttatgatgatttcttgaagaacagtaatatgttagatctgattgatgtttatcaaaaatgtagggctttgacttctaattgtgaaaattataacacagtatctcctagtcaactactggattttctgtctggcaaacagtatgcagtaggtgatgaaactgatctttctataccaacatcaccaacaagtaaatacaaccgtgataatgaaaaggccctcccagtcctgaagagataactgagagtctagcaccttttaataggaagcatttgccatctattgtttctaagggtggccacctatgagacgtcatctacataataagaaccttggtcttcacaatcccatatcttaaaccagagactcctttctactgattccaggtctttagataataattctttcaaccaattgcttgccaatcagaaaatctttgaatctacctatgacctataagccccatttcaaggtgtcccacctttccaggctgaaccaatctttacctcacatgtactgattgatgtcttatgtctctctaaaacatatattaccttagcctcctgagcagctgggattacaggccgtgccaccacgcctggctaattttgtatttttagtagagacagggtttcaccatgttggccaggctggtcttgaactcctgatctcgtgatccacccacctcggcctcccaaagtgctggaattacaggcgtgagccaccgcacccagctggaagtcaatgtagctctaattaaaatcctaatgtgaatttttgggcttcagtcttgcagagaaatattttgaccatcaaatgtgtttactaatatgacaccagtcttcaagtaggtgaatggattgaatttgagaaacaatatttttgtttccttattttattttacttcattttatttttcctaaggtactaaaccattgcttttaaaattctgaagtaatgaagggaataatagaataaaggccagaaaaagaaaatcatcagtt

SEQ ID NO: 7807 - DNA, 2341 bp, Homo sapiens
tggaactgtattcagcggcgacagcggcgactgcggcggccgcgggagggcatcccgttggggatccttccgcacactgaagagtacgtcttcgggtctacccctaatcacataatggctgtgtttaatcagaagtctgtctcggatatgattaaagagtttcgaaaaaattggcgtgctctttgtaactctgagagaactactctatgtggtgcagactccatgctcttggcattgcagctttctatggcggagaacaacaaacagagagacggggtttcaccatgttagccaggatggtctcgatctcctgacttcgtgatccacccgcctcggcctcccaaagtgctaaaattacaggcgtgaacatacaccacagtggagaatttacagtctctctcagtgatgttttattgacatggaaatacttgctccatgagaaattgaacttaccagttgaaaacatggacgtgactgaccattatgaggacgttaggaagatttatgatgatttcttgaagaacagtaatatgttagatctgattgatgtttatcaaaaatgtagggctttgacttctaattgtgaaaattataacacagtatctcctagtcaactactggattttctgtctggcaaacagtatgcagtaggtgatgaaactgatctttctataccaacatcaccaacaagtaaatacaaccgtgataatgaaaaggtgcagctgctagcaaggaaaattatcttttcatatttaaatctgctagtgaattcaaagaatgacctggctgtggcttatattctcaatattcctgatagaggactaggaagagaagccttcactgatttgaaacatgctgctcgagagaaacaaatgtctatctttttggtggccacgtcttttattagaacaatagagcttggagggaaaggatatgcaccaccaccatcagatcctttaaggacacatgtaaagggattgtctaattttattaatttcattgacaaattagatgagattcttggagaaataccaaacccaagcattgcagggggtcaaatactgtcagtgataaagatgcaactgattaaaggccaaaacagcagggatcctttttgcaaagcaatagaggaagttgctcaggatttggatttgaggattaaaaatattatcaattctcaagaaggtgttgtagctcttagcaccactgacatcagtcctgctcggccaaaatctcatgccataaaccatggtactgcatactgtggcagagatactgtgaaagccttattagttcttttggacgaagaagcagctaatgctcctaccaaaaacaaagcagagcttttatatgatgaggaaaacacaatccatcatcatggaacgtctattcttacactttttaggtctcccacacaggtgaataattcgataaaacccctaagagaacgcatctgtgtgtcaatgcaagagaaaaaaattaagatgaagcaaactttaattagatcccaatttgcttgtacttataaagatgactacatgataagcaaggataattggaataatgttaatttagcatcaaagcctttgtgtgttctttacatggaaaatgacctttctgagggtgtaaatccatctgttggaagatcaacaattggaacgagttttggaaatgttcatctggacagaagtaaaaatgaaaaagtatcaagaaaatcaaccagtcagacaggaaataaaagctcaaaaaggaaacaggtggatttggatggtgaaaatattctctgtgataatagaaatgaaccacctcaacataaaaatgctaaaatacctaagaaatcaaatgattcacagaatagattgtacggcaaactagctaaagtagcaaaaagtaataaatgtactgccaaggacaagttgatttctggccaggcaaagttaactcagttttttagactataaatttgtgtcttatatgctttaggtttatgcatctataaaccattcaccaaagacatgcttaatttttaagagatcaaggtgtaaattatgatgatttattattttggtctacagtgtatgtaaggttagtatgttaagcactgtttttgactttttaaaaataccttagatgcaaatttataggagaaaaaacactttcagataagaggtgtttgctgggatggaagaactacctggcatgtaagaaatatcgtcagtcgtcctaatgcatattgtgactgtttgcatatacttctgtttataaaagtatcagttttacttttcagaggatttgtaagaatcatttaaattttcattgaaataaacgacaagtcacattg

SEQ ID NO: 7808 - DNA, 706 bp, Homo sapiens
gctaaaagacttttagctccaagggaagggaaagtggaagatagattaagtatataatttctgctgcatatcctggggcttgaggcctcatggttatgccccttgctctattcctgctcagcgctgcccaggagacactgtggccctgccccctcttaatgtttggccttcttatggccttcaccaccctgcactctgtggccttggggatgagggtccttgtgacttaccgggttgcctttaggccttaagaaagccaaacaccattttatatttgacaatgtttttgtatgattttataccagataagttaaattttaccattatattaatgtgctattgatgttcaacttaattttaataaaatcttgtagacattatttatccaattttaatgtctaactataaggtaagacttttatagattctttaactttttataatttttgttaaagagcaggttagtgctttaagaaaaatctatagtgattttattgtaatatccagttcacagaaaaactggatgatacccctttaactttagccaatatgttaacacacagaatttcctttacaattaacattttaaaacttgcttaaatctttaaaacagaaaaaaagtttagcctttaatgtaggtaaaaatctgtattcttatgcctctttataatcctgttattaaaagtatttttttacataccttgta

SEQ ID NO: 7809 - DNA, 677 bp, Homo sapiens
ttgactactctagggacctcatgtaagtggattccagagtgaatatgagaagagactgctggttgccaggagctgggagtggggagaatcagaagttgttcatgggtgggcagtttcttttatgcaagatggggagtttctagagatctgctgtagagcttgatgcctatagttcacaaagatggagtatttcttatgcctacaacttaggacaaaaagtgttttgcatttctttcattttttgattctgaaatatttgtcatatacttactggttaagcatcccaaatctgatagattcaaagtctaagatgcttcagtgagcatttcttttcagcatcagattagtaggcataagtgggaggtgataagccaaagatattcttgcccttttttttctctcaccacgtttctagcttggtgattagttttcggtgaattccatactggccatgctgcacttgtatatttttgaatgccttggcatgtgagaaaggctgattgctattttctatgtcatgagaactttccaccttttcatggttgcatctttttctcagtgtttttgttgtggcagtcattaagaagagcctgtcagctcagatttaggacagagttttctaattctgcaaaaaatgttactgggatgctggtaggggttgcattgaatctgcaact

SEQ ID NO: 7810 - DNA, 329 bp, Homo sapiens
gagtgcgatggcatgatcttagctcactgcagcctccacctcccaggttcaagcgattctcctacctcagcctcctgagtagctgggattacaggcgtgcaccaccatgcccagctaagttttgtattattagtagagatggggtttcaccatgttggtcaggctggtctcaaactcctgacctcaggtgatccacccacctcggcctcccaaagtgctgggattataggcgtgagtcaccgtgcctggcctatagtagccactgttgattcatccacattcagctcacatccaacagcaccataattcacccctgaacggagctttcc

SEQ ID NO: 7811 - DNA, 954 bp, Homo sapiens
atggtaatgaagcatcatataataattagcagaccaagaggtattgaacttcacaaattactatttatgtcattttaactgagggtttttctccctctctataattctgttatgctgtttggttaattaagaagtgctaattctaagaacattaagctatgccttcaaaatttcaaatgacctgttgataataaaatttagcataagaaggcatctttgacctttgatgatcattgttttcaatttctgaaggaggtaacggaatcatgaattcttttggctatatcttaatatgaatcccaagcatgcataacaaagtctacttgctgaggacatttggaatgttatttaatcgatgatttttttggtatgctcaattttgatcttactgaaatgtacacagggttacagttcccgagtacttctgtcttctgtttgtggtatgctcaattttcatcttactgaaatgtacacatggttacagttcccgagtacttctgtcttctaacattacagaggtggtgtattcacttttcctttattaatatagacattaactacttggtcccctaatatttttactttagaagattccaaatttacattaaatagcatggaaattatcttcatttcatgtgtttaagttgtgtgccttttcaaatcaaaaagggataacatttagggtgggggaaggataacatattctcttcaaaacataagtgaagaaaaactgtgcgtgacacagcaattaaagaagatgtaaggaaactgttaagataacacagcattcaatttgtcaatcattttcaagggaaaaaattcaagcaaatgggttccaaaaatatattaaaaattagagttcttttagagttttaggaaatacaagaaagaatccccacttagttgcagagacagaattgttcctttgtgcacctagtgagtttctaagaaaaa

SEQ ID NO: 7812 - DNA, 448 bp, Homo sapiens
cagactagcctgggctactttacagttccaaaaccagcaagagaaaagtttctatgtgtagtcacttttctagtctctgcttgtgtcacatttcctattttttcattggtcaaacaagtcactttactaagccaagagtcagtgagggaggtggctgagggatggatggtagggacttaatatagaccaagctaggcggggcgctgtggctcactcctgtaatcccagcacttcaggaggccgaggcgggggggttaacgaggtcaggagttccagaccagcctgaccaacatggtgaaaccccgtctctattaaaaatacaaaaatgaggccgggcacggtggcccatgcctgtaatcccagcactttgggaggccgaggcgggtggatcatgaggtcaggagatcaagaccatcctggctaacactgtgaaaccccgtctctacta

SEQ ID NO: 7813 - DNA, 682 bp, Homo sapiens
cttcattttttttttttgtctgcattctctaccatcaatagatacgaactccctcatggcagagatatttgactactctatgctaggtgcctagaaaaatacctagcatataggtattgagtgagtgctcaataaatcttttgttgaataaatgaatatctgtgtgtctgtgggtgtgtattgggaagggatgaagaaaaggaaagatgaggccacagttgtgatgtggaaagatcacatgtttgtgtataaaagaagtaggacactaacttgagcttctagagacaggttattaccttaggccaagattgctcattcttgggaaagagaagagacccaacaactttctacgtatgaagcagggatgtgaggacaaggtccaacttgaatgtgaggacaaggtctaactgtaaatcaccaaacaaaaaatgtctcccttaatagctccttcacaccacaggaaatggtgtcttctagtccaatcctcttctttttatttatttatttttgagacagggtcttcctctgttgcccaggctggagtgcagtggcacaatcacagctcactgcagccaagacatcctgggctgaagcaatcctctcacctcagcctcccaagtatctggaaccacaggtgcacaccaccacacctggctttttttctatttttctgtaggtcttg

SEQ ID NO: 7814 - DNA, 453 bp, Homo sapiens
gtgttagccaggctggccttcatctcctgacctcatgatccacccacctcagcctcccaaagctggattataggtgtgagccaccgtgcccagcccaacctggtctttagtaacagcaaggacacagaaaactagaaggataatgagttatatttggtaggtaatatatacctgactgactggatttggggatgggagtggaggtaatcattgatacgctgatgccatttaccaatttaagaaatcctgtagaaggatcaaagttaaggggtaaaaagttaggggcttcagatcatacaactggagatattctgtagtcagctggacacatggatctggagctcaggaaagagatctagaataaagatttctatttattatggatggcaactaaagcaatcaaagtgaattcaaagtggccagagaataagtagagaagacaaagccaacatc

SEQ ID NO: 7815 - DNA, 465 bp, Homo sapiens
agtctccactggcactcagctgaatactgaccagcacattgtgcaagaaaactacttaaggtcagtgaaaaggcctttcctctttaacttttcgaattagaggaaacatgtctggtgctcacccatggccagggatagtgcctgttcccaccagctaagactggaaaaatatttcatggggcattgggtatgatacagagtagggggtcttgcctctgtagtagggaatgatcagccttagagtgagcactgcttcagccctacctgagtgtttacaggaatatacaaatacccaacatccaacaagatgaaattcacaatgtctggaacccaataaaaaattactggctgggtgtggtggctcagcctgtaatcccagtgctttgagaggctgaggtgggttgattgcttgagcctaggagttcaaaaccagcctgggcaacatagtgagatcctatctctaca

SEQ ID NO: 7816 - DNA, 490 bp, Homo sapiens
tgaaaaaatccttacaagtatatcagtagagaggttcatttacaggaacagaatgaggaagtgtgagttacattgtcttttgaattcctttatctcgtctgttgtatatattaaacaaatagctctaactaaagatttccttcctccagcttcgaagctgaccgtagagtacccaggttcatagctttaaaatgctgagctaatcctgtgtttatgtaatttctgtttcacatacagttggctttctttccaaacctgagcatttccgtgtcatgctgtagtgacacgatgcagatttacatgcatgatctttttgaatgcattgaagacagaaaactgtgttgcatttgtttaacatgtgtcctgcttgataaatgatacacatagttgctgccttccataaacttgcctgcagctagagttaatgatgggaaagaaaagaagggaataaaaaccacagcatgatttgaacaaaacaagccaaatgaaa

SEQ ID NO: 7817 - DNA, 414 bp, Homo sapiens
ggcccgtccctgggtgcatgtcccacctttctgttcacctgagacaggcattccagtctaagccaggccttcctcacgctgagggtctaaccaaggctccatcaaaagacattggcccagcggtggctcatgcctgtgatcctggcactctgggaggctgagcggggcggatcgcttgagcccaggaggtccaggctgcagtgagccgtgacccagcccctgcactccagcctaggccacagagcgagatcccgtctcaaaataaataaataaataaaaataggccgggcgcggtggctcacgcctgtaatcccagcactttgggaggctaagaggcgggaggatagcttgagcccaggagttcgagacctgcctgggcaatatagcgagaccccgttctcacaagaaaaagga

SEQ ID NO: 7818 - DNA, 442 bp, Homo sapiens
gaaaagctagatgtacagagagatgaagaacagcaaggcaggaagaggggcagcaaaaagggaggctcatcagagtgagggagaggaggagggatttgcagccaggacagacagagcagagtggtgctggtggcaaggagaacagaggaagaacaacagcagggaacacagctgggaatctagggtgccagagagtgggtacagaggggtataacagggaagagataatttaacagggagaaaagaggaggtgcagagatgggagaagaggtggaaatatatggagattgaggatgattgaaagactggggagaaggaggaacaagaggttatataagttccaaggatgaagcagaagaggtggaagagaaggaatagaggtaagaagggaataaacagcagcagaagagaggggtacagaatgaggtgcagaatcccaggg

SEQ ID NO: 7819 - DNA, 460 bp, Homo sapiens
ttcaggataaaatcacagcttcggccaggccagtggctggacacctgtaatcccaggactttgggaggctgaggcagaaggattgcttgagtccggtagttcgagaccagcctgggcaacatggtgaaaccctgtctctacaagaaatacaaaaaatcagccaagtgtggtggcagacacctgtagtcccagctacttgggaggcttgaggcaggagaatcacctgagcaccagaggtggaggctgcagtgagctgtggtcacactcctgtacaccaacctgggtgacagagcaagaccctatcttaaaggacaaaacagaaaaatgggagtgagaaaaaatacacttctaaaaaatgttgtatatgcatgttttaaaagccacccatctgtatactgatgtatatgtgtttaaaaatctccagaaggtaacagaaaactgccagtttttttgagggagt

SEQ ID NO: 7820 - DNA, 397 bp, Homo sapiens
tgagacggaatctcgctctgttgcccaggctggagtgcattggccgatctcggctcactgcaagctccatctcctgggttcacgccattctcctgcctcagctacttgggaggcttgaggcaggagaatcacctgagcaccagaggtggaggctgcagtgagctgtggtcacactcctgtacaccaacctgggtgacagagcaagaccctatcttaaaggacaaaacagaaaaatgggagtgagaaaaaatacacttctaaaaaatgttgtatatgcatgttttaaaagccacccatctgtatactgatgtatatgtgtttaaaaatctccagaaggtaacagaaagttgctttgattcttcctcaaagtattttaaaatcagctacagttccaaaa

SEQ ID NO: 7821 - DNA, 382 bp, Homo sapiens
gttgggggtcgtgtgtgctcctgtccctctggctgctagggagcccagcctcctctcgaagtgcaaggaaggggtccgaccccacgctgggttttggctcctgtccctgggccacacgtgggcctgctgttgtttattatttttatttgttgagacggggtcttactctcttgcccaggctggagtgctgtcctagctcactgcagcctccacctcccagacttaagcaatcctcccacctcagcctcctgagtacctgggactacatgtgcacacaaccatgctcccatgctcggacttttttttttttttgatggagttttgctcttgttgtccaggttggagtgcagtggtgcgatctcagctgctcactgcaaccccc

SEQ ID NO: 7822 - DNA, 2315 bp, Homo sapiens
cgtcggcgcaggcgcgtcgcggcggcaggggcgcggggcttctggaggcggcggcggtggccagcgcggcggcgccggccgtattctccgggctgcggagggtaaagagcgggctcgggccgaggctggagggctgggtggggccagagcggcgcttcgggggcccgcggaggacgagggagggagagaatctgaggagctgggttgccattaggggactcctgaggtcctatctccaggctgcggtgactgcactttccctggagtggaagctgctggaaggcggaccggccgccatgtccacgttcaggcaggaggacgtggaggaccattatgagatgggggaggagctgggcagcggccagtttgcgatcgtgcggaagtgccggcagaagggcacgggcaaggagtacgcagccaagttcatcaagaagcgccgcctgtcatccagccggcgtggggtgagccgggaggagatcgagcgggaggtgaacatcctgcgggagatccggcaccccaacatcatcaccctgcacgacatcttcgagaacaagacggacgtggtcctcatcctggagctggtctctggcggggagctctttgacttcctggcggagaaggagtcgctgacggaggacgaggccacccagttcctcaagcagatcctggacggcgttcactacctgcactctaagcgcatcgcacactttgacctgaagccggaaaacatcatgctgctggacaagaacgtgcccaacccacgaatcaagctcatcgacttcggcatcgcgcacaagatcgaggcggggaacgagttcaagaacatcttcggcaccccggagtttgtggccccagagattgtgaactatgagccgctgggcctggaggcggacatgtggagcatcggtgtcatcacctatatcctcctgagcggtgcatccccgttcctgggcgagaccaagcaggagacgctcaccaacatctcagccgtgaactacgacttcgacgaggagtacttcagcaacaccagcgagctggccaaggacttcattcgccggctgctcgtcaaagatcccaagcggagaatgaccattgcccagagcctggaacattcctggattaaggcgatccggcggcggaacgtgcgtggtgaggacagcggccgcaagcccgagcggcggcgcctgaagaccacgcgtctgaaggagtacaccatcaagtcgcactccagcttgccgcccaacaacagctacgccgacttcgagcgcttctccaaggtgctggaggaggcggcggccgccgaggagggcctgcgcgagctgcagcgcagccggcggctctgccacgaggacgtggaggcgctggccgccatctacgaggagaaggaggcctggtaccgcgaggagagcgacagcctgggccaggacctgcggaggctacggcaggagctgctcaagaccgaggcgctcaagcggcaggcgcaggaggaggccaagggcgcgctgctggggaccagcggcctcaagcgccgcttcagccgcctggagaaccgctacgaggcgctggccaagcaagtagcctccgagatgcgcttcgtgcaggacctcgtgcgcgccctggagcaggagaagctgcagggcgtggagtgcgggctgcgctaggcgcagtggggtgggccaggccccaggacagccggagctcggcctgcggtgggggcgcttcctgtggacgctgcgcctcccatcgcccgggtgcctgtccttgcccagcgccaccaggctggaggcggagtgggaggagctggagccaggcccgtaagttcgcaggcaggggtgggtgtgggacggggctgcttctctacacagcctctacgctggccttcaccttcacccctgcatcgtcggtgaccctgggaccctccaggcagcgtggcctgtggcaccgtgagggttgggacccaccgaggcgcagaggcggcccgaatgcagccctggttcaggcccggaggagggtttgcgggtagttgcacggacaattcggcggggtgctgcctgttgctgccattagcccaggaggaggtcgtgggacggggagggtgggatggacggcggacaggcagtccccacgctgctgggtggcgccgggcttggtggggtcttccactgtgtgcccttctcgccgaggccggtcccccgggtgtggggtgccctgctgcggactcctccgcgagccccatcgtcgcgcctgtggacgcctaggcaagagcggccctctgcagccaagagaaataaaatactggcttccagataaaaaaa

SEQ ID NO: 7823 - DNA, 2188 bp, Homo sapiens
taggctgggtgtagaatcggccgagggtgtgccagctgcggtgtggcgccggccgtattctccgggctgcggaggggttgccattaggggactcctgaggtcctatctccaggctgcggtgactgcactttccctggagtggaagctgctggaaggcggaccggccgccatgtccacgttcaggcaggaggacgtggaggaccattatgagatgggggaggagctgggcagcggccagtttgcgatcgtgcggaagtgccggcagaagggcacgggcaaggagtacgcagccaagttcatcaagaagcgccgcctgtcatccagccggcgtggggtgagccgggaggagatcgagcgggaggtgaacatcctgcgggagatccggcaccccaacatcatcaccctgcacgacatcttcgagaacaagacggacgtggtcctcatcctggagctggtctctggcggggagctctttgacttcctggcggagaaggagtcgctgacggaggacgaggccacccagttcctcaagcagatcctggacggcgttcactacctgcactctaagcgcatcgcacactttgacctgaagccggaaaacatcatgctgctggacaagaacgtgcccaacccacgaatcaagctcatcgacttcggcatcgcgcacaagatcgaggcggggaacgagttcaagaacatcttcggcaccccggagtttgtggccccagagattgtgaactatgagccgctgggcctggaggcggacatgtggagcatcggtgtcatcacctatatcctcctgagcggtgcatccccgttcctgggcgagaccaagcaggagacgctcaccaacatctcagccgtgaactacgacttcgacgaggagtacttcagcaacaccagcgagctggccaaggacttcattcgccggctgctcgtcaaagatcccaagcggagaatgaccattgcccagagcctggaacattcctggattaaggcgatccggcggcggaacgtgcgtggtgaggacagcggccgcaagcccgagcggcggcgcctgaagaccacgcgtctgaaggagtacaccatcaagtcgcactccagcttgccgcccaacaacagctacgccgacttcgagcgcttctccaaggtgctggaggaggcggcggccgccgaggagggcctgcgcgagctgcagcgcagccggcggctctgccacgaggacgtggaggcgctggccgccatctacgaggagaaggaggcctggtaccgcgaggagagcgacagcctgggccaggacctgcggaggctacggcaggagctgctcaagaccgaggcgctcaagcggcaggcgcaggaggaggccaagggcgcgctgctggggaccagcggcctcaagcgccgcttcagccgcctggagaaccgctacgaggcgctggccaagcaagtagcctccgagatgcgcttcgtgcaggacctcgtgcgcgccctggagcaggagaagctgcagggcgtggagtgcgggctgcgctaggcgcagtggggtgggccaggccccaggacagccggagctcggcctgcggtgggggcgcttcctgtggacgctgcgcctcccatcgcccgggtgcctgtccttgcccagcgccaccaggctggaggcggagtgggaggagctggagccaggcccgtaagttcgcaggcaggggtgggtgtgggacggggctgcttctctacacagcctctacgctggccttcaccttcacccctgcatcgtcggtgaccctgggaccctccaggcagcgtggcctgtggcaccgtgagggttgggacccaccgaggcgcagaggcggcccgaatgcagccctggttcaggcccggaggagggtttgcgggtagttgcacggacaattcggcggggtgctgcctgttgctgccattagcccaggaggaggtcgtgggacggggagggtgggatggacggcggacaggcagtccccacgctgctgggtggcgccgggcttggtggggtcttccactgtgtgcccttctcgccgaggccggtcccccgggtgtggggtgccctgctgcggactcctccgcgagccccatcgtcgcgcctgtggacgcctaggcaagagcggccctctgcagccaagagaaataaaatactggcttccagataaaaaaa

SEQ ID NO: 7824 - DNA, 2214 bp, Homo sapiens
cgtcggcgcaggcgcgtcgcggcggcaggggcgcggggcttctggaggcggcggcggtggccagcgcggcggcgccggccgtattctccgggctgcggaggggttgccattaggggactcctgaggtcctatctccaggctgcggtgactgcactttccctggagtggaagctgctggaaggcggaccggccgccatgtccacgttcaggcaggaggacgtggaggaccattatgagatgggggaggagctgggcagcggccagtttgcgatcgtgcggaagtgccggcagaagggcacgggcaaggagtacgcagccaagttcatcaagaagcgccgcctgtcatccagccggcgtggggtgagccgggaggagatcgagcgggaggtgaacatcctgcgggagatccggcaccccaacatcatcaccctgcacgacatcttcgagaacaagacggacgtggtcctcatcctggagctggtctctggcggggagctctttgacttcctggcggagaaggagtcgctgacggaggacgaggccacccagttcctcaagcagatcctggacggcgttcactacctgcactctaagcgcatcgcacactttgacctgaagccggaaaacatcatgctgctggacaagaacgtgcccaacccacgaatcaagctcatcgacttcggcatcgcgcacaagatcgaggcggggaacgagttcaagaacatcttcggcaccccggagtttgtggccccagagattgtgaactatgagccgctgggcctggaggcggacatgtggagcatcggtgtcatcacctatatcctcctgagcggtgcatccccgttcctgggcgagaccaagcaggagacgctcaccaacatctcagccgtgaactacgacttcgacgaggagtacttcagcaacaccagcgagctggccaaggacttcattcgccggctgctcgtcaaagatcccaagcggagaatgaccattgcccagagcctggaacattcctggattaaggcgatccggcggcggaacgtgcgtggtgaggacagcggccgcaagcccgagcggcggcgcctgaagaccacgcgtctgaaggagtacaccatcaagtcgcactccagcttgccgcccaacaacagctacgccgacttcgagcgcttctccaaggtgctggaggaggcggcggccgccgaggagggcctgcgcgagctgcagcgcagccggcggctctgccacgaggacgtggaggcgctggccgccatctacgaggagaaggaggcctggtaccgcgaggagagcgacagcctgggccaggacctgcggaggctacggcaggagctgctcaagaccgaggcgctcaagcggcaggcgcaggaggaggccaagggcgcgctgctggggaccagcggcctcaagcgccgcttcagccgcctggagaaccgctacgaggcgctggccaagcaagtagcctccgagatgcgcttcgtgcaggacctcgtgcgcgccctggagcaggagaagctgcagggcgtggagtgcgggctgcgctaggcgcagtggggtgggccaggccccaggacagccggagctcggcctgcggtgggggcgcttcctgtggacgctgcgcctcccatcgcccgggtgcctgtccttgcccagcgccaccaggctggaggcggagtgggaggagctggagccaggcccgtaagttcgcaggcaggggtgggtgtgggacggggctgcttctctacacagcctctacgctggccttcaccttcacccctgcatcgtcggtgaccctgggaccctccaggcagcgtggcctgtggcaccgtgagggttgggacccaccgaggcgcagaggcggcccgaatgcagccctggttcaggcccggaggagggtttgcgggtagttgcacggacaattcggcggggtgctgcctgttgctgccattagcccaggaggaggtcgtgggacggggagggtgggatggacggcggacaggcagtccccacgctgctgggtggcgccgggcttggtggggtcttccactgtgtgcccttctcgccgaggccggtcccccgggtgtggggtgccctgctgcggactcctccgcgagccccatcgtcgcgcctgtggacgcctaggcaagagcggccctctgcagccaagagaaataaaatactggcttccagataaaaaaa

SEQ ID NO: 7825 - DNA, 2609 bp, Homo sapiens
taggctgggtgtagaatcggccgagggtgtgccagctgcggtgtggcgccggccgtattctccgggctgcggaggggttgccattaggggactcctgaggtcctatctccaggctgcggtgactgcactttccctggagtggaagctgctggaaggcggaccggccgccatgtccacgttcaggcaggaggacgtggaggaccattatgagatgggggaggagctgggcagcggccagtttgcgatcgtgcggaagtgccggcagaagggcacgggcaaggagtacgcagccaagttcatcaagaagcgccgcctgtcatccagccggcgtggggtgagccgggaggagatcgagcgggaggtgaacatcctgcgggagatccggcaccccaacatcatcaccctgcacgacatcttcgagaacaagacggacgtggtcctcatcctggagctggtctctggcggggagctctttgacttcctggcggagaaggagtcgctgacggaggacgaggccacccagttcctcaagcagatcctggacggcgttcactacctgcactctaagcgcatcgcacactttgacctgaagccggaaaacatcatgctgctggacaagaacgtgcccaacccacgaatcaagctcatcgacttcggcatcgcgcacaagatcgaggcggggaacgagttcaagaacatcttcggcaccccggagtttgtggccccagagattgtgaactatgagccgctgggcctggaggcggacatgtggagcatcggtgtcatcacctatatcctcctgagcggtgcatccccgttcctgggcgagaccaagcaggagacgctcaccaacatctcagccgtgaactacgacttcgacgaggagtacttcagcaacaccagcgagctggccaaggacttcattcgccggctgctcgtcaaagatcccaagcggagaatgaccattgcccagagcctggaacattcctggattaaggtaagtggggaggtgggggagctccctgggcttcccgccttggccttctcgctggggtcccggggggccttcagcatttaaggcttgtggatgtgacaacccccagtggctggggagggtccccagaggagtgagcctgtgtggcgggggttgggtcctgggcgtgggatgtccagcacccgacagacctggtggcatccttggctggtgtgtgtccaacggggctgactcctggggccagggccgcagcgtttttctcgagagagcactctcggctttgcgtcgggctgggcagtctccgtcacgaggcgttgactctgctgccggatgagcccctgaacctcagttcacactggcaggtgggggctggcggggctgggtggcatcgcggggaccccgctcaggcttccctccttcctaggcgatccggcggcggaacgtgcgtggtgaggacagcggccgcaagcccgagcggcggcgcctgaagaccacgcgtctgaaggagtacaccatcaagtcgcactccagcttgccgcccaacaacagctacgccgacttcgagcgcttctccaaggtgctggaggaggcggcggccgccgaggagggcctgcgcgagctgcagcgcagccggcggctctgccacgaggacgtggaggcgctggccgccatctacgaggagaaggaggcctggtaccgcgaggagagcgacagcctgggccaggacctgcggaggctacggcaggagctgctcaagaccgaggcgctcaagcggcaggcgcaggaggaggccaagggcgcgctgctggggaccagcggcctcaagcgccgcttcagccgcctggagaaccgctacgaggcgctggccaagcaagtagcctccgagatgcgcttcgtgcaggacctcgtgcgcgccctggagcaggagaagctgcagggcgtggagtgcgggctgcgctaggcgcagtggggtgggccaggccccaggacagccggagctcggcctgcggtgggggcgcttcctgtggacgctgcgcctcccatcgcccgggtgcctgtccttgcccagcgccaccaggctggaggcggagtgggaggagctggagccaggcccgtaagttcgcaggcaggggtgggtgtgggacggggctgcttctctacacagcctctacgctggccttcaccttcacccctgcatcgtcggtgaccctgggaccctccaggcagcgtggcctgtggcaccgtgagggttgggacccaccgaggcgcagaggcggcccgaatgcagccctggttcaggcccggaggagggtttgcgggtagttgcacggacaattcggcggggtgctgcctgttgctgccattagcccaggaggaggtcgtgggacggggagggtgggatggacggcggacaggcagtccccacgctgctgggtggcgccgggcttggtggggtcttccactgtgtgcccttctcgccgaggccggtcccccgggtgtggggtgccctgctgcggactcctccgcgagccccatcgtcgcgcctgtggacgcctaggcaagagcggccctctgcagccaagagaaataaaatactggcttccagataaaaaaa

SEQ ID NO: 7826 - DNA, 1943 bp, Homo sapiens
gtgtctggctctcaggaccccagtggatgggacgcagctgagacgtctgcagccatcccaggatgcgcagctggcgggagcacacggggcacaggagcctgtcccggcaatggctccttgtctccggcccaagcgacccctggcatggcggacagagaggcccaggaggagccggcctcagggaggatggcttgaggagacaagccccaggacgcagcctgaccccaggacacggcctcgccacaggacacggcctcaccccaggacacggcctcgccccaggacactggcgagtgtttggactttgttgaaactgcgccacaggcactgccctgggaggtaaataaccggaaaacatcatgctgctggacaagaacgtgcccaacccacgaatcaagctcatcgacttcggcatcgcgcacaagatcgaggcggggaacgagttcaagaacatcttcggcaccccggagtttgtggccccagagattgtgaactatgagccgctgggcctggaggcggacatgtggagcatcggtgtcatcacctatatcctcctgagcggtgcatccccgttcctgggcgagaccaagcaggagacgctcaccaacatctcagccgtgaactacgacttcgacgaggagtacttcagcaacaccagcgagctggccaaggacttcattcgccggctgctcgtcaaagatcccaagcggagaatgaccattgcccagagcctggaacattcctggattaaggcgatccggcggcggaacgtgcgtggtgaggacagcggccgcaagcccgagcggcggcgcctgaagaccacgcgtctgaaggagtacaccatcaagtcgcactccagcttgccgcccaacaacagctacgccgacttcgagcgcttctccaaggtgctggaggaggcggcggccgccgaggagggcctgcgcgagctgcagcgcagccggcggctctgccacgaggacgtggaggcgctggccgccatctacgaggagaaggaggcctggtaccgcgaggagagcgacagcctgggccaggacctgcggaggctacggcaggagctgctcaagaccgaggcgctcaagcggcaggcgcaggaggaggccaagggcgcgctgctggggaccagcggcctcaagcgccgcttcagccgcctggagaaccgctacgaggcgctggccaagcaagtagcctccgagatgcgcttcgtgcaggacctcgtgcgcgccctggagcaggagaagctgcagggcgtggagtgcgggctgcgctaggcgcagtggggtgggccaggccccaggacagccggagctcggcctgcggtgggggcgcttcctgtggacgctgcgcctcccatcgcccgggtgcctgtccttgcccagcgccaccaggctggaggcggagtgggaggagctggagccaggcccgtaagttcgcaggcaggggtgggtgtgggacggggctgcttctctacacagcctctacgctggccttcaccttcacccctgcatcgtcggtgaccctgggaccctccaggcagcgtggcctgtggcaccgtgagggttgggacccaccgaggcgcagaggcggcccgaatgcagccctggttcaggcccggaggagggtttgcgggtagttgcacggacaattcggcggggtgctgcctgttgctgccattagcccaggaggaggtcgtgggacggggagggtgggatggacggcggacaggcagtccccacgctgctgggtggcgccgggcttggtggggtcttccactgtgtgcccttctcgccgaggccggtcccccgggtgtggggtgccctgctgcggactcctccgcgagccccatcgtcgcgcctgtggacgcctaggcaagagcggccctctgcagccaagagaaataaaatactggcttccagataaaaaaa

SEQ ID NO: 7827 - DNA, 1794 bp, Homo sapiens
ggaggcagacgctgttggggcctctcactgccgggctgttgaccttgatcctttggctaaggtgttggctcgggctccccactgcagttaccctcccctcggcgttactgagcactgggggctttcgggctctgcgtctgcacagatacttcgagtctccaaggagacttctgcctgttcatttctgctgctgtcagtggcggggtgggggggtggattttgaatgcctcttgggtggtgtctgggatcgttgcaggaaggttctaagggctcaggagtgtgagtggcccaggcacctgccgtcagcctgtcttctgtgctccgcctgtcgtgggcagccggagaggcggcgcggccgtggtgggagcccaggaccccactgagcccccacgcctgtctcgcagcctgagcggtgcatccccgttcctgggcgagaccaagcaggagacgctcaccaacatctcagccgtgaactacgacttcgacgaggagtacttcagcaacaccagcgagctggccaaggacttcattcgccggctgctcgtcaaagatcccaagcggagaatgaccattgcccagagcctggaacattcctggattaaggcgatccggcggcggaacgtgcgtggtgaggacagcggccgcaagcccgagcggcggcgcctgaagaccacgcgtctgaaggagtacaccatcaagtcgcactccagcttgccgcccaacaacagctacgccgacttcgagcgcttctccaaggtgctggaggaggcggcggccgccgaggagggcctgcgcgagctgcagcgcagccggcggctctgccacgaggacgtggaggcgctggccgccatctacgaggagaaggaggcctggtaccgcgaggagagcgacagcctgggccaggacctgcggaggctacggcaggagctgctcaagaccgaggcgctcaagcggcaggcgcaggaggaggccaagggcgcgctgctggggaccagcggcctcaagcgccgcttcagccgcctggagaaccgctacgaggcgctggccaagcaagtagcctccgagatgcgcttcgtgcaggacctcgtgcgcgccctggagcaggagaagctgcagggcgtggagtgcgggctgcgctaggcgcagtggggtgggccaggccccaggacagccggagctcggcctgcggtgggggcgcttcctgtggacgctgcgcctcccatcgcccgggtgcctgtccttgcccagcgccaccaggctggaggcggagtgggaggagctggagccaggcccgtaagttcgcaggcaggggtgggtgtgggacggggctgcttctctacacagcctctacgctggccttcaccttcacccctgcatcgtcggtgaccctgggaccctccaggcagcgtggcctgtggcaccgtgagggttgggacccaccgaggcgcagaggcggcccgaatgcagccctggttcaggcccggaggagggtttgcgggtagttgcacggacaattcggcggggtgctgcctgttgctgccattagcccaggaggaggtcgtgggacggggagggtgggatggacggcggacaggcagtccccacgctgctgggtggcgccgggcttggtggggtcttccactgtgtgcccttctcgccgaggccggtcccccgggtgtggggtgccctgctgcggactcctccgcgagccccatcgtcgcgcctgtggacgcctaggcaagagcggccctctgcagccaagagaaataaaatactggcttccagataaaaaaa

SEQ ID NO: 7828 - DNA, 1860 bp, Homo sapiens
tgataatcagagagttgtatgactcctattgatgatggttgtgagagccaggtgtcctgtacctgctgcctagcgaatagcgacagatgactttgagacgagctgcaacgatttctaaagacatactactgaacgcgtgtctggtaccgtggctcttcgtatttgcatacagcatgacttcgcaacatggaacggagtcttatggatgaatgctgagcagatgaacgtggccagacccacagaactcatggctgcactcgaactctggtgttctgttgcctccatccgatcggacgtgccgggcgataccgtacgtgtcttcgcaaccatcctatcggtgcaccactcgagagcatcgtcgagtcgcacttcgcagatgagtcgaaatcactaaaccgctaggcgctggcatgggagatggtgggagcagtcagtatgcattcacttatatggtcctgactgatgcttcgccgtgactggttccgtactaccttgtgtgagactcttaccaccatctcagatgtgactgactcagttcgagcgaggaacgtgctatgcagaacaaggtcgcagttgatgctggccaaggacttcattcgccggctgctcgtcaaagatcccaagcggagaatgaccattgcccagagcctggaacattcctggattaaggcgatccggcggcggaacgtgcgtggtgaggacagcggccgcaagcccgagcggcggcgcctgaagaccacgcgtctgaaggagtacaccatcaagtcgcactccagcttgccgcccaacaacagctacgccgacttcgagcgcttctccaaggtgctggaggaggcggcggccgccgaggagggcctgcgcgagctgcagcgcagccggcggctctgccacgaggacgtggaggcgctggccgccatctacgaggagaaggaggcctggtaccgcgaggagagcgacagcctgggccaggacctgcggaggctacggcaggagctgctcaagaccgaggcgctcaagcggcaggcgcaggaggaggccaagggcgcgctgctggggaccagcggcctcaagcgccgcttcagccgcctggagaaccgctacgaggcgctggccaagcaagtagcctccgagatgcgcttcgtgcaggacctcgtgcgcgccctggagcaggagaagctgcagggcgtggagtgcgggctgcgctaggcgcagtggggtgggccaggccccaggacagccggagctcggcctgcggtgggggcgcttcctgtggacgctgcgcctcccatcgcccgggtgcctgtccttgcccagcgccaccaggctggaggcggagtgggaggagctggagccaggcccgtaagttcgcaggcaggggtgggtgtgggacggggctgcttctctacacagcctctacgctggccttcaccttcacccctgcatcgtcggtgaccctgggaccctccaggcagcgtggcctgtggcaccgtgagggttgggacccaccgaggcgcagaggcggcccgaatgcagccctggttcaggcccggaggagggtttgcgggtagttgcacggacaattcggcggggtgctgcctgttgctgccattagcccaggaggaggtcgtgggacggggagggtgggatggacggcggacaggcagtccccacgctgctgggtggcgccgggcttggtggggtcttccactgtgtgcccttctcgccgaggccggtcccccgggtgtggggtgccctgctgcggactcctccgcgagccccatcgtcgcgcctgtggacgcctaggcaagagcggccctctgcagccaagagaaataaaatactggcttccagataaaaaaa

SEQ ID NO: 7829 - DNA, 576 bp, Homo sapiens
taggctgggtgtagaatcggccgagggtgtgccagctgcggtgtggcgccggccgtattctccgggctgcggaggggttgccattaggggactcctgaggtcctatctccaggctgcggtgactgcactttccctggagtggaagctgctggaaggcggaccggccgccatgtccacgttcaggcaggaggacgtggaggaccattatgagatgggggaggagctgggcagcggccagtttgcgatcgtgcggaagtgccggcagaagggcacgggcaaggagtacgcagccaagttcatcaagaagcgccgcctgtcatccagccggcgtggggtgagccgggaggagatcgagcgggaggtgaacatcctgcgggagatccggcaccccaacatcatcaccctgcacgacatcttcgagaacaagacggacgtggtcctcatcctggagctggtctctggcggggagctctttgacttcctggcggagaaggagtcgctgacggaggacgaggccacccagttcctcaagcagactccgggtgatcctcatagacgtcgaccgtgcagtgcatg

SEQ ID NO: 7830 - DNA, 354 bp, Homo sapiens
ggtcgagagcgactcattcgttgtcggcgaaggagggtccgtgttttgccgaaggcgtctgattgcacggacaattcggcggggtgctgcctgttgctgccattagcccaggaggaggtcgtgggacggggagggtgggatggacggcggacaggcagtccccacgctgctgggtggcgccgggcttggtggggtcttccactgtgtgcccttctcgccgaggccggtcccccgggtgtggggtgccctgctgcggactcctccgcgagccccatcgtcgcgcctgtggacgcctaggcaagagcggccctctgcagccaagagaaataaaatactggcttccagataaaaaaa

SEQ ID NO: 7831 - DNA, 560 bp, Homo sapiens
ctgggagggtgggcggccccacgctgcgctgacccttgcctcttgtctgtccccaggagcatcggtgtcatcacctatatcctgtgagtacctggcgggggccccctcggctgtgcaacacagctggcatgggtccccggctccgtgtgtctcatgtggacgccaggggtccccagcctggctgtgacccatcgcgggtactcaggggataccgggtgaacggatgagtgattctctgtggctgctgtcacagaggcttctggagagttctgaaggcaggacactcacagagcggctgagcaggctccgggttgggggtcgtgtgtgctcctgtccctctggctgctagggagcccagcctcctctcgaagtgcaaggaaggggtccgaccccacgctgggttttggctcctgtccctgggccacacgtgggcctgctgttgtttattatttttatttgttgagacggggtcttactctcttgcccaggctggagtgctgtcctagctcactgcagcctccacctcccagacttaagcaatcctcccacctcagcctcct

SEQ ID NO: 7832 - DNA, 402 bp, Homo sapiens
aagtgattcagctagctttgaggcagtgttttgtagtgagtcattctttgagtcctgaatccttttttttagcctcaaaatatcaatgagatacgcatatcttatttggagtatattattttctaactgtggtcttttagtttaaggaacaacagactgtttgaatgatccttacgatgtttgaacatgttaccggctggaatcccagaaaatatcttggcatgcctttgaattttgagagcccattttattgtgggtgctctggtttaatcccaaatacacaaaaaccaattaaatataagcactgaatttgcaaaggccaaataaacgcaagcacagatgggaaaataaagtacccacttaccaagaaggacgataagaagccttctccagaagtagtta

SEQ ID NO: 7833 - DNA, 310 bp, Homo sapiens
acacacacacacacacacacacacacacacacgaaaatttagtttatttcccattggataattgaataggtctgtttgcttttggtacttgctgatctttccagaagtatactattaggccctgagaatattaaggttacttatggtgagttggaaaacattgttggaattaaagcactttaaatggaaaccatcagtgtgcatccaatattctcccgcccgcaaccaggtacacagattagaaataaaacgtagttaatgtcatatttacttatttaacccgtgctaagggaaatatcacagttttcta

SEQ ID NO: 7834 - DNA, 331 bp, Homo sapiens
ctgttttgcctgggcctggagaacccaagaagacctgctttgctggacaggtgcttgcaaagggccagagaataaacactgtaggctttgggggccagatggtctctgttgagactactcaactctattcttatagtacaaaagcagccacaggcaatacataaaagaatgagtgggctgtgttccaataaaactttatttataaaacgaaaagggggccggacatggcctgtgagcagacaaccggagctcatgcctgtccccttcagtccccataagcaggccttcccgtatctctccgtaaaggaaaatgggaagcagaccagaagta

SEQ ID NO: 7835 - DNA, 247 bp, Homo sapiens
caaatatgttatattgtcctgtgcctggaaacaccacctcctttttcaccttttgattttggttcttgcctcatatatttgaatttaattccttatcccctttttcttttgaacattttcttctactgttggcttatagccacacaacagcttgcaacattgagtctttgttgctcatttagaaaaagaaaagtaatttcaaaccctcatgaacttggcctgggcaacaagagcgaaactccgtctc

SEQ ID NO: 7836 - DNA, 419 bp, Homo sapiens
aaatgattaccagtacttaacacacacaacacctgccaggtgaaacactcaaaactaagtctcaactttttaaagatgctttaacatctttgagaacttaaatccactccaggcattaaccactcggtatctgcatttgaccacagtatcttgtccattcatttaaaatctacttgtgctagatgctatggatacaagagaaacaagatagatatggccctcctgcattcaaagccttcaaaggaaaaagtttcatcacaataaagagtagaagtggggaactaaatactttttttaaaaagtcaaataaatatttaagaaattcttagtttcaagtattttcagaaaatcaatctggtcttatcaagaactgcctagttgaagccaggcacagtggtgcatgcctgcagtctcagcta

SEQ ID NO: 7837 - DNA, 1384 bp, Homo sapiens
  misc_feature (1)..(1): n is a, c, g, or t
  misc_feature (6)..(6): n is a, c, g, or t
  misc_feature (8)..(9): n is a, c, g, or t
  misc_feature (11)..(11): n is a, c, g, or t
  misc_feature (43)..(43): n is a, c, g, or t
ngcacngnncngagactcgcgccccccgccggatccccacctncgcgcccgccccgcgggctgagctgcccgaccggggcccgcccccggcgcccaccatgtacgcctttgtgcggttcctggaggacaacgtctgctacgcgctgcccgtgtcgtgcgtgcgcgacttcagcccccgctcgcggctggattttgacaaccagaaggtgtacgccgtgtaccggggcccggaggaattgggcgccgggcccgagagccccccgcgcgccccccgcgactggggcgcgctgttgctccacaaggcccagatcctggcgctggcagaagacaaatctgaccttgaaaacagtgtgatgcagaagaaaataaaaatccccaagctttctcttaatcatgtagaagaagatggagaggttaaagattatggggaagaagatttacagcttagacacatcaagagacctgaggggcggaagccgagcgaagtggcgcacaagagcatcgaggcagtggtggctcggctagagaagcagaacggcctgagcctgggccatagcacgtgtccggaagaggtcttcgtggaggcctcgccaggcacagaggacatggacagtctagaagatgctgtggtgccccgggctctgtatgaggagctgctgcgcaactaccagcagcaacaggaagagatgcgccacctccagcaggagctggagcggactcggaggcagctggtacaacaggccaagaagctcaaggagtacggggcacttgtgtctgaaatgaaggagctccgtgaccttaaccggaggctccaggacgtgctgctcctgaggcttggcagcggtcccgccattgatctggaaaaagtaaagtcagaatgtctcgagcccgagccggagttacggagcactttcagtgaggaagcaaatacgtcgtcctattaccccgctcctgcgcctgtcatggacaagtatatcctagacaatggcaaggtccatctgggaagcgggatttgggttgatgaggagaaatggcaccagctacaagtaacccaaggagattccaagtacacgaagaacttggcagttatgatttggggaacagatgttctgaaaaacagaagcgtcacaggcgtcgccacaaaaaaaaagaaagatgcagtccctaaaccacccctctcgcctcacaaactaagcatcgtcagagagtgtttgtatgacagaatagcacaagaaactgtggatgaaactgaaattgcacagagactctccaaagtcaacaagtacatctgtgaaaaaatcatggatatcaataaatcctgtaaaaatgaagaacgaagggaagcaaaatacaatttgcaataaactttggatttttcataaag

SEQ ID NO: 7838 - DNA, 1466 bp, Homo sapiens
  misc_feature (1)..(1): n is a, c, g, or t
  misc_feature (6)..(6): n is a, c, g, or t
  misc_feature (8)..(9): n is a, c, g, or t
  misc_feature (11)..(11): n is a, c, g, or t
  misc_feature (43)..(43): n is a, c, g, or t
ngcacngnncngagactcgcgccccccgccggatccccacctncgcgcccgccccgcgggctgagctgcccgaccggggcccgcccccggcgcccaccatgtacgcctttgtgcggttcctggaggacaacgtctgctacgcgctgcccgtgtcgtgcgtgcgcgacttcagcccccgctcgcggctggattttgacaaccagaaggtgtacgccgtgtaccggggcccggaggaattgggcgccgggcccgagagccccccgcgcgccccccgcgactggggcgcgctgttgctccacaaggcccagatcctggcgctggcagaagacaaatctgaccttgaaaacagtgtgatgcagaagaaaataaaaatccccaagctttctcttaatcatgtagaagaagatggagaggttaaagattatggggaagaagatttacagcttagacacatcaaggattgtctggggaaatattgatctgcagtccaagaaaatcccagctgcccttgcctgaactgattctcgttgtcctacacagagacctgaggggcggaagccgagcgaagtggcgcacaagagcatcgaggcagtggtggctcggctagagaagcagaacggcctgagcctgggccatagcacgtgtccggaagaggtcttcgtggaggcctcgccaggcacagaggacatggacagtctagaagatgctgtggtgccccgggctctgtatgaggagctgctgcgcaactaccagcagcaacaggaagagatgcgccacctccagcaggagctggagcggactcggaggcagctggtacaacaggccaagaagctcaaggagtacggggcacttgtgtctgaaatgaaggagctccgtgaccttaaccggaggctccaggacgtgctgctcctgaggcttggcagcggtcccgccattgatctggaaaaagtaaagtcagaatgtctcgagcccgagccggagttacggagcactttcagtgaggaagcaaatacgtcgtcctattaccccgctcctgcgcctgtcatggacaagtatatcctagacaatggcaaggtccatctgggaagcgggatttgggttgatgaggagaaatggcaccagctacaagtaacccaaggagattccaagtacacgaagaacttggcagttatgatttggggaacagatgttctgaaaaacagaagcgtcacaggcgtcgccacaaaaaaaaagaaagatgcagtccctaaaccacccctctcgcctcacaaactaagcatcgtcagagagtgtttgtatgacagaatagcacaagaaactgtggatgaaactgaaattgcacagagactctccaaagtcaacaagtacatctgtgaaaaaatcatggatatcaataaatcctgtaaaaatgaagaacgaagggaagcaaaatacaatttgcaataaactttggatttttcataaag

SEQ ID NO: 7839 - DNA, 1191 bp, Homo sapiens
ggacaaccagaaggtgtacgccgtgtaccggggcccggaggaattgggcgccgggcccgagagccccccgcgcgccccccgcgactggggcgcgctgttgctccacaaggcccagatcctggcgctggcagaagacaaatctgaccttgaaaacagtgtgatgcagaagaaaataaaaatccccaagctttctcttaatcatgtagaagaagatggagaggttaaagattatggggaagaagatttacagcttagacacatcaagagacctgaggggcggaagccgagcgaagtggcgcacaagagcatcgaggcagtggtggctcggctagagaagcagaacggcctgagcctgggccatagcacgtgtccggaagaggtcttcgtggaggcctcgccaggcacagaggacatggacagtctagaagatgctgtggtgccccgggctctgtatgaggagctgctgcgcaactaccagcagcaacaggaagagatgcgccacctccagcaggagctggagcggactcggaggcagctggtacaacaggccaagaagctcaaggagtacggggcacttgtgtctgaaatgaaggagctccgtgaccttaaccggaggctccaggacgtgctgctcctgaggcttggcagcggtcccgccattgatctggaaaaagtaaagtcagaatgtctcgagcccgagccggagttacggagcactttcagtgaggaagcaaatacgtcgtcctattaccccgctcctgcgcctgtcatggacaagtatatcctagacaatggcaaggtccatctgggaagcgggatttgggttgatgaggagaaatggcaccagctacaagtaacccaaggagattccaagtacacgaagaacttggcagttatgatttggggaacagatgttctgaaaaacagaagcgtcacaggcgtcgccacaaaaaaaaagaaagatgcagtccctaaaccacccctctcgcctcacaaactaagcatcgtcagagagtgtttgtatgacagaatagcacaagaaactgtggatgaaactgaaattgcacagagactctccaaagtcaacaagtacatctgtgaaaaaatcatggatatcaataaatcctgtaaaaatgaagaacgaagggaagcaaaatacaatttgcaataaactttggatttttcataaag

SEQ ID NO: 7840 - DNA, 1537 bp, Homo sapiens
ggacaaccagaaggtgtacgccgtgtaccggggcccggaggaattgggcgccgggcccgagagccccccgcgcgccccccgcgactggggcgcgctgttgctccacaaggcccagatcctggcgctggcagaagacaaatctgaccttgaaaacagtgtgatgcagaagaaaataaaaatccccaagctttctcttaatcatgtagaagaagatggagaggttaaagattatggggaagaagatttacagcttagacacatcaagagacctgaggggcggaagccgagcgaagtggcgcacaagagcatcgaggcagtggtggctcggctagagaagcagaacggcctgagcctgggccatagcacgtgtccggaagaggtcttcgtggaggcctcgccaggcacagaggacatggacagtctagaagatgctgtggtgccccgggctctgtatgaggagctgctgcgcaactaccagcagcaacaggaagagatgcgccacctccagcaggagctggagcggactcggaggcagctggtacaacaggccaagaagctcaaggagtacggggcacttgtgtctgaaatgaaggagctccgtgaccttaaccggaggctccaggacgtgctgctcctgaggcttggcagcggtcccgccattgatctggaaaaagtaaagtcagaatgtctcgagcccgagccggagttacggagcactttcagtgaggaagcaaatacgtcgtcctattaccccgctcctgcgcctgtcatggacaagtatatcctagacaatggcaaggtccatctgggaagcgggatttgggttgatgaggagaaatggcaccagctacaagtaacccaaggagattccaagtacacgaagaacttggcagttatgatttggggaacagatgttctgaaaaacagaagcgtcacaggcgtcgccacaaaaaaaaagaaagatgcagtccctaaaccacccctctcgcctcacaaactaagcatcgtcagagagtgtttgtatgacagaatagcacaagaaactgtggatgaaactgaaattgcacagagactctccaaagtcaacaagtacatctgtgaaaaaatcatggatatcaataaatcctgtaaaaatgaagaacgaagggaagcaaaatacaatttgcaataaactttggatttttcataaagctttcgtgttttccttgtgtggcatgtgatttgcgagcgatggtgccgtccaaatcagaccccaccgtgcatggtggtgtgtgtgcagggatccatcgggttctggggtcagcggcttgttctgaatgtggacactccaaagaagacagatggctttgctgagactcaggagcagcctggcactggtgtccttctgggaatggggaaaacactcttcttggagggggataaggttgcctgagttgcctgtcacttgactggggtttgaatggatatttttactatccaaggacttctttgttgctctattttgttctataataaattttcattaattctttgatgt

SEQ ID NO: 7841 - DNA, 1520 bp, Homo sapiens
ggacaaccagaaggtgtacgccgtgtaccggggcccggaggaattgggcgccgggcccgagagccccccgcgcgccccccgcgactggggcgcgctgttgctccacaaggcccagatcctggcgctggcagaagacaaatctgaccttgaaaacagtgtgatgcagaagaaaataaaaatccccaagctttctcttaatcatgtagaagaagatggagaggttaaagattatggggaagaagatttacagcttagacacatcaagagacctgaggggcggaagccgagcgaagtggcgcacaagagcatcgaggcagtggtggctcggctagagaagcagaacggcctgagcctgggccatagcacgtgtccggaagaggtcttcgtggaggcctcgccaggcacagaggacatggacagtctagaagatgctgtggtgccccgggctctgtatgaggagctgctgcgcaactaccagcagcaacaggaagagatgcgccacctccagcaggagctggagcggactcggaggcagctggtacaacaggccaagaagctcaaggagtacggggcacttgtgtctgaaatgaaggagctccgtgaccttaaccggaggctccaggacgtgctgctcctgaggcttggcagcggtcccgccattgatctggaaaaagtaaagtcagaatgtctcgagcccgagccggagttacggagcactttcagtgaggaagcaaatacgtcgtcctattaccccgctcctgcgcctgtcatggacaagtatatcctagacaatggcaaggtccatctgggaagcgggatttgggttgatgaggagaaatggcaccagctacaagtaacccaaggagattccaagtacacgaagaacttggcagttatgatttggggacagaagcgtcacaggcgtcgccacaaaaaaaaagaaagatgcagtccctaaaccacccctctcgcctcacaaactaagcatcgtcagagagtgtttgtatgacagaatagcacaagaaactgtggatgaaactgaaattgcacagagactctccaaagtcaacaagtacatctgtgaaaaaatcatggatatcaataaatcctgtaaaaatgaagaacgaagggaagcaaaatacaatttgcaataaactttggatttttcataaagctttcgtgttttccttgtgtggcatgtgatttgcgagcgatggtgccgtccaaatcagaccccaccgtgcatggtggtgtgtgtgcagggatccatcgggttctggggtcagcggcttgttctgaatgtggacactccaaagaagacagatggctttgctgagactcaggagcagcctggcactggtgtccttctgggaatggggaaaacactcttcttggagggggataaggttgcctgagttgcctgtcacttgactggggtttgaatggatatttttactatccaaggacttctttgttgctctattttgttctataataaattttcattaattctttgatgt

SEQ ID NO: 7842 - DNA, 1388 bp, Homo sapiens
ggacaaccagaaggtgtacgccgtgtaccggggcccggaggaattgggcgccgggcccgagagccccccgcgcgccccccgcgactggggcgcgctgttgctccacaaggcccagatcctggcgctggcagaagacaaatctgaccttgaaaacagtgtgatgcagaagaaaataaaaatccccaagctttctcttaatcatgtagaagaagatggagaggttaaagattatggggaagaagatttacagcttagacacatcaagagacctgaggggcggaagccgagcgaagtggcgcacaagagcatcgaggcagtggtggctcggctagagaagcagaacggcctgagcctgggccatagcacgtgtccggaagaggtcttcgtggaggcctcgccaggcacagaggacatggacagtctagaagatgctgtggtgccccgggctctgtatgaggagctgctgcgcaactaccagcagcaacaggaagagatgcgccacctccagcaggagctggagcggactcggaggcagctggtacaacaggccaagaagctcaaggagtacggggcacttgtgtctgaaatgaaggagctccgtgaccttaaccggaggctccaggacgtgctgctcctgaggcttggcagcggtccatctgggaagcgggatttgggttgatgaggagaaatggcaccagctacaagtaacccaaggagattccaagtacacgaagaacttggcagttatgatttggggaacagatgttctgaaaaacagaagcgtcacaggcgtcgccacaaaaaaaaagaaagatgcagtccctaaaccacccctctcgcctcacaaactaagcatcgtcagagagtgtttgtatgacagaatagcacaagaaactgtggatgaaactgaaattgcacagagactctccaaagtcaacaagtacatctgtgaaaaaatcatggatatcaataaatcctgtaaaaatgaagaacgaagggaagcaaaatacaatttgcaataaactttggatttttcataaagctttcgtgttttccttgtgtggcatgtgatttgcgagcgatggtgccgtccaaatcagaccccaccgtgcatggtggtgtgtgtgcagggatccatcgggttctggggtcagcggcttgttctgaatgtggacactccaaagaagacagatggctttgctgagactcaggagcagcctggcactggtgtccttctgggaatggggaaaacactcttcttggagggggataaggttgcctgagttgcctgtcacttgactggggtttgaatggatatttttactatccaaggacttctttgttgctctattttgttctataataaattttcattaattctttgatgt

SEQ ID NO: 7843 - DNA, 806 bp, Homo sapiens
agggggatggggatgttgaatttggaaattggaggggacgctggtggacggattgggtgcaaggagttggtgttgatggaggagcaggacgccagagtcccagccctggaaccgttcagagtggagcaggttgtcagaactcagggtgcagagggtgaaggaggcaggctgattcctgagttcttgggttgggactgcccccttccaccaaattcattcttactgtcagagtccattctggaatggcactggtcccttgactttagaccctgacctgtctgaggacatcctgagcctgtctccaggcataggggttgctctgtgatgatatgtcctctgtgtgggttgaagggccacaccttcagggggtctttctatcctaggcaccacctgtaatctactatgtccctgacttcatctccaaagaagaggaggagtatttgcttcgacaggtgacctcagtgccctactggtctgttttcccactcttcccatattcctccccaatgtccatcctctgtatgagagcccccaaggctgcagtgaagaccccgacagaaggaacaaggaagttacagagctcatactccctctactgagatagcccaatcctgctagcttagagaatagggggttataaacataggctgagatagcccagttcagatcattgagactggggagtaaagaattttgtattcagatttctgtgctgagatagcccagtaaactctttcctgtgctaaaatagcccagcatagacccagagcacaataaggttaccaaatacagaccatctacgctga

SEQ ID NO: 7844 - DNA, 961 bp, Homo sapiens
agggggatggggatgttgaatttggaaattggaggggacgctggtggacggattgggtgcaaggagttggtgttgatggaggagcaggacgccagagtcccagccctggaaccgttcagagtggagcaggcaccacctgtaatctactatgtccctgacttcatctccaaagaagaggaggagtatttgcttcgacaggtttttaatgccccaaagccaaagtggacccagctctctgggagaaagttacagaactggggtgggcttcctcatccccgagggatggttcctgagcggctgcccccatggctccagcgctacgtggacaaagtgtcaaacctcagcctctttggaggcctcccagctaaccatgtcctcgtgaaccagtatctgcctggggagggcatcatgccccacgaggacggaccactgtactacccgactgtcagcaccatcagcctgggctcccacaccgtgctggacttctacgagccgcggcggccagaggacgatgaccctacagaacagcctcggcctccgccccggcccaccacctcgctactgctggaaccgcgcagcctgctggtgctccgcggccccgcctacacgcgtcttctccacggcatcgccgccgcccgcgtagacgcgctggacgccgcctcctcgccgcccaatgcggcagcctgcccgtcggcgcggccgggagcctgcctggtgcgcggcacccgggtctcgctgaccatccgccgcgtgccccgcgtgctgcgcgccggcctcctgctgggcaagtgaccgccagggccgggacccctcggattcccaggttcctgcccctttggggctgctgtgactccgcgacctaggaaccgtgggcaaagggggctcccctgggttatttattttcccaataattttgtgtgagctacagaagaccccataccaaataaacaaaaaaatcttt

SEQ ID NO: 7845 - DNA, 1002 bp, Homo sapiens
cgggcatggaacgtaggggctctctgtgtggcttgtaagatgctgaagactcagattttagagaccaagtgcgtttcagaagagggctgaggattgggtgcaaggagttggtgttgatggaggagcaggacgccagagtcccagccctggaaccgttcagagtggagcaggcaccacctgtaatctactatgtccctgacttcatctccaaagaagaggaggagtatttgcttcgacaggtttttaatgccccaaagccaaagtggacccagctctctgggagaaagttacagaactggggtgggcttcctcatccccgagggatggttcctgagcggctgcccccatggctccagcgctacgtggacaaagtgtcaaacctcagcctctttggaggcctcccagctaaccatgtcctcgtgaaccagtatctgcctggggagggcatcatgccccacgaggacggaccactgtactacccgactgtcagcaccatcagcctgggctcccacaccgtgctggacttctacgagccgcggcggccagaggacgatgaccctacagaacagcctcggcctccgccccggcccaccacctcgctactgctggaaccgcgcagcctgctggtgctccgcggccccgcctacacgcgtcttctccacggcatcgccgccgcccgcgtagacgcgctggacgccgcctcctcgccgcccaatgcggcagcctgcccgtcggcgcggccgggagcctgcctggtgcgcggcacccgggtctcgctgaccatccgccgcgtgccccgcgtgctgcgcgccggcctcctgctgggcaagtgaccgccagggccgggacccctcggattcccaggttcctgcccctttggggctgctgtgactccgcgacctaggaaccgtgggcaaagggggctcccctgggttatttattttcccaataattttgtgtgagctacagaagaccccataccaaataaacaaaaaaatcttt

SEQ ID NO: 7846 - DNA, 1244 bp, Homo sapiens
cgggcatggaacgtaggggctctctgtgtggcttgtaagatgctgaagactcagattttagagaccaagtgcgtttcagaagagggctgaggattgggtgcaaggagttggtgttgatggaggagcaggacgccagagtcccagccctggaaccgttcagagtggagcaggcaccacctgtaatctactatgtccctgacttcatctccaaagaagaggaggagtatttgcttcgacaggtttttaatgccccaaagccaaagtggacccagctctctgggagaaagttacagaactggggggggccctcaggaccccattgccttccccaggtgggcttcctcatccccgagggatggttcctgagcggctgcccccatggctccagcgctacgtggacaaagtgtcaaacctcagcctctttggaggcctcccagctaaccatgtcctcgtgaaccagtatctgcctggggagggcatcatggtaaccacacaccctcggcccgtgtccccccactcagacttctgagctgtgctggggcaggggactctgtacccaccctcactcattaggcagccacatctcccaaacaggcattcacctccctgtccctggcttgggaagcccccctttgacccagagggtgggggttgtggactcctgccctgcccagccctggtgcccactccctagccccacgaggacggaccactgtactacccgactgtcagcaccatcagcctgggctcccacaccgtgctggacttctacgagccgcggcggccagaggacgatgaccctacagaacagcctcggcctccgccccggcccaccacctcgctactgctggaaccgcgcagcctgctggtgctccgcggccccgcctacacgcgtcttctccacggcatcgccgccgcccgcgtagacgcgctggacgccgcctcctcgccgcccaatgcggcagcctgcccgtcggcgcggccgggagcctgcctggtgcgcggcacccgggtctcgctgaccatccgccgcgtgccccgcgtgctgcgcgccggcctcctgctgggcaagtgaccgccagggccgggacccctcggattcccaggttcctgcccctttggggctgctgtgactccgcgacctaggaaccgtgggcaaagggggctcccctgggttatttattttcccaataattttgtgtgagctacagaagaccccataccaaataaacaaaaaaatcttt

SEQ ID NO: 7847 - DNA, 1137 bp, Homo sapiens
ggggtcagtggaggtcctgagggattagggatttcctgatgagttgggagtatctgaaagggacctgtggtctggagaagtgaggaaacctctgaaggacccagtggctatctccaaacggtcaggggtccctgagaggatcagggtgcttccagccactgtggaatccctaatgggggatctattgctataggggggccctcaggaccccattgccttccccaggtgggcttcctcatccccgagggatggttcctgagcggctgcccccatggctccagcgctacgtggacaaagtgtcaaacctcagcctctttggaggcctcccagctaaccatgtcctcgtgaaccagtatctgcctggggagggcatcatggtaaccacacaccctcggcccgtgtccccccactcagacttctgagctgtgctggggcaggggactctgtacccaccctcactcattaggcagccacatctcccaaacaggcattcacctccctgtccctggcttgggaagcccccctttgacccagagggtgggggttgtggactcctgccctgcccagccctggtgcccactccctagccccacgaggacggaccactgtactacccgactgtcagcaccatcagcctgggctcccacaccgtgctggacttctacgagccgcggcggccagaggacgatgaccctacagaacagcctcggcctccgccccggcccaccacctcgctactgctggaaccgcgcagcctgctggtgctccgcggccccgcctacacgcgtcttctccacggcatcgccgccgcccgcgtagacgcgctggacgccgcctcctcgccgcccaatgcggcagcctgcccgtcggcgcggccgggagcctgcctggtgcgcggcacccgggtctcgctgaccatccgccgcgtgccccgcgtgctgcgcgccggcctcctgctgggcaagtgaccgccagggccgggacccctcggattcccaggttcctgcccctttggggctgctgtgactccgcgacctaggaaccgtgggcaaagggggctcccctgggttatttattttcccaataattttgtgtgagctacagaagaccccataccaaataaacaaaaaaatcttt

SEQ ID NO: 7848 - DNA, 829 bp, Homo sapiens
agggggatggggatgttgaatttggaaattggaggggacgctggtggacggattgggtgcaaggagttggtgttgatggaggagcaggacgccagagtcccagccctggaaccgttcagagtggagcaggcaccacctgtaatctactatgtccctgacttcatctccaaagaagaggaggagtatttgcttcgacaggtgacctcagtgccctactggtttttaatgccccaaagccaaagtggacccagctctctgggagaaagttacagaactgggccccacgaggacggaccactgtactacccgactgtcagcaccatcagcctgggctcccacaccgtgctggacttctacgagccgcggcggccagaggacgatgaccctacagaacagcctcggcctccgccccggcccaccacctcgctactgctggaaccgcgcagcctgctggtgctccgcggccccgcctacacgcgtcttctccacggcatcgccgccgcccgcgtagacgcgctggacgccgcctcctcgccgcccaatgcggcagcctgcccgtcggcgcggccgggagcctgcctggtgcgcggcacccgggtctcgctgaccatccgccgcgtgccccgcgtgctgcgcgccggcctcctgctgggcaagtgaccgccagggccgggacccctcggattcccaggttcctgcccctttggggctgctgtgactccgcgacctaggaaccgtgggcaaagggggctcccctgggttatttattttcccaataattttgtgtgagctacagaagaccccataccaaataaacaaaaaaatcttt

SEQ ID NO: 7849 - DNA, 800 bp, Homo sapiens
cgggcatggaacgtaggggctctctgtgtggcttgtaagatgctgaagactcagattttagagaccaagtgcgtttcagaagagggctgaggattgggtgcaaggagttggtgttgatggaggagcaggacgccagagtcccagccctggaaccgttcagagtggagcaggcaccacctgtaatctactatgtccctgacttcatctccaaagaagaggaggagtatttgcttcgacaggtttttaatgccccaaagccaaagtggacccagctctctgggagaaagttacagaactggggtgggcttcctcatccccgagggatggttcctgagcggctgcccccatggctccagcgctacgtggacaaagtgtcaaacctcagcctctttggaggcctcccagctaaccatgtcctcgtgaaccagtatctgcctggggagggcatcatgccccacgaggacggaccactgtactacccgactgtcagcaccatcagcctgggctcccacaccgtgctggacttctacgagccgcggcggccagaggacgatgaccctacagaacagcctcggcctccgccccggcccaccacctcgctatgcgcgccggcctcctgctgggcaagtgaccgccagggccgggacccctcggattcccaggttcctgcccctttggggctgctgtgactccgcgacctaggaaccgtgggcaaagggggctcccctgggttatttattttcccaataattttgtgtgagctacagaagaccccataccaaataaacaaaaaaatcttt

SEQ ID NO: 7850 - DNA, 580 bp, Homo sapiens
agggggatggggatgttgaatttggaaattggaggggacgctggtggacggattgggtgcaaggagttggtgttgatggaggagcaggacgccagagtcccagccctggaaccgttcagagtggagcaggttgtcagaactcagggtgcagagggtgaaggaggcaggctgattcctgagttcttgggttgggactgcccccttccaccaaattcattcttactgtcagagtccattctggaatggcactggtcccttgactttagaccctgacctgtctgaggacatcctgagcctgtctccaggcataggggttgctctgtgatgatatgtcctctgtgtgggttgaagggccacaccttcagggggtctttctatcctaggcaccacctgtaatctactatgtccctgacttcatctccaaagaagaggaggagtatttgcttcgacaggtgacctcagtgccctactggtctgttttcccactcttcccatattcctccccaatgtccatcctctgtatactaatctccctacaaatctccttaattataacattcacagccacagaacaccgtca

SEQ ID NO: 7851 - DNA, 993 bp, Homo sapiens
agggggatggggatgttgaatttggaaattggaggggacgctggtggacggattgggtgcaaggagttggtgttgatggaggagcaggacgccagagtcccagccctggaaccgttcagagtggagcaggcaccacctgtaatctactatgtccctgacttcatctccaaagaagaggaggagtatttgcttcgacaggtttttaatgccccaaagccaaagtggacccagctctctgggagaaagttacagaactggggggggccctcaggaccccattgccttccccaggtgggcttcctcatccccgagggatggttcctgagcggctgcccccatggctccagcgctacgtggacaaagtgtcaaacctcagcctctttggaggcctcccagctaaccatgtcctcgtgaaccagtatctgcctggggagggcatcatgccccacgaggacggaccactgtactacccgactgtcagcaccatcagcctgggctcccacaccgtgctggacttctacgagccgcggcggccagaggacgatgaccctacagaacagcctcggcctccgccccggcccaccacctcgctactgctggaaccgcgcagcctgctggtgctccgcggccccgcctacacgcgtcttctccacggcatcgccgccgcccgcgtagacgcgctggacgccgcctcctcgccgcccaatgcggcagcctgcccgtcggcgcggccgggagcctgcctggtgcgcggcacccgggtctcgctgaccatccgccgcgtgccccgcgtgctgcgcgccggcctcctgctgggcaagtgaccgccagggccgggacccctcggattcccaggttcctgcccctttggggctgctgtgactccgcgacctaggaaccgtgggcaaagggggctcccctgggttatttattttcccaataattttgtgtgagctacagaagaccccataccaaataaacaaaaaaatcttt

SEQ ID NO: 7852 - DNA, 1212 bp, Homo sapiens
cgggcatggaacgtaggggctctctgtgtggcttgtaagatgctgaagactcagattttagagaccaagtgcgtttcagaagagggctgaggattgggtgcaaggagttggtgttgatggaggagcaggacgccagagtcccagccctggaaccgttcagagtggagcaggcaccacctgtaatctactatgtccctgacttcatctccaaagaagaggaggagtatttgcttcgacaggtttttaatgccccaaagccaaagtggacccagctctctgggagaaagttacagaactggggtgggcttcctcatccccgagggatggttcctgagcggctgcccccatggctccagcgctacgtggacaaagtgtcaaacctcagcctctttggaggcctcccagctaaccatgtcctcgtgaaccagtatctgcctggggagggcatcatggtaaccacacaccctcggcccgtgtccccccactcagacttctgagctgtgctggggcaggggactctgtacccaccctcactcattaggcagccacatctcccaaacaggcattcacctccctgtccctggcttgggaagcccccctttgacccagagggtgggggttgtggactcctgccctgcccagccctggtgcccactccctagccccacgaggacggaccactgtactacccgactgtcagcaccatcagcctgggctcccacaccgtgctggacttctacgagccgcggcggccagaggacgatgaccctacagaacagcctcggcctccgccccggcccaccacctcgctactgctggaaccgcgcagcctgctggtgctccgcggccccgcctacacgcgtcttctccacggcatcgccgccgcccgcgtagacgcgctggacgccgcctcctcgccgcccaatgcggcagcctgcccgtcggcgcggccgggagcctgcctggtgcgcggcacccgggtctcgctgaccatccgccgcgtgccccgcgtgctgcgcgccggcctcctgctgggcaagtgaccgccagggccgggacccctcggattcccaggttcctgcccctttggggctgctgtgactccgcgacctaggaaccgtgggcaaagggggctcccctgggttatttattttcccaataattttgtgtgagctacagaagaccccataccaaataaacaaaaaaatcttt

SEQ ID NO: 7853 - DNA, 964 bp, Homo sapiens
cgggcatggaacgtaggggctctctgtgtggcttgtaagatgctgaagactcagattttagagaccaagtgcgtttcagaagagggctgaggattgggtgcaaggagttggtgttgatggaggagcaggacgccagagtcccagccctggaaccgttcagagtggagcaggcaccacctgtaatctactatgtccctgacttcatctccaaagaagaggaggagtatttgcttcgacaggtttttaatgccccaaagccaaagtggacccagctctctgggagaaagttacagaactggggtgggcttcctcatccccgagggatggttcctgagcggctgcccccatggctccagcgctacgtggacaaagtgtcaaacctcagcctctttggaggcctcccagctaaccatgtcctcgtgaaccagtatctgcctggggagggcatcatgcaccatcagcctgggctcccacaccgtgctggacttctacgagccgcggcggccagaggacgatgaccctacagaacagcctcggcctccgccccggcccaccacctcgctactgctggaaccgcgcagcctgctggtgctccgcggccccgcctacacgcgtcttctccacggcatcgccgccgcccgcgtagacgcgctggacgccgcctcctcgccgcccaatgcggcagcctgcccgtcggcgcggccgggagcctgcctggtgcgcggcacccgggtctcgctgaccatccgccgcgtgccccgcgtgctgcgcgccggcctcctgctgggcaagtgaccgccagggccgggacccctcggattcccaggttcctgcccctttggggctgctgtgactccgcgacctaggaaccgtgggcaaagggggctcccctgggttatttattttcccaataattttgtgtgagctacagaagaccccataccaaataaacaaaaaaatcttt

SEQ ID NO: 7854 - DNA, 850 bp, Homo sapiens
cgggcatggaacgtaggggctctctgtgtggcttgtaagatgctgaagactcagattttagagaccaagtgcgtttcagaagagggctgaggattgggtgcaaggagttggtgttgatggaggagcaggacgccagagtcccagccctggaaccgttcagagtggagcaggcaccacctgtaatctactatgtccctgacttcatctccaaagaagaggaggagtatttgcttcgacaggtttttaatgccccaaagccaaagtggacccagctctctgggagaaagttacagaactgggccccacgaggacggaccactgtactacccgactgtcagcaccatcagcctgggctcccacaccgtgctggacttctacgagccgcggcggccagaggacgatgaccctacagaacagcctcggcctccgccccggcccaccacctcgctactgctggaaccgcgcagcctgctggtgctccgcggccccgcctacacgcgtcttctccacggcatcgccgccgcccgcgtagacgcgctggacgccgcctcctcgccgcccaatgcggcagcctgcccgtcggcgcggccgggagcctgcctggtgcgcggcacccgggtctcgctgaccatccgccgcgtgccccgcgtgctgcgcgccggcctcctgctgggcaagtgaccgccagggccgggacccctcggattcccaggttcctgcccctttggggctgctgtgactccgcgacctaggaaccgtgggcaaagggggctcccctgggttatttattttcccaataattttgtgtgagctacagaagaccccataccaaataaacaaaaaaatcttt

SEQ ID NO: 7855 - DNA, 190 bp, Homo sapiens
ctcccacaccgtgctggacttctacgagccgcggcggccagaggacgatgaccctacagaacaggtgggcccccagacactgccccagctgcttgtaggcacttcaacctcgcacatcctccaagatgacctggtcccacatgccttcggggtactcctggcactctcccagataccttcccttgtcccc

SEQ ID NO: 7856 - DNA, 372 bp, Homo sapiens
aactgacaagatggtcgcgggtcgccgcgtccggagccgcccaccaggttgccaggaggaggcgggagcggggaggcgcccgaggtgagacgggggcaccctctgcatcataaaggacccagaccccggcaccctcaacatcataaggaatcagacggatgcggaaaccgagacgggctggataggaaactctttccaggaaggctccggggcactcaactggtctccaaccttcccctgcaacctgtgacgcctgccattttcccattttaggcgatggcaacgcaacccccccgtttgctctgggcaaaacttcgagagttccctctgaagctggagctttttcctcagatccaagatccaattggtcac

SEQ ID NO: 7857 - DNA, 168 bp, Homo sapiens
tagcatattaaggctctcttaagcttgagttaatatcgaaaacagtactgtggaactgacttaatctgcttctctctgtgcatgcttcctttattatttctgaagactttaattttttttttttttgagacagggtctcactctgtcacctaggctggagtgcagtgg

SEQ ID NO: 7858 - DNA, 963 bp, Homo sapiens
atccacactggaagaacaagatttggtttctgaacattgggtcttagtccttaaaataacttgcaacctgttacctcttcacttactcccatcgccaccacaagaatcctgtgtgtttttgttttgtgcatccagtctaaaacgggtctgcttttattcataggcttttgttttcagtggtttttgttgttgcatttttccctagataaaatgttttttctataagacactgcttaaaagagtccaatgcagtatgaatttgtatttgtgtttaacttttgtgcttaacagatctgccatggctgaactctcagttgcttaagcaaaattctggggcttattctaggttcctttatttgtcattgtcactcccattccagttatcagcaaattccatcagctgtctccgagacatcttaaatctgtctacctccctccatgtccactgctaccactctgcccaagctattatcatctttcacctgaactcctgcactaatgtctgctgtccttgcatccactcctgccctcctacaatcactgacggcagccgcagggatctttataaaacgaaaatcagataatgtcacttccctgcttaaagccctttgagtggcttcccattgcacttagaaaaaaaaaaaaaaaaaaaaactggccaggtgcgatggctcatgcctgtaatcccagcactttgggaggccgaggcgggcggatcccctgaggttggtagttcgagacctgcttggccaacatggagaaaccctgtctctactaaaaacacaaaattagtcaggtgtgatggcgcatgcctgtaatcccagctacttgggaggctgagtcaggagaaacgctcgaacccaggaggcagaggttgtggtgagttgacatcacgccattgcactccagcctgggcaacaagagtgaaactccgtctgaaaaaaaaaaaaaaaaacccaaact

SEQ ID NO: 7859 - DNA, 432 bp, Homo sapiens
ggagggaaacagattctgcagtttaagtctagaccaattatttaaaaactcaaactctgaaaaaaaaataataaatctagagttactgttaagggttccatattcaaccccaaactgctagacatggcaaagaaaagaaataccaggaaaatgtgagtcatcatcaggaaaaatagtcaataaaacggactctgactgggctcagtgttggatttaatgaagacttcaaattggctatttagaatatattgaaagaattaaaggaaaatacagtctgggcattgtgacatgtgcctgtagtcccagctacacaggaggctgaggtgggaggattacttgagcccggtagttcaagactatgatcacacctgtgaatacccacatcagtctagcctgggcagtaaagaccctgtttctttcaagaaaagaaaa

SEQ ID NO: 7860 - DNA, 1750 bp, Homo sapiens
gcggccgcggccctggcattcgcgcttgggtctggagatagcgcgagagactcaccggctcctgggaacccagtcgagggcccgggccaggggcataagaggaagttgtcccgagtggctcgcctctggccctgggagaggcggccccgggagccggcgtcccgcccccggcggcctcattccccgaccctcctccccggctgcgcgcgccggccctggctgtatctcgggggctgcggcgggaactgccgagcgggcttgactggacgcactgcctgaggacctgcggaggagacgagggagcgcggcgggtcagccccgaggttaggccgcgggtcccctgtccgtggcgctccgtccttttcccagccgtcttggctacagaatctgcgacctccccacactccttctcttttgagtatgtcacttaagtcttctcgccggatgctttttcctccttgcttttgccggaaaggagagagatacatgtgaaggatatctgtcctcgttgcttcccctgccctctcaaaagtttaacttctgtgggaatgtgtatcttccttttctggaccatttgacagtcccgccccagccgccgtgtgatttagcaaccggtatcatattcagatcaaatcttaaaaaaaaaagtcacctacagaactacagaattgttctctcccgctcaagaagggcaagtggactttggcgttaagatgcaggggggtgaaccagtgtccacaatgaaagtctcggagagcgaaggaaagctggagggccaggccacagcggtgaccccgaacaagaacagcagctgtggaggtggaatcagtagcagcagcagcagccgcggtggcagtgcaaaaggctggcagtacagtgatcacatggaaaatgtgtatggctatttaatgaagtataccaaccttgtcactgggtggcagtacaggttttttgttttaaacaatgaagctgggctgttggagtactttgtgaatgaacagtctagaaatcagaaacctagaggaactttgcagcttgcaggagctgtaatatcacccagtgatgaggattctcacaccttcactgtaaacgctgccagtggggaacaatataaactcagagctacagatgcaaaagagcgacagcactgggttagcagacttcagatatgtacacagcatcatactgaagctattggaaagaataatcctcctctgaagtcacggagcttctcacttgcatctagtagtaattctcctatatcgcagaggagaccaagtcaaaatgccatttctttttttaatgttggacattccaaactgcaatcactgagcaaaagaactaatttacctccagaccatcttgtggaagtcagagaaatgatgtctcatgctgaaggacaacaaagagacttaattagacgaattgaatgccttcctacttctggccatcttagttccttggaccaggatctcttaatgctcaaagctacttccatggcaactatgaactgcttaaatgactgctttcatattctccagttacagcatgcatcacatcagaagggctcattgccttcaggaacgacaatcgagtggttagaaccaaagatatctttatcaaaccactataaaaatggagctgaccagccctttgcaactgatcagagtaagccggtggcagtcccagaagagcagcctgttgcagaatctggactattagcgagggtaaggtaatataaaaatatgat

SEQ ID NO: 7861 - DNA, 902 bp, Homo sapiens
gagcagtggagtgaacaggtggtgtacagtgatcacatggaaaatgtgtatggctatttaatgaagtataccaaccttgtcactgggtggcagtacaggttttttgttttaaacaatgaagctgggctgttggagtactttgtgaatgaacagtctagaaatcagaaacctagaggaactttgcagcttgcaggagctgtaatatcacccagtgatgaggattctcacaccttcactgtaaacgctgccagtggggaacaatataaactcagagctacagatgcaaaagagcgacagcactgggttagcagacttcagatatgtacacagcatcatactgaagctattggaaagaataatcctcctctgaagtcacggagcttctcacttgcatctagtagtaattctcctatatcgcagaggagaccaagtcaaaatgccatttctttttttaatgttggacattccaaactgcaatcactgagcaaaagaactaatttacctccagaccatcttgtggaagtcagagaaatgatgtctcatgctgaaggacaacaaagagacttaattagacgaattgaatgccttcctacttctggccatcttagttccttggaccaggatctcttaatgctcaaagctacttccatggcaactatgaactgcttaaatgactgctttcatattctccagttacagcatgcatcacatcagaagggctcattgccttcaggaacgacaatcgagtggttagaaccaaagatatctttatcaaaccactataaaaatggagctgaccagccctttgcaactgatcagagtaagccggtggcagtcccagaagagcagcctgttgcagaatctggactattagcgagggtaaggtaatataaaaatatgat

SEQ ID NO: 7862 - DNA, 396 bp, Homo sapiens
gtgcttccaggcctgtaaggaattcggtgcctaaccattcggtgataattagctaaccacactgagacttcaatggccacacctgaaagagaagacagactttacagaattagtccaagaaagtcactgaacaaaggaacagcagcagcagaagcaacaccacactgtggggcaggacatctgatttccagagttgccacattattttttaaattgtctgattttcaagaaaaaaatatgtaacaaagaaacatgacggtatccgttactaaacaaagactttaaatctgctgttataaaggtgcaccaagaactaaaggaaactgaaaaaattaaaagaaaatgttagagtaatgcctcaacaaataaagaatatcagtaaggagagagatatta

SEQ ID NO: 7863 - DNA, 316 bp, Homo sapiens
aaattaaaatttcttctggatttttaaaaccttatccaattagacttaaaattcttattacaaatgtctactatgtaattagtatgtaatctcaacattttaggaggctgagaaaggaggatcatttgagaccaggagttgaaaaccagcctgctcaacatagtgagaccctgtctctacaaattaaaaaaaaattagccagatatggtagaacttgcttgtagtcccaactacttgggaggctaaggcagaggatcacttaagcctaggaatttggggctgcagtgagctatgattgtgccaccacactccagcc

SEQ ID NO: 7864 - DNA, 239 bp, Homo sapiens
catcatctccctgaaagctcagtcaaccctgtgcagcgctactgccacactccccttttgcacatgtagaaatcaaggatctgtggctcctctgagtgacttgttcaaggtttctcagtttccaagagatggaggcaggacttgaattgagatttccctttcttgagaacctgtggtccttaaccattaaaaccacttaagaggtcttctctcttgatcactacctactaagtgctagg

SEQ ID NO: 7865 - DNA, 402 bp, Homo sapiens
aaaagaaataaaataagaaataatgaagttttctctagttttgttaaagtagtatataaaaattagattattagaaaatacacttaattgctagcttagaagtcttttaaattctactgtcagccgggcacagtgtctcacccctgtatttccaacactttaggaggccaaggtgggaggatcacttgggcccaggagttcaagaccagcctctgtaacatagggagaccctgtctacaaaaaattaaaacaattagccaggtatgatggcaagcacctgtcatcctaggtactcaggaggctgaggtgggaggaccacttgagactgaaagattgaggctgcagtgagtcttgattgcaccactgtactccaacctgggcgacagagtgagactctatatc

SEQ ID NO: 7866 - DNA, 271 bp, Homo sapiens
catagagtgaaccaatgagaaaccttcatttgtatagactgaagcagtgggaaaccttcatttgcatagagtgaaccaatgagaaaccttcatttgcatagagtgaaccaatgggaagctgtcatttgcatagagtgaagcaatgggaaacctctagagggtatttaacccagaaaattctgtgacagatgttcttgagccacttgctcaaccctgctcccactgtggagtgtacttttgtttaaaataaatctctgcttttacttccttc

SEQ ID NO: 7867 - DNA, 365 bp, Homo sapiens
gtcgacctgtactccagcctggatgacagaggaagaccctgtctccacagtaaataaatcaatggaacagaattgagagttcagaaataggttgggtgccgtggctcgtgcttgtaatcccagcactttgggaggccgaagagggaggatcacttgaggccagaagtctgagaccagcctgagcaacatagcaagaccctgtctctgcaaaaaaataaaaataacccaggcagtgggttgtgcctgcagtcccatctgctcaggaaggtgaggtgggagaattgcttcagccaggggtttgaggatacagtgagctatgatcataccactgtactccagcctggatgacagagtaagaccctgtc

SEQ ID NO: 7868 - DNA, 455 bp, Homo sapiens
tttttttttttgagacagggtccgtcacccaggccatcacccaggctgcagtgcggtggtacaatcttggcctaatgcaacctccacctcctgtgctcaagtgattctcctgcctcagcctcccgagtagctgggactacaggtaggcgccatcatgtccagctaatgttagtattttttgtagagacggggtttcgctatgctgcccaggctggcctcaaactcctgagttcaagcaatccatctgcctcagtctcccaaagtgctgggattacaggcgcgagccaccacaccaggctgattactagtttaagaagctggatgatcaattgcttcaagttttttacttcccttccatatttcaagcaaaacactttttcaagtctttgaggaattcctaaatttataaaagctaacaacaaaatacattctcgatccatataacacagcctcgt

SEQ ID NO: 7869 - DNA, 410 bp, Homo sapiens
acatgggttatggccacatgtccctctcatctctgttcactaccaggttaaatctttctgttcattgcctcttgctgagagtgtatctcagcctaactaatgtctacattaatatttaccaaagaactgaattgtctagttgtttatattctcatgaaaataagatgaggtttgtgggttagcctagcagtgaatggaaatttattaggcttaaaagccaggaaagaatagagacaaattgtaacctccagtctctccctcaggtttccacaatagacatcagtaattaataatgccactcagaatccttcttgacacagtggtcttggcaacaattgttgaatgatcagagagggcaggccagttagaacctatttgccatctttatgtcagtgtctgatgtaagttaa

SEQ ID NO: 7870 - DNA, 373 bp, Homo sapiens
ttcattaaattaagaagtcaacataataattttaaactaacagttgaataacatacaaaaccaagtacacaataaggaaagacccaaaatctggatcggttatttctcccaaattccattccttaagaaattaagtgtttataggccaggtgtgggctcacccctgtaatcccagcacttcaggaggctgaagtgggagaatggcttgagcccaggagttgaggccagcctggataacatgctgaaaccctgtctctaccaaaaaaaaaaaaagtgtattttacacacacacacagctacctcttattttttgagatggagtctcgctctgtcacccaggctggagtacagtggtacgatctcagctcactgc

SEQ ID NO: 7871 - DNA, 435 bp, Homo sapiens
aattgttgtgcatgttttttattttctttcataattagaacatgagctattaataggctagattataagctccccaaggctagagataccggccagttttattcattgatgcatcacaggcatctaaaacaatgtcaggaatatagaactgttcaataaattcttgctgaattaacaggaaggtgtatttctctttccattcatgaatctctctaaaactccaaatataatgctaaacacaaatatatgaaaattttaaatgcctgagtaaatgaaaatagatatgtctggtattttaaaaattttaaaaattcaaacaatagagccacaatagacaaatcaactcactggctacagaagtcacttagcttgttcattacatgttctcagtgactctctgtcactgctgtaagaaagatatatggtatcagctga

SEQ ID NO: 7872 - DNA, 474 bp, Homo sapiens
ggaaaccacagaactaggtgagactcctacctctgactgcctgggtgtccttgggcaagtcagctgaccgggccatttccctcagttgtcaagtagggattagaggtgtatgtgctcctactgtgttctctgctccaaggaatcatggcgcagtgctcccagaggtgggttgtgtgttaccatgtttttaacaacgggaagcaaaaactttatttgaactttcattctgatgcttcactgatgacaccggaaatgaagataatttgttttgtgattgttttattgtgttttcaagttttaattcatgaattttcctgtactaaaacaaagagcaaagttggttaaagcctgcatgtaaataaagtccagtgggatttttgacacctgcttgacgtttctatgtctacaaacagtgttgtaatgaatacggcctttcatcattaaacattcgattttttaaaaatgacgtttact

SEQ ID NO: 7873 - DNA, 216 bp, Homo sapiens
gtgtcaactcacgtataaaacagtcacctttacagtatcatcacatttcttagcagaaaccttgcagacgaggagagaatggaatcatatattcaaagtgctcaaataaagcaaataactgtcagccaataaaactattccagcaaagctattcttcggaaataaaggagaaataaaggcctttcctgacaaaaaaaaaaaaaaaaaaaaaaagca

SEQ ID NO: 7874 - DNA, 645 bp, Homo sapiens
agagaggaaagaaccctgggaacgggaggcgaagggataatgagctggggatgggagcagtcgcaggaagaatcctctgcctggagccggcagactccaacccctcagcttgagactcaggagccccatagtccccacagcaataagaagcaccagctcctggtcccgaaaaaaggagggccccaactccagggactgcggcccgccctggagctgagaacacgcggactccagggagaggacagggcttcagggacccgagagccgctctgagcaccgggggatgtgactgcctcagcggcagagctggaagggccctcgaatgccattcacaggaacagcccaggaacccagggacttcagaagggctggtttgtccgaaaagtgagaggaggcggaggagagagcctgcgaggtcaagctgcagagaacatgagcttctacctccagatgtgccagggtgcatctcaataaacttggattttggccaggcgcggtggctcaggcctgtaatcccagctctggaagctgaaggatagcttgagcccaggagttcgaggctgcagtgagctatgatctcaccactacactccagcctgggtgacagcaagagatcttgtctcagaaataaataaataaaattta

SEQ ID NO: 7875 - DNA, 270 bp, Homo sapiens
ttcgttccagcctgggcaacagaaagaccctgtctgggggaaaaacaatctggtaggcttccagaccaaaagtaacttttgtagttcgaacaagggcaagagccctgaatggtaagaggaaagagttccatgtggctctttaccattctgagattaagccaaaaatgaagatgtcaacttaaaacaggatatatttgattaacaaatggtttcatggataaaaattcaatgattccgtaagggatattcccttggaacttcaagttggtt

SEQ ID NO: 7876 - DNA, 3607 bp, Homo sapiens
cgtggcctccgctgggcagggcgacgcggaaccgaggcggcggcggcggctgcggcggcaggaaatcggggctcggccccgccggcgcgcgaccccatccccatcccggtccctgcagagcgatccccgggcccagatatggacgcagcagagccgggactccccccaggtcctgagggcaggaagaggtacagtgacatcttccggagcctggacaacctcgaaatctcactggggaacgtgacccttgagatgctggctggagaccctctactctcagaagacccagaacctgacaagacccctacagccactgttaccaacgaagccagctgttggagcggcccctccccagagggtcctgtacccctcacaggggaggaactggacttgcggctcattcggacaaaggggggtgtggacgcagccctggaatatgccaagacctggagccgctatgccaaggaactgcttgcctggactgaaaagagagccagctatgagctggagtttgctaagagcaccatgaagatcgctgaagctggcaaggtgtccattcaacagcagagccacatgcctctgcagtacatctacaccctgtttctggagcacgatctcagcctgggaaccctggccatggagacagtggcccagcagaaaagagactactaccagcccctcgccgccaaacggactgagattgagaagtggcggaaggagttcaaggagcagtggatgaaggagcagaagcggatgaatgaggcggtgcaggcactgcggcgcgcccagctgcagtatgtgcaacgcagcgaggacctgcgggcacgctcccaggggtcccctgaggactcggccccccaggcctcgccgggacctagcaagcagcaggagcggcggcggcgctcgcgagaggaggcccaggccaaggcgcaggaggccgaggcgctgtaccaggcctgtgtccgcgaggccaacgcgcggcagcaggacctggagatcgccaagcagcgaatcgtgtcgcacgtgcgcaagctggtgtttcagggggatgaagtgctgaggcgggtgacgctgagtctcttcgggctgcggggggcgcaggcagagcgtggcccccgcgccttcgccgccctggccgagtgctgtgcgccctttgagccgggccagcgctaccaggagtttgtacgggcgctgcggcccgaggccccgccgcccccgccgcccgccttctccttccaggagttccttccctccttgaacagctcccctctggacatcagaaagaagctctctgggcctcttcctccaaggctggatgagaattcagctgagccaggcccttgggaggatccgggcacaggctggcgctggcaagggactccaggccccactccgggcagcgatgtggacagcgtgggtggcggcagcgagtctcggtccctggactcacccacttccagcccaggcgctggcacgaggcagctggtgaaggcttcgtccacaggcactgagtcctcagatgactttgaggagcgagaccctgacctgggagacgggctggagaatgggctgggcagccccttcgggaagtggacactgtccagcgcggctcagacccaccagctgcggcgactgcggggcccagccaagtgccgcgagtgcgaagccttcatggtcagcgggacggagtgtgaggagtgctttctgacctgccacaagcgctgcctggagactctcctgatcctctgtggacacaggcggctcccagcccggacacccctttttggggttgacttcctgcagctacccagggacttcccggaggaggtaccctttgtggtcacgaagtgcacggctgagatagaacaccgtgccctggatgtgcagggcatttaccgggtcagcgggtcccgggtccgtgtggagcggctgtgccaggctttcgagaatggccgagcgttggtggagctgtcggggaactcgcctcatgacgtctcgagtgtcctcaagcgatttcttcaggagctcaccgagcccgtgatccccttccacctctacgacgccttcatctctctggctaagaccttgcatgcagaccctggggacgaccctgggacccccagccccagccctgaggttatccgctcgctgaagaccctcttggtacagctgcctgactctaactacaacaccctgcggcacctggtggcccatctgttcagggtggctgcacgatttatggaaaacaagatgtctgccaacaacctgggcattgtgtttgggccgacactgctgcggccgccggacggcccgcgggcagccagcgccatccctgtcacctgcctgctggactctgggcatcaggcccagcttgtggagttcctcatcgtgcactacgagcagatctttgggatggatgagctcccccaggccactgagcccccgccccaagactccagcccagcccctgggcccctcacaaccagctcccaaccgccacccccgcaccttgacccagactcccagcccccagtcctagcctcagaccccggcccagacccccagcaccacagtaccctggagcagcatcccacggccacacctaccgagattccaactccacagagtgaccagagagaggacgtggctgaagacaccaaagatgggggaggggaagtgtccagccaaggcccagaggactcactcctggggacacagtctcgtggccacttcagccgccagccagtgaagtatccccggggcggtgtgaggcctgtaacccaccagctgtccagtctggccctggtggcttccaagctgtgcgaggagacccccatcacatcagtgcccagagggagtttgcgggggcgggggcccagccctgcagctgcctcccctgagggcagccccctgcgccgcaccccgctgcccaagcattttgagattacccaggagacagcccggctactctcgaaattggacagcgaggctgtgcccagggccacctgctgcccggacgtccagcctgaggaagccgaggaccatctctgaccaccctggcaccttaaataaggaagaggcccagattgtgaacacggacccatatatccctacctcccaccacctagtggccaaacaccccgccaggagttcaatgctgggagaggtccagagggttcctataaggaaaaactatttaatacatgacctaggggaggcctaaaacccttttggggataatgtcccagagtccccccactagacacaggtcactgccaagcatcagggccactcgggctcagaggtcactcagggtcaatactcagggtcagtgcaggttatgagatccttggggtccaccctagtctctgacacctgggacaggggtgcttttgctactttggttgtggtcactcccccacacctgcctgcctccttcacggactcgaagtgaccttcctggaggaggtgggcagctcagactccacatgctggtggtgcctgaggtctgatggcctctaataaactgtgtcctataaaaaaaaaaaacagacaaaacaacaaaaaaccaaaaacagagcccaacaaaaaaacaacaagccaacac

SEQ ID NO: 7877 - DNA, 3681 bp, Homo sapiens
cgtggcctccgctgggcagggcgacgcggaaccgaggcggcggcggcggctgcggcggcaggaaatcggggctcggccccgccggcgcgcgaccccatccccatcccggtccctgcagagcgatccccgggcccagatatggacgcagcagagccgggactccccccaggtcctgagggcaggaagaggtacagtgacatcttccggagcctggacaacctcgaaatctcactggggaacgtgacccttgagatgctggctggagaccctctactctcagaagacccagaacctgacaagacccctacagccactgttaccaacgaagccagctgttggagcggcccctccccagagggtcctgtacccctcacaggggaggaactggacttgcggctcattcggacaaaggggggtgtggacgcagccctggaatatgccaagacctggagccgctatgccaaggaactgcttgcctggactgaaaagagagccagctatgagctggagtttgctaagagcaccatgaagatcgctgaagctggcaaggtgtccattcaacagcagagccacatgcctctgcagtacatctacaccctgtttctggagcacgatctcagcctgggaaccctggccatggagacagtggcccagcagaaaagagactactaccagcccctcgccgccaaacggactgagattgagaagtggcggaaggagttcaaggagcagtggatgaaggagcagaagcggatgaatgaggcggtgcaggcactgcggcgcgcccagctgcagtatgtgcaacgcagcgaggacctgcgggcacgctcccaggggtcccctgaggactcggccccccaggcctcgccgggacctagcaagcagcaggagcggcggcggcgctcgcgagaggaggcccaggccaaggcgcaggaggccgaggcgctgtaccaggcctgtgtccgcgaggccaacgcgcggcagcaggacctggagatcgccaagcagcgaatcgtgtcgcacgtgcgcaagctggtgtttcagggggatgaagtgctgaggcgggtgacgctgagtctcttcgggctgcggggggcgcaggcagagcgtggcccccgcgccttcgccgccctggccgagtgctgtgcgccctttgagccgggccagcgctaccaggagtttgtacgggcgctgcggcccgaggccccgccgcccccgccgcccgccttctccttccaggagttccttccctccttgaacagctcccctctggacatcagaaagaagctctctgggcctcttcctccaaggctggatgagaattcagctgagccaggcccttgggaggatccgggcacaggctggcgctggcaagggactccaggccccactccgggcagcgatgtggacagcgtgggtggcggcagcgagtctcggtccctggactcacccacttccagcccaggcgctggcacgaggcagctggtgaaggcttcgtccacaggcactgagtcctcagatgactttgaggagcgagaccctggtgaggctgaagcagggtaggtcaggatgggacagggcagggcaccaggcactcctgaccctgtctccctgcagacctgggagacgggctggagaatgggctgggcagccccttcgggaagtggacactgtccagcgcggctcagacccaccagctgcggcgactgcggggcccagccaagtgccgcgagtgcgaagccttcatggtcagcgggacggagtgtgaggagtgctttctgacctgccacaagcgctgcctggagactctcctgatcctctgtggacacaggcggctcccagcccggacacccctttttggggttgacttcctgcagctacccagggacttcccggaggaggtaccctttgtggtcacgaagtgcacggctgagatagaacaccgtgccctggatgtgcagggcatttaccgggtcagcgggtcccgggtccgtgtggagcggctgtgccaggctttcgagaatggccgagcgttggtggagctgtcggggaactcgcctcatgacgtctcgagtgtcctcaagcgatttcttcaggagctcaccgagcccgtgatccccttccacctctacgacgccttcatctctctggctaagaccttgcatgcagaccctggggacgaccctgggacccccagccccagccctgaggttatccgctcgctgaagaccctcttggtacagctgcctgactctaactacaacaccctgcggcacctggtggcccatctgttcagggtggctgcacgatttatggaaaacaagatgtctgccaacaacctgggcattgtgtttgggccgacactgctgcggccgccggacggcccgcgggcagccagcgccatccctgtcacctgcctgctggactctgggcatcaggcccagcttgtggagttcctcatcgtgcactacgagcagatctttgggatggatgagctcccccaggccactgagcccccgccccaagactccagcccagcccctgggcccctcacaaccagctcccaaccgccacccccgcaccttgacccagactcccagcccccagtcctagcctcagaccccggcccagacccccagcaccacagtaccctggagcagcatcccacggccacacctaccgagattccaactccacagagtgaccagagagaggacgtggctgaagacaccaaagatgggggaggggaagtgtccagccaaggcccagaggactcactcctggggacacagtctcgtggccacttcagccgccagccagtgaagtatccccggggcggtgtgaggcctgtaacccaccagctgtccagtctggccctggtggcttccaagctgtgcgaggagacccccatcacatcagtgcccagagggagtttgcgggggcgggggcccagccctgcagctgcctcccctgagggcagccccctgcgccgcaccccgctgcccaagcattttgagattacccaggagacagcccggctactctcgaaattggacagcgaggctgtgcccagggccacctgctgcccggacgtccagcctgaggaagccgaggaccatctctgaccaccctggcaccttaaataaggaagaggcccagattgtgaacacggacccatatatccctacctcccaccacctagtggccaaacaccccgccaggagttcaatgctgggagaggtccagagggttcctataaggaaaaactatttaatacatgacctaggggaggcctaaaacccttttggggataatgtcccagagtccccccactagacacaggtcactgccaagcatcagggccactcgggctcagaggtcactcagggtcaatactcagggtcagtgcaggttatgagatccttggggtccaccctagtctctgacacctgggacaggggtgcttttgctactttggttgtggtcactcccccacacctgcctgcctccttcacggactcgaagtgaccttcctggaggaggtgggcagctcagactccacatgctggtggtgcctgaggtctgatggcctctaataaactgtgtcctataaaaaaaaaaaacagacaaaacaacaaaaaaccaaaaacagagcccaacaaaaaaacaacaagccaacac

SEQ ID NO: 7878 - DNA, 3410 bp, Homo sapiens
cgtggcctccgctgggcagggcgacgcggaaccgaggcggcggcggcggctgcggcggcaggaaatcggggctcggccccgccggcgcgcgaccccatccccatcccggtccctgcagagcgatccccgggcccagatatggacgcagcagagccgggactccccccaggtcctgagggcaggaagaggtacagtgacatcttccggagcctggacaacctcgaaatctcactggggaacgtgacccttgagatgctggctggagaccctctactctcagaagacccagaacctgacaagacccctacagccactgttaccaacgaagccagctgttggagcggcccctccccagagggtcctgtacccctcacaggggaggaactggacttgcggctcattcggacaaaggggggtgtggacgcagccctggaatatgccaagacctggagccgctatgccaaggaactgcttgcctggactgaaaagagagccagctatgagctggagtttgctaagagcaccatgaagatcgctgaagctggcaaggtgtccattcaacagcagagccacatgcctctgcagtacatctacaccctgtttctggagcacgatctcagcctgggaaccctggccatggagacagtggcccagcagaaaagagactactaccagcccctcgccgccaaacggactgagattgagaagtggcggaaggagttcaaggagcagtggatgaaggagcagaagcggatgaatgaggcggtgcaggcactgcggcgcgcccagctgcagtatgtgcaacgcagcgaggacctgcgggcacgctcccaggggtcccctgaggactcggccccccaggcctcgccgggacctagcaagcagcaggagcggcggcggcgctcgcgagaggaggcccaggccaaggcgcaggaggccgaggcgctgtaccaggcctgtgtccgcgaggccaacgcgcggcagcaggacctggagatcgccaagcagcgaatcgtgtcgcacgtgcgcaagctggtgtttcagggggatgaagtgctgaggcgggtgacgctgagtctcttcgggctgcggggggcgcaggcagagcgtggcccccgcgccttcgccgccctggccgagtgctgtgcgccctttgagccgggccagcgctaccaggagtttgtacgggcgctgcggcccgaggccccgccgcccccgccgcccgccttctccttccaggagttccttccctccttgaacagctcccctctggacatcagaaagaagctctctgggcctcttcctccaaggctggatgagaattcagctgagccaggcccttgggaggatccgggcacaggctggcgctggcaagggactccaggccccactccgggcagcgatgtggacagcgtgggtggcggcagcgagtctcggtccctggactcacccacttccagcccaggcgctggcacgaggcagctggtgaaggcttcgtccacaggcactgagtcctcagatgactttgaggagcgagaccctgacctgggagacgggctggagaatgggctgggcagccccttcgggaagtggacactgtccagcgcggctcagacccaccagctgcggcgactgcggggcccagccaagtgccgcgagtgcgaagccttcatggtcagcgggacggagtgtgaggagtgctttctgacctgccacaagcgctgcctggagactctcctgatcctctgtggacacaggcggctcccagcccggacacccctttttggggttgacttcctgcagctacccagggacttcccggaggaggtaccctttgtggtcacgaagtgcacggctgagatagaacaccgtgccctggatgtgcagggcatttaccgggtcagcgggtcccgggtccgtgtggagcggctgtgccaggctttcgagaatggccgagcgttggtggagctgtcggggaactcgcctcatgacgtctcgagtgtcctcaagcgatttcttcaggagggtggctgcacgatttatggaaaacaagatgtctgccaacaacctgggcattgtgtttgggccgacactgctgcggccgccggacggcccgcgggcagccagcgccatccctgtcacctgcctgctggactctgggcatcaggcccagcttgtggagttcctcatcgtgcactacgagcagatctttgggatggatgagctcccccaggccactgagcccccgccccaagactccagcccagcccctgggcccctcacaaccagctcccaaccgccacccccgcaccttgacccagactcccagcccccagtcctagcctcagaccccggcccagacccccagcaccacagtaccctggagcagcatcccacggccacacctaccgagattccaactccacagagtgaccagagagaggacgtggctgaagacaccaaagatgggggaggggaagtgtccagccaaggcccagaggactcactcctggggacacagtctcgtggccacttcagccgccagccagtgaagtatccccggggcggtgtgaggcctgtaacccaccagctgtccagtctggccctggtggcttccaagctgtgcgaggagacccccatcacatcagtgcccagagggagtttgcgggggcgggggcccagccctgcagctgcctcccctgagggcagccccctgcgccgcaccccgctgcccaagcattttgagattacccaggagacagcccggctactctcgaaattggacagcgaggctgtgcccagggccacctgctgcccggacgtccagcctgaggaagccgaggaccatctctgaccaccctggcaccttaaataaggaagaggcccagattgtgaacacggacccatatatccctacctcccaccacctagtggccaaacaccccgccaggagttcaatgctgggagaggtccagagggttcctataaggaaaaactatttaatacatgacctaggggaggcctaaaacccttttggggataatgtcccagagtccccccactagacacaggtcactgccaagcatcagggccactcgggctcagaggtcactcagggtcaatactcagggtcagtgcaggttatgagatccttggggtccaccctagtctctgacacctgggacaggggtgcttttgctactttggttgtggtcactcccccacacctgcctgcctccttcacggactcgaagtgaccttcctggaggaggtgggcagctcagactccacatgctggtggtgcctgaggtctgatggcctctaataaactgtgtcctataaaaaaaaaaaacagacaaaacaacaaaaaaccaaaaacagagcccaacaaaaaaacaacaagccaacac

SEQ ID NO: 7879 - DNA, 2956 bp, Homo sapiens
cgtggcctccgctgggcagggcgacgcggaaccgaggcggcggcggcggctgcggcggcaggaaatcggggctcggccccgccggcgcgcgaccccatccccatcccggtccctgcagagcgatccccgggcccagatatggacgcagcagagccgggactccccccaggtcctgagggcaggaagaggtacagtgacatcttccggagcctggacaacctcgaaatctcactggggaacgtgacccttgagatgctggctggagaccctctactctcagaagacccagaacctgacaagacccctacagccactgttaccaacgaagccagctgttggagcggcccctccccagagggtcctgtacccctcacaggggaggaactggacttgcggctcattcggacaaaggggggtgtggacgcagccctggaatatgccaagacctggagccgctatgccaaggaactgcttgcctggactgaaaagagagccagctatgagctggagtttgctaagagcaccatgaagatcgctgaagctggcaaggtgtccattcaacagcagagccacatgcctctgcagtacatctacaccctgtttctggagcacgatctcagcctgggaaccctggccatggagacagtggcccagcagaaaagagactactaccagcccctcgccgccaaacggactgagattgagaagtggcggaaggagttcaaggagcagtggatgaaggagcagaagcggatgaatgaggcggtgcaggcactgcggcgcgcccagctgcagtatgtgcaacgcagcgaggacctgcgggcacgctcccaggggtcccctgaggactcggccccccaggcctcgccgggacctagcaagcagcaggagcggcggcggcgctcgcgagaggaggcccaggccaaggcgcaggaggccgaggcgctgtaccaggcctgtgtccgcgaggccaacgcgcggcagcaggacctggagatcgccaagcagcgaatcgtgtcgcacgtgcgcaagctggtgtttcagggggatgaagtgctgaggcgggtgacgctgagtctcttcgggctgcggggggcgcaggcagagcgtggcccccgcgccttcgccgccctggccgagtgctgtgcgccctttgagccgggccagcgctaccaggagtttgtacgggcgctgcggcccgaggccccgccgcccccgccgcccgccttctccttccaggagttccttccctccttgaacagctcccctctggacatcagaaagaagctctctgggcctcttcctccaaggctggatgagaattcagctgagccaggcccttgggaggatccgggcacaggctggcgctggcaagggactccaggccccactccgggcagcgatgtggacagcgtgggtggcggcagcgagtctcggtccctggactcacccacttccagcccaggcgctggcacgaggcagctggtgaaggcttcgtccacaggcactgagtcctcagatgactttgaggagcgagaccctgacctgggagacgggctggagaatgggctgggcagccccttcgggaagtggacactgtccagcgcggctcagacccaccagctgcggcgactgcggggcccagccaagtgccgcgagtgcgaagccttcatggtcagcgggacggagtgtgaggagtgctttctgacctgccacaagcgctgcctggagactctcctgatcctctgtggacacaggcggctcccagcccggacacccctttttggggttgacttcctgcagctacccagggacttcccggaggaggtaccctttgtggtcacgaagtgcacggctgagatagaacaccgtgccctggatgtgcagggcatttaccgggtcagcgggtcccgggtccgtgtggagcggctgtgccaggctttcgagaatggccgagcgttggtggagctgtcggggaactcgcctcatgacgtctcgagtgtcctcaagcgatttcttcaggagctcaccgagcccgtgatccccttccacctctacgacgccttcatctctctggctaagaccttgcatgcagaccctggggacgaccctgggacccccagccccagccctgaggttatccgctcgctgaagaccctcttggtacagctgcctgactctaactacaacaccctgcggcacctggtggcccatctgttcagggtggctgcacgatttatggaaaacaagatgtctgccaacaacctgggcattgtgtttgggccgacactgctgcggccgccggacggcccgcgggcagccagcgccatccctgtcacctgcctgctggactctgggcatcaggcccagcttgtggagttcctcatcgtgcactacgagcagatctttgggatggatgagctcccccaggccactgagcccccgccccaagactccagcccagcccctgggcccctcacaaccagctcccaaccgccacccccgcaccttgacccagactcccagcccccagtcctagcctcagaccccggcccagacccccagcaccacagtaccctggagcagcatcccacggccacacctaccgaggtaagaacccactgggcccacagctatggagagggccttatctctgttcaattctcttaccttctctttcaccttccttcctttttaaaatttccttcattctcttcctcccttcctcatttaacttatgttcattctggaaggaatagtgaggaatgagcagtgggcagtgatgatgtaacaaaaggggacagccctgcagaggtactaacatgggtgatcattcattcctccaacagaatatttattgaacatgtattttgggccaagcattgtcgtaggcattgcagatacatccaggagctaaatatccaaagaccctgccctctcagtgcctgtgttttag

SEQ ID NO: 7880 - DNA, 395 bp, Homo sapiens
gtgtgcatgggtccctgagccttgaaacgcgacccttttccctggacatgcgactactaacttccctggctgacccctgacactgacctctgacctttgacctgtgttttctgaactctgaaccttaatccatgattcataactttgggtactgacccctgacctccagttctggatatgtggctgctggtctcagacgacttacacctgtgacatgggcaagtcacctctaggctggcctgcgtgtcccacccttaccctcagaccaatgagcttgcatcctgtaccctgacctttctcttcacaccatccccagggtggctgcacgatttatggaaaacaagatgtctgccaacaacctgggcattgtgtttgggccgacactgctgcggccg

SEQ ID NO: 7881 - DNA, 930 bp, Homo sapiens
agcctccctagtagctgggattacaggcatgcaccaccacgcccggctaaattttgtatttctagtagagacggagtttcaccatgttggccaggctggtcccgaactcctgacctcagataatccaccaacctcagcctcccaaagtgctgggattacaggcatgcaccaccatgcctggccaagcagtacacttataagggcatcgtctatccccaaacaccaaaactgcaaaggatgacaggtgcacagtcagtggtggtccatgccctgtgcataggaggagttcaatggtagtccacacccagtgcagagtaggtgcaaagtcaggggtggctggcagagccacctgggcccactcctctttggtctcacttcctaccacctttccctcattcattacagggtggggctgcgtcctaacataccaggcatgctcctacctcagggcctttgcactggctattccttttgcatgtccaggaacaagcccttggctctccaggaatctcaaagaactgggattttagtgttggggtctcattcttgggtttctccctgcagattccaactccacagagtgaccagagagaggacgtggctgaagacaccaaagatgggggaggggaaggtgagtatgttagagagaggctcaggagttctgggggtgccctggccccagggtggcttgctaaaagatgactcctggggggatatacagagaacttggaggtgctctgcactgaccacccaccccgtacacagtgtccagccaaggcccagaggactcactcctggggacacagtctcgtggccacttcagccgccagccagtgaagtatccccggggcggtgtgaggcctgtaacccaccagctgtccagtctggccctggtggcttccaagctgtgcgaggagacccccatcacat

SEQ ID NO: 7882 - DNA, 3538 bp, Homo sapiens
cgtggcctccgctgggcagggcgacgcggaaccgaggcggcggcggcggctgcggcggcaggaaatcggggctcggccccgccggcgcgcgaccccatccccatcccggtccctgcagagcgatccccgggcccagatatggacgcagcagagccgggactccccccaggtcctgagggcaggaagaggtacagtgacatcttccggagcctggacaacctcgaaatctcactggggaacgtgacccttgagatgctggctggagaccctctactctcagaagacccagaacctgacaagacccctacagccactgttaccaacgaagccagctgttggagcggcccctccccagagggtcctgtacccctcacaggggaggaactggacttgcggctcattcggacaaaggggggtgtggacgcagccctggaatatgccaagacctggagccgctatgccaaggaactgcttgcctggactgaaaagagagccagctatgagctggagtttgctaagagcaccatgaagatcgctgaagctggcaaggtgtccattcaacagcagagccacatgcctctgcagtacatctacaccctgtttctggagcacgatctcagcctgggaaccctggccatggagacagtggcccagcagaaaagagactactaccagcccctcgccgccaaacggactgagattgagaagtggcggaaggagttcaaggagcagtggatgaaggagcagaagcggatgaatgaggcggtgcaggcactgcggcgcgcccagctgcagtatgtgcaacgcagcgaggacctgcgggcacgctcccaggggtcccctgaggactcggccccccaggcctcgccgggacctagcaagcagcaggagcggcggcggcgctcgcgagaggaggcccaggccaaggcgcaggaggccgaggcgctgtaccaggcctgtgtccgcgaggccaacgcgcggcagcaggacctggagatcgccaagcagcgaatcgtgtcgcacgtgcgcaagctggtgtttcagggggatgaagtgctgaggcgggtgacgctgagtctcttcgggctgcggggggcgcaggcagagcgtggcccccgcgccttcgccgccctggccgagtgctgtgcgccctttgagccgggccagcgctaccaggagtttgtacgggcgctgcggcccgaggccccgccgcccccgccgcccgccttctccttccaggagttccttccctccttgaacagctcccctctggacatcagaaagaagctctctgggcctcttcctccaaggctggatgagaattcagctgagccaggcccttgggaggatccgggcacaggctggcgctggcaagggactccaggccccactccgggcagcgatgtggacagcgtgggtggcggcagcgagtctcggtccctggactcacccacttccagcccaggcgctggcacgaggcagctggtgaaggcttcgtccacaggcactgagtcctcagatgactttgaggagcgagaccctgacctgggagacgggctggagaatgggctgggcagccccttcgggaagtggacactgtccagcgcggctcagacccaccagctgcggcgactgcggggcccagccaagtgccgcgagtgcgaagccttcatggtcagcgggacggagtgtgaggagtgctttctgacctgccacaagcgctgcctggagactctcctgatcctctgtggacacaggcggctcccagcccggacacccctttttggggttgacttcctgcagctacccagggacttcccggaggaggtaccctttgtggtcacgaagtgcacggctgagatagaacaccgtgccctggatgtgcagggcatttaccgggtcagcgggtcccgggtccgtgtggagcggctgtgccaggctttcgagaatggccgagcgttggtggagctgtcggggaactcgcctcatgacgtctcgagtgtcctcaagcgatttcttcaggagctcaccgagcccgtgatccccttccacctctacgacgccttcatctctctggctaagaccttgcatgcagaccctggggacgaccctgggacccccagccccagccctgaggttatccgctcgctgaagaccctcttggtacagctgcctgactctaactacaacaccctgcggcacctggtggcccatctgttcagggtggctgcacgatttatggaaaacaagatgtctgccaacaacctgggcattgtgtttgggccgacactgctgcggccgccggacggcccgcgggcagccagcgccatccctgtcacctgcctgctggactctgggcatcaggcccagcttgtggagttcctcatcgtgcactacgagcagatctttgggatggatgagctcccccaggccactgagcccccgccccaagactccagcccagcccctgggcccctcacaaccagctcccaaccgccacccccgcaccttgacccagactcccagcccccagtcctagcctcagaccccggcccagacccccagcaccacagtaccctggagcagcatcccacggccacacctaccgagattccaactccacagagtgaccagagagaggacgtggctgaagacaccaaagatgggggaggggaagtgtccagccaaggcccagaggactcactcctggggacacagtctcgtggccacttcagccgccagccagtgaagtatccccggggcggtgtgaggcctgtaacccaccagctgtccagtctggccctggtggcttccaagctgtgcgaggagacccccatcacatcagtgcccagagggagtttgcgggggcgggggcccagccctgcagctgcctcccctgagggcagccccctgcgccgcaccccgctgcccaagcattttgagattacccaggagacagcccggctactctcgaaattggacagcgaggctgtgcccagggccacctgctgcccggacgtccagcctgaggaagccgaggaccatctctgaccaccctggcaccttaaataaggaagaggcccagattgtgaacacggacccatatatccctacctcccaccacctagtggccaaacaccccgccaggagttcaatgctgggagaggtccagagggttcctataaggaaaaactatttaatacatgacctaggggaggcctaaaacccttttggggataatgtcccagagtccccccactagacacaggtcactgccaagcatcagggccactcgggctcagaggtcactcagggtcaatactcagggtcagtgcaggttatgagatccttggggtccaccctagtctctgacacctgggacaggggtgcttttgctactttggttgtggtcactcccccacacctgcctgcctccttcacggactcgaagtgaccttcctggaggaggtgggcagctcagactccacatgctggtggtgcctgaggtctgatggcctctaataaactgtgtcctata

SEQ ID NO: 7883 - DNA, 3542 bp, Homo sapiens
cgtggcctccgctgggcagggcgacgcggaaccgaggcggcggcggcggctgcggcggcaggaaatcggggctcggccccgccggcgcgcgaccccatccccatcccggtccctgcagagcgatccccgggcccagatatggacgcagcagagccgggactccccccaggtcctgagggcaggaagaggtacagtgacatcttccggagcctggacaacctcgaaatctcactggggaacgtgacccttgagatgctggctggagaccctctactctcagaagacccagaacctgacaagacccctacagccactgttaccaacgaagccagctgttggagcggcccctccccagagggtcctgtacccctcacaggggaggaactggacttgcggctcattcggacaaaggggggtgtggacgcagccctggaatatgccaagacctggagccgctatgccaaggaactgcttgcctggactgaaaagagagccagctatgagccacatgcctctgcagtacatctacaccctgtttctggagcacgatctcagcctgggaaccctggccatggagacagtggcccagcagaaaagagactactaccagcccctcgccgccaaacggactgagattgagaagtggcggaaggagttcaaggagcagtggatgaaggagcagaagcggatgaatgaggcggtgcaggcactgcggcgcgcccagctgcagtatgtgcaacgcagcgaggacctgcgggcacgctcccaggggtcccctgaggactcggccccccaggcctcgccgggacctagcaagcagcaggagcggcggcggcgctcgcgagaggaggcccaggccaaggcgcaggaggccgaggcgctgtaccaggcctgtgtccgcgaggccaacgcgcggcagcaggacctggagatcgccaagcagcgaatcgtgtcgcacgtgcgcaagctggtgtttcagggggatgaagtgctgaggcgggtgacgctgagtctcttcgggctgcggggggcgcaggcagagcgtggcccccgcgccttcgccgccctggccgagtgctgtgcgccctttgagccgggccagcgctaccaggagtttgtacgggcgctgcggcccgaggccccgccgcccccgccgcccgccttctccttccaggagttccttccctccttgaacagctcccctctggacatcagaaagaagctctctgggcctcttcctccaaggctggatgagaattcagctgagccaggcccttgggaggatccgggcacaggctggcgctggcaagggactccaggccccactccgggcagcgatgtggacagcgtgggtggcggcagcgagtctcggtccctggactcacccacttccagcccaggcgctggcacgaggcagctggtgaaggcttcgtccacaggcactgagtcctcagatgactttgaggagcgagaccctgacctgggagacgggctggagaatgggctgggcagccccttcgggaagtggacactgtccagcgcggctcagacccaccagctgcggcgactgcggggcccagccaagtgccgcgagtgcgaagccttcatggtcagcgggacggagtgtgaggagtgctttctgacctgccacaagcgctgcctggagactctcctgatcctctgtggacacaggcggctcccagcccggacacccctttttggggttgacttcctgcagctacccagggacttcccggaggaggtaccctttgtggtcacgaagtgcacggctgagatagaacaccgtgccctggatgtgcagggcatttaccgggtcagcgggtcccgggtccgtgtggagcggctgtgccaggctttcgagaatggccgagcgttggtggagctgtcggggaactcgcctcatgacgtctcgagtgtcctcaagcgatttcttcaggagctcaccgagcccgtgatccccttccacctctacgacgccttcatctctctggctaagaccttgcatgcagaccctggggacgaccctgggacccccagccccagccctgaggttatccgctcgctgaagaccctcttggtacagctgcctgactctaactacaacaccctgcggcacctggtggcccatctgttcagggtggctgcacgatttatggaaaacaagatgtctgccaacaacctgggcattgtgtttgggccgacactgctgcggccgccggacggcccgcgggcagccagcgccatccctgtcacctgcctgctggactctgggcatcaggcccagcttgtggagttcctcatcgtgcactacgagcagatctttgggatggatgagctcccccaggccactgagcccccgccccaagactccagcccagcccctgggcccctcacaaccagctcccaaccgccacccccgcaccttgacccagactcccagcccccagtcctagcctcagaccccggcccagacccccagcaccacagtaccctggagcagcatcccacggccacacctaccgagattccaactccacagagtgaccagagagaggacgtggctgaagacaccaaagatgggggaggggaagtgtccagccaaggcccagaggactcactcctggggacacagtctcgtggccacttcagccgccagccagtgaagtatccccggggcggtgtgaggcctgtaacccaccagctgtccagtctggccctggtggcttccaagctgtgcgaggagacccccatcacatcagtgcccagagggagtttgcgggggcgggggcccagccctgcagctgcctcccctgagggcagccccctgcgccgcaccccgctgcccaagcattttgagattacccaggagacagcccggctactctcgaaattggacagcgaggctgtgcccagggccacctgctgcccggacgtccagcctgaggaagccgaggaccatctctgaccaccctggcaccttaaataaggaagaggcccagattgtgaacacggacccatatatccctacctcccaccacctagtggccaaacaccccgccaggagttcaatgctgggagaggtccagagggttcctataaggaaaaactatttaatacatgacctaggggaggcctaaaacccttttggggataatgtcccagagtccccccactagacacaggtcactgccaagcatcagggccactcgggctcagaggtcactcagggtcaatactcagggtcagtgcaggttatgagatccttggggtccaccctagtctctgacacctgggacaggggtgcttttgctactttggttgtggtcactcccccacacctgcctgcctccttcacggactcgaagtgaccttcctggaggaggtgggcagctcagactccacatgctggtggtgcctgaggtctgatggcctctaataaactgtgtcctataaaaaaaaaaaacagacaaaacaacaaaaaaccaaaaacagagcccaacaaaaaaacaacaagccaacac

SEQ ID NO: 7884 - DNA, 2862 bp, Homo sapiens
cgtggcctccgctgggcagggcgacgcggaaccgaggcggcggcggcggctgcggcggcaggaaatcggggctcggccccgccggcgcgcgaccccatccccatcccggtccctgcagagcgatccccgggcccagatatggacgcagcagagccgggactccccccaggtcctgagggcaggaagaggtacagtgacatcttccggagcctggacaacctcgaaatctcactggggaacgtgacccttgagatgctggctggagaccctctactctcagaagacccagaacctgacaagacccctacagccactgttaccaacgaagccagctgttggagcggcccctccccagagggtcctgtacccctcacaggggaggaactggacttgcggctcattcggacaaaggggggtgtggacgcagccctggaatatgccaagacctggagccgctatgccaaggaactgcttgcctggactgaaaagagagccagctatgagctggagtttgctaagagcaccatgaagatcgctgaagctggcaaggtgtccattcaacagcagagccacatgcctctgcagtacatctacaccctgtttctggagcacgatctcagcctgggaaccctggccatggagacagtggcccagcagaaaagagactactaccagcccctcgccgccaaacggactgagattgagaagtggcggaaggagttcaaggagcagtggatgaaggagcagaagcggatgaatgaggcggtgcaggcactgcggcgcgcccagctgcagtatgtgcaacgcagcgaggacctgcgggcacgctcccaggggtcccctgaggactcggccccccaggcctcgccgggacctagcaagcagcaggagcggcggcggcgctcgcgagaggaggcccaggccaaggcgcaggaggccgaggcgctgtaccaggcctgtgtccgcgaggccaacgcgcggcagcaggacctggagatcgccaagcagcgaatcgtgtcgcacgtgcgcaagctggtgtttcagggggatgaagtgctgaggcgggtgacgctgagtctcttcgggctgcggggggcgcaggcagagcgtggcccccgcgccttcgccgccctggccgagtgctgtgcgccctttgagccgggccagcgctaccaggagtttgtacgggcgctgcggcccgaggccccgccgcccccgccgcccgccttctccttccaggagttccttccctccttgaacagctcccctctggacatcagaaagaagctctctgggcctcttcctccaaggctggatgagaattcagctgagccaggcccttgggaggatccgggcacaggctggcgctggcaagggactccaggccccactccgggcagcgatgtggacagcgtgggtggcggcagcgagtctcggtccctggactcacccacttccagcccaggcgctggcacgaggcagctggtgaaggcttcgtccacaggcactgagtcctcagatgactttgaggagcgagaccctgacctgggagacgggctggagaatgggctgggcagccccttcgggaagtggacactgtccagcgcggctcagacccaccagctgcggcgactgcggggcccagccaagtgccgcgagtgcgaagccttcatggtcagcgggacggagtgtgaggagtgctttctgacctgccacaagcgctgcctggagactctcctgatcctctgtggacacaggcggctcccagcccggacacccctttttggggttgacttcctgcagctacccagggacttcccggaggaggtaccctttgtggtcacgaagtgcacggctgagatagaacaccgtgccctggatgtgcagggcatttaccgggtcagcgggtcccgggtccgtgtggagcggctgtgccaggctttcgagaatggccgagcgttggtggagctgtcggggaactcgcctcatgacgtctcgagtgtcctcaagcgatttcttcaggagctcaccgagcccgtgatccccttccacctctacgacgccttcatctctctggctaagaccttgcatgcagaccctggggacgaccctgggacccccagccccagccctgaggttatccgctcgctgaagaccctcttggtacagctgcctgactctaactacaacaccctgcggcacctggtggcccatctgttcagggtggctgcacgatttatggaaaacaagatgtctgccaacaacctgggcattgtgtttgggccgacactgctgcggccgccggacggcccgcgggcagccagcgccatccctgtcacctgcctgctggactctgggcatcaggcccagcttgtggagttcctcatcgtgcactacgagcagatctttgggatggatgagctcccccaggccactgagcccccgccccaagactccagcccagcccctgggcccctcacaaccagctcccaaccgccacccccgcaccttgacccagactcccagcccccagtcctagcctcagaccccggcccagacccccagcaccacagtaccctggagcagcatcccacggccacacctaccgagattccaactccacagagtgaccagagagaggacgtggctgaagacaccaaagatgggggaggggaagggtccaccctagtctctgacacctgggacaggggtgcttttgctactttggttgtggtcactcccccacacctgcctgcctccttcacggactcgaagtgaccttcctggaggaggtgggcagctcagactccacatgctggtggtgcctgaggtctgatggcctctaataaactgtgtcctata

SEQ ID NO: 7885 - DNA, 932 bp, Homo sapiens
agtgtccagccaaggcccagaggactcactcctggggacacagtctcgtggccacttcagccgccagccagtgaagtatccccggggcggtgtgaggcctgtaacccaccagctgtccagtctggccctggtggcttccaagctgtgcgaggagacccccatcacatcagtgcccagagggagtttgcgggggcgggggcccagccctgcagctgcctcccctgagggcagccccctgcgccgcaccccgctgcccaagcattttgagattacccaggagacagcccggctactctcgaaattggacagcgaggctgtgcccagggccacctgctgcccggacgtccagcctgaggaagccgaggaccatctctgaccaccctggcaccttaaataaggaagaggcccagattgtgaacacggacccatatatccctacctcccaccacctagtggccaaacaccccgccaggagttcaatgctgggagaggtccagagggttcctataaggaaaaactatttaatacatgacctaggggaggcctaaaacccttttggggataatgtcccagagtccccccactagacacaggtcactgccaagcatcagggccactcgggctcagaggtcactcagggtcaatactcagggtcagtgcaggttatgagatccttggggtccaccctagtctctgacacctgggacaggggtgcttttgctactttggttgtggtcactcccccacacctgcctgcctccttcacggactcgaagtgaccttcctggaggaggtgggcagctcagactccacatgctggtggtgcctgaggtctgatggcctctaataaactgtgtcctataaaaaaaaaaaacagacaaaacaacaaaaaaccaaaaacagagcccaacaaaaaaacaacaagccaacac

SEQ ID NO: 7886 - DNA, 518 bp, Homo sapiens
tgcaaccagcccctttgctgccttctcctggttgtccctcaaccatcccctgggcttggcacagaaagtagggttcaaggggtgcagctgtcacactcctgcctagagccaggaccccccaccccacaccctgccaattacagaattacaccagccagagggctctcacagggtagcagatctatgccccacatttcacagatggagaaactgaggctcagggaaggatagtgactccacagcatcagggctgggacccaggacccctaccttcagcaccagagctctttgcaccccacctgctgcccaacctggttttagttgagattccaagggacagtggcaggtagagaatgaagtttaaatgggtcgccttgactcctgggggaccccagactgtctgcctgcttgtaggggctacttgcatgaaatagctgccccacacctggctctgcccaccccttagctgggctgctgcccgcctcctgtatccctcccttcacaccccatcctatgaa

SEQ ID NO: 7887 - DNA, 325 bp, Homo sapiens
ttgcactagttgctaagaagctgtcagaaaccattagcggttggctaaagtcgccctatggcatttcctcatagcatcagcaaaacgagcataaatcacccactggagcctactgctatcctaatgaggctgtaagcttgtttatggactagcatcatttttatgattatttccaccttttcagtttgccttcatttggcggcaggagaagtcagctccaggaatgaagtcactgctgacattttacaaatgtggttcagagctgctgcctgctgccgtgtggtcggccggcggttctccaagtttgtttagtgatctcaaaagt

SEQ ID NO: 7888 - DNA, 643 bp, Homo sapiens
cttattcttatccatacatgtaaactctttttagagaagcttaataaagaagtagtacacacttgaccaaagaaaggggacatttattttttactatgagattttgcatctaataaaattgcttgtattttcttacaatgttgttcatatggaaccagaacttgttatgtataaatataatgggatgagaatttacatgtttattagaagttttctgatatttataggccaatatatttaaaatatatatattcagaaattggaaacatttaaactgtcaaagagtagataataggttaactaaatgatggtattactctgagagactatagtacatacaataaagacatgctttgaaagtatatatattaatatggaaaaatgaatgttataaaacaacatatgtggaaaaaatgtgaacttatgtaaatatatacttgaagtgctgcaaagtatagaatctctgagtgataggacttgtctttattctttatctgtatttttataaaatctatattttgaatatttatatgtaaagactcgttttagctctataaaattgatctgtagaggtatttttcatctataaaagtaataaagtccagtaaaaaataatatatatatacaatgctatattattgta

SEQ ID NO: 7889 - DNA, 2014 bp, Homo sapiens
cacccttctcctttctgctgtctctgcacgggtggccagagccacacagccctttctttaagtcaggagttgccctgtcagagcacaaggcaagaaggaagtggtaaagggacggaggggaagccctgagaggactgagaggatgggaaattctctgctgagagaaaacaggcggcagcagaacactcaagagatgccttggaatgtgagaatgcaaagccccaaacagagaacatccagatgctgggatcaccatatcgctgaagggtgtttctgccttccatggaaaaaaatactcatttttgaaaagaggcaagattcccaaaacgaaaatgaaagaatgtcatctactcccatccaggacaatgttgaccagacctactcagaggagctgtgctataccctcatcaatcatcgggttctctgtacaaggccatcagggaactctgctgaagagtactatgagaatgttccctgcaaagctgagagacccagagagtccttgggaggaactgagactgagtattcacttctacatatgccttctacagaccccaggcatgcccgatccccagaagatgaatatgaacttctcatgcctcacagaatctcctctcactttctgcaacagccacgtccacttatggccccttctgagactcagttttcccatttatagtgaagtggctggactagcatttgtttagcaccaacaaataaaaggtgggatgggggatctgcctgaagcagggatgggacacaaagtccctccagcttatctcccacaacaaccctttccctgcagagcatggtttgtataccacaagccctcttagcacgcaaaagccaaaatctaaagatcaaccatttatcctgaacaacaccatttgagaaagaggtaaccatctttggttctacatggtttggagagtatagtggtaggaggggctccctgattcccctaaagctatgcacaccacaaggggctctgctcttctgtctgggatcttcttataaagtgttcccatgatcattctctaaagtcacaaggaagctttactcatcatactaagtgtgcccaagggggagttcactcattactgtgaccttccagctcagtccccacccatgggagcctgtgttgctcctctcactccatgtgtctaagtcatgtcttttacatagtgtcctttgacctgttggcccccatggtctggttagttatgtgagttgaatcaagaggctctaggccagatgtttacataattttaacctatatgattttatttttaactttgtatttctccctagaaatcttaataagacaattatgccatcagacaatgttaagaagaacgatccttggagatcccgtaatcccactacccttctttggctcagagaggataatttgcctaatgatacattaaagttagtggcaaaacttaatttggagcctgatttcctactgacttccaatttagtgctcccccagtatgctaaatagaaagccctctgcaatatattaaatgtatactaaatgtatatatttaataatgtcatgtataaaatatgaataaaatgtccacataggaaattaacacatatataccttctctgataagcactcctctatgtgtcctgattatttactttctcttatcttttccttagtgttcctcaaattatatctatcctctaaaccagggatcagcaaactataacccccaggccaaatctagcccactccctgtttttatagataaagatttgttggaacacagccacactcatttgtttacctactatctatgattgttcaaccatgggagagttgagtaattgtgacatggaccataggccctaaagagccaaaataaatatactttggcactttttggaaaaaaagtttgcagacacctgccctaaatgattatagtttgagagaaacttaacagaaatgtgtttggttactgatgcataagagcaagcaccaataaaatggcataaaaat

SEQ ID NO: 7890 - DNA, 2152 bp, Homo sapiens
cacccttctcctttctgctgtctctgcacgggtggccagagccacacagccctttctttaagtcaggagttgccctgtcagagcacaaggcaagaaggaagtggtaaagggacggaggggaagccctgagaggactgagaggatgggaaattctctgctgagagaaaacaggcggcagcagaacactcaagagatgccttggaatgtgagaatgcaaagccccaaacagagaacatccaggaagacaaaggcattctaccatgagagatgtgtccaagttatctagaatgaaacacgcttgcggggagaaaaaaagttttccacagaaatggcaaaaggaaaggagtcaccttaacaaagctgcagaaatcaaccttatgatttgccatctctcttgggtattttagatgctgggatcaccatatcgctgaagggtgtttctgccttccatggaaaaaaatactcatttttgaaaagaggcaagattcccaaaacgaaagacaatgttgaccagacctactcagaggagctgtgctataccctcatcaatcatcgggttctctgtacaaggccatcagggaactctgctgaagagtactatgagaatgttccctgcaaagctgagagacccagagagtccttgggaggaactgagactgagtattcacttctacatatgccttctacagaccccaggcatgcccgatccccagaagatgaatatgaacttctcatgcctcacagaatctcctctcactttctgcaacagccacgtccacttatggccccttctgagactcagttttcccatttatagtgaagtggctggactagcatttgtttagcaccaacaaataaaaggtgggatgggggatctgcctgaagcagggatgggacacaaagtccctccagcttatctcccacaacaaccctttccctgcagagcatggtttgtataccacaagccctcttagcacgcaaaagccaaaatctaaagatcaaccatttatcctgaacaacaccatttgagaaagaggtaaccatctttggttctacatggtttggagagtatagtggtaggaggggctccctgattcccctaaagctatgcacaccacaaggggctctgctcttctgtctgggatcttcttataaagtgttcccatgatcattctctaaagtcacaaggaagctttactcatcatactaagtgtgcccaagggggagttcactcattactgtgaccttccagctcagtccccacccatgggagcctgtgttgctcctctcactccatgtgtctaagtcatgtcttttacatagtgtcctttgacctgttggcccccatggtctggttagttatgtgagttgaatcaagaggctctaggccagatgtttacataattttaacctatatgattttatttttaactttgtatttctccctagaaatcttaataagacaattatgccatcagacaatgttaagaagaacgatccttggagatcccgtaatcccactacccttctttggctcagagaggataatttgcctaatgatacattaaagttagtggcaaaacttaatttggagcctgatttcctactgacttccaatttagtgctcccccagtatgctaaatagaaagccctctgcaatatattaaatgtatactaaatgtatatatttaataatgtcatgtataaaatatgaataaaatgtccacataggaaattaacacatatataccttctctgataagcactcctctatgtgtcctgattatttactttctcttatcttttccttagtgttcctcaaattatatctatcctctaaaccagggatcagcaaactataacccccaggccaaatctagcccactccctgtttttatagataaagatttgttggaacacagccacactcatttgtttacctactatctatgattgttcaaccatgggagagttgagtaattgtgacatggaccataggccctaaagagccaaaataaatatactttggcactttttggaaaaaaagtttgcagacacctgccctaaatgattatagtttgagagaaacttaacagaaatgtgtttggttactgatgcataagagcaagcaccaataaaatggcataaaaat

SEQ ID NO: 7891 - DNA, 2288 bp, Homo sapiens
cacccttctcctttctgctgtctctgcacgggtggccagagccacacagccctttctttaagtcaggagttgccctgtcagagcacaaggcaagaaggaagtggtaaagggacggaggggaagccctgagaggactgagaggatgggaaattctctgctgagagaaaacaggttttgccttctcccaagaatcatggtgagcagctgatggagaatagctgaaaggtggaaagactttaccaaggaaggtctatataataggttaccacctaagaaatgaaacaactttctgaaagcccgggaaggagatgctctcctgagctcctcatgctccacaaggaggtcaaaatcaccaccctctttcagccactattttaagtttgaaataaacagcaagcttcctgccaccttgagtcttcctttgatgtgcactccctgcaagcaggcggcagcagaacactcaagagatgccttggaatgtgagaatgcaaagccccaaacagagaacatccagatgctgggatcaccatatcgctgaagggtgtttctgccttccatggaaaaaaatactcatttttgaaaagaggcaagattcccaaaacgaaaatgaaagaatgtcatctactcccatccaggacaatgttgaccagacctactcagaggagctgtgctataccctcatcaatcatcgggttctctgtacaaggccatcagggaactctgctgaagagtactatgagaatgttccctgcaaagctgagagacccagagagtccttgggaggaactgagactgagtattcacttctacatatgccttctacagaccccaggcatgcccgatccccagaagatgaatatgaacttctcatgcctcacagaatctcctctcactttctgcaacagccacgtccacttatggccccttctgagactcagttttcccatttatagtgaagtggctggactagcatttgtttagcaccaacaaataaaaggtgggatgggggatctgcctgaagcagggatgggacacaaagtccctccagcttatctcccacaacaaccctttccctgcagagcatggtttgtataccacaagccctcttagcacgcaaaagccaaaatctaaagatcaaccatttatcctgaacaacaccatttgagaaagaggtaaccatctttggttctacatggtttggagagtatagtggtaggaggggctccctgattcccctaaagctatgcacaccacaaggggctctgctcttctgtctgggatcttcttataaagtgttcccatgatcattctctaaagtcacaaggaagctttactcatcatactaagtgtgcccaagggggagttcactcattactgtgaccttccagctcagtccccacccatgggagcctgtgttgctcctctcactccatgtgtctaagtcatgtcttttacatagtgtcctttgacctgttggcccccatggtctggttagttatgtgagttgaatcaagaggctctaggccagatgtttacataattttaacctatatgattttatttttaactttgtatttctccctagaaatcttaataagacaattatgccatcagacaatgttaagaagaacgatccttggagatcccgtaatcccactacccttctttggctcagagaggataatttgcctaatgatacattaaagttagtggcaaaacttaatttggagcctgatttcctactgacttccaatttagtgctcccccagtatgctaaatagaaagccctctgcaatatattaaatgtatactaaatgtatatatttaataatgtcatgtataaaatatgaataaaatgtccacataggaaattaacacatatataccttctctgataagcactcctctatgtgtcctgattatttactttctcttatcttttccttagtgttcctcaaattatatctatcctctaaaccagggatcagcaaactataacccccaggccaaatctagcccactccctgtttttatagataaagatttgttggaacacagccacactcatttgtttacctactatctatgattgttcaaccatgggagagttgagtaattgtgacatggaccataggccctaaagagccaaaataaatatactttggcactttttggaaaaaaagtttgcagacacctgccctaaatgattatagtttgagagaaacttaacagaaatgtgtttggttactgatgcataagagcaagcaccaataaaatggcataaaaat

SEQ ID NO: 7892 - DNA, 2478 bp, Homo sapiens
ttattctgggattaaatgaaatataacacacaaaatgattggcatatagtaagtagtgtttaagtgttagtttctttatcctcatactcccaattcccaacaagtgggaagatgggtatacagaaatctaacccaaacaatgaaccaatttattttctttattcaatccttttcttctccttctgtcccttgttctgggcctccatgctttctgtgaaagatggtgtgatttacacaagacaaagccagtacctttccccattacttgtgcatagctcctggaactgcaccaaagagatggtagctgaggacctcaggcctctctctggacacggatactctcaagggtcatgacgaggatccctggatatttgggatcagatgatttaggatcacttgttcatggaggttggagaacatcagtgggctgttgctgtggcaatggagagcatgtcagatcaaaggtagcttgcgacatgtgcttgaggaaacagtattaacatgtgtgagggcaaccagtcaatttctgagttacacacaaatagcagaaatgaggaaagtcggaaaaattatgaaaagaagtgacaggcctgtttaggaaatacttagcctgtttctgatatgttgagtttcaggcggcagcagaacactcaagagatgccttggaatgtgagaatgcaaagccccaaacagagaacatccagatgctgggatcaccatatcgctgaagggtgtttctgccttccatggaaaaaaatactcatttttgaaaagaggcaagattcccaaaacgaaaatgaaagaatgtcatctactcccatccaggacaatgttgaccagacctactcagaggagctgtgctataccctcatcaatcatcgggttctctgtacaaggccatcagggaactctgctgaagagtactatgagaatgttccctgcaaagctgagagacccagagagtccttgggaggaactgagactgagtattcacttctacatatgccttctacagaccccaggcatgcccgatccccagaagatgaatatgaacttctcatgcctcacagaatctcctctcactttctgcaacagccacgtccacttatggccccttctgagactcagttttcccatttatagtgaagtggctggactagcatttgtttagcaccaacaaataaaaggtgggatgggggatctgcctgaagcagggatgggacacaaagtccctccagcttatctcccacaacaaccctttccctgcagagcatggtttgtataccacaagccctcttagcacgcaaaagccaaaatctaaagatcaaccatttatcctgaacaacaccatttgagaaagaggtaaccatctttggttctacatggtttggagagtatagtggtaggaggggctccctgattcccctaaagctatgcacaccacaaggggctctgctcttctgtctgggatcttcttataaagtgttcccatgatcattctctaaagtcacaaggaagctttactcatcatactaagtgtgcccaagggggagttcactcattactgtgaccttccagctcagtccccacccatgggagcctgtgttgctcctctcactccatgtgtctaagtcatgtcttttacatagtgtcctttgacctgttggcccccatggtctggttagttatgtgagttgaatcaagaggctctaggccagatgtttacataattttaacctatatgattttatttttaactttgtatttctccctagaaatcttaataagacaattatgccatcagacaatgttaagaagaacgatccttggagatcccgtaatcccactacccttctttggctcagagaggataatttgcctaatgatacattaaagttagtggcaaaacttaatttggagcctgatttcctactgacttccaatttagtgctcccccagtatgctaaatagaaagccctctgcaatatattaaatgtatactaaatgtatatatttaataatgtcatgtataaaatatgaataaaatgtccacataggaaattaacacatatataccttctctgataagcactcctctatgtgtcctgattatttactttctcttatcttttccttagtgttcctcaaattatatctatcctctaaaccagggatcagcaaactataacccccaggccaaatctagcccactccctgtttttatagataaagatttgttggaacacagccacactcatttgtttacctactatctatgattgttcaaccatgggagagttgagtaattgtgacatggaccataggccctaaagagccaaaataaatatactttggcactttttggaaaaaaagtttgcagacacctgccctaaatgattatagtttgagagaaacttaacagaaatgtgtttggttactgatgcataagagcaagcaccaataaaatggcataaaaat

SEQ ID NO: 7893 - DNA, 580 bp, Homo sapiens
aatttataaagaaaagaagtttatttggctcatggttcttcaggcggtacactcataactgcgaggatggcactaagccattcatgagaaatctgctcccataaccaaaacacctctcactaggcaccacctccaacaatgggaacaaaatttcaacattagatttgcaggggacgaatatccaaactatatcaggtggtcagaggtcactctggaacaaggggcagaggatgcacctgagcaggctctagaccttaagcactcttgcagctagcctagtggttggggtagaagcagccatttagaaaaaaatggccaagagatggggaggaggtggtcatagaagacagacttgaccaagggtcaagcctgtgttgagactgaaatgtaaaggtcatggcaagagaccaaatcttgatgatggttcttctttgacaagcaggacaatgttgaccagacctactcagaggagctgtgctataccctcatcaatcatcgggttctctgtacaaggccatcagggaactctgctgaagagtactatgagaatgttccctgcaaagctgagagacccagagag

SEQ ID NO: 7894 - DNA, 2181 bp, Homo sapiens
cacccttctcctttctgctgtctctgcacgggtggccagagccacacagccctttctttaagtcaggagttgccctgtcagagcacaaggcaagaaggaagtggtaaagggacggaggggaagccctgagaggactgagaggatgggaaattctctgctgagagaaaacaggcggcagcagaacactcaagagatgccttggaatgtgagaatgcaaagccccaaacagagaacatccaggaagacaaaggcattctaccatgagagatgtgtccaagttatctagaatgaaacacgcttgcggggagaaaaaaagttttccacagaaatggcaaaaggaaaggagtcaccttaacaaagctgcagaaatcaaccttatgatttgccatctctcttgggtattttagatgctgggatcaccatatcgctgaagggtgtttctgccttccatggaaaaaaatactcatttttgaaaagaggcaagattcccaaaacgaaaatgaaagaatgtcatctactcccatccaggacaatgttgaccagacctactcagaggagctgtgctataccctcatcaatcatcgggttctctgtacaaggccatcagggaactctgctgaagagtactatgagaatgttccctgcaaagctgagagacccagagagtccttgggaggaactgagactgagtattcacttctacatatgccttctacagaccccaggcatgcccgatccccagaagatgaatatgaacttctcatgcctcacagaatctcctctcactttctgcaacagccacgtccacttatggccccttctgagactcagttttcccatttatagtgaagtggctggactagcatttgtttagcaccaacaaataaaaggtgggatgggggatctgcctgaagcagggatgggacacaaagtccctccagcttatctcccacaacaaccctttccctgcagagcatggtttgtataccacaagccctcttagcacgcaaaagccaaaatctaaagatcaaccatttatcctgaacaacaccatttgagaaagaggtaaccatctttggttctacatggtttggagagtatagtggtaggaggggctccctgattcccctaaagctatgcacaccacaaggggctctgctcttctgtctgggatcttcttataaagtgttcccatgatcattctctaaagtcacaaggaagctttactcatcatactaagtgtgcccaagggggagttcactcattactgtgaccttccagctcagtccccacccatgggagcctgtgttgctcctctcactccatgtgtctaagtcatgtcttttacatagtgtcctttgacctgttggcccccatggtctggttagttatgtgagttgaatcaagaggctctaggccagatgtttacataattttaacctatatgattttatttttaactttgtatttctccctagaaatcttaataagacaattatgccatcagacaatgttaagaagaacgatccttggagatcccgtaatcccactacccttctttggctcagagaggataatttgcctaatgatacattaaagttagtggcaaaacttaatttggagcctgatttcctactgacttccaatttagtgctcccccagtatgctaaatagaaagccctctgcaatatattaaatgtatactaaatgtatatatttaataatgtcatgtataaaatatgaataaaatgtccacataggaaattaacacatatataccttctctgataagcactcctctatgtgtcctgattatttactttctcttatcttttccttagtgttcctcaaattatatctatcctctaaaccagggatcagcaaactataacccccaggccaaatctagcccactccctgtttttatagataaagatttgttggaacacagccacactcatttgtttacctactatctatgattgttcaaccatgggagagttgagtaattgtgacatggaccataggccctaaagagccaaaataaatatactttggcactttttggaaaaaaagtttgcagacacctgccctaaatgattatagtttgagagaaacttaacagaaatgtgtttggttactgatgcataagagcaagcaccaataaaatggcataaaaat

SEQ ID NO: 7895 - DNA, 136 bp, Homo sapiens
atacatcctctatctgaggacaatacattaaagggatttttggagcagggagatggaataaggactagtttcctccactccatgcatcaacctggtattgcagtacctccagaaatggtgcacccctcccaataag

SEQ ID NO: 7896 - DNA, 425 bp, Homo sapiens
tatggcaggaacaattcagaaacagcttaaatcattcagtcttcttcttcttcttttttttttttaacttgctgcattggtaacccttttcattcttgtgtaagaaattggaactgtagcacataatgatgctttggtatgaaataatggtaggaataaaaatgatttcttctgagaagcctgtgttaaagcacttggatactgataactggcttacagggaggctgatccaggtggtcttaaaactggctctcctgaacgccactcaagccccagtcccatctgctcctcctttgttaactcctgtcagttgatgcctctcctaggagtttctcccgctgcaggcacccccggggaacacccgagactacagatcagaaatggattccaatccagctggggtgctaactcacaataatcatctt

SEQ ID NO: 7897 - DNA, 420 bp, Homo sapiens
tcttctttcactgcctatataattaaaaaaccatctggttctaaaagtggcttcttgtatgtttaccagttgaaccagccagactttggctttggccttgccttttgtgtgcttgatggggaaatgaacaaagaagatacacataagaggtaaataaatgattctttgcatgaaacaatttcttttccccactgcctgctatactaaagaaaatcagaaagtgggtatccttttatcaaggtacagagcctcctgacattagaggcctcattctaagtgtctacacagataggtacgtacattcttctaggattggagccttcacttttatcagaatctcagatggacctctcttatccccaaacaaccatcattctgcagtcattatttaatgtattcagcaaaacttactaaaagacc

SEQ ID NO: 7898 - DNA, 117 bp, Homo sapiens
ggtaacctaccttggtacttgagttgagattttaggtcttgactttggaggtctggaacttgaccctaattcttacaaccttaattcaacttgacatttcaaccttgatttatattt

SEQ ID NO: 7899 - DNA, 810 bp, Homo sapiens
tctgaaatggaactgatctgtttctccagacctgcttctcacttggtagccccaatcctggtcatcatcaccgaagtcagaaaccctggaggccccttggactccccagtatcccctccccaccacatccagcctattaccaagtctgtgcctcctctaccctcacagctgctgccgccctagttcagtcctcatcttctccaggctgccttgctgggactgaggaaaaagagctcgatcccctgagcccttaggcagggcctggagtgagcagccctgggcttagacagttgtcattttctatttggcagtcccacggccaaagctgggaggtggaggcctctcggcacttgggctgatctctgtgcagttggagggttccctggatggacacctttctctgacattttacttacaacaccatcgtgcagtttccatagtccgtcagttctaacatgtgcttcttttctttcacattttaattgaatatctacagtaggaaggctcttacaatcaatgatgtgtcatggtgtaatttttttttctttctccctaatacataaaataagtggaagttttacaatcattggtgtcttaggatcagtgagatacagcatgattttccccgtgtctcaggcctgcttccctgagtcttccaatggcaggaacacgtggtggttctcctcagagctctggctcagcctccagaactgggactgagctaaagagtcactaaatggtcactgagattcaggagcagaacttccctgagagtggcttagctctgggaacctgacctgtccaaattaa

SEQ ID NO: 7900 - DNA, 487 bp, Homo sapiens
agtcaagccgtgtttttatggacaggtatgtgtgattagtatgaagttgtcttgtgcataatctatgcaacaaaatacacttagtatccaaacctaataatacaaaggtggatgcatatcccttttccatgctggatacttgctcttcttttcctacctcttctgaggagataatcacagaactttaagaaatagcctttgtagctgggtgcggtgcctcacaacctgtaatcccagagctttgggaggctgaggcaggtggatcacaaggtcaagagtttgaagaccagcctggccaacacggtgaaaccctgtgtctactaaaaatataaaaattagccgtgtgtggtggtgggtgcctgtaatcccagctactcgcgggctgaggcagagaattgcttgaacctgggaggtggaggttgcagtgagccgagatcgcggcactgcgctccagcctgggcgacggaacaagactccctctccaaaa

SEQ ID NO: 7901 - DNA, 498 bp, Homo sapiens
tttatttcaagttaatttttatatacatgtgagatagagatcaaggtttcatattcttgcatatgaatgtttgtttcagcaccatgtattgcaaagattatcatttttcaagtcagttatcttgggcactgttgtcaaaaatcaatcaaacaggccaaggtgggaggttggcttgagctcaggaatttgaggctgcagtgagctgtaatcacaccactgcactccccactgggtggtagcgcaagacgctgtctcaaaaaaattaaaaaaaatcaatcacacttatatgtttggccctatttctgtaccctattctgtgccagtaatctatacctatctctgtgtgccaataccacaccgtcttgatatactgcaactttatagtaagtcttgaaagcagataatgtaggttttccaactttttgttccttcccaaaattgttttgaccatttaaaatagtttctattttcagcttgttaatttctacaaaaaaaaaa

SEQ ID NO: 7902 - DNA, 336 bp, Homo sapiens
gatcattagacattccaaaatgtttgttaaataaatcccctaatgcttgatatgctgtttagttataaaagattgaagagctgtgagcccagctgtgattgcattgatcaggcagctgtattacattacagtgtctactccttcaagtatcagtttgctaaggaatctgactgtgctgacttgagaactccttctgcactattacctctggtgattaatgagaccaggcaccactggatgaatggatgacacccaatactccactattacctgtaatggaattaacttacaagtagcattgataaattctagttttaggcttactttccataggcc

SEQ ID NO: 7903 - DNA, 1528 bp, Homo sapiens
gctccgggagagttagggctccgagccgagcgcgcggagcagctggggccggggcgcggatgctggaagttcacatcccgtcggtggggcccgaggccgaggggcccaggcagagcccggagaaaagccacatggtgttccgagtggaggtgctgtgcagcgggcgcagacacacggtgccaaggcgctacagcgagttccacgcgctgcacaagcggatcaagaagctgtacaaagtgcccgacttcccctcgaaacgcctgcccaactggaggaccagagggttggaacagcgccggcagggcttggaggcttacatccagggcatcctgtacctgaaccaggaggtgcccaaggagttactggaattcctgagacttcggcacttccccacagaccccaaggctagcaactggggcaccctgagggagttcctgcctggcgacagcagctcccagcagcaccagcggcctgtcctgagcttccatgtggatccctatgtttgcaacccctccccagagtcgctgcccaacgtggtggtgaatggtgtgctccagggcctctacagcttcagcatcagcccagataaagcccagccaaaggcggcctgtcaccctgctcctctgccaccgatgccctgatcagtccagaggcctttggctgcctcctaagaaagtcatgtgcctctgtcctatgaactccatataaggctgggtcctcctttggcctggacccaggacttaattacccagtgcccagttgtgccacattcccactcaaggctcagaacttggctcgcattggtagctggaggtggtagaatttgtatgctcttagagcccaacagccaaggcagggtcaagaagataagtaataaaagaggaagtcagccaggcgcagtggctgatgcctgtaatcccagcactttgggaggccaagatgggtggatcacctgaggtcaggagttcgagaccagcctgaccaccatggagaaaccccgtctctactgaaaatacaaaattagccgggcattgtggtggtgcatgcctgtaaccccagctactcgggaagctgaggtaggagaatctctctttttttttttttttttttttttttggggcggagtttcactcttgttgcccaggctggaatgcagtggcacgatctcggctcacggcaacccccgcttcccgggttcaagcaattctcctgcctcagcctctcgagtggctgggattacaggcatccgccaccatgcccggctagtttttgtatttttaatagagacgggtttcaccacgttggccaggctggtcttgtactcctgacgtcaggtgatccacccgcctcggcttcccaaagtgctgggattacgggcgtgagccaccgtgctcggcccaaggcaggagaatctcttgaagccgggaggcggaagttgtggtgagccgagatcgcgccactgcactccagcctgggcaacaagagtgaaactccgtctcaaaataaataaataataaaggaagaagtc

SEQ ID NO: 7904 - DNA, 923 bp, Homo sapiens
gctccgggagagttagggctccgagccgagcgcgcggagcagctggggccggggcgcggatgctggaagttcacatcccgtcggtggggcccgaggccgaggggcccaggcagagcccggagaaaagccacatggtgttccgagtggaggtgctgtgcagcgggcgcagacacacggtgccaaggcgctacagcgagttccacgcgctgcacaagcgggtgaggcggcgccgacctcccaccggccccggcccagcctctgtccagcccccgcccaggccctgtgaggcgggcgggcgagccccagcctccgccacccccattactgcctcagtccctgcgcagccggtcagcccccgggcctctgtgggtgggttggggccttcctcgccctcggccggtccaccactcaccagggtctgtcccagtagagcccgaaggcgggggcgcgggagggcttctggctggggcgaagagggcttgagggctcagtcgggatgctgtgatcgcacgcggtaaacctccagtagatcaagaagctgtacaaagtgcccgacttcccctcgaaacgcctgcccaactggaggaccagagggttggaacagcgccggcagggcttggaggcttacatccaggtatgcgagagcacagttggttgccccccggccttctgtgccaggggtgtggcccagacagagaggtgtgggggcatggcagggagggaacccacaacttggggatgttattcaccacctcaagcatcaattttctgagtctaatataggtccaaacacccccctctggcttgttgaaaggactgaaagaggtaacggacacaggtagtcccagctccatgaaacccaggtcctgtcccctccatggtgaggtcctgtgctgccctcctgatggcatgtagggtgaggg

SEQ ID NO: 7905 - DNA, 1340 bp, Homo sapiens
gctccgggagagttagggctccgagccgagcgcgcggagcagctggggccggggcgcggatgctggaagttcacatcccgtcggtggggcccgaggccgaggggcccaggcagagcccggagaaaagccacatggtgttccgagtggaggtgctgtgcagcgggcgcagacacacggtgccaaggcgctacagcgagttccacgcgctgcacaagcggatcaagaagctgtacaaagtgcccgacttcccctcgaaacgcctgcccaactggaggaccagagggttggaacagcgccggcagggcttggaggcttacatccagggcatcctgtacctgaaccaggaggtgcccaaggagttactggaattcctgagacttcggcacttccccacagaccccaaggctagcaactgggggtaaggggggccgatggcgggggccaggggctgtcagcagtgagcagcaccctgagggagttcctgcctggcgacagcagctcccagcagcaccagcggcctgtcctgagcttccatgtggatccctatgtttgcaacccctccccagagtcgctgcccaacgtggtggtgaatggtgtgctccagggcctctacagcttcagcatcagcccagataaagcccagccaaaggcggcctgtcaccctgctcctctgccaccgatgccctgatcagtccagaggcctttggctgcctcctaagaaagtcatgtgcctctgtcctatgaactccatataaggctgggtcctcctttggcctggacccaggacttaattacccagtgcagtggcgcgatctcagctcactggagcccccatctcctgggttcaggcagttctcttgcctcagcctctcgagtggctgggattacaggcatccgccaccatgcccggctagtttttgtatttttaatagagacgggtttcaccacgttggccaggctggtcttgtactcctgacgtcaggtgatccacccgcctcggcttcccaaagtgctgggattacgggcgtgagccactgcacccggcctagatagtatatatttggataatgttttctaatctactctgccagttactgtgttttgattgatgtatgtagaccatttgtatttaatgtcattaccgacatgttagggcttaagtttgtctttctgtttttctggctctgtttctgtttctctgtttcctttttcctatttttctgtgtgttacttgaacatgtagaattccatttcgatttacctagtgtgggtgtgagtgtatgtatatttggtatagcttttttagtggttattctaagtattacattatatataattag

SEQ ID NO: 7906 - DNA, 624 bp, Homo sapiens
gagcgcgcggagcagctggggccggggcgcggatgctggaagttcacatcccgtcggtggggcccgaggccgaggggcccaggcagagcccggagaaaagccacatggtgagcgcggcccctggatggggaggggcgccgggacccgcaggatttccccgccggcgctcagtggggaccggggccccgggcctgggtgaacgagcgctgcgggctggaccgtcgggggaaaccttgtcgagggtttgggggccgcttggatttgccagctcgcggaccatggttcgagctcttgagggaccccagggctccgaggggcaggtccgccagccggttctcccaggtgtgcgggagcggagagtccccgggcagccgcggcgccgcaaggccgctttgtgcctttgagagcgggagggtgggcacgtcgccaggcgcaggtgctgcggcgtcctcccgcggggcctcacgcgcagacccgctgcccgcccgcgccgccaggtgttccgagtggaggtgctgtgcagcgggcgcagacacacggtgccaaggcgctacagcgagttccacgcgctgcacaagcgggtgaggcggcgccgacctcccaccggccccggcccagcctctg

SEQ ID NO: 7907 - DNA, 1206 bp, Homo sapiens
gctccgggagagttagggctccgagccgagcgcgcggagcagctggggccggggcgcggatgctggaagttcacatcccgtcggtggggcccgaggccgaggggcccaggcagagcccggagaaaagccacatggtgttccgagtggaggtgctgtgcagcgggcgcagacacacggtgccaaggcgctacagcgagttccacgcgctgcacaagcgggtgaggcggcgccgacctcccaccggccccggcccagcctctgtccagcccccgcccaggccctgtgaggcgggcgggcgagccccagcctccgccacccccattactgcctcagtccctgcgcagccggtcagcccccgggcctctgtgggtgggttggggccttcctcgccctcggccggtccaccactcaccagggtctgtcccagtagagcccgaaggcgggggcgcgggagggcttctggctggggcgaagagggcttgagggctcagtcgggatgctgtgatcgcacgcggtaaacctccagtagatcaagaagctgtacaaagtgcccgacttcccctcgaaacgcctgcccaactggaggaccagagggttggaacagcgccggcagggcttggaggcttacatccagggcatcctgtacctgaaccaggaggtgcccaaggagttactggaattcctgagacttcggcacttccccacagaccccaaggctagcaactggggcaccctgagggagttcctgcctggcgacagcagctcccagcagcaccagcggcctgtcctgagcttccatgtggatccctatgtttgcaacccctccccagagtcgctgcccaacgtggtggtgaatggtgtgctccagggcctctacagcttcagcatcagcccagataaagcccagccaaaggcggcctgtcaccctgctcctctgccaccgatgccctgatcagtccagaggcctttggctgcctcctaagaaagtcatgtgcctctgtcctatgaactccatataaggctgggtcctcctttggcctggacccaggacttaattacccagtgcccagttgtgccacattcccactcaaggctcagaacttggctcgcattggtagctggaggtggtagaatttgtatgctcttagagcccaacagccaaggcagggtcaagaagataagtaataaaagaggaagtcagccagg

SEQ ID NO: 7908 - DNA, 1293 bp, Homo sapiens
gctccgggagagttagggctccgagccgagcgcgcggagcagctggggccggggcgcggatgctggaagttcacatcccgtcggtggggcccgaggccgaggggcccaggcagagcccggagaaaagccacatggtgttccgagtggaggtgctgtgcagcgggcgcagacacacggtgccaaggcgctacagcgagttccacgcgctgcacaagcggatcaagaagctgtacaaagtgcccgacttcccctcgaaacgcctgcccaactggaggaccagagggttggaacagcgccggcagggcttggaggcttacatccagggcatcctgtacctgaaccaggaggtgcccaaggagttactggaattcctgagacttcggcacttccccacagaccccaaggctagcaactggggcaccctgagggagttcctgcctggcgacagcagctcccagcagcaccagcggcctgtcctgagcttccatgtggatccctatgtttgcaacccctccccagagtcgctgcccaacgtggtggtgaatggtgtgctccagggcctctacagcttcagcatcagcccagataaagcccagccaaaggcggcctgtcaccctgctcctctgccaccgatgccctgatcagtccagaggcctttggctgcctcctaagaaagtcatgtgcctctgtcctatgaactccatataaggctgggtcctcctttggcctggacccaggacttaattacccagtgcagtggcgcgatctcagctcactggagcccccatctcctgggttcaggcagttctcttgcctcagcctctcgagtggctgggattacaggcatccgccaccatgcccggctagtttttgtatttttaatagagacgggtttcaccacgttggccaggctggtcttgtactcctgacgtcaggtgatccacccgcctcggcttcccaaagtgctgggattacgggcgtgagccactgcacccggcctagatagtatatatttggataatgttttctaatctactctgccagttactgtgttttgattgatgtatgtagaccatttgtatttaatgtcattaccgacatgttagggcttaagtttgtctttctgtttttctggctctgtttctgtttctctgtttcctttttcctatttttctgtgtgttacttgaacatgtagaattccatttcgatttacctagtgtgggtgtgagtgtatgtatatttggtatagcttttttagtggttattctaagtattacattatatataattag

SEQ ID NO: 7909 - DNA, 491 bp, Homo sapiens
gtgatttgcagtcagctttcaatgagactgggaagatcttgagaattagctgtcttgacatttggaacacattccattgcattaaaccaaagaagcctttaaaactgaaccatgcatgctgcttttcactatttttgttcactggctacggttcattcccaccatactcttctcttaggtaccattgccccacgtaagcaggtaatgccttggtttgcccagctcttggtagaattttgaactgacagcggattacattgtgtcatgaggtgggaagggctgggaaggcaacatccacatatccccattatgatctagtcattgtttccatttcaaaggagcgatatattcagctcagcacttccgtctatttaagatatgttagctccatgaatcagagtgaatctacatattcccattgtgaacctgacattgaaatatacgttttccagtttcaatctactcacctgttatgagtgaagcttaccttt

SEQ ID NO: 7910 - DNA, 521 bp, Homo sapiens
gcaacaggataagaggaggaagaagagtgaatgttcctcttatacctcactaaaccactttgtgagctgagccatacatggtttctggcaatagatttgggaatgcaggcctggctggaggcgagcccagcgtgacatccaccccttgctagggctcagtgttgaacttaagtgaaacatcaacctgcccagtgctgcccacctcttccagaacccctttcctctccgttcacagggcaggctttcccctcaggtaggaccaactgggggttactgcttttgctgcactgaaattttttgaaatttggaattaagtctctgtccttcccccagtcaccacaatacagggtacacattctgactcctgtctagctttgatagtgttatccattcaaacagcaaaagaacaagcacttgtcaccactcaacactgatttagaatttatctgcttgctttttttgttttttgagacttagtctcgctctgtcccccagcgtggagtgcagtggcgtgatctcag

SEQ ID NO: 7911 - DNA, 542 bp, Homo sapiens
gcaaattagaaaactagagagaaaggaagtggttccagtctaccatgagcagctcataggctagatgaactgaacatagcttttggtttgttctaaggaaaggatataagaccaaagtgtccataaagttcttatttaaagtaacttttagagtttggggtaagagatctttcaattgaaactactaagaatacttcttaggccaggcaatttgaattgatgagataagataaagctgaaggtcaaagttatgactttgagaagagtcaaggcaatgccatcatcaagggagccaatcttccagtagacaggggctcctggagtgagaactacagacctgctgtttccaggctgcaaattaattgcattggcccagcagacaccatcagtaaacaagcctgccagggaatatctacttgatcctctttcacagagcaaacttccaagggctgcctgggtcccatccttattttgttatcatcttcaagtgagtccaagtgcacagcaatgaaaaaaaatgcatgtgtagactaaaaaaaaga

SEQ ID NO: 7912 - DNA, 605 bp, Homo sapiens
aaaatataagcccaaaaaattggataaaatgcactgcaaaaaatgaggcaaattattggtaaccaatttatttttctctccctccctaactccctccctccatccatcctttcctcccttcctcccttgtttccttccatccattctccttccttgttttcctccttccttccttgcttttctctctctttctttcctttttgggtacataatcagaatactttttccacaaaatcatttgaaataatttttctctatttgttcatgccaacatttatacagctagtttaattgttcagttctcttttttacattttggaattttgttgtattactttgttttgtttcatatctgttttgtatatataaaacatttatatgaaactaaagtcaaaattataaaagatgatgcatttgaagattttagctttcattttagatttcttattcctcttttctccctgacactataggtaacaatatttttggcagttcacttgagctttttcactgtttgtcatagcggagtatgtattgtttctattttaatgccatatttatattttcgttctgatatttggtttttatacattttaatcaatctt

SEQ ID NO: 7913 - DNA, 144 bp, Homo sapiens
cttccctctcccctttctacctctaattacaatcctgctgctccaaatctctgatgatggcatcttcccagaccagcttttatctccccttccctccccaggatgattactgccagtcatttccaataaagcattcctggggac

SEQ ID NO: 7914 - DNA, 1449 bp, Homo sapiens
tgtatggcttcaagttcatggtctttaatctcctggaggctgtctctctttcttttttcttttttttaatcagtgttgggatcaaattctggctcccctaggaagcatctggcaaggtttcgggagccatcgggttggccatgttatgctggaatatttataagcaccggagggttatccccatgtcgtagaaaatgaaactgaagctcagagagatttgcactctctgcccttttgtacaactcatttttccccagtatgtggaattgagggagcttcacgcttctagctgtcatgattccaagattctacgacatgtgggagaggatcctaaggttcggggaaccgcggaggtttcggggttctagaaatccgaggttctaagcctaggtgctccaataaacccagtgagagccagcccaggtttccggtctgtacccgctggtgcaagcccagagacaagcaggcgccacccatgagcccctctgcggccccctcccgggtcccacctcgcaggccagctggagggcgcgatcctggcgtcccccgacggcctggggccccaatccagaggcctgggtgggaggggaccaagggtgtagtaaggaagcgccttttgctggagggcaacggaccggggcggggagtcgggagaccagagtgggaggaaggcggggagtccaggttccgccccggagccgacttcctcctggtcggcggctgcagcggggtgagcggcggcagcggccggggatcctggagccatggggcgcgcgcgcgacgccatcctggatgcgctggagaacctgaccgccgaggagctcaagaagttcaagctgaagctgctgtcggtgccgctgcgcgagggctacgggcgcatcccgcggggcgcgctgctgtccatggacgccttggacctcaccgacaagctggtcagcttctacctggagacctacggcgccgagctcaccgctaacgtgctgcgcgacatgggcctgcaggagatggccgggcagctgcaggcggccacgcaccagggctctggagccgcgccagctgggatccaggcccctcctcagtcggcagccaagccaggcctgcactttatagaccagcaccgggctgcgcttatcgcgagggtcacaaacgttgagtggctgctggatgctctgtacgggaaggtcctgacggatgagcagtaccaggcagtgcgggccgagcccaccaacccaagcaagatgcggaagctcttcagtttcacaccagcctggaactggacctgcaaggacttgctcctccaggccctaagggagtcccagtcctacctggtggaggacctggagcggagctgaggctccttcccagcaacactccggtcagcccctggcaatcccaccaaatcatcctgaatctgatctttttatacacaatatacgaaaagccagcttg

SEQ ID NO: 7915 - DNA, 1268 bp, Homo sapiens
tgtatggcttcaagttcatggtctttaatctcctggaggctgtctctctttcttttttcttttttttaatcagtgttgggatcaaattctggctcccctaggaagcatctggcaaggtttcgggagccatcgggttggccatgttatgctggaatatttataagcaccggagggttatccccatgtcgtagaaaatgaaactgaagctcagagagatttgcactctctgcccttttgtacaactcatttttccccagtatgtggaattgagggagcttcacgcttctagctgtcatgattccaagattctacgacatgtgggagaggatcctaaggttcggggaaccgcggaggtttcggggttctagaaatccgaggttctaagcctaggtgctccaataaacccagtgagagccagcccaggtttccggtctgtacccgctggtgcaagcccagagacaagcaggcgccacccatgagcccctctgcggccccctcccgggtcccacctcgcaggccagctggagggcgcgatcctggcgtcccccgacggcctggggccccaatccagaggcctgggtgggaggggaccaagggtgtagtaaggaagcgccttttgctggagggcaacggaccggggcggggagtcgggagaccagagtgggaggaaggcggggagtccaggttccgccccggagccgacttcctcctggtcggcggctgcagcggggtgagcggcggcagcggccggggatcctggagccatggggcgcgcgcgcgacgccatcctggatgcgctggagaacctgaccgccgaggagctcaagaagttcaactgcaggcggccacgcaccagggctctggagccgcgccagctgggatccaggcccctcctcagtcggcagccaagccaggcctgcactttatagaccagcaccgggctgcgcttatcgcgagggtcacaaacgttgagtggctgctggatgctctgtacgggaaggtcctgacggatgagcagtaccaggcagtgcgggccgagcccaccaacccaagcaagatgcggaagctcttcagtttcacaccagcctggaactggacctgcaaggacttgctcctccaggccctaagggagtcccagtcctacctggtggaggacctggagcggagctgaggctccttcccagcaacactccggtcagcccctggcaatcccaccaaatcatcctgaatctgatctttttatacacaatatacgaaaagccagcttg

SEQ ID NO: 7916 - DNA, 1676 bp, Homo sapiens
tgtatggcttcaagttcatggtctttaatctcctggaggctgtctctctttcttttttcttttttttaatcagtgttgggatcaaattctggctcccctaggaagcatctggcaaggtttcgggagccatcgggttggccatgttatgctggaatatttataagcaccggagggttatccccatgtcgtagaaaatgaaactgaagctcagagagatttgcactctctgcccttttgtacaactcatttttccccagtatgtggaattgagggagcttcacgcttctagctgtcatgattccaagattctacgacatgtgggagaggatcctaaggttcggggaaccgcggaggtttcggggttctagaaatccgaggttctaagcctaggtgctccaataaacccagtgagagccagcccaggtttccggtctgtacccgctggtgcaagcccagagacaagcaggcgccacccatgagcccctctgcggccccctcccgggtcccacctcgcaggccagctggagggcgcgatcctggcgtcccccgacggcctggggccccaatccagaggcctgggtgggaggggaccaagggtgtagtaaggaagcgccttttgctggagggcaacggaccggggcggggagtcgggagaccagagtgggaggaaggcggggagtccaggttccgccccggagccgacttcctcctggtcggcggctgcagcggggtgagcggcggcagcggccggggatcctggagccatggggcgcgcgcgcgacgccatcctggatgcgctggagaacctgaccgccgaggagctcaagaagttcaagctgaagctgctgtcggtgccgctgcgcgagggctacgggcgcatcccgcggggcgcgctgctgtccatggacgccttggacctcaccgacaagctggtcagcttctacctggagacctacggcgccgagctcaccgctaacgtgctgcgcgacatgggcctgcaggagatggccgggcagctgcaggcggccacgcaccagggcctgcactttatagaccagcaccgggctgcgcttatcgcgagggtcacaaacgttgagtggctgctggatgctctgtacgggaaggtcctgacggatgagcagtaccaggcagtgcgggccgagcccaccaacccaagcaagatgcggaagctcttcagtttcacaccagcctggaactggacctgcaaggacttgctcctccaggccctaagggagtcccagtcctacctggtggaggacctggagcggagctgaggctccttcccagcaacactccggtcagcccctggcaatcccaccaaatcatcctgaatctgatctttttatacacaatatacgaaaagccagcttgatcagatgcaggatgcttggtgggatagcaggggctgaccggagtgttgctgggaaagagcctcagggtcggcctcaggtctccacaaggtaggactgggaaacctgtgggcctggaggagcagtcctgcaggtcagttcacggcggttttaaaggaaaactccgaattggtagagtgatgtacgacagacaagaggtggggactcagagagcaagaaaagattagttcgagtgtaacaagagacagggaaaatataaaggggagacagaggcaggaaaaaata

SEQ ID NO: 7917 - DNA, 1420 bp, Homo sapiens
tgtatggcttcaagttcatggtctttaatctcctggaggctgtctctctttcttttttcttttttttaatcagtgttgggatcaaattctggctcccctaggaagcatctggcaaggtttcgggagccatcgggttggccatgttatgctggaatatttataagcaccggagggttatccccatgtcgtagaaaatgaaactgaagctcagagagatttgcactctctgcccttttgtacaactcatttttccccagtatgtggaattgagggagcttcacgcttctagctgtcatgattccaagattctacgacatgtgggagaggatcctaaggttcggggaaccgcggaggtttcggggttctagaaatccgaggttctaagcctaggtgctccaataaacccagtgagagccagcccaggtttccggtctgtacccgctggtgcaagcccagagacaagcaggcgccacccatgagcccctctgcggccccctcccgggtcccacctcgcaggccagctggagggcgcgatcctggcgtcccccgacggcctggggccccaatccagaggcctgggtgggaggggaccaagggtgtagtaaggaagcgccttttgctggagggcaacggaccggggcggggagtcgggagaccagagtgggaggaaggcggggagtccaggttccgccccggagccgacttcctcctggtcggcggctgcagcggggtgagcggcggcagcggccggggatcctggagccatggggcgcgcgcgcgacgccatcctggatgcgctggagaacctgaccgccgaggagctcaagaagttcaagctgaagctgctgtcggtgccgctgcgcgagggtgtccatggacgccttggacctcaccgacaagctggtcagcttctacctggagacctacggcgccgagctcaccgctaacgtgctgcgcgacatgggcctgcaggagatggccgggcagctgcaggcggccacgcaccagggctctggagccgcgccagctgggatccaggcccctcctcagtcggcagccaagccaggcctgcactttatagaccagcaccgggctgcgcttatcgcgagggtcacaaacgttgagtggctgctggatgctctgtacgggaaggtcctgacggatgagcagtaccaggcagtgcgggccgagcccaccaacccaagcaagatgcggaagctcttcagtttcacaccagcctggaactggacctgcaaggacttgctcctccaggccctaagggagtcccagtcctacctggtggaggacctggagcggagctgaggctccttcccagcaacactccggtcagcccctggcaatcccaccaaatcatcctgaatctgatctttttatacacaatatacgaaaagccagcttg

SEQ ID NO: 7918 - DNA, 1542 bp, Homo sapiens
tgtatggcttcaagttcatggtctttaatctcctggaggctgtctctctttcttttttcttttttttaatcagtgttgggatcaaattctggctcccctaggaagcatctggcaaggtttcgggagccatcgggttggccatgttatgctggaatatttataagcaccggagggttatccccatgtcgtagaaaatgaaactgaagctcagagagatttgcactctctgcccttttgtacaactcatttttccccagtatgtggaattgagggagcttcacgcttctagctgtcatgattccaagattctacgacatgtgggagaggatcctaaggttcggggaaccgcggaggtttcggggttctagaaatccgaggttctaagcctaggtgctccaataaacccagtgagagccagcccaggtttccggtctgtacccgctggtgcaagcccagagacaagcaggcgccacccatgagcccctctgcggccccctcccgggtcccacctcgcaggccagctggagggcgcgatcctggcgtcccccgacggcctggggccccaatccagaggcctgggtgggaggggaccaagggtgtagtaaggaagcgccttttgctggagggcaacggaccggggcggggagtcgggagaccagagtgggaggaaggcggggagtccaggttccgccccggagccgacttcctcctggtcggcggctgcagcggggtgagcggcggcagcggccggggatcctggagccatggggcgcgcgcgcgacgccatcctggatgcgctggagaacctgaccgccgaggagctcaagaagttcaagctgaagctgctgtcggtgccgctgcgcgagggctacgggcgcatcccgcggggcgcgctgctgtccatggacgccttggacctcaccgacaagctggtcagcttctacctggagacctacggcgccgagctcaccgctaacgtgctgcgcgacatgggcctgcaggagatggccgggcagctgcaggcggccacgcaccagggaggctccccacgcttggcctaccgaccaacgggaccccggccccacggcgggaagggaagggaaggggatcacttggcccatatccttccaggctctggagccgcgccagctgggatccaggcccctcctcagtcggcagccaagccaggcctgcactttatagaccagcaccgggctgcgcttatcgcgagggtcacaaacgttgagtggctgctggatgctctgtacgggaaggtcctgacggatgagcagtaccaggcagtgcgggccgagcccaccaacccaagcaagatgcggaagctcttcagtttcacaccagcctggaactggacctgcaaggacttgctcctccaggccctaagggagtcccagtcctacctggtggaggacctggagcggagctgaggctccttcccagcaacactccggtcagcccctggcaatcccaccaaatcatcctgaatctgatctttttatacacaatatacgaaaagccagcttg

SEQ ID NO: 7919 - DNA, 1392 bp, Homo sapiens
tgtatggcttcaagttcatggtctttaatctcctggaggctgtctctctttcttttttcttttttttaatcagtgttgggatcaaattctggctcccctaggaagcatctggcaaggtttcgggagccatcgggttggccatgttatgctggaatatttataagcaccggagggttatccccatgtcgtagaaaatgaaactgaagctcagagagatttgcactctctgcccttttgtacaactcatttttccccagtatgtggaattgagggagcttcacgcttctagctgtcatgattccaagattctacgacatgtgggagaggatcctaaggttcggggaaccgcggaggtttcggggttctagaaatccgaggttctaagcctaggtgctccaataaacccagtgagagccagcccaggtttccggtctgtacccgctggtgcaagcccagagacaagcaggcgccacccatgagcccctctgcggccccctcccgggtcccacctcgcaggccagctggagggcgcgatcctggcgtcccccgacggcctggggccccaatccagaggcctgggtgggaggggaccaagggtgtagtaaggaagcgccttttgctggagggcaacggaccggggcggggagtcgggagaccagagtgggaggaaggcggggagtccaggttccgccccggagccgacttcctcctggtcggcggctgcagcggggtgagcggcggcagcggccggggatcctggagccatggggcgcgcgcgcgacgccatcctggatgcgctggagaacctgaccgccgaggagctcaagaagttcaagctgaagctgctgtcggtgccgctgcgcgagggctacgggcgcatcccgcggggcgcgctgctgtccatggacgccttggacctcaccgacaagctggtcagcttctacctggagacctacggcgccgagctcaccgctaacgtgctgcgcgacatgggcctgcaggagatggccgggcagctgcaggcggccacgcaccagggcctgcactttatagaccagcaccgggctgcgcttatcgcgagggtcacaaacgttgagtggctgctggatgctctgtacgggaaggtcctgacggatgagcagtaccaggcagtgcgggccgagcccaccaacccaagcaagatgcggaagctcttcagtttcacaccagcctggaactggacctgcaaggacttgctcctccaggccctaagggagtcccagtcctacctggtggaggacctggagcggagctgaggctccttcccagcaacactccggtcagcccctggcaatcccaccaaatcatcctgaatctgatctttttatacacaatatacgaaaagccagcttg

SEQ ID NO: 7920 - DNA, 1379 bp, Homo sapiens
tgtatggcttcaagttcatggtctttaatctcctggaggctgtctctctttcttttttcttttttttaatcagtgttgggatcaaattctggctcccctaggaagcatctggcaaggtttcgggagccatcgggttggccatgttatgctggaatatttataagcaccggagggttatccccatgtcgtagaaaatgaaactgaagctcagagagatttgcactctctgcccttttgtacaactcatttttccccagtatgtggaattgagggagcttcacgcttctagctgtcatgattccaagattctacgacatgtgggagaggatcctaaggttcggggaaccgcggaggtttcggggttctagaaatccgaggttctaagcctaggtgctccaataaacccagtgagagccagcccaggtttccggtctgtacccgctggtgcaagcccagagacaagcaggcgccacccatgagcccctctgcggccccctcccgggtcccacctcgcaggccagctggagggcgcgatcctggcgtcccccgacggcctggggccccaatccagaggcctgggtgggaggggaccaagggtgtagtaaggaagcgccttttgctggagggcaacggaccggggcggggagtcgggagaccagagtgggaggaaggcggggagtccaggttccgccccggagccgacttcctcctggtcggcggctgcagcggggtgagcggcggcagcggccggggatcctggagccatggggcgcgcgcgcgacgccatcctggatgcgctggagaacctgaccgccgaggagctcaagaagttcaactgcaggcggccacgcaccagggctctggagccgcgccagctgggatccaggcccctcctcagtcggcagccaagccaggcctgcactttatagaccagcaccgggctgcgcttatcgcgagggtcacaaacgttgagtggctgctggatgctctgtacgggaaggtcctgacggatgagcagtaccaggcagtgcgggccgagcccaccaacccaagcaagatgcggaagctcttcagtttcacaccagcctggaactggacctgcaaggacttgctcctccaggccctaagggagtcccagtcctacctggtggaggacctggagcggagctgaggctccttcccagcaacactccggtcagcccctggcaatcccaccaaatcatcctgaatctgatctttttatacacaatatacgaaaagccagcttgaaaaaaaaaaaggccggggtcttatttgggcgtgcggggaacgcggttttgaatggcccatgtctaagttttcctgccccctttttgtcagggggaaatctgcggccctag

SEQ ID NO: 7921 - DNA, 342 bp, Homo sapiens
tctggtgctggtgtgaaactgaagagctccgcatcttgcttgggttggtgggctcggcccgcactgcctggaactggacctgcaaggacttgctcctccaggccctaagggagtcccagtcctacctggtggaggacctggagcggagctgaggctccttcccagcaacactccggtcagcccctggcaatcccaccaaatcatcctgaatctgatctttttatacacaatatacgaaaagccagcttgtgaacttgtgtgttttcctgcttctagcctgctggcatgtgcagagctcagctatgcttcagaggccacccagcctccagctccatgtcccta

SEQ ID NO: 7922 - DNA, 1720 bp, Homo sapiens
agtttcccggaagggtagcgattaccggagcgcctcgcgcgcctgcccgcctgcggaggacccgggcgcacacgccttagcgcttctcgaaagagatttcctcccacgcgaccttccagttctcggagccaggttaggggtttggcggaggaggactgcggggcgcgggcctagggccccagcagccacagccaggggagcgctcaagacagaaagccggtggcttcctcacctccacctgtaatgcaggagggagaattggctatttctcctataagccctgtggcagccatgcctcccctaggcacccacgtgcaagccagatgtgaagctcaaattaacctgctgggtgaaggggggatctgcaagctgccaggaagactccgcatccagcccgcactgtggagcagggaggacgtgctgcactggctgcgctgggcagagcaggagtactctctgccatgcaccgcggagcacgggttcgagatgaacggacgcgccctctgcatcctcaccaaggacgacttccggcaccgtgcgcccagctcaggtgacgtcctgtatgagctgctccagtacatcaagacccagcggcgagccctggtgtgtgggcccttttttggagggatcttcaggctgaagacgcccacccagcactctccagtccccccggaagaggtgactggcccctctcagatggacacccgaaggggccacctgctgcagccaccagacccagggcttaccagcaacttcggccacctggatgaccctggcctggcaaggtggacccctggcaaggaggagtccctcaacttatgtcactgtgcagagctcggctgcaggacccagggggtctgttccttccccgcgatgccgcaggcccccattgacggcaggatcgctgactgccgcctgctgtgggattacgtgtatcagctgctccttgatacccgatatgagccctacatcaagtgggaagacaaggacgccaagatcttccgagttgtggatccaaatgggctcgccagactctggggaaatcacaagaaccgggtgaacatgacctacgagaagatgtctcgtgccctgcgccactattataagcttaatatcattaagaaggaaccggggcagaaactcctgttcagatttctaaagactccgggaaagatggtccaggacaagcacagccacctggagccgctggagagccaggagcaggacagaatagagttcaaggacaagaggccagaaatctctccgtgaggggcaggtggactccaggcacccggtaccgatggggcagggaccgagtctcccatgaaggcagactcctcctcccagcagagcagcaggatccccagccagactctgtacccacaggattacagccattgcttgggaaggctgggaggcctcccatccaggacactgggggcaggagtgtcatcttttgggcagggcaatcctggggctaaatgaggtacaggggaatggactctcccctactgcacccctgggagaggaagccaggcaccgatagagcacccagccccacccctgtaaatggaatttaccagatgaagggaatgaagtccctcactgagcctcagatttcctcacctgtgaaatgggctgaggcaggaaatgggaaaaagtgttagtgcttccaggcggcactgacagcctcagtaacaataaaaacaatggtagctga

SEQ ID NO: 7923 - DNA, 1489 bp, Homo sapiens
agtttcccggaagggtagcgattaccggagcgcctcgcgcgcctgcccgcctgcggaggacccgggcgcacacgccttagcgcttctcgaaagagatttcctcccacgcgaccttccagttctcggagccaggttaggggtttggcggaggaggactgcggggcgcgggcctagggccccagcagccacagccaggggagcgctcaagacagaaagccggtggcttcctcacctccacctgtaatgcaggagggagaattggctatttctcctataagccctgtggcagccatgcctcccctaggcacccacgtgcaagccagatgtgaagctcaaattaacctgctgggtgaaggggggatctgcaagctgccaggaagactccgcatccagcccgcactgtggagcagggaggacgtgctgcactggctgcgctgggcagagcaggagtactctctgccatgcaccgcggagcacgggttcgagatgaacggacgcgccctctgcatcctcaccaaggacgacttccggcaccgtgcgcccagctcaggtgacgtcctgtatgagctgctccagtacatcaagacccagcggcgagccctggtgtgtgggcccttttttggagggatcttcaggctgaagacgcccacccagcactctccagtccccccggaagactgccgcctgctgtgggattacgtgtatcagctgctccttgatacccgatatgagccctacatcaagtgggaagacaaggacgccaagatcttccgagttgtggatccaaatgggctcgccagactctggggaaatcacaagaaccgggtgaacatgacctacgagaagatgtctcgtgccctgcgccactattataagcttaatatcattaagaaggaaccggggcagaaactcctgttcagatttctaaagactccgggaaagatggtccaggacaagcacagccacctggagccgctggagagccaggagcaggacagaatagagttcaaggacaagaggccagaaatctctccgtgaggggcaggtggactccaggcacccggtaccgatggggcagggaccgagtctcccatgaaggcagactcctcctcccagcagagcagcaggatccccagccagactctgtacccacaggattacagccattgcttgggaaggctgggaggcctcccatccaggacactgggggcaggagtgtcatcttttgggcagggcaatcctggggctaaatgaggtacaggggaatggactctcccctactgcacccctgggagaggaagccaggcaccgatagagcacccagccccacccctgtaaatggaatttaccagatgaagggaatgaagtccctcactgagcctcagatttcctcacctgtgaaatgggctgaggcaggaaatgggaaaaagtgttagtgcttccaggcggcactgacagcctcagtaacaataaaaacaatggtagctga

SEQ ID NO: 7924 - DNA, 1584 bp, Homo sapiens
agtttcccggaagggtagcgattaccggagcgcctcgcgcgcctgcccgcctgcggaggacccgggcgcacacgccttagcgcttctcgaaagagatttcctcccacgcgaccttccagttctcggagccaggttaggggtttggcggaggaggactgcggggcgcgggcctagggccccagcagccacagccaggggagcgctcaagacagaaagccggtggcttcctcacctccacctgtaatgcaggcatccagcccgcactgtggagcagggaggacgtgctgcactggctgcgctgggcagagcaggagtactctctgccatgcaccgcggagcacgggttcgagatgaacggacgcgccctctgcatcctcaccaaggacgacttccggcaccgtgcgcccagctcaggtgacgtcctgtatgagctgctccagtacatcaagacccagcggcgagccctggtgtgtgggcccttttttggagggatcttcaggctgaagacgcccacccagcactctccagtccccccggaagaggtgactggcccctctcagatggacacccgaaggggccacctgctgcagccaccagacccagggcttaccagcaacttcggccacctggatgaccctggcctggcaaggtggacccctggcaaggaggagtccctcaacttatgtcactgtgcagagctcggctgcaggacccagggggtctgttccttccccgcgatgccgcaggcccccattgacggcaggatcgctgactgccgcctgctgtgggattacgtgtatcagctgctccttgatacccgatatgagccctacatcaagtgggaagacaaggacgccaagatcttccgagttgtggatccaaatgggctcgccagactctggggaaatcacaagaaccgggtgaacatgacctacgagaagatgtctcgtgccctgcgccactattataagcttaatatcattaagaaggaaccggggcagaaactcctgttcagatttctaaagactccgggaaagatggtccaggacaagcacagccacctggagccgctggagagccaggagcaggacagaatagagttcaaggacaagaggccagaaatctctccgtgaggggcaggtggactccaggcacccggtaccgatggggcagggaccgagtctcccatgaaggcagactcctcctcccagcagagcagcaggatccccagccagactctgtacccacaggattacagccattgcttgggaaggctgggaggcctcccatccaggacactgggggcaggagtgtcatcttttgggcagggcaatcctggggctaaatgaggtacaggggaatggactctcccctactgcacccctgggagaggaagccaggcaccgatagagcacccagccccacccctgtaaatggaatttaccagatgaagggaatgaagtccctcactgagcctcagatttcctcacctgtgaaatgggctgaggcaggaaatgggaaaaagtgttagtgcttccaggcggcactgacagcctcagtaacaataaaaacaatggtagctga

SEQ ID NO: 7925 - DNA, 1618 bp, Homo sapiens
agtttcccggaagggtagcgattaccggagcgcctcgcgcgcctgcccgcctgcggaggacccgggcgcacacgccttagcgcttctcgaaagagatttcctcccacgcgaccttccagttctcggagccaggttaggggtttggcggaggaggactgcggggcgcgggcctagggccccagcagccacagccaggggagcgctcaagacagaaagccggtggcttcctcacctccacctgtaatgcaggagggagaattggctatttctcctataagccctgtggcagccatgcctcccctaggcacccacgtgcaagccagatgtgaagctcaaattaacctgctgggtgaaggggggatctgcaagctgccaggaagactccgcatccagcccgcactgtggagcagggaggacgtgctgcactggctgcgctgggcagagcaggagtactctctgccatgcaccgcggagcacgggttcgagatgaacggacgcgccctctgcatcctcaccaaggacgacttccggcaccgtgcgcccagctcaggtgacgtcctgtatgagctgctccagtacatcaagacccagcggcgagccctggtgtgtgggcccttttttggagggatcttcaggctgaagacgcccacccagcactctccagtccccccggaagaggtgactggcccctctcagatggacacccgaaggggccacctgctgcagccaccagacccagggcttaccagcaacttcggccacctggatgaccctggcctggcaaggtggacccctggcaaggaggagtccctcaacttatgtcactgtgcagagctcggctgcaggacccagggggtctgttccttccccgcgatgccgcaggcccccattgacggcaggatcgctgactgccgcctgctgtgggattacgtgtatcagctgctccttgatacccgatatgagccctacatcaagtgggaagacaaggacgccaagatcttccgagttgtggatccaaatgggctcgccagactctggggaaatcacaagaaccgggtgaacatgacctacgagaagatgtctcgtgccctgcgccactattataagcttaatatcattaagaaggaaccggggcagaaactcctgttcagaaatggacttcagctgatcttcatattcatatggagtttccagtgaccccaaatagccaaaacagtcttggaaagaaaaacaaagttggaggacccacacttcctgattttgaaacttgctacaaagctatagtactcaacaaagattggtaatggcataaggatatagattaagaacagttttttcaacaaatagtgttgggacaatgggtgtccacatgcaaaagaataaagttgtccccttaccttacaccatctccaaaaattaactcaaaatatgtcaaagacataaacgtaagagctaaaactgtaaaactcctagaataaaacataggagtaaatcttcatgaccttggattaggccattgtgtcttaaatataacaccaaaagaataagtaataaaaaaatagataaattgaactccatcaaaattaaaagcctttgtgcttcataggacaccatcaag

SEQ ID NO: 7926 - DNA, 1674 bp, Homo sapiens
agtttcccggaagggtagcgattaccggagcgcctcgcgcgcctgcccgcctgcggaggacccgggcgcacacgccttagcgcttctcgaaagagatttcctcccacgcgaccttccagttctcggagccaggttaggggtttggcggaggaggactgcggggcgcgggcctagggccccagcagccacagccaggggagcgctcaagacagaaagccggtggcttcctcacctccacctgtaatgcaggagggagaattggctatttctcctataagccctgtggcagccatgcctcccctaggcacccacgtgcaagccagatgtgaagctcaaattaacctgctgggtgaaggggggatctgcaagctgccaggaagactccgcatccagcccgcactgtggagcagggaggacgtgctgcactggctgcgctgggcagagcaggagtactctctgccatgcaccgcggagcacgggttcgagatgaacggacgcgccctctgcatcctcaccaaggacgacttccggcaccgtgcgcccagctcaggtcagggaaacgcacaggctttcctctaagcgggaaccctggtgacgtcctgtatgagctgctccagtacatcaagacccagcggcgagccctggtgtgtgggcccttttttggagggatcttcaggctgaagacgcccacccagcactctccagtccccccggaagaggtgactggcccctctcagatggacacccgaaggggccacctgctgcagccaccagacccagggcttaccagcaacttcggccacctggatgaccctggcctggcaaggtggacccctggcaaggaggagtccctcaacttatgtcactgtgcagagctcggctgcaggacccagggggtctgttccttccccgcgatgccgcaggcccccattgacggcaggatcgctgactgccgcctgctgtgggattacgtgtatcagctgctccttgatacccgatatgagccctacatcaagtgggaagacaaggacgccaagatcttccgagttgtggatccaaatgggctcgccagactctggggaaatcacaagaaccgggtgaacatgacctacgagaagatgtctcgtgccctgcgccactattataagcttaatatcattaagaaggaaccggggcagaaactcctgttcagatttctaaagactccgggaaagatggtccaggacaagcacagccacctggagccgctggagagccaggagcaggacagaatagagttcaaggcagactcctcctcccagcagagcagcaggatccccagccagactctgtacccacaggattacagccattgcttgggaaggctgggaggcctcccatccaggacactgggggcaggagtgtcatcttttgggcagggcaatcctggggctaaatgaggtacaggggaatggactctcccctactgcacccctgggagaggaagccaggcaccgatagagcacccagccccacccctgtaaatggaatttaccagatgaagggaatgaagtccctcactgagcctcagatttcctcacctgtgaaatgggctgaggcaggaaatgggaaaaagtgttagtgcttccaggcggcactgacagcctcagtaacaataaaaacaatggtagctga

SEQ ID NO: 7927 - DNA, 1761 bp, Homo sapiens
agtttcccggaagggtagcgattaccggagcgcctcgcgcgcctgcccgcctgcggaggacccgggcgcacacgccttagcgcttctcgaaagagatttcctcccacgcgaccttccagttctcggagccaggttaggggtttggcggaggaggactgcggggcgcgggcctagggccccagcagccacagccaggggagcgctcaagacagaaagccggtggcttcctcacctccacctgtaatgcaggagggagaattggctatttctcctataagccctgtggcagccatgcctcccctaggcacccacgtgcaagccagatgtgaagctcaaattaacctgctgggtgaaggggggatctgcaagctgccaggaagactccgcatccagcccgcactgtggagcagggaggacgtgctgcactggctgcgctgggcagagcaggagtactctctgccatgcaccgcggagcacgggttcgagatgaacggacgcgccctctgcatcctcaccaaggacgacttccggcaccgtgcgcccagctcaggtcagggaaacgcacaggctttcctctaagcgggaaccctggtgacgtcctgtatgagctgctccagtacatcaagacccagcggcgagccctggtgtgtgggcccttttttggagggatcttcaggctgaagacgcccacccagcactctccagtccccccggaagaggtgactggcccctctcagatggacacccgaaggggccacctgctgcagccaccagacccagggcttaccagcaacttcggccacctggatgaccctggcctggcaaggtggacccctggcaaggaggagtccctcaacttatgtcactgtgcagagctcggctgcaggacccagggggtctgttccttccccgcgatgccgcaggcccccattgacggcaggatcgctgactgccgcctgctgtgggattacgtgtatcagctgctccttgatacccgatatgagccctacatcaagtgggaagacaaggacgccaagatcttccgagttgtggatccaaatgggctcgccagactctggggaaatcacaagaaccgggtgaacatgacctacgagaagatgtctcgtgccctgcgccactattataagcttaatatcattaagaaggaaccggggcagaaactcctgttcagatttctaaagactccgggaaagatggtccaggacaagcacagccacctggagccgctggagagccaggagcaggacagaatagagttcaaggacaagaggccagaaatctctccgtgaggggcaggtggactccaggcacccggtaccgatggggcagggaccgagtctcccatgaaggcagactcctcctcccagcagagcagcaggatccccagccagactctgtacccacaggattacagccattgcttgggaaggctgggaggcctcccatccaggacactgggggcaggagtgtcatcttttgggcagggcaatcctggggctaaatgaggtacaggggaatggactctcccctactgcacccctgggagaggaagccaggcaccgatagagcacccagccccacccctgtaaatggaatttaccagatgaagggaatgaagtccctcactgagcctcagatttcctcacctgtgaaatgggctgaggcaggaaatgggaaaaagtgttagtgcttccaggcggcactgacagcctcagtaacaataaaaacaatggtagctga

SEQ ID NO: 7928 - DNA, 1555 bp, Homo sapiens
agtttcccggaagggtagcgattaccggagcgcctcgcgcgcctgcccgcctgcggaggacccgggcgcacacgccttagcgcttctcgaaagagatttcctcccacgcgaccttccagttctcggagccaggttaggggtttggcggaggaggactgcggggcgcgggcctagggccccagcagccacagccaggggagcgctcaagacagaaagccggtggcttcctcacctccacctgtaatgcaggagggagaattggctatttctcctataagccctgtggcagccatgcctcccctaggcacccacgtgcaagccagatgtgaagctcaaattaacctgctgggtgaaggggggatctgcaagctgccaggaagactccgtgacgtcctgtatgagctgctccagtacatcaagacccagcggcgagccctggtgtgtgggcccttttttggagggatcttcaggctgaagacgcccacccagcactctccagtccccccggaagaggtgactggcccctctcagatggacacccgaaggggccacctgctgcagccaccagacccagggcttaccagcaacttcggccacctggatgaccctggcctggcaaggtggacccctggcaaggaggagtccctcaacttatgtcactgtgcagagctcggctgcaggacccagggggtctgttccttccccgcgatgccgcaggcccccattgacggcaggatcgctgactgccgcctgctgtgggattacgtgtatcagctgctccttgatacccgatatgagccctacatcaagtgggaagacaaggacgccaagatcttccgagttgtggatccaaatgggctcgccagactctggggaaatcacaagaaccgggtgaacatgacctacgagaagatgtctcgtgccctgcgccactattataagcttaatatcattaagaaggaaccggggcagaaactcctgttcagatttctaaagactccgggaaagatggtccaggacaagcacagccacctggagccgctggagagccaggagcaggacagaatagagttcaaggacaagaggccagaaatctctccgtgaggggcaggtggactccaggcacccggtaccgatggggcagggaccgagtctcccatgaaggcagactcctcctcccagcagagcagcaggatccccagccagactctgtacccacaggattacagccattgcttgggaaggctgggaggcctcccatccaggacactgggggcaggagtgtcatcttttgggcagggcaatcctggggctaaatgaggtacaggggaatggactctcccctactgcacccctgggagaggaagccaggcaccgatagagcacccagccccacccctgtaaatggaatttaccagatgaagggaatgaagtccctcactgagcctcagatttcctcacctgtgaaatgggctgaggcaggaaatgggaaaaagtgttagtgcttccaggcggcactgacagcctcagtaacaataaaaacaatggtagctga

SEQ ID NO: 7929 - DNA, 1453 bp, Homo sapiens
agtttcccggaagggtagcgattaccggagcgcctcgcgcgcctgcccgcctgcggaggacccgggcgcacacgccttagcgcttctcgaaagagatttcctcccacgcgaccttccagttctcggagccaggttaggggtttggcggaggaggactgcggggcgcgggcctagggccccagcagccacagccaggggagcgctcaagacagaaagccggtggcttcctcacctccacctgtaatgcaggagggagaattggctatttctcctataagccctgtggcagccatgcctcccctaggcacccacgtgcaagccagatgtgaagctcaaattaacctgctgggtgaaggggggatctgcaagctgccaggaagactccgtgacgtcctgtatgagctgctccagtacatcaagacccagcggcgagccctggtgtgtgggcccttttttggagggatcttcaggctgaagacgcccacccagcactctccagtccccccggaagaggtgactggcccctctcagatggacacccgaaggggccacctgctgcagccaccagacccagggcttaccagcaacttcggccacctggatgaccctggcctggcaaggtggacccctggcaaggaggagtccctcaacttatgtcactgtgcagagctcggctgcaggacccagggggtctgttccttccccgcgatgccgcaggcccccattgacggcaggatcgctgactgccgcctgctgtgggattacgtgtatcagctgctccttgatacccgatatgagccctacatcaagtgggaagacaaggacgccaagatcttccgagttgtggatccaaatgggctcgccagactctggggaaatcacaagaaccgggtgaacatgacctacgagaagatgtctcgtgccctgcgccactattataagcttaatatcattaagaaggaaccggggcagaaactcctgttcagaaatggacttcagctgatcttcatattcatatggagtttccagtgaccccaaatagccaaaacagtcttggaaagaaaaacaaagttggaggacccacacttcctgattttgaaacttgctacaaagctatagtactcaacaaagattggtaatggcataaggatatagattaagaacagttttttcaacaaatagtgttgggacaatgggtgtccacatgcaaaagaataaagttgtccccttaccttacaccatctccaaaaattaactcaaaatatgtcaaagacataaacgtaagagctaaaactgtaaaactcctagaataaaacataggagtaaatcttcatgaccttggattaggccattgtgtcttaaatataacaccaaaagaataagtaataaaaaaatagataaattgaactccatcaaaattaaaagcctttgtgcttcataggacaccatcaag

SEQ ID NO: 7930 - DNA, 841 bp, Homo sapiens
agtttcccggaagggtagcgattaccggagcgcctcgcgcgcctgcccgcctgcggaggacccgggcgcacacgccttagcgcttctcgaaagagatttcctcccacgcgaccttccagttctcggagccaggttaggggtttggcggaggaggactgcggggcgcgggcctagggccccagcagccacagccaggggagcgctcaagacagaaagccggtggcttcctcacctccacctgtaatgcaggagggagaattggctatttctcctataagccctgtggcagccatgcctcccctaggcacccacgtgcaagccagatgtgaagctcaaattaacctgctgggtgaaggggggatctgcaagctgccaggaagactccgcatccagcccgcactgtggagcagggaggacgtgctgcactggctgcgctgggcagagcaggagtactctctgccatgcaccgcggagcacgggttcgagatgaacggacgcgccctctgcatcctcaccaaggacgacttccggcaccgtgcgcccagctcaggtgacgtcctgtatgagctgctccagtacatcaagacccagcggcgagccctggtgtgtgggcccttttttggagggatcttcaggctgaagacgcccacccagcactctccagtccccccggaagccccacccctgtaaatggaatttaccagatgaagggaatgaagtccctcactgagcctcagatttcctcacctgtgaaatgggctgaggcaggaaatgggaaaaagtgttagtgcttccaggcggcactgacagcctcagtaacaataaaaacaatggtagctga

SEQ ID NO: 7931 - DNA, 328 bp, Homo sapiens
gcctcttcccactcgtccctgccctgttccctcccccgagggacctgctgcatgtaccccccaacctcccatccaccaccaagtcctgctagcgttatttccaaaatgtaacccacctccagctgcctctcctgtccctgctgctgccatcctgcccagagccaccgttagttctcctggactccagttctgctcctgacaggcacctgggctccaccctggacacagaggccagagggatcccttagaagtgcaagtcaggtcagacgtgtttcctgagcgagcagctgccagcagagaagagaccacatcctactccaaggagagg

SEQ ID NO: 7932 - DNA, 321 bp, Homo sapiens
acgttaacacagttactaggcttgaaaaaggctatcttgctataaacattctttcctcaagattttagacgttttgttcataggtcaggaaatttagccctaagatatttcaagaggttaatcttagagaataagtcttctcaagatcattgagaagattataagaggttatatgtgtgaaaagttagtggaaagtactacgtgtaaaacaccattgttttcattttttaattggcaaaggcatgattagtggcaaaaacagggtctgtaaactgtatttcatttcttttactataatatcataaacattgtcttccattt

SEQ ID NO: 7933 - DNA, 503 bp, Homo sapiens
gcctccagttctgtgagggtcagaagctgatccacagtaatggctgccaagcagtgcttaccttgagagagggaatagcaggaaagccacacgacgagccttctaggatactggggatattctctctatagatctggatgtgtatatgatgtgtacattcaccaaggtgtacacatgagatatgtacacttctctgtattccattacaccttggtttttgaaaagacagaaacagcatgctcagcttattaagaacctgaatattttcagacaaaaagtatgtctagtgttagtccacttttttttttttttagttttagactcacagagccctcttagggtcatatttagttgtatatcatctgacaaaagagggaatggctcacccagctgctacagtcagtcttgtagcctttgtaagatttgatgataaatcatacaataaattaaaactttcggctgggcacagtggctcacgcccataatcccagcactttgggagg

SEQ ID NO: 7934 - DNA, 500 bp, Homo sapiens
tgtttgaattcatggtggctttacttcattcacctgtatggttggggacaattccattctaaatacatttattcagcacctgccatatatcaggcactctgttaggttgaaagtgttggctcattggagaagacagagttatttttacattacatttccagagtatatcacagtgtttggtacatagaaagcacttagtcaacaatgaacgtataagggagctaaatcactaaatggttttaagaagagaaaataaatgcttactatgtgatgcagaatatggttagtgttatatttgatataggaacctaccagggctaaaaaaaaatttagagattatgtaagtccgaaatattggtgaaaatttcatggaggatgtgcgatttgatatgaattttaaataatttatagaattacatgtaaatgtctaaaggaatggtatggccaaaggtctggagttggaaatatatgtgcctgaaagaaatatagcatagtgatta

SEQ ID NO: 7935 - DNA, 349 bp, Homo sapiens
ttttagggtcttgctttgttgcccaggctgaactcaaactcctagctcaagtgatcctcttgcctcagcctcctgtgtagctgagaagggaggattgcttgagtccaagagttggaggctgcagtgatcaatgatcatgccactgcactcctgttgcctgggcaacagagtgagatcctgtcccttcaaaaaaggagcaaaatacatattttccttagcacaaaatatttgcaatttgtttataaaaccaagttttctaaacataattctgtaacaaaatataaagtccatttaagttggatcatggaccccaccccaccaaatctatatttttcaaagactaagactg

SEQ ID NO: 7936 - DNA, 523 bp, Homo sapiens
agagtgaatgggagcaagatggactaaacttcagagaatattattttagctcacagtgcagatctatatcacctatactttagatatcttttaattaaatttttatagattaaaaatcaaatattactgaaatattgatatatgtatgcatatcaggttttttagggtaataaatttgctcaacttggacttaagtttttgtgaagaattcttataagtgttgatttctctctaattagctatgtggaacaaacgtaatttcctaaaaagaagtaagctagtaataactttgattttatatttctccttaaatgacaaaccaattttactaccagaactcatttcaaaagtatttctgggctatttgtatgactagctcattttgtgaaataataaaatacataaaaatagtaaggctcagtaacttgtccaaataaggtatttttgaggatagtacacatgcaaattattacttcatatcacattttaaaagggcttataggtttgaaagttttcatatagt

SEQ ID NO: 7937 - DNA, 633 bp, Homo sapiens
ctgaaatcctatatattgttaactaaaattagaaatcatttgtatttcttttgacttgcagcttgttagaggcttcttagtcattagctagaaatgtattttttctcttcatgtattttcaaagaaggatttatgtaaccatgttgtcatttgggaggcactgagtgttaaatatcataggatgccagaagcccacaagaagataagaacactccagtgaggacctctgaagagaaacagcaaaagcatctccatcctgcactgagttgtgggttattattgtcatggaggtgaataaaggatgatttaggagatggtactataatgtggaggaaacatccagcccatttatggttcaggaaaaaggtttactcctttgagcttggttgggttaaaacattgtattgcctactctcataatgctggaagtataaagagatcaataaagtttcctcagattctgtaagtcagacttgtctctattttcttaacatttccagggaagtcaagatcacaaaaagtggttgattctggtggtgggaatattgatattgattctataatattactgtaaattctttctccgagattaaatatattgtgcacaagtactctgaccacatctctagattc

SEQ ID NO: 7938 - DNA, 104 bp, Homo sapiens
ttttttttctttgagagggggtcttactctgtctcaacctccttggctcaagtgattctccctcttcagcctcctgagtgagtagctgggaccaaagggcacac

SEQ ID NO: 7939 - DNA, 419 bp, Homo sapiens
atttttaaaaagtgctcaaagcatctatttttcatagctgtgcaaaagtaaaagaaataatattcatttttcacttcatgcaagaacctcacttgcatgaggttctcgaaatagaaaatcataatcaggacaacttgtcacttcttcagatgttttatatagaatatcatttggcttctaaatctgtgattccttttttgtctgtggctccagattttcataatctaccactattaagcagaagtggtaatttatgaagaaatttgggtttgaaatgcttattattttcatgaagataaaaagtaaaataagaatgttaaccatttgagtcctgttgctgaagggcattgagaggagttgagccccatctctctctcccattgcagtagttcctcttaaagtctcccttaccatcttaa

SEQ ID NO: 7940 - DNA, 330 bp, Homo sapiens
gagttactgcaaggtttaggcgagacaatagcaaaaatgttttcgggggctgcacaaaaaagagggaattgtagtagttttacatcgccataacaagcagaactggtacctgctggtggatggtctgtgcttcccagagcgggatctgtggatgcttggggagggggaccactgagatctttcagagggtacataatgttcaaactattttcatgttattgagatgttttgtctttcaacatttgtacttaacggtgcaaaagcagtggtggaaaatgctgtatccatcataggaacaatcaaggcagagaaccggtattgtatatagtc

SEQ ID NO: 7941 - DNA, 585 bp, Homo sapiens
acgtgacagcgtcgaccttgagtgccagcaatcaagaggaataaaagatggcgcagcagaagctggccaggcagctggatgattctggaacttggaaggcataatgagtgaggttttggatagagtctagcggcgtccctggttcaagcactgattggtccccaaccatgtccacatccttgtgaaactgtggggcagggcaaggcaagccagctcaggctctgccccagtaggagaggcaggcaaagagacagagatacaaaacaacgtgtggttaagcatttggaggctggaaatgagttctcctgggcaggatgagggcagatacctgcggtttctgggctaagacgaacctacaggtagctgcaaatctgagatgtgcccaggtgttccatgctgacggcctccttgtctcctgcagaatccaggtgggcattttttacctgctcccaatgcaaggtctgtctatgagcatctgtcaattcctttaaagtcctacaattgaaagatgaagagccgggctgtgcagtgtgtggtctggagggagcctggcaccgtcgactccagctgcagggtgaggtgtag

SEQ ID NO: 7942 - DNA, 242 bp, Homo sapiens
tccggccaccttgggcggggacgcggagagtggggttggctcctcccccgccgcgggtctccatccatttccccatttgggaggggtaataacccgggagccgcgccacggaaatgcatcttcccctgctattcagacgggaatccgcccacccatgacaaccgcccttcccgcctagggaaagggggcgggaagacctagcctcgggccctgccaactgccagcaagccagacggatagac

SEQ ID NO: 7943 - DNA, 324 bp, Homo sapiens
gacaaaacactcttcagctttggggtaatcatttttggtttggtaaaaagagtgactgaaacttgcctaaagattaatttttagaggactctgaggaaaccagattggcagtgaatatacagtgatgaagtgagaaacacttcagcaaagggtggaacaaattagtaactgacttactacacatcctggcaaaaacagcaacttagctaagagtctaaactctcctttcaaatctagaatatcttggtgggaaggtgggagatgagcagcttataaatagcaaaatcaactgggattttgagtttacttgtccctgttataccc

SEQ ID NO: 7944 - DNA, 280 bp, Homo sapiens
aagtcattccatgctgaagacatccctagggcaggtagcagaatacctaattcaacctagagaggcacaggctgcacgagagtctctcagataaagccccattgaaaataaattgacaatctaaaatttaaaaacccgttaaaaaagcagcacagcatgaggagtcagtagatacactgaaagcaagattagatcttcaagactttcaaactataaaatttagaaaattataataaattatgaaatagaggccctttcatgtcaaaaagtcatgaaagaa

SEQ ID NO: 7945 - DNA, 494 bp, Homo sapiens
cccaggcaggagtgtggtggtgcagcaccttgctcactgcaacctccgcctcctgggttcaagagattctcctgcctcagcctcccaagtagctgggattaccacaaccagctaatttttgtattttttcgtagagatagggtttcaccatgttggccaggctggtcttgaactcctgacctcaagtgatccacccacctcagcctccaaaagtgtggggaattacaggcgtgagccactgcacctggccctcaggcttaattgttagaaaaatatccaaagcaaatacatggaaaaaagcatatctccttgacatttgttcttagacaagctgtgggcagtgtttctggcaaagccatttacattctggataatgatgccaacaatggaactcctggacaaggaggggggagacagagaaagaacgggccagaaattcggaaaaggaatgttctcaggactgtgttgagttggccctggcatgttctccttcc

SEQ ID NO: 7946 - DNA, 545 bp, Homo sapiens
aagttgcaggatgttatatttacaggctgaggttatttaaataaactaaaacaaacaactaccaattctccatggtaacaagtataggaaaactgtactgaaccaacatataccaaatttgcaaaagtaattgtttcagttagggcacagggccagggtcatgataggaaaagggaacagaagaggaaacagtggttaaaaatgactttatctggccaggcacggtggctcatgcatgtaatcccagcactttgggaggccaagtgtggggaattacaggcgtgagccactgcacctggccctcaggcttaattgttagaaaaatatccaaagcaaatacatggaaaaaagcatatctccttgacatttgttcttagacaagctgtgggcagtgtttctggcaaagccatttacattctggataatgatgccaacaatggaactcctggacaaggaggggggagacagagaaagaacgggccagaaattcggaaaaggaatgttctcaggactgtgttgagttggccctggcatgttctccttcc

SEQ ID NO: 7947 - DNA, 1922 bp, Homo sapiens
ccagtcagggacagccagacttgtaaactgcacctgcttccacagtcttagtgccccgtctaaaaggaacaggcgctgaagcactcatcttgccgattttatttcaaacgtccaggagatggcagcaaactctccttccctctcagtgcttcacaggcagccattctaatgctcgttgcattacaatttgctttgaatattctttttttaaaaaagacaaaagactaaagggggtcttgagacgtgatttttatctgaccccctgcttctaatcaagaatgagtataaatatttctagggatagaatagaatgatacaattttattatctagaaaagagattggatttccttggctattttttcttatctctggggaaaaagattgtatgacttcccttggctgttgggccctagactctgttatctccaaatccaaaatattcttactaataactagcttaaatctatctggcagtaatctaaacattcttattttgggatctaggctaatggaaaattttgaagcactttgaatgcttattagctttttaaaatgaaaataaatacgattataaaattttcaaaagaaaaaggaagttcatgcactttgtgcatcatagggaaagagcccaatatttttgtttaactttaacattaatcttggcaaatagagtagtatgtcaacaaaatgcaaaatcagtcagaggctgcttatatgttacaagagtgtacggaacaaagaaacaggcagacccacttggtgacggctttgatcctaacaagcacattgttttcaaaactttgaggcactaaagtttatttctaaaacagaaaagatggtgacgtgttggaagttctgtgatgtgaaatatatgtttgtacatttaccagtgggaggagaaaagactaatgggagagctggatattataaatgatgggttaatgctggagcctaggtcactgcacaggtttgatgccatgtggtcaatgaatgactgatctgttcattgtattttgtttgtttggttggttgttttttttcttttgtttttgttttgttttgttttgtttttagacagagtctcgctctgtcgcccaggctagagtgcagtggcaccatctcggcttactgccatgtttttttttgttttgttttttgtttttgttttggataattgcttaagaatttagacacacatactactaaaggatctctcttttcctctctttctctcaaatgtgtattgatgagggcctatccattttagtctccccagaagttactttttatcttaggctaagattacatatccatagcagttaagagggctgatgtagtattttagctaattcataatgtttttgtaaattcatcaatgcatttgcatgaattaatactaaaagtgaaaaaattgtttaacaattgtaatagtcaataaatacctaacatcaaatcaaaatgaaggcaaactttgggatggggagaagtcaggagaatactaaagaatgagatccttttaataaatgtgtggtctacatggcaaaatttgctgtagtattaacatacaatgttatctcaagacaattatacattgcagcttcatgaatgcattaagaaagctatgctggccaggcgcagtggctcaagcctgtaatcccagcactttgggaagctgaggtgggtggatcacttgaggtcaggagtttaagaccagcctggtcgacatggtgaaaccccacctctattaaaaacacaaaaattagctgggcgtggtggcacatgcctgtaatcccaggtacccggcagggtgaggcaggagaattacttgaacctggggagcagaggttgcagtgagcccatatcgtactgctgcagtccagcctgggtgacagagacagactccgtctcaaaaaaaaaaaa

SEQ ID NO: 7948 - DNA, 414 bp, Homo sapiens
tctcatttctttcctgctctggcaagtcttcctgacctctgtggtcaccaagctggaggcattttaagctaagtgggtcacacttagtgggctctgtgcaaggcctcaccatctgactgtcagattctcttgcaggttggacaaagctggagaagccaagaggaccctaccagccccagcccccatcctgccaaggcattctccatgtgtggagccgagcgctcacacttgggtgtttattttcacacatagtcacatagtggtcacactagcgtgcttgttttcacactgctgtccttctgtggaaagccctgtctgactttttaggttgtggattccaccctttccacccaactgagtgttaaatagtttttgagtgagcattcagagtgcttggaagttactataattagc

SEQ ID NO: 7949 - DNA, 454 bp, Homo sapiens
cttccagctgctaatgtctgtctaactatctaacaagtctgttttggggatttacaaaacatttgaattatactgtaatcatatttactagggaaaataagttaccataaaccattttatttgaaactttctcaggaaactaaaataactaaatatcatcagttttagttactttagcatcgtgagtgatgaggaggcatgtcagcttgtagagacaatttcaatctggagtcctacagatctggattttaatcttcctctaccgcttactatccatttcgaattaatcaagtttcaattttctaatatacaaattgagataagaatatttactaccatccgagagtggttgctcacacctgtaaccccagcattttgggaagccaaggcgggcagattgcttgagctcaggagttcaaaaccggcctgggtaacttggcaaagcactgtcttt

SEQ ID NO: 7950 - DNA, 419 bp, Homo sapiens
tgagacaaggtcttactttgtcacccaggctggagtgcagtggcatgatctcggctcactgcagccttgacctcctgggctcagccccccaagtagctgggactacagccacgtgccaccatgtttggctaattatttgtattttttgtagagatggggttttgccatgttgtccaggctggtcttgaactcctgagcgtagttttttggtggacacaggtggattgcttgagcgatctgcctgccctgaccttccaaagtactaggattacaggtgtcagctaccacacctggcttcatgtcttgctttcttttttgcttttcagttccttgctccatttctctctttcctctcatattttactgtaagtaacaaggagaaaccaggatgtctcttccgcactttgcttggaaatctc

SEQ ID NO: 7951 - DNA, 450 bp, Homo sapiens
gatgaggtttgaggatgaacctaacagtgaatgaaaatttattaggtttaaggaaaggatgtgcaaactgattgcagcttccctgcaatcctttacgggacatcagaattcagtttatgaaagttctatgaagtctagagttttgataatggtatttcaatggtgtaatgttcaattacctgcatgaaggcaagagaatgaaaaatattggttcattcataaatgtctaactatatttagtatggctctaaagtatgttttttaaaaaaaattaacagtgacttaaaagagtattaaaaaaaaaacaacacacatatgggccaggtgcagtggctcacacctgtaatcccagcactttgggagaccgaggcaggcagatcatttgaggtcaggagttcaagaccagcctggccaacatggtgaaaccctgtctctaccaaaaatacaaaa

SEQ ID NO: 7952 - DNA, 325 bp, Homo sapiens
cattttaaaacattttgcctaggtccaggtggagttcaagtattttgaaaagggagcttaatagaaaaaaaaattgtgctgagagaggttgaaggtatctttttctaaacctctttgaatataggttagattcgtatctggctcatgaagtttcagagtgatgtgttttaacttgaaggtaaaagataaagagatccccaaaggccattctatagactggcagaaaaatcgcctggggaagttgttataaaaaaaaattcctgcaccctacactaaaagaacctgattcaatcggtcttaggtggagcttaggaatcagtgtttt

SEQ ID NO: 7953 - DNA, 216 bp, Homo sapiens
ctctggcctgggttgagggtgagggaaatcaattcctgtgaacatctccaaaatgctacccatataatggtgccacctggactgggattcagttgtggccacgcaactgagcggatgctacaaaaataaatacatacatacatacatacgtacatacatacatacatacagaaatgcctgccctaagagcaaaaatacagaggaaggcctacacac

SEQ ID NO: 7954 - DNA, 417 bp, Homo sapiens
atccaatataaatcattactctgtttttataagtaacaagagagggaggagctattactgatttaacacttgtagcccatatttatttcatttgatttggaacctttctcttttttcaatgctttgctattttaaaatgtgcccattttcaccatttactgtggctcctaaacgggtaaagaagaaaatttaaactaaacaaataactaatcctgctttagaaatcaagatctgctagggaagaaaaactccctaatccgtacagaggatcatctctattacaaaagtccattagcagaatggtacatgttccctctttatttccacccaccactcctgcctaacaaatataataagaaacagaaaacaggacacatttctatttctataaagagaaaataccgggtcccgaaagct

SEQ ID NO: 7955 - DNA, 429 bp, Homo sapiens
aaactggcctcccacaaaggtttccggggtagagatgttgaagaaacccacaccccaataatggttgcccaaattgtgagtcctaaaataattaaatttgccctggctccctatttgatctgttgggttttgtgtaaatactttacatttcctaggtttctttttttaacctgacttacaactacatctgtaaagtagctccctagtgtcatcaaagtaggaaccacatcagaagaaaataaattgttggtgagtgactgtatgttaaaaattaaaaataaattagattggctgggcgtggtggctcatgcctgtaatcccagcactttgggaggccaaggcaggcagatcgctttgagctcaggagtttgagaccagcctgggaatcatggcaagaccctatctgtataaaaaatacaaaaaaaaaaa

SEQ ID NO: 7956 - DNA, 355 bp, Homo sapiens
ggggtctcaaactaaaaattcatccgaagtagtcccaagtttcagatgaatttgtattctttatatagtaacaacatgtgcttgatggcaggactgtattccataaattatgatgtcagttgttgctatgctcatcagtattgagctatctagcaatattggggtgggggttagaatgtgaggactatgtgaaagcagtaagacaggacttggcatgtgctacgctgggatttgctgagctgtgggggctttgtggttcacaagtccaaagggtgaatgatttcaacaacaagaaggccactatataccagctcagtattctccctggagtgtcttattctatttacaaaactgc

SEQ ID NO: 7957 - DNA, 1503 bp, Homo sapiens
agaaggagttgagtgatggtagatatcaggccctggtctgcggttggaagtttcctgtgaataagaaaaacatcatcgcttcttgagtcacaaggatgataggatgagaaaaagaaaggacaaaggcaccagaggaggtatgccaaatgggaaacttttcatcactttccagataaaaactagcagtctgtgaaggcaactggtctgatttttcaggtaagaacatatgagaggcaggctgagaccaattttctaccaggccagctaattcatcacaatgacaagctatgggtcatatgctttcaggaaccagacactggaacatgtcgtctgatgtacatcacaccaagaaataaaaaaagaattggaaagccaatgtccaattatttactaaaacagaatccactggagagaaatgcaaaggcaggtaaaaaggcaatctcttaacatgaaaactcacaactgtaaaatgagaacctaaactatacagcgacaaactcaggaaaaagtctccagctactgctgtctctcagactctcacagtatgtgtaaccacttcctcctctgcacggaatcaccccagaagatcaactctactagatcatttgaggacaatgaacaaagtctcaagactgaattcccacagaaaacattctcatgaaaccacccaatattctggtgaagttaaagaagggcatgtgttcggagacaaccagaagcagcaatgctcaaaaccacaaaactctggattgccgactctgcacatcctggttcctctagatacagttcagtggcacattcacaaataaacgttttcaaaaactgccctcaggcagttctagagaaatgctttgacttgcctaatggtataatgtcaagaaaggaagaccagcactgatcattcatactcattattacagtcacagggcactgtctgacttgacagatacagccgagcagttaaaaaggttatgggaatttaagtccattatggtcatacgattcttatggacccagagatatgaaattaatcagccacatgtgtagggacaaagtttgtcataaatagatataagttatctgcatgctaagaacttagttacttaactctgtttcctcatgttaatataaacataattatagaatgcaaatgaaatacttagcctggagcctattatataggaagcactcaataatttcaaactattgagtatattattagataggctccataattatttattcctttttcaacagacagtatgatctattgaaaataaagccaaactagatttctttgacccactcctttttctgtttgtattgttggcaagttgttctaaatcaacttgccaacatactattaacatgttattaacatagaagggatgcttattttgtttgctttgtaagaaatgcttctgattcagtaactgggcaatttatttaaatataagtaaaaagcagattttattaaaaactactttgtgctatcataaataa

SEQ ID NO: 7958 - DNA, 1413 bp, Homo sapiens
agaaggagttgagtgatggtagatatcaggccctggtctgcggttggaagtttcctgtgaataagaaaaacatcatcgcttcttgagtcacaaggatgataggatgagaaaaagaaaggacaaaggcaccagaggaggtatgccaaatgggaaacttttcatcactttccagataaaaactagcagtctgtgaaggcaactggtctgatttttcaggaaccagacactggaacatgtcgtctgatgtacatcacaccaagaaataaaaaaagaattggaaagccaatgtccaattatttactaaaacagaatccactggagagaaatgcaaaggcaggtaaaaaggcaatctcttaacatgaaaactcacaactgtaaaatgagaacctaaactatacagcgacaaactcaggaaaaagtctccagctactgctgtctctcagactctcacagtatgtgtaaccacttcctcctctgcacggaatcaccccagaagatcaactctactagatcatttgaggacaatgaacaaagtctcaagactgaattcccacagaaaacattctcatgaaaccacccaatattctggtgaagttaaagaagggcatgtgttcggagacaaccagaagcagcaatgctcaaaaccacaaaactctggattgccgactctgcacatcctggttcctctagatacagttcagtggcacattcacaaataaacgttttcaaaaactgccctcaggcagttctagagaaatgctttgacttgcctaatggtataatgtcaagaaaggaagaccagcactgatcattcatactcattattacagtcacagggcactgtctgacttgacagatacagccgagcagttaaaaaggttatgggaatttaagtccattatggtcatacgattcttatggacccagagatatgaaattaatcagccacatgtgtagggacaaagtttgtcataaatagatataagttatctgcatgctaagaacttagttacttaactctgtttcctcatgttaatataaacataattatagaatgcaaatgaaatacttagcctggagcctattatataggaagcactcaataatttcaaactattgagtatattattagataggctccataattatttattcctttttcaacagacagtatgatctattgaaaataaagccaaactagatttctttgacccactcctttttctgtttgtattgttggcaagttgttctaaatcaacttgccaacatactattaacatgttattaacatagaagggatgcttattttgtttgctttgtaagaaatgcttctgattcagtaactgggcaatttatttaaatataagtaaaaagcagattttattaaaaactactttgtgctatcataaataa

SEQ ID NO: 7959 - DNA, 1424 bp, Homo sapiens
agaaggagttgagtgatggtagatatcaggccctggtctgcggttggaagtttcctgtgaataagaaaaacatcatcgcttcttgagtcacaaggatgataggatgagaaaaagaaaggacaaaggcaccagaggaggtaagaacatatgagaggcaggctgagaccaattttctaccaggccagctaattcatcacaatgacaagctatgggtcatatgctttcaggaaccagacactggaacatgtcgtctgatgtacatcacaccaagaaataaaaaaagaattggaaagccaatgtccaattatttactaaaacagaatccactggagagaaatgcaaaggcaggtaaaaaggcaatctcttaacatgaaaactcacaactgtaaaatgagaacctaaactatacagcgacaaactcaggaaaaagtctccagctactgctgtctctcagactctcacagtatgtgtaaccacttcctcctctgcacggaatcaccccagaagatcaactctactagatcatttgaggacaatgaacaaagtctcaagactgaattcccacagaaaacattctcatgaaaccacccaatattctggtgaagttaaagaagggcatgtgttcggagacaaccagaagcagcaatgctcaaaaccacaaaactctggattgccgactctgcacatcctggttcctctagatacagttcagtggcacattcacaaataaacgttttcaaaaactgccctcaggcagttctagagaaatgctttgacttgcctaatggtataatgtcaagaaaggaagaccagcactgatcattcatactcattattacagtcacagggcactgtctgacttgacagatacagccgagcagttaaaaaggttatgggaatttaagtccattatggtcatacgattcttatggacccagagatatgaaattaatcagccacatgtgtagggacaaagtttgtcataaatagatataagttatctgcatgctaagaacttagttacttaactctgtttcctcatgttaatataaacataattatagaatgcaaatgaaatacttagcctggagcctattatataggaagcactcaataatttcaaactattgagtatattattagataggctccataattatttattcctttttcaacagacagtatgatctattgaaaataaagccaaactagatttctttgacccactcctttttctgtttgtattgttggcaagttgttctaaatcaacttgccaacatactattaacatgttattaacatagaagggatgcttattttgtttgctttgtaagaaatgcttctgattcagtaactgggcaatttatttaaatataagtaaaaagcagattttattaaaaactactttgtgctatcataaataa

SEQ ID NO: 7960 - DNA, 294 bp, Homo sapiens
ctttttcggaaaatgaatgattattcaaaaagctctaaactatgtccctgtatagtcagacatatatatttatcaacaaaacaatgtccctgtagcaccagatatacatatctggtcatttaaatatatatctatatagagaaatagatacatttacatatcaaataacaagtaaaaaaaaaagaaaaactaacataaattaaggcaaaaataaaatagtgccacagtattttgggaattaatattcatcaaactgttgcccacatagtggtagaaatgaggcaactaacctta

SEQ ID NO: 7961 - DNA, 433 bp, Homo sapiens
aattattattactgaggggcaaggaaatcagaggttagatccagcttcaccatatgctagctctgtgatccatatcttcgttccacctgtaaagtgggaatagtaattgtgaagacaaattagatcttagataacaccataaagcactacacatcatagggtattctgatcttttaagtttcttctggactgggcacggtggctcacatctgtaatcccagcactttgggaggccaaggtgggcggatcacctgaggtcaggagtttgagaccagcctggccaacatggcaaaaccctgtctctactgaaagtacaaaaattagccagatgtggtggcgggcgcctgtaatcccagctactcaggaggctgaggcaggagaatcgcttgaacccaggaggcggaggttgcagcaaaccaaaatcatgccaccg

SEQ ID NO: 7962 - DNA, 423 bp, Homo sapiens
ttttttccttgtcatttttctctacttaattttggacacattctattgctacgtcttcaagttcactgatgatttcttcttcagtgtctaatttgctgttaatcacatccagtgatattttcatctcagagattatattttctgttatagaagtttcatttggctcttttcactagtttccatttctctcttcactaagctcatatgttccttaaaatttgtgtatatagttataatagctgttttagtatccttttcctgctagtttcatcatttctgatatttttggatctgtttctctgaaatgatttccccattggtaaaggttaccttttcctattttgtggaatgtttagagattttttataattgaatgctggacgttgcgatatttcaatgctgagtgtctggactttgtctttc

SEQ ID NO: 7963 - DNA, 943 bp, Homo sapiens
ctgggatctgggtatcacaggtagcattttatagcatcagacatgttccagtgactaactcttggctgccccatccccagacactttcctgcagtgggttggggctggggaggttgtggagctcactgatgcacattttgcagtttggctcaatgggtccacaggccttacataacctaaactccctgacttttcatcacttcctgcagaatgtgatgtgggtgggctgagggattcaagtagagactagtgggtgatacttaaacttgctcaaagggaacatcttttagggagccttctagagtgccacaaaattgggctatgactgtttctgccatctgagagagggctatcactctttctattatcttaacaagcagaagatatatttctattgtaagtagtgaagctcttcgtatcttaacattgaataatgtaggtacagtggtgtaatctcggcccactgtaacctctgcctcccgggttaaggcaattcttgtgcctcagcctccccagtagctaggattacaggtgcacaccaccacacctggctaatttttgtatttttagtagagacggggtttcaccatgttggccaggctggtctcgaactcctggcctcaagtgatccacccacctaggccttccagagttttgggattataggcatgagccaccacgcctggctctaataatgtaaaaattttaatgagtcatatttctagaattttgtttaaacacacaaattatgtgtgtgtgtgtgtgtgtgtgtgtgtgtgtgtgtgtgtttgactctctgttgccgtgagttcttgtttgaccatgtggtggtatgtgctagggtttggagaaattaatgggaaaaagagtatatgtcacatttaagtagtttttttccttctaagaattgggaaaaggcctccattgtttgattttcatggtg

SEQ ID NO: 7964 - DNA, 654 bp, Homo sapiens
ggcgcggtggctcacgcctgtaatcccggcactttgggaggctgaggcagacggatcacgaggtcaggagatcgagaacatcctggctaacatggtgaaaccccatctctactaaaaatacaaaaaattagcggggcgtggtggcgggcgcctgtagtcccagctactcaggaggctgaggcaggagaatggcgtgaacctgggaagcggagcttgcagtgggcggagatcacgccactgccctccagcctgggctacagaacaagactccgtctcaaaagaaaaaaagaaattaaatctctttaagatagggtataaacacagctttccaacaccagtgatttagtaattattccacatagagatatctgggtagaagaaataattaataaaggtcttcaaattcaggccaatagtcatattgtttattatacaaaaaataatcctctctgcacccccctccccacagtctgtggggccagattttttaagatctttatacaagaagcaagttcaccccagaggagaaaaaaaatcagaagataaatactaatccaaactaatttcctacagcttgagctcctttgaaattttatgatcagtaagagggctgaatccccagcaatatattattctagttcctctctcttaaca

SEQ ID NO: 7965 - DNA, 596 bp, Homo sapiens
ggcgcggtggctcacgcctgtaatcccggcactttgggaggctgaggcagacggatcacgaggtcaggagatcgagaacatcctggctaacatggtgaaaccccatctctactaaaaatacaaaaaattagcggggcgtggtggcgggcgcctgtagtcccagctactcaggaggctgaggcaggagaatggcgtgaacctgggaagcggagcttgcagtgggcggagatcacgccactgccctccagcctgggctacagaacaagactccgtctcaaaagaaaaaaagaaattaaatctctttaagatagggtataaacacagctttccaacaccagtgatttagtaattattccacatagagatatctgggtagaagaaataattaataaaggtcttcaaattcaggccaatagtcatattgtttattatacaaaaaataatcctctctgcacccccctccccacagtctgtggggccagattttttaagatctttatacaagaagcaagttcaccccagaggagtgaaattttatgatcagtaagagggctgaatccccagcaatatattattctagttcctctctcttaaca

SEQ ID NO: 7966 - DNA, 225 bp, Homo sapiens
gctgaacttaatggagcatcagaatgaatgacccagatcactagaaataatttgagagaatgtttagactatatatatatatttcctatggaaagaaaatgtttaccttgatcccttcctttgggtgaaaatagaagaactattattttgagaggaagttcatatcagtggggttggcttcagagtcatcaatgactcctctctgtttcttgcaacagaatttgc

SEQ ID NO: 7967 - DNA, 455 bp, Homo sapiens
ccttggtggctttggggcccttctagggaagcccctgcttcttcctagttttcaaaatcctgggagagaatctgattggctcagtatcagtcaggtatgactgtgtttggatcagtcagccctgggagagaagaggagaaataacacatagggcaaacaaaccaatttgtgtctactgtcatagaataatatttttagtaaccatcagatggggaaggcctttctaagctacttagaagatttagatgccagaatggaaaagtttgaaagatagcaaatatattaaaatgtgaaacatctttgtgacaaatgatgtcgtaaaaaagtggccaactgggagaatctatttgccataggtagacaaagaatgttccagaatatacaaacctgtgagtaaaaggtaaacaatccagtcaagaaactggcaatttacagaagaaatacagatggtctat

SEQ ID NO: 7968 - DNA, 430 bp, Homo sapiens
attcgcggccgcgtcgacctggagtgcagtggcacagtctcgactcactgcaacctcagcctgggagacagagcgagactctgtctcaacaacaacaacaaataaaaaaataaaaagtattcgtcaatttatataagaaactattattaactgttctttatagtgagaataataaactacagcacggttccaatgtcatgggtgagaaattatgattgattcatgcagtgaattatgaaattatggaaaagacggaggaggttatagatttacaatgttacttgacctgaaaaaagtccataatattttcttaaataaaatgagcaagttgcagaataacgtgtacaatattttagttgcattattttaaaaagggacacacccttttctatacctcgtcgacgcggccgcgaatttagtagtagtagta

SEQ ID NO: 7969 - DNA, 384 bp, Homo sapiens
tctggctgctttcaagatttttttcttcagttttcataaatttaattataacctgtcttagagtgttttttgaaggggtttatcctgtttggagcttgttcagcttcttgaatcctggttgatgtagcttgttaaatttgggatatatttggaggtcatttctgtgaatactttttaagccctgctctttcttcactccttgcagaactccagtgccatgacatcattttttatagtcctacgggtccttgagactttgcgctttttttttccccagtgtatttttttgttgttcagattgggtaatttctgttgttctttcagttcactgactcttttctttgtcccttccattctgctatggaaagcccatccattgaactt

SEQ ID NO: 7970 - DNA, 384 bp, Homo sapiens
caaactctgtaataactgaattggctgcataattctttatttaaaaaaaaaaacagttactcactgtagagtaacatagaaagcaagtctgtgtatcccaaactggaaggaatagaaaatattctcagccctggccaacacactagactgcttttctgacagtgctggagtggatgttgagatgtggataactaaaaggatgacagaatgtgaattttaaaagattttgctacttacaggtttttattgtttgattcctaaccccaccccctccataaaccccaaaaggtatatattctacaattaggtggaaggaaagaggaaggaagggaaggagaaaaggaagaaaggatggagagagagaggaaggaagattcacaacta

SEQ ID NO: 7971 - DNA, 991 bp, Homo sapiens
tttttgtttccttactccaaaatggtaatgatcatactactacccacctgggtggattggtgtgcatatgaaggaggtcatggggacaagtggttggaagagtgttgagcacatagaaagtacaagataaatggtggccattatgttactacttagactatatcatacttgtctttatctgggcttagaatcttgacactgagatctttcattctcagatcttaatatgaaagcttaccaggtaaacactaccccaacataattatttagtgggttcatacatgtgaaagcagttgaaatacaatttctgaactccgggttaatttatatccttagttggaacaggtagtaccctcccagcacctaaggcctctcacttctatccattcttcagatgacctttgcaataatcatggtaattgaatagcatctgcaccataacattgttgaataacatcaaaatgatccatttagccatcatgagccttcctagtaattcagactcacaccagttctttcaggttattgagtagcttttacaaataattgctaacagtacaaatactgtctcaggtattttggaagggtgaattttcccattgatttcagtgtatctttaggaggtaatttgcaaaaccgaagagtttggttccgtcaaagtcacccctaaggagtgtggaggaccacattgtaggtttatactgcactgtccctcacgcttgaaatttggctcatgcaaccaaggaactgaatttttaatttcgttaaattttgatttaaattttaaaacagaaatagtataaaatatttttctgttaaatataccttgtagtgttggcaagactacatttcgtgttaccatgctgggtaagatttcttgtagtgtgtattgtgttttgtcacctcgttaataattttcttattttggttgcatgttaaaataattttggatatattgggttaaataaatatattgttaaaattaaattca

SEQ ID NO: 7972 - DNA, 1192 bp, Homo sapiens
cggcgccaccctggccccctgctgtagctgccgcgttggttgtggtggctgggggtggtactggtgggggtgggtcccagctgcacactggcgagtgagtcggcctcttgaactgctcaggaaacatccccagatggagagagagaaacaggcagtgggtgagaccagagctcccacctgaacacagtccccagcacagcatttttgactgcaccccgagtcccaccagggcccctgtaccacttctacagcccacaggatcaggcccactcatctctactaggcaaagattccagggcaggcccagctggaaggaggcggcacccccagcccagtgtaatcaagtcaacagccagaccaaaacctgtgatcagccaacaaagtgcgcactcaaaagttctgggccaccaaaccatactgagcctgaacaggggcagggagaatgtctgagaggatatggccattgaagacggggaagaaagaacaaaggctgcatcttctggaagagaccacaaccagggcaagcactccagggagcctacgagggggctctgcggggatgagcccatgggaggctggggtgtaggagtgctcagaacaacaactctgggacacaagaagctacaggcaccaacagtgaggtctcagaagggtcccagctggtggcctccaaattctccatactgcagaaccccaatctgctcaaaatccttgaatggtttctgattgctcttaagctgaagaccaacattctctcccttcccctaggtctaaaataaacacatactccccacctctggggcaccaagagttgcagccacaccaggctggtctgttgcctcacatgcactgcactccctcttgccacagggcccttgctcctgctgcctgcactgccctccccctcgcccccctcagtgatcaactcccactcatcctgcagatttcagcttggatgtcacctcccgagggacgctgtgcctgcctccctcgtcagagcaggtgttgtcatctactcacagaatctggcttccttccacaaagcacccccgtgagcatctgtttaacattgtctctccacctagactgtaaggtccgtgaaagcagggaccacacccatttgtgctcacttgggacctacagcctctaatccagagcctgacacaaacctcaataaatatttaagaactga

SEQ ID NO: 7973 - DNA, 1084 bp, Homo sapiens
agggtaaaaggccgcccaggaaccacttggtgatggccataggtgtttcctgaagaacaaagctcccacctgaacacagtccccagcacagcatttttgactgcaccccgagtcccaccagggcccctgtaccacttctacagcccacaggatcaggcccactcatctctactaggcaaagattccagggcaggcccagctggaaggaggcggcacccccagcccagtgtaatcaagtcaacagccagaccaaaacctgtgatcagccaacaaagtgcgcactcaaaagttctgggccaccaaaccatactgagcctgaacaggggcagggagaatgtctgagaggatatggccattgaagacggggaagaaagaacaaaggctgcatcttctggaagagaccacaaccagggcaagcactccagggagcctacgagggggctctgcggggatgagcccatgggaggctggggtgtaggagtgctcagaacaacaactctgggacacaagaagctacaggcaccaacagtgaggtctcagaagggtcccagctggtggcctccaaattctccatactgcagaaccccaatctgctcaaaatccttgaatggtttctgattgctcttaagctgaagaccaacattctctcccttcccctaggtctaaaataaacacatactccccacctctggggcaccaagagttgcagccacaccaggctggtctgttgcctcacatgcactgcactccctcttgccacagggcccttgctcctgctgcctgcactgccctccccctcgcccccctcagtgatcaactcccactcatcctgcagatttcagcttggatgtcacctcccgagggacgctgtgcctgcctccctcgtcagagcaggtgttgtcatctactcacagaatctggcttccttccacaaagcacccccgtgagcatctgtttaacattgtctctccacctagactgtaaggtccgtgaaagcagggaccacacccatttgtgctcacttgggacctacagcctctaatccagagcctgacacaaacctcaataaatatttaagaactga

SEQ ID NO: 7974 - DNA, 414 bp, Homo sapiens
gtgctgttagcccagtaactaaaagttcctaggttttagttcgtaccgtgagacaaaaatttatgtatttgaatttgataatctctttctttaatattactaatgcatcagaaacactgacttctactgatagtcactgaattgtttgaattcttcactggtggtggcaacattgtctcctagagctttatatcctgttgggcagttgagctcaggtgaccaaggaagataatttaattaccatttagtcattttacgccatatacttctacattatcttcccaaaatattaaggacactttcatggctttatgtaacaccctacttcctgattccaaattctttcagttaagatgcttttgattgcaaatataacagaaaacaatactggtttccttcagcaaaaaaaaaaaa

SEQ ID NO: 7975 - DNA, 6294 bp, Homo sapiens
ggacgcgggacccgtacagcggcctccgccgcaccgggacagcagccgccgccgctgccgccgtcctcccctgtctacccggagctgtctcgagctgagccccctaccgggccggatcccgagataaagcctagccatggctgctgtttattctggcatttcccttaagcttaaaagcaagacaacttcctgggaagataaactaaaactagctcactttgcttggatttctcaccagtgctttcttccaaataaagaacaagtgttacttgattgggcaagacaatcattggttgcattttataagaaaaagcttgaactgaaggaagatattgttgaaaggctttggatctatatagataacattttacatagcagaaaattgcagaatctcctcaagaatggaaagaccattaatcttcagatttccctagtcaagatcatcaatgagagagtagctgagttctctctttcgggatcccaaagaaacatctgtgctgtccttcgatgttgccagggcatcctgtcgacacctgccctggctgtcatctacacggccaaacaggagctgatggtggccttgctgagccagctttgctggtcggcctgcaggcagcccgaaggagctgtggtagcccagttgtttgaggtcattcacctggcccttggccattatctcttgatcctgcagcagcaggtcaacccaagacgtgcctttggggatgtgactgctcacctgctccagccgtgcctggtcctgaggcacttactctctgggggcacatggacgcaggctggccagggccagctgaggcaggtgctgagccgggacatcaggagtcagattgaggccatgttccgaggagggatttttcagcctgagctactgtcatcctacaaggaggggctcttggaccagcagcaaggggatgtgaagacgggagccatgaagaaccttctggctcccatggacaccgtgcttaacaggctggttgatgctggctactgtgcagcatcccttcatacctctgttgtggccaactcagtggccttgctgtataagctctttctagattcttactttaaggagggaaaccagcttctctgcttccaggttctccccaggttgtttggctgcttgaagatttcacacctgcaggaggagcagagcaaagccctgtccacatcagattggaccacagagcttttggttgtggaacagctactaaactcagtggccaacaacaatatctacaacatcgctgccgacagaattcggcacgaagaggctcagttccgcttttaccgccacgtggctgagctgctgataaaccatgcacaagcacccataccggcctggttccgctgtctgaagactttgatatctctgaatcatttgattttggagccagacctggatgacctgctggcttcagcgtggatcgatgccgaggtaacagagtttcgaaccaaaaaagcccaggaggcgcttattcgtactgtcttccagacttatgccaaactccgacaagtgccacggttgtttgaagaggttttgggggtgatctgtcgtccagctgctgaggcactgaggcagcctgtgctggcctcgggcccctccacggtactctctgcatgcctcctggagctgcctccaagtcagatcctggacacgtggtcccttgtgctggagaagttccagtctttagtcttgccctatttgcagagtgatgccgacatggccctgaaattactgtcactgagcttgctgctgcactgcatcatgttcaacatgaggagcctggacagcagcacgcctctgcccattgtcagacggacacagtgcatgatggagaggatgatgagggagctcgtgcagcccctgctggcccttctcccggacaccccaggcccagagccagagctgtggctgcagaaggtcagtgactctgtgctcctgctctcttacacttgggcccaggtggacgctatgttcagtttgaactgtagccagtatcactctatgtctgggccccttataggtgttgctctggagatctcgaacctcccttcgttgctcccaggtgtaaaaacacagcattggaagaagatagagaagtttacagctcagttcagctctcttggtacatattgcttagaacagctgtacctgcagaaaatgaaaaggactttaatgcaaactagtttccggtctgaaggagccatccaaagtttgaggtgcgatgctgcctttattattggttccggcagaaaaagcttgaatcagagaacgacggcttcctgggatggccaagttgggatggtgagtggactcacataccctgtagcacactggcacttgattgtgtcaaatctcacaattttaatatcctatctgtgtccagatgatgtgggatacctggccagtgtcctgctgagaactttacccatgggcaaagcccaggaagtctcaatagatgaagaggcatacatcacactggaaaaaatatccaaagccttccttcatagccctctctttccagagatgcagtcccttcattctgctttcttaacgtgcgtaaccacaagttgctccagcattctgtgttctggtgcccagcgtgactcaggtcttgtcagtcagcagcttccctggctttttgaaaaggaccacatggttgtgggtcattgggaaaacagatttgcaaaagctggacccgaaggtatagaacctagaggagaaattgcccagaacttactgtccctggtcaagagtgacttccctatccagctggagggagagcagttggaaagcatcctggggcttttggaagtgatttctgccttacagctggacagcctcttgccaccctatcatgtgcattattttcttgtgttactgtccatggccgtcaccaaactaggatgctcttgctcctcctcactggctctcaagttcttgacgacttgctaccaacttcttggttacttgcaaaaggggaaaagtgctcgctctgtgttcaagatcatgtatggtagtgatatttttgaggttgtactgacctcattgttcagagctagtagtaggttccttattgagatggatgatcccgcttggctggaattcctccaagtgatagggacgttcttagaggagctaatgcagatgctcatccaaatgaagctgagcttggtgctcaattttagaaaaatcaccgcattcctctctagttccaaaccatacacggaggcagcttcaagcaaacaattagaaaatcagaacccccagggcaggcagctccttctggtgtctttaaccaggttgtgccatgtcctgggacctttcctcaaagagcagaagctgggccaagaggccccagcagcactgtctgagctgctgcagcaggttgtgctgcagacaggagctgtgctgcagctctgctcagtgccgggggcccggggctggcgccttccctcggtcctcatctcatccgtcagcacgctcttggaagccgacctgggtcagcactgcagggatggaggggccgacatttcccaaggaagcgacaggacgctgctctcccatgttgccctctaccagggtgtttactctcagatactgttggagttgccagctctcgcgggacatgatcagtcttttcaggcagccttgcagtttttgactctgttctttttggccccagaactgcatcccaaaaaggactccgtgtttacctccatgtttcattctgtgagaagagttcttgcagatcctgaaattcctgttcaggtcactcaggatattgagcctcatttgggagccttgttcacccaaatgttagaggttgggacgacagaggacttgaggctggtgatgcagtgtattctccagggactggatgtcagtaacatgtggaaagcagatgtgcaggctgttgtgtcagctgttacactgctgaggctgctactgaactgcccactcagtggagagaaagcaagtctgttgtggcgtgcgtgtccccagatagtcacagctttaacactcttaaaccgagaagcttctcaggagcagcctgtgtccctcacagtggtcgggcctgtcttagatgtcctggctgcactgctgcggcagggggaggaggccatcggcaacccccaccacgtcagcctggccttcagcatccttctcactgtccctttggaccatctgaagccgctggagtatggaagcgtcttcccgaggctgcacaacgtgctcttctcaatcctgcagtgtcaccctaaggtaatgctgaaagccatcccttctttcttgaactctttcaatagattggtgttttcagttatgcgggaagggcggcagaaggacaaaggaagcatagatgacctgcctacggtcctaaagtgtgcacgcctggttgaaaggatgtacagccacatcgccgcacgagctgaggagtttgctgtgttttccccatttatggtggcccagtacgtgttggaggtacagaaggtgaccttatatccagctgtgaaaagtctgctgcaggagggcatttacctcatcctggacctctgcatcgagcctgacgtccagttcctgcgggcctcgctgcagccgggaatgagagacatctttaaggagctctataatgactatctcaagtaccacaaggccaaacatgaaggagagaaaagatatacggcctaaggctatgggacagaagtgccgccagtgacactgtccagaggctttggctgcatggtctgaaagagctggagaatgaaagacttaagatgttctaattcgtagtattggtatacatagaaaatcctttggggtttatgtagtatattttgatgtattttacatcgtgtttttcttactattttttaatacatagttttatgcagtaagtattgcaatagaatcctgaaaattgaccctgggatgagattaattcaatagaaaaattgctgactcttgggacctttctgtgtttggttctcgtcttggctcagtggtttggtgttccctcgtctgcactggaaactacataaaacttggctttttactttgggtacatgggcgtataattcagccctgtttaaatatacttgcctttcaaattcttcaagtaacatgggaagtattcttgaaatgtcacattttctgccttccctctaagtatgctttctgaagaagtcagggaaagttagagtctgtggcctgaggtgtctgctctgggtggcgatagtgggcacctcaggcaggtcggtgacgtttagcacaggtgccagggctcctgcctgctcctcctgtgttagctctgtgaagttcatttaggaatttttttttcctatgcagtttaagaaataatcctaattgttttttcttattacctaagcaatatatttttattatagcaacctcagaaaagaaaaataaaaggataatttaaaaaactcattcatagtctcagttacccagataacctcggttgtcaccttggagtatcttgttgtagtccctttactatgtgtatgtatatagatgtgcatataaatatatatagtagctaaattggatcataaatgcatttttttaaagttaccttttttcctgtgtaatattaagtaactctgggtcagtgaaaacattcgacatatattttttttggctgcatagtagtccattgagtagatattgttgttttatttaataagtacaccatggttagacataggtatctgtccaaattcccttttatagatggtgcttgcagctgaattattttcagaagatgaattctcatgagttgtattatttgtcagaaaaccacatcatttttaaaggatttatataaatattgccaaattgccccctagaatattactaatttattttcctactagtgagtcaactttaatattattgatttttgtttctttatgcttccttgataggagagagatgttattctgttttgaatttctttaattactaagagattatacatttttcacatttaccatttttatttcttatgtaaattatgtttatataattatctttcttctgtaatagcacatttctcaattgggatatttaccatttttcttattcactgtctttgggggaatcatgttggaattccctttttaattagttcaaaatgcagacttttgaagttatttgaaggatcatccttaagcaaaggctttttttttttaacactgtattttcaagcagatgtgattggagcagacaatataaaatgaatgtctttgata

SEQ ID NO: 7976 - DNA, 906 bp, Homo sapiens
ccaatgatacttgaatatattaattagtactgttcctattattgtttgtttctacccatttccagaatggattagcaccagcttagagtaaaaggtacagactcagcaaattccaaaccaggattgccccatagacctcctgaagttacgcagtgtgggttctctaccctagatagttaaaacaagggtcaaagagtctaatacaagatgggtgagcagtgacagcagcatgtccaggcgaaaggatgtggctatccctgggcacacacaactggtttgagtgtcccgatagactaggctaagaaagaaataagtatgagctcctttaaagtagaaaaacttaaataatcacgtatgtacttttacattctgttatctgtcattacaggtaatgctgaaagccatcccttctttcttgaactctttcaatagattggtgttttcagttatgcgggaagggcggcagaaggacaaaggaagcatagatgacctgcctacggtcctaaagtgtgcacgcctggttgaaaggatgtacagccacatcgccgcacgagctgaggagtttgctgtgttttccccatttatggtggcccagtacgtgttggaggtacagaaggtaaaattgggttcaatgtctttcaccaagtactgtgtttatggtccttaagcagggtttctcaaccaaaatggcaagcggtgttctggatctgacagttctctgttgctgtgtgcaagttttagacagggttttgctctctcactcaggctggagtgcattagtgcgatgatagcacactacagcctcgaactcctgggctcaaatgttcctcccgcctcagcctcccaagtagctaggactacaggcatgtactactccactcagctaatttttaaatttttgtagag

SEQ ID NO: 7977 - DNA, 5470 bp, Homo sapiens
ggacgcgggacccgtacagcggcctccgccgcaccgggacagcagccgccgccgctgccgccgtcctcccctgtctacccggagctgtctcgagctgagccccctaccgggccggatcccgagataaagcctagccatggctgctgtttattctggcatttcccttaagcttaaaagcaagacaacttcctgggaagataaactaaaactagctcactttgcttggatttctcaccagtgctttcttccaaataaagaacaagtgttacttgattgggcaagacaatcattggttgcattttataagaaaaagcttgaactgaaggaagatattgttgaaaggctttggatctatatagataacattttacatagcagaaaattgcagaatctcctcaagaatggaaagaccattaatcttcagatttccctagtcaagatcatcaatgagagagtagctgagttctctctttcgggatcccaaagaaacatctgtgctgtccttcgatgttgccagggcatcctgtcgacacctgccctggctgtcatctacacggccaaacaggagctgatggtggccttgctgagccagctttgctggtcggcctgcaggcagcccgaaggagctgtggtagcccagttgtttgaggtcattcacctggcccttggccattatctcttgatcctgcagcagcaggtcaacccaagacgtgcctttggggatgtgactgctcacctgctccagccgtgcctggtcctgaggcacttactctctgggggcacatggacgcaggctggccagggccagctgaggcaggtgctgagccgggacatcaggagtcagattgaggccatgttccgaggagggatttttcagcctgagctactgtcatcctacaaggaggggctcttggaccagcagcaaggggatgtgaagacgggagccatgaagaaccttctggctcccatggacaccgtgcttaacaggctggttgatgctggctactgtgcagcatcccttcatacctctgttgtggccaactcagtggccttgctgtataagctctttctagattcttactttaaggagggaaaccagcttctctgcttccaggttctccccaggttgtttggctgcttgaagatttcacacctgcaggaggagcagagcaaagccctgtccacatcagattggaccacagagcttttggttgtggaacagctactaaactcagtggccaacaacaatatctacaacatcgctgccgacagaattcggcacgaagaggctcagttccgcttttaccgccacgtggctgagctgctgataaaccatgcacaagcacccataccggcctggttccgctgtctgaagactttgatatctctgaatcatttgattttggagccagacctggatgacctgctggcttcagcgtggatcgatgccgaggtaacagagtttcgaaccaaaaaagcccaggaggcgcttattcgtactgtcttccagacttatgccaaactccgacaagtgccacggttgtttgaagaggttttgggggtgatctgtcgtccagctgctgaggcactgaggcagcctgtgctggcctcgggcccctccacggtactctctgcatgcctcctggagctgcctccaagtcagatcctggacacgtggtcccttgtgctggagaagttccagtctttagtcttgccctatttgcagagtgatgccgacatggccctgaaattactgtcactgagcttgctgctgcactgcatcatgttcaacatgaggagcctggacagcagcacgcctctgcccattgtcagacggacacagtgcatgatggagaggatgatgagggagctcgtgcagcccctgctggcccttctcccggacaccccaggcccagagccagagctgtggctgcagaaggtcagtgactctgtgctcctgctctcttacacttgggcccaggtggacgctatgttcagtttgaactgtagccagtatcactctatgtctgggccccttataggtgttgctctggagatctcgaacctcccttcgttgctcccaggtgtaaaaacacagcattggaagaagatagagaagtttacagctcagttcagctctcttggtacatattgcttagaacagctgtacctgcagaaaatgaaaaggactttaatgcaaactagtttccggtctgaaggagccatccaaagtttgaggtgcgatgctgcctttattattggttccggcagaaaaagcttgaatcagagaacgacggcttcctgggatggccaagttgggatggtgagtggactcacataccctgtagcacactggcacttgattgtgtcaaatctcacaattttaatatcctatctgtgtccagatgatgtgggatacctggccagtgtcctgctgagaactttacccatgggcaaagcccaggaagtctcaatagatgaagaggcatacatcacactggaaaaaatatccaaagccttccttcatagccctctctttccagagatgcagtcccttcattctgctttcttaacgtgcgtaaccacaagttgctccagcattctgtgttctggtgcccagcgtgactcaggtcttgtcagtcagcagcttccctggctttttgaaaaggaccacatggttgtgggtcattgggaaaacagatttgcaaaagctggacccgaaggtatagaacctagaggagaaattgcccagaacttactgtccctggtcaagagtgacttccctatccagctggagggagagcagttggaaagcatcctggggcttttggaagtgatttctgccttacagctggacagcctcttgccaccctatcatgtgcattattttcttgtgttactgtccatggccgtcaccaaactaggatgctcttgctcctcctcactggctctcaagttcttgacgacttgctaccaacttcttggttacttgcaaaaggggaaaagtgctcgctctgtgttcaagatcatgtatggtagtgatatttttgaggttgtactgacctcattgttcagagctagtagtaggttccttattgagatggatgatcccgcttggctggaattcctccaagtgatagggacgttcttagaggagctaatgcagatgctcatccaaatgaagctgagcttggtgctcaattttagaaaaatcaccgcattcctctctagttccaaaccatacacggaggcagcttcaagcaaacaattagaaaatcagaacccccagggcaggcagctccttctggtgtctttaaccaggttgtgccatgtcctgggacctttcctcaaagagcagaagctgggccaagaggccccagcagcactgtctgagctgctgcagcaggttgtgctgcagacaggagctgtgctgcagctctgctcagtgccgggggcccggggctggcgccttccctcggtcctcatctcatccgtcagcacgctcttggaagccgacctgggtcagcactgcagggatggaggggccgacatttcccaaggaagcgacaggacgctgctctcccatgttgccctctaccagggtgtttactctcagatactgttggagttgccagctctcgcgggacatgatcagtcttttcaggcagccttgcagtttttgactctgttctttttggccccagaactgcatcccaaaaaggactccgtgtttacctccatgtttcattctgtgagaagagttcttgcagatcctgaaattcctgttcaggtcactcaggatattgagcctcatttgggagccttgttcacccaaatgttagaggttgggacgacagaggacttgaggctggtgatgcagtgtattctccagggactggatgtcagtaacatgtggaaagcagatgtgcaggctgttgtgtcagctgttacactgctgaggctgctactgaactgcccactcagtggagagaaagcaagtctgttgtggcgtgcgtgtccccagatagtcacagctttaacactcttaaaccgagaagcttctcaggagcagcctgtgtccctcacagtggtcgggcctgtcttagatgtcctggctgcactgctgcggcagggggaggaggccatcggcaacccccaccacgtcagcctggccttcagcatccttctcactgtccctttggaccatctgaagccgctggagtatggaagcgtcttcccgaggctgcacaacgtgctcttctcaatcctgcagtgtcaccctaaggtaatgctgaaagccatcccttctttcttgaactctttcaatagattggtgttttcagttatgcgggaagggcggcagaaggacaaaggaagcatagatgacctgcctacggtcctaaagtgtgcacgcctggttgaaaggatgtacagccacatcgccgcacgagctgaggagtttgctgtgttttccccatttatggtggcccagtacgtgttggaggtacagaaggtgaccttatatccagctgtgaaaagtctgctgcaggagggcatttacctcatcctggacctctgcatcgagcctgacgtccagttcctgcgggcctcgctgcagccgggaatgagagacatctttaaggagctctataatgactatctcaagtaccacaaggccaaacatgaaggagagaaaagatatacggcctaaggctatgggacagaagtgccgccagtgacactgtccagaggctttggctgcatggtctgaaagagctggagaatgaaagacttaagatgttctaattcgtagtattggtatacatagaaaatcctttggggtttatgtagtatattttgatgtattttacatcgtgtttttcttactattttttaatacatagttttatgcagtaagtattgcaatagaatcctgaaaattgaccctgggatgagattaattcaatagaaaaattgctgactcttgggacctttctgtgtttggttctcgtcttggctcagtggtttggtgttccctcgtctgcactggaaactacataaaacttggctttttactttgggtacatgggcgtataattcagccctgtttaaatatacttgcctttcaaattcttcaagtaacatgggaagtattcttgaaatgtcacattttctgccttccctctaagtatgctttctgaagaagtcagggaaagttagagtctgtggcctgaggtgtctgctctgggtggcgatagtgggcacctcaggcaggtcggtgacgtttagcacaggtgccagggctcctgcctgctcctcctgtgttagctctgtgaagttcatttaggaatttttttttcctatgcagtttaagaaataatcctaattgttttttcttattacctaagcaatatatttttattatagcaacctcagaaaagaaaaataaaaggataatttaaaaaactca

SEQ ID NO: 7978 - DNA, 2209 bp, Homo sapiens
aagtaatcctagatttcatcctaaaaatcttgattacttttctggttagactcttaaaaacacccgagcactcttgagttttttaaagtgtccttccctttgttgtgtagataactgtttggacatatctgttctcccttattctgtctgcaaaataagccaattaaagagtctgggaaaacatgtaacacttgagataattttcacccatattaaaagtctaacatagaagagttaaaatgtgctgtttttgaactaattggttgggaaacactttgttgtctgtaggaagcatagatgacctgcctacggtcctaaagtgtgcacgcctggttgaaaggatgtacagccacatcgccgcacgagctgaggagtttgctgtgttttccccatttatggtggcccagtacgtgttggaggtacagaaggtgaccttatatccagctgtgaaaagtctgctgcaggagggcatttacctcatcctggacctctgcatcgagcctgacgtccagttcctgcgggcctcgctgcagccgggaatgagagacatctttaaggagctctataatgactatctcaagtaccacaaggccaaacatgaaggagagaaaagatatacggcctaaggctatgggacagaagtgccgccagtgacactgtccagaggctttggctgcatggtctgaaagagctggagaatgaaagacttaagatgttctaattcgtagtattggtatacatagaaaatcctttggggtttatgtagtatattttgatgtattttacatcgtgtttttcttactattttttaatacatagttttatgcagtaagtattgcaatagaatcctgaaaattgaccctgggatgagattaattcaatagaaaaattgctgactcttgggacctttctgtgtttggttctcgtcttggctcagtggtttggtgttccctcgtctgcactggaaactacataaaacttggctttttactttgggtacatgggcgtataattcagccctgtttaaatatacttgcctttcaaattcttcaagtaacatgggaagtattcttgaaatgtcacattttctgccttccctctaagtatgctttctgaagaagtcagggaaagttagagtctgtggcctgaggtgtctgctctgggtggcgatagtgggcacctcaggcaggtcggtgacgtttagcacaggtgccagggctcctgcctgctcctcctgtgttagctctgtgaagttcatttaggaatttttttttcctatgcagtttaagaaataatcctaattgttttttcttattacctaagcaatatatttttattatagcaacctcagaaaagaaaaataaaaggataatttaaaaaactcattcatagtctcagttacccagataacctcggttgtcaccttggagtatcttgttgtagtccctttactatgtgtatgtatatagatgtgcatataaatatatatagtagctaaattggatcataaatgcatttttttaaagttaccttttttcctgtgtaatattaagtaactctgggtcagtgaaaacattcgacatatattttttttggctgcatagtagtccattgagtagatattgttgttttatttaataagtacaccatggttagacataggtatctgtccaaattcccttttatagatggtgcttgcagctgaattattttcagaagatgaattctcatgagttgtattatttgtcagaaaaccacatcatttttaaaggatttatataaatattgccaaattgccccctagaatattactaatttattttcctactagtgagtcaactttaatattattgatttttgtttctttatgcttccttgataggagagagatgttattctgttttgaatttctttaattactaagagattatacatttttcacatttaccatttttatttcttatgtaaattatgtttatataattatctttcttctgtaatagcacatttctcaattgggatatttaccatttttcttattcactgtctttgggggaatcatgttggaattccctttttaattagttcaaaatgcagacttttgaagttatttgaaggatcatccttaagcaaaggctttttttttttaacactgtattttcaagcagatgtgattggagcagacaatataaaatgaatgtctttgata

SEQ ID NO: 7979 - DNA, 2397 bp, Homo sapiens
ccaatgatacttgaatatattaattagtactgttcctattattgtttgtttctacccatttccagaatggattagcaccagcttagagtaaaaggtacagactcagcaaattccaaaccaggattgccccatagacctcctgaagttacgcagtgtgggttctctaccctagatagttaaaacaagggtcaaagagtctaatacaagatgggtgagcagtgacagcagcatgtccaggcgaaaggatgtggctatccctgggcacacacaactggtttgagtgtcccgatagactaggctaagaaagaaataagtatgagctcctttaaagtagaaaaacttaaataatcacgtatgtacttttacattctgttatctgtcattacaggtaatgctgaaagccatcccttctttcttgaactctttcaatagattggtgttttcagttatgcgggaagggcggcagaaggacaaaggaagcatagatgacctgcctacggtcctaaagtgtgcacgcctggttgaaaggatgtacagccacatcgccgcacgagctgaggagtttgctgtgttttccccatttatggtggcccagtacgtgttggaggtacagaaggtgaccttatatccagctgtgaaaagtctgctgcaggagggcatttacctcatcctggacctctgcatcgagcctgacgtccagttcctgcgggcctcgctgcagccgggaatgagagacatctttaaggagctctataatgactatctcaagtaccacaaggccaaacatgaaggagagaaaagatatacggcctaaggctatgggacagaagtgccgccagtgacactgtccagaggctttggctgcatggtctgaaagagctggagaatgaaagacttaagatgttctaattcgtagtattggtatacatagaaaatcctttggggtttatgtagtatattttgatgtattttacatcgtgtttttcttactattttttaatacatagttttatgcagtaagtattgcaatagaatcctgaaaattgaccctgggatgagattaattcaatagaaaaattgctgactcttgggacctttctgtgtttggttctcgtcttggctcagtggtttggtgttccctcgtctgcactggaaactacataaaacttggctttttactttgggtacatgggcgtataattcagccctgtttaaatatacttgcctttcaaattcttcaagtaacatgggaagtattcttgaaatgtcacattttctgccttccctctaagtatgctttctgaagaagtcagggaaagttagagtctgtggcctgaggtgtctgctctgggtggcgatagtgggcacctcaggcaggtcggtgacgtttagcacaggtgccagggctcctgcctgctcctcctgtgttagctctgtgaagttcatttaggaatttttttttcctatgcagtttaagaaataatcctaattgttttttcttattacctaagcaatatatttttattatagcaacctcagaaaagaaaaataaaaggataatttaaaaaactcattcatagtctcagttacccagataacctcggttgtcaccttggagtatcttgttgtagtccctttactatgtgtatgtatatagatgtgcatataaatatatatagtagctaaattggatcataaatgcatttttttaaagttaccttttttcctgtgtaatattaagtaactctgggtcagtgaaaacattcgacatatattttttttggctgcatagtagtccattgagtagatattgttgttttatttaataagtacaccatggttagacataggtatctgtccaaattcccttttatagatggtgcttgcagctgaattattttcagaagatgaattctcatgagttgtattatttgtcagaaaaccacatcatttttaaaggatttatataaatattgccaaattgccccctagaatattactaatttattttcctactagtgagtcaactttaatattattgatttttgtttctttatgcttccttgataggagagagatgttattctgttttgaatttctttaattactaagagattatacatttttcacatttaccatttttatttcttatgtaaattatgtttatataattatctttcttctgtaatagcacatttctcaattgggatatttaccatttttcttattcactgtctttgggggaatcatgttggaattccctttttaattagttcaaaatgcagacttttgaagttatttgaaggatcatccttaagcaaaggctttttttttttaacactgtattttcaagcagatgtgattggagcagacaatataaaatgaatgtctttgata

SEQ ID NO: 7980 - DNA, 1887 bp, Homo sapiens
gtcagtttgaaattacttgttagtgcttcccaaggcattgttggcaggtggtgcggcttgatctctgcccccaattgttctcacagaggtttgcctttttcctcaggtgaccttatatccagctgtgaaaagtctgctgcaggagggcatttacctcatcctggacctctgcatcgagcctgacgtccagttcctgcgggcctcgctgcagccgggaatgagagacatctttaaggagctctataatgactatctcaagtaccacaaggccaaacatgaaggagagaaaagatatacggcctaaggctatgggacagaagtgccgccagtgacactgtccagaggctttggctgcatggtctgaaagagctggagaatgaaagacttaagatgttctaattcgtagtattggtatacatagaaaatcctttggggtttatgtagtatattttgatgtattttacatcgtgtttttcttactattttttaatacatagttttatgcagtaagtattgcaatagaatcctgaaaattgaccctgggatgagattaattcaatagaaaaattgctgactcttgggacctttctgtgtttggttctcgtcttggctcagtggtttggtgttccctcgtctgcactggaaactacataaaacttggctttttactttgggtacatgggcgtataattcagccctgtttaaatatacttgcctttcaaattcttcaagtaacatgggaagtattcttgaaatgtcacattttctgccttccctctaagtatgctttctgaagaagtcagggaaagttagagtctgtggcctgaggtgtctgctctgggtggcgatagtgggcacctcaggcaggtcggtgacgtttagcacaggtgccagggctcctgcctgctcctcctgtgttagctctgtgaagttcatttaggaatttttttttcctatgcagtttaagaaataatcctaattgttttttcttattacctaagcaatatatttttattatagcaacctcagaaaagaaaaataaaaggataatttaaaaaactcattcatagtctcagttacccagataacctcggttgtcaccttggagtatcttgttgtagtccctttactatgtgtatgtatatagatgtgcatataaatatatatagtagctaaattggatcataaatgcatttttttaaagttaccttttttcctgtgtaatattaagtaactctgggtcagtgaaaacattcgacatatattttttttggctgcatagtagtccattgagtagatattgttgttttatttaataagtacaccatggttagacataggtatctgtccaaattcccttttatagatggtgcttgcagctgaattattttcagaagatgaattctcatgagttgtattatttgtcagaaaaccacatcatttttaaaggatttatataaatattgccaaattgccccctagaatattactaatttattttcctactagtgagtcaactttaatattattgatttttgtttctttatgcttccttgataggagagagatgttattctgttttgaatttctttaattactaagagattatacatttttcacatttaccatttttatttcttatgtaaattatgtttatataattatctttcttctgtaatagcacatttctcaattgggatatttaccatttttcttattcactgtctttgggggaatcatgttggaattccctttttaattagttcaaaatgcagacttttgaagttatttgaaggatcatccttaagcaaaggctttttttttttaacactgtattttcaagcagatgtgattggagcagacaatataaaatgaatgtctttgata

SEQ ID NO: 7981 - DNA, 4990 bp, Homo sapiens
ggacgcgggacccgtacagcggcctccgccgcaccgggacagcagccgccgccgctgccgccgtcctcccctgtctacccggagctgtctcgagctgagccccctaccgggccggatcccgagataaagcctagccatggctgctgtttattctggcatttcccttaagcttaaaagcaagacaacttcctgggaagataaactaaaactagctcactttgcttggatttctcaccagtgctttcttccaaataaagaacaagtgttacttgattgggcaagacaatcattggttgcattttataagaaaaagcttgaactgaaggaagatattgttgaaaggctttggatctatatagataacattttacatagcagaaaattgcagaatctcctcaagaatggaaagaccattaatcttcagatttccctagtcaagatcatcaatgagagagtagctgagttctctctttcgggatcccaaagaaacatctgtgctgtccttcgatgttgccagggcatcctgtcgacacctgccctggctgtcatctacacggccaaacaggagctgatggtggccttgctgagccagctttgctggtcggcctgcaggcagcccgaaggagctgtggtagcccagttgtttgaggtcattcacctggcccttggccattatctcttgatcctgcagcagcaggtcaacccaagacgtgcctttggggatgtgactgctcacctgctccagccgtgcctggtcctgaggcacttactctctgggggcacatggacgcaggctggccagggccagctgaggcaggtgctgagccgggacatcaggagtcagattgaggccatgttccgaggagggatttttcagcctgagctactgtcatcctacaaggaggggctcttggaccagcagcaaggggatgtgaagacgggagccatgaagaaccttctggctcccatggacaccgtgcttaacaggctggttgatgctggctactgtgcagcatcccttcatacctctgttgtggccaactcagtggccttgctgtataagctctttctagattcttactttaaggagggaaaccagcttctctgcttccaggttctccccaggttgtttggctgcttgaagatttcacacctgcaggaggagcagagcaaagccctgtccacatcagattggaccacagagcttttggttgtggaacagctactaaactcagtggccaacaacaatatctacaacatcgctgccgacagaattcggcacgaagaggctcagttccgcttttaccgccacgtggctgagctgctgataaaccatgcacaagcacccataccggcctggttccgctgtctgaagactttgatatctctgaatcatttgattttggagccagacctggatgacctgctggcttcagcgtggatcgatgccgaggtaacagagtttcgaaccaaaaaagcccaggaggcgcttattcgtactgtcttccagacttatgccaaactccgacaagtgccacggttgtttgaagaggttttgggggtgatctgtcgtccagctgctgaggcactgaggcagcctgtgctggcctcgggcccctccacggtactctctgcatgcctcctggagctgcctccaagtcagatcctggacacgtggtcccttgtgctggagaagttccagtctttagtcttgccctatttgcagagtgatgccgacatggccctgaaattactgtcactgagcttgctgctgcactgcatcatgttcaacatgaggagcctggacagcagcacgcctctgcccattgtcagacggacacagtgcatgatggagaggatgatgagggagctcgtgcagcccctgctggcccttctcccggacaccccaggcccagagccagagctgtggctgcagaaggtcagtgactctgtgctcctgctctcttacacttgggcccaggtggacgctatgttcagtttgaactgtagccagtatcactctatgtctgggccccttataggtgttgctctggagatctcgaacctcccttcgttgctcccaggtgtaaaaacacagcattggaagaagatagagaagtttacagctcagttcagctctcttggtacatattgcttagaacagctgtacctgcagaaaatgaaaaggactttaatgcaaactagtttccggtctgaaggagccatccaaagtttgaggtgcgatgctgcctttattattggttccggcagaaaaagcttgaatcagagaacgacggcttcctgggatggccaagttgggatggtgagtggactcacataccctgtagcacactggcacttgattgtgtcaaatctcacaattttaatatcctatctgtgtccagatgatgtgggatacctggccagtgtcctgctgagaactttacccatgggcaaagcccaggaagtctcaatagatgaagaggcatacatcacactggaaaaaatatccaaagccttccttcatagccctctctttccagagatgcagtcccttcattctgctttcttaacgtgcgtaaccacaagttgctccagcattctgtgttctggtgcccagcgtgactcaggtcttgtcagtcagcagcttccctggctttttgaaaaggaccacatggttgtgggtcattgggaaaacagatttgcaaaagctggacccgaaggtatagaacctagaggagaaattgcccagaacttactgtccctggtcaagagtgacttccctatccagctggagggagagcagttggaaagcatcctggggcttttggaagtgatttctgccttacagctggacagcctcttgccaccctatcatgtgcattattttcttgtgttactgtccatggccgtcaccaaactaggatgctcttgctcctcctcactggctctcaagttcttgacgacttgctaccaacttcttggttacttgcaaaaggggaaaagtgctcgctctgtgttcaagatcatgtatggtagtgatatttttgaggttgtactgacctcattgttcagagctagtagtaggttccttattgagatggatgatcccgcttggctggaattcctccaagtgatagggacgttcttagaggagctaatgcagatgctcatccaaatgaagctgagcttggtgctcaattttagaaaaatcaccgcattcctctctagttccaaaccatacacggaggcagcttcaagcaaacaattagaaaatcagaacccccagggcaggcagctccttctggtgtctttaaccaggttgtgccatgtcctgggacctttcctcaaagagcagaagctgggccaagaggccccagcagcactgtctgagctgctgcagcaggttgtgctgcagacaggagctgtgctgcagctctgctcagtgccgggggcccggggctggcgccttccctcggtcctcatctcatccgtcagcacgctcttggaagccgacctgggtcagcactgcagggatggaggggccgacatttcccaaggaagcgacaggacgctgctctcccatgttgccctctaccagggtgtttactctcagatactgttggagttgccagctctcgcgggacatgatcagtcttttcaggcagccttgcagtttttgactctgttctttttggccccagaactgcatcccaaaaaggactccgtgtttacctccatgtttcattctgtgagaagagttcttgcagatcctgaaattcctgttcaggtcactcaggatattgagcctcatttgggagccttgttcacccaaatgttagaggttgggacgacagaggacttgaggctggtgatgcagtgtattctccagggactggatgtcagtaacatgtggaaagcagatgtgcaggctgttgtgtcagctgttacactgctgaggctgctactgaactgcccactcagtggagagaaagcaagtctgttgtggcgtgcgtgtccccagatagtcacagctttaacactcttaaaccgagaagcttctcaggagcagcctgtgtccctcacagtggtcgggcctgtcttagatgtcctggctgcactgctgcggcagggggaggaggccatcggcaacccccaccacgtcagcctggccttcagcatccttctcactgtccctttggaccatctgaagccgctggagtatggaagcgtcttcccgaggctgcacaacgtgctcttctcaatcctgcagtgtcaccctaaggtaatgctgaaagccatcccttctttcttgaactctttcaatagattggtgttttcagttatgcgggaagggcggcagaaggacaaaggaagcatagatgacctgcctacggtcctaaagtgtgcacgcctggttgaaaggatgtacagccacatcgccgcacgagctgaggagtttgctgtgttttccccatttatggtggcccagtacgtgttggaggtacagaaggtgaccttatatccagctgtgaaaagtctgctgcaggagggcatttacctcatcctggacctctgcatcgagcctgacgtccagttcctgcgggcctcgctgcagccgggaatgagagacatctttaaggagctctataatgactatctcaagtaccacaaggccaaacatgaaggagagaaaagatatacggcctaaggctatgggacagaagtgccgccagtgacactgtccagaggctttggctgcatggtctgaaagagctggagaatgaaagacttaagatgttctaattcgtagtattggtatacatagaaaatcctttggggtttatgtagtatattttgatgtattttacatcgtgtttttcttactattttttaatacatagttttatgcagtaagtattgcaatagaatcctgaaaattgaccctgggatgagattaattcaatagaaaaattgctgactcttggga

SEQ ID NO: 7982 - DNA, 6240 bp, Homo sapiens
ggacgcgggacccgtacagcggcctccgccgcaccgggacagcagccgccgccgctgccgccgtcctcccctgtctacccggagctgtctcgagctgagccccctaccgggccggatcccgagataaagcctagccatggctgctgtttattctggcatttcccttaagcttaaaagcaagacaacttcctgggaagataaactaaaactagctcactttgcttggatttctcaccagtgctttcttccaaataaagaacaagtgttacttgattgggcaagacaatcattggttgcattttataagaaaaagcttgaactgaaggaagatattgttgaaaggctttggatctatatagataacattttacatagcagaaaattgcagaatctcctcaagaatggaaagaccattaatcttcagatttccctagtcaagatcatcaatgagagagtagctgagttctctctttcgggatcccaaagaaacatctgtgctgtccttcgatgttgccagggcatcctgtcgacacctgccctggctgtcatctacacggccaaacaggagctgatggtggccttgctgagccagctttgctggtcggcctgcaggcagcccgaaggagctgtggtagcccagttgtttgaggtcattcacctggcccttggccattatctcttgatcctgcagcagcaggtcaacccaagacgtgcctttggggatgtgactgctcacctgctccagccgtgcctggtcctgaggcacttactctctgggggcacatggacgcaggctggccagggccagctgaggcaggtgctgagccgggacatcaggagtcagattgaggccatgttccgaggagggatttttcagcctgagctactgtcatcctacaaggaggggctcttggaccagcagcaaggggatgtgaagacgggagccatgaagaaccttctggctcccatggacaccgtgcttaacaggctggttgatgctggctactgtgcagcatcccttcatacctctgttgtggccaactcagtggccttgctgtataagctctttctagattcttactttaaggagggaaaccagcttctctgcttccaggttctccccaggttgtttggctgcttgaagatttcacacctgcaggaggagcagagcaaagccctgtccacatcagattggaccacagagcttttggttgtggaacagctactaaactcagtggccaacaacaatatctacaacatcgctgccgacagaattcggcacgaagaggctcagttccgcttttaccgccacgtggctgagctgctgataaaccatgcacaagcacccataccggcctggttccgctgtctgaagactttgatatctctgaatcatttgattttggagccagacctggatgacctgctggcttcagcgtggatcgatgccgaggtaacagagtttcgaaccaaaaaagcccaggaggcgcttattcgtactgtcttccagacttatgccaaactccgacaagtgccacggttgtttgaagaggttttgggggtgatctgtcgtccagctgctgaggcactgaggcagcctgtgctggcctcgggcccctccacggtactctctgcatgcctcctggagctgcctccaagtcagatcctggacacgtggtcccttgtgctggagaagttccagtctttagtcttgccctatttgcagagtgatgccgacatggccctgaaattactgtcactgagcttgctgctgcactgcatcatgttcaacatgaggagcctggacagcagcacgcctctgcccattgtcagacggacacagtgcatgatggagaggatgatgagggagctcgtgcagcccctgctggcccttctcccggacaccccaggcccagagccagagctgtggctgcagaaggtcagtgactctgtgctcctgctctcttacacttgggcccaggtggacgctatgttcagtttgaactgtagccagtatcactctatgtctgggccccttataggtgttgctctggagatctcgaacctcccttcgttgctcccaggtgtaaaaacacagcattggaagaagatagagaagtttacagctcagttcagctctcttggtacatattgcttagaacagctgtacctgcagaaaatgaaaaggactttaatgcaaactagtttccggtctgaaggagccatccaaagtttgaggtgcgatgctgcctttattattggttccggcagaaaaagcttgaatcagagaacgacggcttcctgggatggccaagttgggatggtgagtggactcacataccctgtagcacactggcacttgattgtgtcaaatctcacaattttaatatcctatctgtgtccagatgatgtgggatacctggccagtgtcctgctgagaactttacccatgggcaaagcccaggaagtctcaatagatgaagaggcatacatcacactggaaaaaatatccaaagccttccttcatagccctctctttccagagatgcagtcccttcattctgctttcttaacgtgcgtaaccacaagttgctccagcattctgtgttctggtgcccagcgtgactcaggtcttgtcagtcagcagcttccctggctttttgaaaaggaccacatggttgtgggtcattgggaaaacagatttgcaaaagctggacccgaaggtatagaacctagaggagaaattgcccagaacttactgtccctggtcaagagtgacttccctatccagctggagggagagcagttggaaagcatcctggggcttttggaagtgatttctgccttacagctggacagcctcttgccaccctatcatgtgcattattttcttgtgttactgtccatggccgtcaccaaactaggatgctcttgctcctcctcactggctctcaagttcttgacgacttgctaccaacttcttggttacttgcaaaaggggaaaagtgctcgctctgtgttcaagatcatgtatggtagtgatatttttgaggttgtactgacctcattgttcagagctagtagtaggttccttattgagatggatgatcccgcttggctggaattcctccaagtgatagggacgttcttagaggagctaatgcagatgctcatccaaatgaagctgagcttggtgctcaattttagaaaaatcaccgcattcctctctagttccaaaccatacacggaggcagcttcaagcaaacaattagaaaatcagaacccccagggcaggcagctccttctggtgtctttaaccaggttgtgccatgtcctgggacctttcctcaaagagcagaagctgggccaagaggccccagcagcactgtctgagctgctgcagcaggttgtgctgcagacaggagctgtgctgcagctctgctcagtgccgggggcccggggctggcgccttccctcggtcctcatctcatccgtcagcacgctcttggaagccgacctgggtcagcactgcagggatggaggggccgacatttcccaaggaagcgacaggacgctgctctcccatgttgccctctaccagggtgtttactctcagatactgttggagttgccagctctcgcgggacatgatcagtcttttcaggcagccttgcagtttttgactctgttctttttggccccagaactgcatcccaatcctgaaattcctgttcaggtcactcaggatattgagcctcatttgggagccttgttcacccaaatgttagaggttgggacgacagaggacttgaggctggtgatgcagtgtattctccagggactggatgtcagtaacatgtggaaagcagatgtgcaggctgttgtgtcagctgttacactgctgaggctgctactgaactgcccactcagtggagagaaagcaagtctgttgtggcgtgcgtgtccccagatagtcacagctttaacactcttaaaccgagaagcttctcaggagcagcctgtgtccctcacagtggtcgggcctgtcttagatgtcctggctgcactgctgcggcagggggaggaggccatcggcaacccccaccacgtcagcctggccttcagcatccttctcactgtccctttggaccatctgaagccgctggagtatggaagcgtcttcccgaggctgcacaacgtgctcttctcaatcctgcagtgtcaccctaaggtaatgctgaaagccatcccttctttcttgaactctttcaatagattggtgttttcagttatgcgggaagggcggcagaaggacaaaggaagcatagatgacctgcctacggtcctaaagtgtgcacgcctggttgaaaggatgtacagccacatcgccgcacgagctgaggagtttgctgtgttttccccatttatggtggcccagtacgtgttggaggtacagaaggtgaccttatatccagctgtgaaaagtctgctgcaggagggcatttacctcatcctggacctctgcatcgagcctgacgtccagttcctgcgggcctcgctgcagccgggaatgagagacatctttaaggagctctataatgactatctcaagtaccacaaggccaaacatgaaggagagaaaagatatacggcctaaggctatgggacagaagtgccgccagtgacactgtccagaggctttggctgcatggtctgaaagagctggagaatgaaagacttaagatgttctaattcgtagtattggtatacatagaaaatcctttggggtttatgtagtatattttgatgtattttacatcgtgtttttcttactattttttaatacatagttttatgcagtaagtattgcaatagaatcctgaaaattgaccctgggatgagattaattcaatagaaaaattgctgactcttgggacctttctgtgtttggttctcgtcttggctcagtggtttggtgttccctcgtctgcactggaaactacataaaacttggctttttactttgggtacatgggcgtataattcagccctgtttaaatatacttgcctttcaaattcttcaagtaacatgggaagtattcttgaaatgtcacattttctgccttccctctaagtatgctttctgaagaagtcagggaaagttagagtctgtggcctgaggtgtctgctctgggtggcgatagtgggcacctcaggcaggtcggtgacgtttagcacaggtgccagggctcctgcctgctcctcctgtgttagctctgtgaagttcatttaggaatttttttttcctatgcagtttaagaaataatcctaattgttttttcttattacctaagcaatatatttttattatagcaacctcagaaaagaaaaataaaaggataatttaaaaaactcattcatagtctcagttacccagataacctcggttgtcaccttggagtatcttgttgtagtccctttactatgtgtatgtatatagatgtgcatataaatatatatagtagctaaattggatcataaatgcatttttttaaagttaccttttttcctgtgtaatattaagtaactctgggtcagtgaaaacattcgacatatattttttttggctgcatagtagtccattgagtagatattgttgttttatttaataagtacaccatggttagacataggtatctgtccaaattcccttttatagatggtgcttgcagctgaattattttcagaagatgaattctcatgagttgtattatttgtcagaaaaccacatcatttttaaaggatttatataaatattgccaaattgccccctagaatattactaatttattttcctactagtgagtcaactttaatattattgatttttgtttctttatgcttccttgataggagagagatgttattctgttttgaatttctttaattactaagagattatacatttttcacatttaccatttttatttcttatgtaaattatgtttatataattatctttcttctgtaatagcacatttctcaattgggatatttaccatttttcttattcactgtctttgggggaatcatgttggaattccctttttaattagttcaaaatgcagacttttgaagttatttgaaggatcatccttaagcaaaggctttttttttttaacactgtattttcaagcagatgtgattggagcagacaatataaaatgaatgtctttgata

SEQ ID NO: 7983 - DNA, 4803 bp, Homo sapiens
ggacgcgggacccgtacagcggcctccgccgcaccgggacagcagccgccgccgctgccgccgtcctcccctgtctacccggagctgtctcgagctgagccccctaccgggccggatcccgagataaagcctagccatggctgctgtttattctggcatttcccttaagcttaaaagcaagacaacttcctgggaagataaactaaaactagctcactttgcttggatttctcaccagtgctttcttccaaataaagaacaagtgttacttgattgggcaagacaatcattggttgcattttataagaaaaagcttgaactgaaggaagatattgttgaaaggctttggatctatatagataacattttacatagcagaaaattgcagaatctcctcaagaatggaaagaccattaatcttcagatttccctagtcaagatcatcaatgagagagtagctgagttctctctttcgggatcccaaagaaacatctgtgctgtccttcgatgttgccagggcatcctgtcgacacctgccctggctgtcatctacacggccaaacaggagctgatggtggccttgctgagccagctttgctggtcggcctgcaggcagcccgaaggagctgtggtagcccagttgtttgaggtcattcacctggcccttggccattatctcttgatcctgcagcagcaggtcaacccaagacgtgcctttggggatgtgactgctcacctgctccagccgtgcctggtcctgaggcacttactctctgggggcacatggacgcaggctggccagggccagctgaggcaggtgctgagccgggacatcaggagtcagattgaggccatgttccgaggagggatttttcagcctgagctactgtcatcctacaaggaggggctcttggaccagcagcaaggggatgtgaagacgggagccatgaagaaccttctggctcccatggacaccgtgcttaacaggctggttgatgctggctactgtgcagcatcccttcatacctctgttgtggccaactcagtggccttgctgtataagctctttctagattcttactttaaggagggaaaccagcttctctgcttccaggttctccccaggttgtttggctgcttgaagatttcacacctgcaggaggagcagagcaaagccctgtccacatcagattggaccacagagcttttggttgtggaacagctactaaactcagtggccaacaacaatatctacaacatcgctgccgacagaattcggcacgaagaggctcagttccgcttttaccgccacgtggctgagctgctgataaaccatgcacaagcacccataccggcctggttccgctgtctgaagactttgatatctctgaatcatttgattttggagccagacctggatgacctgctggcttcagcgtggatcgatgccgaggtaacagagtttcgaaccaaaaaagcccaggaggcgcttattcgtactgtcttccagacttatgccaaactccgacaagtgccacggttgtttgaagaggttttgggggtgatctgtcgtccagctgctgaggcactgaggcagcctgtgctggcctcgggcccctccacggtactctctgcatgcctcctggagctgcctccaagtcagatcctggacacgtggtcccttgtgctggagaagttccagtctttagtcttgccctatttgcagagtgatgccgacatggccctgaaattactgtcactgagcttgctgctgcactgcatcatgttcaacatgaggagcctggacagcagcacgcctctgcccattgtcagacggacacagtgcatgatggagaggatgatgagggagctcgtgcagcccctgctggcccttctcccggacaccccaggcccagagccagagctgtggctgcagaaggtcagtgactctgtgctcctgctctcttacacttgggcccaggtggacgctatgttcagtttgaactgtagccagtatcactctatgtctgggccccttataggtgttgctctggagatctcgaacctcccttcgttgctcccaggtgtaaaaacacagcattggaagaagatagagaagtttacagctcagttcagctctcttggtacatattgcttagaacagctgtacctgcagaaaatgaaaaggactttaatgcaaactagtttccggtctgaaggagccatccaaagtttgaggtgcgatgctgcctttattattggttccggcagaaaaagcttgaatcagagaacgacggcttcctgggatggccaagttgggatggtgagtggactcacataccctgtagcacactggcacttgattgtgtcaaatctcacaattttaatatcctatctgtgtccagatgatgtgggatacctggccagtgtcctgctgagaactttacccatgggcaaagcccaggaagtctcaatagatgaagaggcatacatcacactggaaaaaatatccaaagccttccttcatagccctctctttccagagatgcagtcccttcattctgctttcttaacgtgcgtaaccacaagttgctccagcattctgtgttctggtgcccagcgtgactcaggtcttgtcagtcagcagcttccctggctttttgaaaaggaccacatggttgtgggtcattgggaaaacagatttgcaaaagctggacccgaaggtatagaacctagaggagaaattgcccagaacttactgtccctggtcaagagtgacttccctatccagctggagggagagcagttggaaagcatcctggggcttttggaagtgatttctgccttacagctggacagcctcttgccaccctatcatgtgcattattttcttgtgttactgtccatggccgtcaccaaactaggatgctcttgctcctcctcactggctctcaagttcttgacgacttgctaccaacttcttggttacttgcaaaaggggaaaagtgctcgctctgtgttcaagatcatgtatggtagtgatatttttgaggttgtactgacctcattgttcagagctagtagtaggttccttattgagatggatgatcccgcttggctggaattcctccaagtgatagggacgttcttagaggagctaatgcagatgctcatccaaatgaagctgagcttggtgctcaattttagaaaaatcaccgcattcctctctagttccaaaccatacacggaggcagcttcaagcaaacaattagaaaatcagaacccccagggcaggcagctccttctggtgtctttaaccaggttgtgccatgtcctgggacctttcctcaaagagcagaagctgggccaagaggccccagcagcactgtctgagctgctgcagcaggttgtgctgcagacaggagctgtgctgcagctctgctcagtgccgggggcccggggctggcgccttccctcggtcctcatctcatccgtcagcacgctcttggaagccgacctgggtcagcactgcagggatggaggggccgacatttcccaaggaagcgacaggacgctgctctcccatgttgccctctaccagggtgtttactctcagatactgttggagttgccagctctcgcgggacatgatcagtcttttcaggcagccttgcagtttttgactctgttctttttggccccagaactgcatcccaaaaaggactccgtgtttacctccatgtttcattctgtgagaagagttcttgcagatcctgaaattcctgttcaggtcactcaggatattgagcctcatttgggagccttgttcacccaaatgttagaggttgggacgacagaggacttgaggctggtgatgcagtgtattctccagggactggatgtcagtaacatgtggaaagcagatgtgcaggctgttgtgtcagctgttacactgctgaggctgctactgaactgcccactcagtggagagaaagcaagtctgttgtggcgtgcgtgtccccagatagtcacagctttaacactcttaaaccgagaagcttctcaggagcagcctgtgtccctcacagtggtcgggcctgtcttagatgtcctggctgcactgctgcggcagggggaggaggccatcggcaacccccaccacgtcagcctggccttcagcatccttctcactgtccctttggaccatctgaagccgctggagtatggaagcgtcttcccgaggctgcacaacgtgctcttctcaatcctgcagtgtcaccctaaggtaatgctgaaagccatcccttctttcttgaactctttcaatagattggtgttttcagttatgcgggaagggcggcagaaggacaaaggaagcatagatgacctgcctacggtcctaaagtgtgcacgcctggttgaaaggatgtacagccacatcgccgcacgagctgaggagtttgctgtgttttccccatttatggtggcccagtacgtgttggaggtacagaaggtaaaattgggttcaatgtctttcaccaagtactgtgtttatggtccttaagcagggtttctcaaccaaaatggcaagcggtgttctggatctgacagttctctgttgctgtgtgcaagttttagacagggttttgctctctcactcaggctggagtgcattagtgcgatgatagcacactacagcctcgaactcctgggctcaaatgttcctcccgcctcagcctcccaagtagctaggactacaggcatgtactactccactcagctaatttttaaatttttgtagag

SEQ ID NO: 7984 - DNA, 530 bp, Homo sapiens
gaactactactactaaattcgcgccgctgtcgacaaagatgcacggaaagttatcttacagcaaactgtagtttgcctccaagacaccattgtctccctttaatcttctcttttgtatacatttgttacccatggtgttctttgttccttttcataagctaataccactgtagggattttgttttgaacgcatattgacagcacgctttacttagtagccggttcccatttgccatacaatgtaggttctgcttaatgtaacttcttttttgcttaagcatttgcatgactattagtgcttcaaagtcaatttttaaaaatgcacaagttataaatacatacaaagatgcaatcagttttagtcattttcttccagatgtttttatcaacttacaataaacgcagaactgagatctacttacagtcttagtatgaaagtgttcgggggtccttgttaggtttggtgggttgctctttcttctgtatttataacttgtgcatttttaaaaattgtcgacgcggccgcgaat

SEQ ID NO: 7985 - DNA, 1748 bp, Homo sapiens
gacagagacatgaaatttatttgaaatcaatgtcaagcatcggttattctaatcctggggcttggccagacctgggcgtctggaatgatctacgtgcttaaatacaccactcgccaccattttctccaggtaattttccatccctgcccccaccatcaaggggaagaaagtgctcttcggattccggttcgccctggcctcccgcagccgccgcgggaccggcccccagcacacccccggggcgccgggcgcggggcagccgcccggacgcgcgcgggcctcaggcgccgccgggaccccagccccccaaactttggcaagttgcgggcgccgagcgcacccggaggcgcggggcgcggccgcaggcggagccgccccctgacgccgggccgccccctcccggccccggccgccccgccggctccgcggaaagtttgcggccgcccctgcgccgcacccggggcctgggtgagactgcggcggcggcagggcgcggacggccatatttgccggcgcggcccgagccgccgacaacaaaaagtgcgcgggcgctcggcgggcgctcggacgggcgcggggctgcagcgctaccgcccggcctcgccgccgccgccgccgccctcgcggcctggccccgccgcgcccggcgcgcccgccgcccggggggatgtcttacaaaccgaacttggccgcgcacatgcccgccgccgccctcaacgccgctgggagtgtccactcgccttccaccagcatggcaacgtcttcacagtaccgccagctgctcagtgactacgggccaccgtccctaggctacacccagggaactgggaacagccaggtgccccaaagcaaatacgcggagctgctggccatcattgaagagctggggaaggagatcagacccacgtacgcagggagcaagagtgccatggagaggctgaagcgcggcatcattcacgctagaggactggttcgggagtgcttggcagaaacggaacggaatgccagatcctagctgccttgttggttttgaaggatttccatctttttacaagatgagaagttacagttcatctcccctgttcagatgaaacccttgttttcaaaatggttacagtttcgtttttcctcccatggttcacttggctctgaacctacagtctcaaagattgagaaaagattttgcagttaattaggatttgcattttaagtagttaggaactgcccaggttttttttgttttttaagcattgatttaaaagatgcacggaaagttatcttacagcaaactgtagtttgcctccaagacaccattgtctccctttaatcttctcttttgtatacatttgttacccatggtgttctttgttccttttcataagctaataccactgtagggattttgttttgaacgcatattgacagcacgctttacttagtagccggttcccatttgccatacaatgtaggttctgcttaatgtaacttcttttttgcttaagcatttgcatgactattagtgcttcaaagtcaatttttaaaaatgcacaagttataaatacagaagaaagagcaacccaccaaacctaacaaggacccccgaacactttcatactaagactgtaagtagatctcagttctgcgtttattgtaagttgataaaaacatctggaagaaaatgactaaaactgtttgcatctttgtatgtatttattacttgatgtaataaagcttattttcattaacaa

SEQ ID NO: 7986 - DNA, 1143 bp, Homo sapiens
cagcctggcaccagctgtctgtccccgaggccaagtctgcggcgcccactgtgtgtgtgagagagagaccgtgtggctctgggggcggcaggcgggcagctgccgagggaggactagctgggagtgtccactcgccttccaccagcatggcaacgtcttcacagtaccgccagctgctcagtgactacgggccaccgtccctaggctacacccagggaactgggaacagccaggtgccccaaagcaaatacgcggagctgctggccatcattgaagagctggggaaggagatcagacccacgtacgcagggagcaagagtgccatggagaggctgaagcgcggcatcattcacgctagaggactggttcgggagtgcttggcagaaacggaacggaatgccagatcctagctgccttgttggttttgaaggatttccatctttttacaagatgagaagttacagttcatctcccctgttcagatgaaacccttgttttcaaaatggttacagtttcgtttttcctcccatggttcacttggctctgaacctacagtctcaaagattgagaaaagattttgcagttaattaggatttgcattttaagtagttaggaactgcccaggttttttttgttttttaagcattgatttaaaagatgcacggaaagttatcttacagcaaactgtagtttgcctccaagacaccattgtctccctttaatcttctcttttgtatacatttgttacccatggtgttctttgttccttttcataagctaataccactgtagggattttgttttgaacgcatattgacagcacgctttacttagtagccggttcccatttgccatacaatgtaggttctgcttaatgtaacttcttttttgcttaagcatttgcatgactattagtgcttcaaagtcaatttttaaaaatgcacaagttataaatacagaagaaagagcaacccaccaaacctaacaaggacccccgaacactttcatactaagactgtaagtagatctcagttctgcgtttattgtaagttgataaaaacatctggaagaaaatgactaaaactgtttgcatctttgtatgtatttattacttgatgtaataaagcttattttcattaacaa

SEQ ID NO: 7987 - DNA, 1155 bp, Homo sapiens
gacagagacatgaaatttatttgaaatcaatgtcaagcatcggttattctaatcctggggcttggccagacctgggcgtctggaatgatctacgtgcttaaatacaccactcgccaccattttctccagctgggagtgtccactcgccttccaccagcatggcaacgtcttcacagtaccgccagctgctcagtgactacgggccaccgtccctaggctacacccagggaactgggaacagccaggtgccccaaagcaaatacgcggagctgctggccatcattgaagagctggggaaggagatcagacccacgtacgcagggagcaagagtgccatggagaggctgaagcgcggcatcattcacgctagaggactggttcgggagtgcttggcagaaacggaacggaatgccagatcctagctgccttgttggttttgaaggatttccatctttttacaagatgagaagttacagttcatctcccctgttcagatgaaacccttgttttcaaaatggttacagtttcgtttttcctcccatggttcacttggctctgaacctacagtctcaaagattgagaaaagattttgcagttaattaggatttgcattttaagtagttaggaactgcccaggttttttttgttttttaagcattgatttaaaagatgcacggaaagttatcttacagcaaactgtagtttgcctccaagacaccattgtctccctttaatcttctcttttgtatacatttgttacccatggtgttctttgttccttttcataagctaataccactgtagggattttgttttgaacgcatattgacagcacgctttacttagtagccggttcccatttgccatacaatgtaggttctgcttaatgtaacttcttttttgcttaagcatttgcatgactattagtgcttcaaagtcaatttttaaaaatgcacaagttataaatacagaagaaagagcaacccaccaaacctaacaaggacccccgaacactttcatactaagactgtaagtagatctcagttctgcgtttattgtaagttgataaaaacatctggaagaaaatgactaaaactgtttgcatctttgtatgtatttattacttgatgtaataaagcttattttcattaacaa

SEQ ID NO: 7988 - DNA, 1789 bp, Homo sapiens
gacagagacatgaaatttatttgaaatcaatgtcaagcatcggttattctaatcctggggcttggccagacctgggcgtctggaatgatctacgtgcttaaatacaccactcgccaccattttctccaggtaattttccatccctgcccccaccatcaaggggaagaaagtgctcttcggattccggttcgccctggcctcccgcagccgccgcgggaccggcccccagcacacccccggggcgccgggcgcggggcagccgcccggacgcgcgcgggcctcaggcgccgccgggaccccagccccccaaactttggcaagttgcgggcgccgagcgcacccggaggcgcggggcgcggccgcaggcggagccgccccctgacgccgggccgccccctcccggccccggccgccccgccggctccgcggaaagtttgcggccgcccctgcgccgcacccggggcctgggtgagactgcggcggcggcagggcgcggacggccatatttgccggcgcggcccgagccgccgacaacaaaaagtgcgcgggcgctcggcgggcgctcggacgggcgcggggctgcagcgctaccgcccggcctcgccgccgccgccgccgccctcgcggcctggccccgccgcgcccggcgcgcccgccgcccggggggatgtcttacaaaccgaacttggccgcgcacatgcccgccgccgccctcaacgccgctgggagtgtccactcgccttccaccagcatggcaacgtcttcacagtaccgccagctgctcagtgactacgggccaccgtccctaggctacacccagggaactgggaacagccaggtgccccaaagcaaatacgcggagctgctggccatcattgaagagctggggaaggagatcagacccacgtacgcagggagcaagagtgccatggagaggctgaagcgcggcatcattcacgctagaggactggttcgggagtgcttggcagaaacggaacggaatgccagatcctagctgccttgttggttttgaaggatttccatctttttacaagatgagaagttacagttcatctcccctgttcagatgaaacccttgttttcaaaatggttacagtttcgtttttcctcccatggttcacttggctctgaacctacagtctcaaagattgagaaaagattttgcagttaattaggatttgcattttaagtagttaggaactgcccaggttttttttgttttttaagcattgatttaaaagatgcacggaaagttatcttacagcaaactgtagtttgcctccaagacaccattgtctccctttaatcttctcttttgtatacatttgttacccatggtgttctttgttccttttcataagctaataccactgtagggattttgttttgaacgcatattgacagcacgctttacttagtagccggttcccatttgccatacaatgtaggttctgcttaatgtaacttcttttttgcttaagcatttgcatgactattagtgcttcaaagtcaatttttaaaaatgcacaagttataaatacagaagaaagagcaacccaccaaacctaacaaggacccccgaacactttcatactaagactgtaagtagatctcagttctgcgtttattgtaagttgataaaaacatctggaagaaaatgactaaaactgtttgcatctttgtatgtatttattacttgatgtaataaagcttattttcattaacaatttgtattaaaatgtgggttccttgaaaaattcttacgtgc

SEQ ID NO: 7989 - DNA, 2338 bp, Homo sapiens
  misc_feature (1835)..(1835): n is a, c, g, or t
  misc_feature (2117)..(2117): n is a, c, g, or t
gacagagacatgaaatttatttgaaatcaatgtcaagcatcggttattctaatcctggggcttggccagacctgggcgtctggaatgatctacgtgcttaaatacaccactcgccaccattttctccaggtaattttccatccctgcccccaccatcaaggggaagaaagtgctcttcggattccggttcgccctggcctcccgcagccgccgcgggaccggcccccagcacacccccggggcgccgggcgcggggcagccgcccggacgcgcgcgggcctcaggcgccgccgggaccccagccccccaaactttggcaagttgcgggcgccgagcgcacccggaggcgcggggcgcggccgcaggcggagccgccccctgacgccgggccgccccctcccggccccggccgccccgccggctccgcggaaagtttgcggccgcccctgcgccgcacccggggcctgggtgagactgcggcggcggcagggcgcggacggccatatttgccggcgcggcccgagccgccgacaacaaaaagtgcgcgggcgctcggcgggcgctcggacgggcgcggggctgcagcgctaccgcccggcctcgccgccgccgccgccgccctcgcggcctggccccgccgcgcccggcgcgcccgccgcccggggggatgtcttacaaaccgaacttggccgcgcacatgcccgccgccgccctcaacgccgctgggagtgtccactcgccttccaccagcatggcaacgtcttcacagtaccgccagctgctcagtgactacgggccaccgtccctaggctacacccagggaactgggaacagccaggtgccccaaagcaaatacgcggagctgctggccatcattgaagagctggggaaggagatcagacccacgtacgcagggagcaagagtgccatggagaggctgaagcgcggcatcattcacgctagaggactggttcgggagtgcttggcagaaacggaacggaatgccagatcctagctgccttgttggttttgaaggatttccatctttttacaagatgagaagttacagttcatctcccctgttcagatgaaacccttgttttcaaaatggttacagtttcgtttttcctcccatggttcacttggctctgaacctacagtctcaaagattgagaaaagattttgcagttaattaggatttgcattttaagtagttaggaactgcccaggttttttttgttttttaagcattgatttaaaagatgcacggaaagttatcttacagcaaactgtagtttgcctccaagacaccattgtctccctttaatcttctcttttgtatacatttgttacccatggtgttctttgttccttttcataagctaataccactgtagggattttgttttgaacgcatattgacagcacgctttacttagtagccggttcccatttgccatacaatgtaggttctgcttaatgtaacttcttttttgcttaagcatttgcatgactattagtgcttcaaagtcaatttttaaaaatgcacaagttataaatacagaagaaagagcaacccaccaaacctaacaaggacccccgaacactttcatactaagactgtaagtagatctcagttctgcgtttattgtaagttgataaaaacatctggaagaaaatgactaaaactgtttgcatctttgtatgtatttattacttgatgtaataaagcttattttcattaacaaaaaaaaaaaaaaaaaaaaaaaaaaaaaagaaaacaaagaacaacaaaaaacaaaaaaaaaaaaaaaaaaaaaaaaaaaaaaaaaaanaaaaaaaaaaaaaggggggggggcaaaaatttccccggggggggccattttccgcgctgctactcccgttttctctttggacacaaggtgggcgccccttattatgggagcggtcccggttattttattcagcccagagggagcacgtgggcgccgcggtgtgttataaacacaacgctgtgactactccggcgacaacacgctgcgctcccctgggagcactctctcgtgtggagagagggaccccccctttactcctcctgggggggggcggcgcacccnctatcgttgtgcgccaccaactacctatccaccaacggaagagattttttagagcgcggcccctcggaggggggcaacacatctcattaatccttctgcagagggcgtcccttacgtggggtgtgtcttaccccccacggcgggcatatttgtttactcgcgccgccctacgaacgaacaagtttggcgcccccacggcgggactatttgatcatcgcacc

SEQ ID NO: 7990 - DNA, 2287 bp, Homo sapiens
  misc_feature (1784)..(1784): n is a, c, g, or t
  misc_feature (2066)..(2066): n is a, c, g, or t
gacagagacatgaaatttatttgaaatcaatgtcaagcatcggttattctaatcctggggcttggccagacctgggcgtctggaatgatctacgtgcttaaatacaccactcgccaccattttctccaggtaattttccatccctgcccccaccatcaaggggaagaaagtgctcttcggattccggttcgccctggcctcccgcagccgccgcgggaccggcccccagcacacccccggggcgccgggcgcggggcagccgcccggacgcgcgcgggcctcaggcgccgccgggaccccagccccccaaactttggcaagttgcgggcgccgagcgcacccggaggcgcggggcgcggccgcaggcggagccgccccctgacgccgggccgccccctcccggccccggccgccccgccggctccgcggaaagtttgcggccgcccctgcgccgcacccggggcctgggtgagactgcggcggcggcagggcgcggacggccatatttgccggcgcggcccgagccgccgacaacaaaaagtgcgcgggcgctcggcgggcgctcggacgggcgcggggctgcagcgctaccgcccggcctcgccgccgccgccgccgccctcgcggcctggccccgccgcgcccggcgcgcccgccgcccggggggatgtcttacaaaccgaacttggccgcgcacatgcccgccgccgccctcaacgccgctgggagtgtccactcgccttccaccagcatggcaacgtcttcacagtaccgccagctgctcagtgactacgggccaccgtccctaggctacacccagggaactgggaacagccaggtgccccaaagcaaatacgcggagctgctggccatcattgaagagctggggaaggagatcagacccacgtacgcagggagcaagagtgccatggagaggctgaagcgcggcatcattcacgctagaggactggttcgggagtgcttggcagaaacggaacggaatgccagatcctagctgccttgttggttttgaaggatttccatctttttacaagatgagaagttacagttcatctcccctgttcagatgaaacccttgttttcaaaatggttacagtttcgtttttcctcccatggttcacttggctctgaacctacagtctcaaagattgagaaaagattttgcagttaattaggatttgcattttaagtagttaggaactgcccaggttttttttgttttttaagcattgatttaaaagatgcacggaaagttatcttacagcaaactgtagtttgcctccaagacaccattgtctccctttaatcttctcttttgtatacatttgttacccatggtgttctttgttccttttcataagctaataccactgtagggattttgttttgaacgcatattgacagcacgctttacttagtagccggttcccatttgccatacaatgtaggttctgcttaatgtaacttcttttttgcttaagcatttgcatgactattagtgcttcaaagtcaatttttaaaaatgcacaagttataaatacagaagaaagagcaacccaccaaacctaacaaggacccccgaacactttcatactaagactgtaagtagatctcagttctgcgtttattgtaagttgataaaaacatctggaagaaaatgactaaaactgtttgcatctttgtatgtatttattacttgatgtaataaagcttattttcattaacaaaaaaaaaaaaaaaaaaaaaaaaaaaaaaaaaaaaanaaaaaaaaaaaaaggggggggggcaaaaatttccccggggggggccattttccgcgctgctactcccgttttctctttggacacaaggtgggcgccccttattatgggagcggtcccggttattttattcagcccagagggagcacgtgggcgccgcggtgtgttataaacacaacgctgtgactactccggcgacaacacgctgcgctcccctgggagcactctctcgtgtggagagagggaccccccctttactcctcctgggggggggcggcgcacccnctatcgttgtgcgccaccaactacctatccaccaacggaagagattttttagagcgcggcccctcggaggggggcaacacatctcattaatccttctgcagagggcgtcccttacgtggggtgtgtcttaccccccacggcgggcatatttgtttactcgcgccgccctacgaacgaacaagtttggcgcccccacggcgggactatttgatcatcgcacc

SEQ ID NO: 7991 - DNA, 1795 bp, Homo sapiens
gacagagacatgaaatttatttgaaatcaatgtcaagcatcggttattctaatcctggggcttggccagacctgggcgtctggaatgatctacgtgcttaaatacaccactcgccaccattttctccaggtaattttccatccctgcccccaccatcaaggggaagaaagtgctcttcggattccggttcgccctggcctcccgcagccgccgcgggaccggcccccagcacacccccggggcgccgggcgcggggcagccgcccggacgcgcgcgggcctcaggcgccgccgggaccccagccccccaaactttggcaagttgcgggcgccgagcgcacccggaggcgcggggcgcggccgcaggcggagccgccccctgacgccgggccgccccctcccggccccggccgccccgccggctccgcggaaagtttgcggccgcccctgcgccgcacccggggcctgggtgagactgcggcggcggcagggcgcggacggccatatttgccggcgcggcccgagccgccgacaacaaaaagtgcgcgggcgctcggcgggcgctcggacgggcgcggggctgcagcgctaccgcccggcctcgccgccgccgccgccgccctcgcggcctggccccgccgcgcccggcgcgcccgccgcccggggggatgtcttacaaaccgaacttggccgcgcacatgcccgccgccgccctcaacgccgctgggagtgtccactcgccttccaccagcatggcaacgtcttcacagtaccgccagctgctcagtgactacgggccaccgtccctaggctacacccagggaactgggaacagccaggtgccccaaagcaaatacgcggagctgctggccatcattgaagagctggggaaggagatcagacccacgtacgcagggagcaagagtgccatggagaggctgaagcgcggcatcattcacgctagaggactggttcgggagtgcttggcagaaacggaacggaatgccagatcctagctgccttgttggttttgaaggatttccatctttttacaagatgagaagttacagttcatctcccctgttcagatgaaacccttgttttcaaaatggttacagtttcgtttttcctcccatggttcacttggctctgaacctacagtctcaaagattgagaaaagattttgcagttaattaggatttgcattttaagtagttaggaactgcccaggttttttttgttttttaagcattgatttaaaagatgcacggaaagttatcttacagcaaactgtagtttgcctccaagacaccattgtctccctttaatcttctcttttgtatacatttgttacccatggtgttctttgttccttttcataagctaataccactgtagggattttgttttgaacgcatattgacagcacgctttacttagtagccggttcccatttgccatacaatgtaggttctgcttaatgtaacttcttttttgcttaagcatttgcatgactattagtgcttcaaagtcaatttttaaaaatgcacaagttataaatacagaagaaagagcaacccaccaaacctaacaaggacccccgaacactttcatactaagactgtaagtagatctcagttctgcgtttattgtaagttgataaaaacatctggaagaaaatgactaaaactgtttgcatctttgtatgtatttattacttgcgcatttttaaaaattgactttgaagcactaatagttatgcaaatgcttaagcaaactagaaggtacattaagca

SEQ ID NO: 7992 - DNA, 1638 bp, Homo sapiens
gacagagacatgaaatttatttgaaatcaatgtcaagcatcggttattctaatcctggggcttggccagacctgggcgtctggaatgatctacgtgcttaaatacaccactcgccaccattttctccaggtaattttccatccctgcccccaccatcaaggggaagaaagtgctcttcggattccggttcgccctggcctcccgcagccgccgcgggaccggcccccagcacacccccggggcgccgggcgcggggcagccgcccggacgcgcgcgggcctcaggcgccgccgggaccccagccccccaaactttggcaagttgcgggcgccgagcgcacccggaggcgcggggcgcggccgcaggcggagccgccccctgacgccgggccgccccctcccggccccggccgccccgccggctccgcggaaagtttgcggccgcccctgcgccgcacccggggcctgggtgagactgcggcggcggcagggcgcggacggccatatttgccggcgcggcccgagccgccgacaacaaaaagtgcgcgggcgctcggcgggcgctcggacgggcgcggggctgcagcgctaccgcccggcctcgccgccgccgccgccgccctcgcggcctggccccgccgcgcccggcgcgcccgccgcccggggggatgtcttacaaaccgaacttggccgcgcacatgcccgccgccgccctcaacgccgctgggagtgtccactcgccttccaccagcatggcaacgtcttcacagtaccgccagctgctcagtgactacgggccaccgtccctaggctacacccagggaactgggaacagccaggtgccccaaagcaaatacgcggagctgctggccatcattgaagagctggggaaggagatcagacccacgtacgcagggagcaagagtgccatggagaggctgaagcgcggcatcattcacgctagaggactggttcgggagtgcttggcagaaacggaacggaatgccagatcctagctgccttgttggttcacttggctctgaacctacagtctcaaagattgagaaaagattttgcagttaattaggatttgcattttaagtagttaggaactgcccaggttttttttgttttttaagcattgatttaaaagatgcacggaaagttatcttacagcaaactgtagtttgcctccaagacaccattgtctccctttaatcttctcttttgtatacatttgttacccatggtgttctttgttccttttcataagctaataccactgtagggattttgttttgaacgcatattgacagcacgctttacttagtagccggttcccatttgccatacaatgtaggttctgcttaatgtaacttcttttttgcttaagcatttgcatgactattagtgcttcaaagtcaatttttaaaaatgcacaagttataaatacagaagaaagagcaacccaccaaacctaacaaggacccccgaacactttcatactaagactgtaagtagatctcagttctgcgtttattgtaagttgataaaaacatctggaagaaaatgactaaaactgtttgcatctttgtatgtatttattacttgatgtaataaagcttattttcattaacaa

SEQ ID NO: 7993 - DNA, 1730 bp, Homo sapiens
gacagagacatgaaatttatttgaaatcaatgtcaagcatcggttattctaatcctggggcttggccagacctgggcgtctggaatgatctacgtgcttaaatacaccactcgccaccattttctccaggtaattttccatccctgcccccaccatcaaggggaagaaagtgctcttcggattccggttcgccctggcctcccgcagccgccgcgggaccggcccccagcacacccccggggcgccgggcgcggggcagccgcccggacgcgcgcgggcctcaggcgccgccgggaccccagccccccaaactttggcaagttgcgggcgccgagcgcacccggaggcgcggggcgcggccgcaggcggagccgccccctgacgccgggccgccccctcccggccccggccgccccgccggctccgcggaaagtttgcggccgcccctgcgccgcacccggggcctgggtgagactgcggcggcggcagggcgcggacggccatatttgccggcgcggcccgagccgccgacaacaaaaagtgcgcgggcgctcggcgggcgctcggacgggcgcggggctgcagcgctaccgcccggcctcgccgccgccgccgccgccctcgcggcctggccccgccgcgcccggcgcgcccgccgcccggggggatgtcttacaaaccgaacttggccgcgcacatgcccgccgccgccctcaacgccgctgggagtgtccactcgccttccaccagcatggcaacgtcttcacagtaccgccagctgctcagtgactacgggccaccgtccctaggctacacccagggaactgggaacagccaggtgccccaaagcaaatacgcggagctgctggccatcattgaagagctggggaaggagatcagacccacgtacgcagggagcaagagtgccatggagaggctgaagcgcggcatcattcacgctagaggactggttcgggagtgcttggcagaaacggaacggaatgccagatcctagctgccttgttggttttgaaggatttccatctttttacaagatgagaagttacagttcatctcccctgttcagatgaaacccttgttttcaaaatggttacagtttcgtttttcctcccatggttcacttggctctgaacctacagtctcaaagattgagaaaagattttgcagttaattaggatttgcattttaagtagttaggaactgcccaggttttttttgttttttaagcattgatttaaaagatgcacggaaagttatcttacagcaaactgtagtttgcctccaagacaccattgtctccctttaatcttctcttttgtatacatttgttacccatggtgttctttgttccttttcataagctaataccactgtagggattttgttttgaacgcatattgacagcacgctttacttagtagccggttcccatttgccatacaatgtaggttctgcttaatgtaacttcttttttgcttaagcatttgcatgactattagtgcttcaaagtcaatttttaaaaatgcacaagttataaatacagaagaaagagcaacccaccaaacctaacaaggacccccgaacactttcatactaagaacagggtcttgttttgccacccaggctggagtgcagtaatataatcttggctcaccgcagcctcaacctcctgggctcaagcaatcctcccatctcagcctccctagtgg

SEQ ID NO: 7994 - DNA, 1695 bp, Homo sapiens
gacagagacatgaaatttatttgaaatcaatgtcaagcatcggttattctaatcctggggcttggccagacctgggcgtctggaatgatctacgtgcttaaatacaccactcgccaccattttctccaggtaattttccatccctgcccccaccatcaaggggaagaaagtgctcttcggattccggttcgccctggcctcccgcagccgccgcgggaccggcccccagcacacccccggggcgccgggcgcggggcagccgcccggacgcgcgcgggcctcaggcgccgccgggaccccagccccccaaactttggcaagttgcgggcgccgagcgcacccggaggcgcggggcgcggccgcaggcggagccgccccctgacgccgggccgccccctcccggccccggccgccccgccggctccgcggaaagtttgcggccgcccctgcgccgcacccggggcctgggtgagactgcggcggcggcagggcgcggacggccatatttgccggcgcggcccgagccgccgacaacaaaaagtgcgcgggcgctcggcgggcgctcggacgggcgcggggctgcagcgctaccgcccggcctcgccgccgccgccgccgccctcgcggcctggccccgccgcgcccggcgcgcccgccgcccggggggatgtcttacaaaccgaacttggccgcgcacatgcccgccgccgccctcaacgccgctgggagtgtccactcgccttccaccagcatggcaacgtcttcacagtaccgccagctgctcagtgactacgggccaccgtccctaggctacacccagggaactgggaacagccaggtgccccaaagcaaatacgcggagctgctggccatcattgaagagctggggaaggagatcagacccacgtacgcagggagcaagagtgccatggagaggctgaagcgcggcatcattcacgctagaggactggttcgggagtgcttggcagaaacggaacggaatgccagatcctagctgccttgttggttttgaaggatttccatctttttacaagatgagaagttacagttcatctcccctgttcagatgaaacccttgttttcaaaatggttacagtttcgtttttcctcccatggttcacttggctctgaacctacagtctcaaagattgagaaaagattttgcagttaattaggatttgcattttaagtagttaggaactgcccaggttttttttgttttttaagcattgatttacattgtctccctttaatcttctcttttgtatacatttgttacccatggtgttctttgttccttttcataagctaataccactgtagggattttgttttgaacgcatattgacagcacgctttacttagtagccggttcccatttgccatacaatgtaggttctgcttaatgtaacttcttttttgcttaagcatttgcatgactattagtgcttcaaagtcaatttttaaaaatgcacaagttataaatacagaagaaagagcaacccaccaaacctaacaaggacccccgaacactttcatactaagactgtaagtagatctcagttctgcgtttattgtaagttgataaaaacatctggaagaaaatgactaaaactgtttgcatctttgtatgtatttattacttgatgtaataaagcttattttcattaacaa

SEQ ID NO: 7995 - DNA, 1259 bp, Homo sapiens
agcccgggcggggggcgctgcgggcagggccaggacccgcgcgggcgggcgcggatggagggctgcggggctgcggggctgccgggctgccgggggccctgaggtcgcggggccgccgggactgggaccaggatggggtcgccggcgggcagcgtactcggaggcccgggggcctcggccgggagcgtgggagcaggggctaccccatgcggtcacgcggggacccccgtaagctgggagtgtccactcgccttccaccagcatggcaacgtcttcacagtaccgccagctgctcagtgactacgggccaccgtccctaggctacacccagggaactgggaacagccaggtgccccaaagcaaatacgcggagctgctggccatcattgaagagctggggaaggagatcagacccacgtacgcagggagcaagagtgccatggagaggctgaagcgcggcatcattcacgctagaggactggttcgggagtgcttggcagaaacggaacggaatgccagatcctagctgccttgttggttttgaaggatttccatctttttacaagatgagaagttacagttcatctcccctgttcagatgaaacccttgttttcaaaatggttacagtttcgtttttcctcccatggttcacttggctctgaacctacagtctcaaagattgagaaaagattttgcagttaattaggatttgcattttaagtagttaggaactgcccaggttttttttgttttttaagcattgatttaaaagatgcacggaaagttatcttacagcaaactgtagtttgcctccaagacaccattgtctccctttaatcttctcttttgtatacatttgttacccatggtgttctttgttccttttcataagctaataccactgtagggattttgttttgaacgcatattgacagcacgctttacttagtagccggttcccatttgccatacaatgtaggttctgcttaatgtaacttcttttttgcttaagcatttgcatgactattagtgcttcaaagtcaatttttaaaaatgcacaagttataaatacagaagaaagagcaacccaccaaacctaacaaggacccccgaacactttcatactaagactgtaagtagatctcagttctgcgtttattgtaagttgataaaaacatctggaagaaaatgactaaaactgtttgcatctttgtatgtatttattacttgatgtaataaagcttattttcattaacaa

SEQ ID NO: 7996 - DNA, 1505 bp, Homo sapiens
gacagagacatgaaatttatttgaaatcaatgtcaagcatcggttattctaatcctggggcttggccagacctgggcgtctggaatgatctacgtgcttaaatacaccactcgccaccattttctccaggtaattttccatccctgcccccaccatcaaggggaagaaagtgctcttcggattccggttcgccctggcctcccgcagccgccgcgggaccggcccccagcacacccccggggcgccgggcgcggggcagccgcccggacgcgcgcgggcctcaggcgccgccgggaccccagccccccaaactttggcaagttgcgggcgccgagcgcacccggaggcgcggggcgcggccgcaggcggagccgccccctgacgccgggccgccccctcccggccccggccgccccgccggctccgcggaaagtttgcggccgcccctgcgccgcacccggggcctgggtgagactgcgctgggagtgtccactcgccttccaccagcatggcaacgtcttcacagtaccgccagctgctcagtgactacgggccaccgtccctaggctacacccagggaactgggaacagccaggtgccccaaagcaaatacgcggagctgctggccatcattgaagagctggggaaggagatcagacccacgtacgcagggagcaagagtgccatggagaggctgaagcgcggcatcattcacgctagaggactggttcgggagtgcttggcagaaacggaacggaatgccagatcctagctgccttgttggttttgaaggatttccatctttttacaagatgagaagttacagttcatctcccctgttcagatgaaacccttgttttcaaaatggttacagtttcgtttttcctcccatggttcacttggctctgaacctacagtctcaaagattgagaaaagattttgcagttaattaggatttgcattttaagtagttaggaactgcccaggttttttttgttttttaagcattgatttaaaagatgcacggaaagttatcttacagcaaactgtagtttgcctccaagacaccattgtctccctttaatcttctcttttgtatacatttgttacccatggtgttctttgttccttttcataagctaataccactgtagggattttgttttgaacgcatattgacagcacgctttacttagtagccggttcccatttgccatacaatgtaggttctgcttaatgtaacttcttttttgcttaagcatttgcatgactattagtgcttcaaagtcaatttttaaaaatgcacaagttataaatacagaagaaagagcaacccaccaaacctaacaaggacccccgaacactttcatactaagactgtaagtagatctcagttctgcgtttattgtaagttgataaaaacatctggaagaaaatgactaaaactgtttgcatctttgtatgtatttattacttgatgtaataaagcttattttcattaacaa

SEQ ID NO: 7997 - DNA, 306 bp, Homo sapiens
ggccatgcttacttatatatacttgaatcaatacgggtgccgataatagcgagggagaccttgcagagggggagaattgttccttctgctttcctaggggactcttgagcttagaaactcatcgtacacttgaccttgagccttctatttgcctcatctataacatgaagtgctagcatcagatatttgagagctcttagctctgtacccgggtgccgattcgctattcatcggcaccttagctctagaggtccatgcatacttaatattatacttgaattcaatacgggtgccgatgaatagcga

SEQ ID NO: 7998 - DNA, 1840 bp, Homo sapiens
gcagagtttcaaatcggctgcggtgggcgaggagcagctgtgctgcggctgtgctcggccttagtggtgtcggggtctagtggacagagaagactcttggccaggcagatggcttctcggtggcagaacatggggacctccgtgcgccggagatctctccagcaccaggagcagctggaggacagcaaggagctgcagcctgtggtcagccatcaggagacctctgtaggggccctggggtccctgtgcagacagttccaaaggaggctgcccctgagagccgtcaacctcaacctccgcgcagggccctcctggaaacgcctggaaaccccagagccaggtcagcagggcctccaggctgcagctcgctcagctaagagtgctttgggtgccgtgtcccagagaatccaggagtcctgccaaagtggcaccaagtggctggtggagacccaggtgaaggccaggaggcggaagagaggagcacagaagggcagtggatccccaactcacagcctgagccagaagagcacccggctgtctggagccgcccctgcccactcagccgcagacccctgggagaaggagcatcaccgcctctctgtccggatgggctcacatgcccacccattacggcgatcaaggcgggaggctgccttccggagcccctactcctcaacagagcccctctgctctcccagcgagtctgacagtgacctagagcctgtgggggcgggaattcagcatctccagaagctgtcccaagagctagatgaagccattatggcggaagagagtggtgacatcgtctctctcattcatgactgaggaagtgcctgcaggtaatgcccacctcccaagagtctttctcactgtccttctcctccatctcatgcatgagcaagttaaagaaaaagcccacagagctgatgggcacagcagagtaggtagtacctacttgccgcttgaagccagagctgctaacctcactgaccccgtcattaacagcacgctgggggccccaagtagctacagccaccttccagcaccccccaccccgcagtgagcagggaaaggcatccctacttctcctaccttgagcacagtgaaaaaggcagctctgtcttgaaggaaacaagccctgtctgaccgccaaggcttcatactcaaggatgtctatgcttccccgtgagcttcctggaaaaaacccccgggagtcgtcagtacccctgggccactgctaacaagcacctaacaaggggcccagagccccctgctccagccacatctggacccatcagtgactgcctgccatagcctgagagtgtcttggggagaccttgcagagggggagaattgttccttctgctttcctaggggactcttgagcttagaaactcatcgtacacttgaccttgagccttctatttgcctcatctataacatgaagtgctagcatcagatatttgagagctcttagctctgtacccgggtgcctggtttttggggagtcatccgcagagtcactcacccactgtgtttctggtgccaaggctcttgagggccccactctcatccctcctttccctaccagggactcggaggaaggcataggagatatttccaggcttacgaccctgggctcacgggtacctatttatatgctcagtgcagagcactgtggatgtgccaggaggggtagccctgttcaagagcaatttctgccctttgtaaattatttaagaaacctgctttgtcattttattagaaagaaaccagcatgtgactttcctagataacactgctttctcataataaagactatttgcatttgaaaaaaaaa

SEQ ID NO: 7999 - DNA, 2164 bp, Homo sapiens
gcagagtttcaaatcggctgcggtgggcgaggagcagctgtgctgcggctgtgctcggccttagtggtgtcggggtctagtggacagagaagactcttggccaggcagatggcttctcggtggcagaacatggggacctccgtgcgccggagatctctccagcaccaggagcagctggaggacagcaaggagctgcagcctgtggtcagccatcaggagacctctgtaggggccctggggtccctgtgcagacagttccaaaggaggctgcccctgagagccgtcaacctcaacctccgcgcagggccctcctggaaacgcctggaaaccccagagccaggtcagcagggcctccaggctgcagctcgctcagctaagagtgctttgggtgccgtgtcccagagaatccaggagtcctgccaaagtggcaccaagtggctggtggagacccaggtgaaggccaggaggcggaagagaggagcacagaagggcagtggatccccaactcacagcctgagccagaagagcacccggctgtctggagccgcccctgcccactcagccgcagacccctgggagaaggagcatcaccgcctctctgtccggatgggctcacatgcccacccattacggcgatcaaggcgggaggctgccttccggagcccctactcctcaacagagcccctctgctctcccagcgagtctgacagtgacctagagcctgtgggggcgggaattcagcatctccagaagctgtcccaagagctagatgaagccattatggcggaagagagaactctccgtggctcgtctgtgccctgcctgcctatggaattgggaaaagcaacctgactgctatggagttcctggtctgtctgctcatggccccatcctgggggcagggcctcggttgtggacctcccctaacttggggctgtttccccattccacttgtataatggccatgatgggctctaaggctgggccctgccagctctatgtgttgaggggccatattcctaccacatttccgggtctgatcttgtgtagctcaggctgggagggccctctcagagcccaccacacccagtggcatcaatccctccccttctctctagtggtgacatcgtctctctcattcatgactgaggaagtgcctgcaggtaatgcccacctcccaagagtctttctcactgtccttctcctccatctcatgcatgagcaagttaaagaaaaagcccacagagctgatgggcacagcagagtaggtagtacctacttgccgcttgaagccagagctgctaacctcactgaccccgtcattaacagcacgctgggggccccaagtagctacagccaccttccagcaccccccaccccgcagtgagcagggaaaggcatccctacttctcctaccttgagcacagtgaaaaaggcagctctgtcttgaaggaaacaagccctgtctgaccgccaaggcttcatactcaaggatgtctatgcttccccgtgagcttcctggaaaaaacccccgggagtcgtcagtacccctgggccactgctaacaagcacctaacaaggggcccagagccccctgctccagccacatctggacccatcagtgactgcctgccatagcctgagagtgtcttggggagaccttgcagagggggagaattgttccttctgctttcctaggggactcttgagcttagaaactcatcgtacacttgaccttgagccttctatttgcctcatctataacatgaagtgctagcatcagatatttgagagctcttagctctgtacccgggtgcctggtttttggggagtcatccgcagagtcactcacccactgtgtttctggtgccaaggctcttgagggccccactctcatccctcctttccctaccagggactcggaggaaggcataggagatatttccaggcttacgaccctgggctcacgggtacctatttatatgctcagtgcagagcactgtggatgtgccaggaggggtagccctgttcaagagcaatttctgccctttgtaaattatttaagaaacctgctttgtcattttattagaaagaaaccagcatgtgactttcctagataacactgctttctcataataaagactatttgcatttgaaaaaaaaa

SEQ ID NO: 8000 - DNA, 1537 bp, Homo sapiens
aaacgaaatagtagtacgagcgcgtgttatcggacgaggctcggcttagtggtgtcggcggtctagtggacagagaagactcttggccaggcagatggcttctcggtggcagaacatggggacctccgtgcgccggagatctctccagcaccaggagcagctggaggacagcaaggagctgcagcctgtggtcagccatcaggagacctctgtaggggccctggggtccctgtgcagacagttccaaaggaggctgcccctgagagccgtcaacctcaacctccgcgcagggccctcctggaaacgcctggaaaccccagagccaggtcagcagggcctccaggctgcagctcgctcagctaagagtgctttgggtgccgtgtcccagagaatccaggagtcctgccaaagtggcaccaagtggctggtggagacccaggtgaaggccaggaggcggaagagaggagcacagaagggcagtggatccccaactcacagcctgagccagaagagcacccggctgtctggagccgcccctgcccactcagccgcagacccctgggagaaggagcatcaccgcctctctgtccggatgggctcacatgcccacccattacggcgatcaaggcgggaggctgccttccggagcccctactcctcaacagagcccctctgctctcccagcgagtctgacagtgacctagagcctgtgggggcgggaattcagcatctccagaagctgtcccaagagctagatgaagccattatggcggaagagagtggtgacatcgtctctctcattcatgactgaggaagtgcctgcaggaaacaagccctgtctgaccgccaaggcttcatactcaaggatgtctatgcttccccgtgagcttcctggaaaaaacccccgggagtcgtcagtacccctgggccactgctaacaagcacctaacaaggggcccagagccccctgctccagccacatctggacccatcagtgactgcctgccatagcctgagagtgtcttggggagaccttgcagagggggagaattgttccttctgctttcctaggggactcttgagcttagaaactcatcgtacacttgaccttgagccttctatttgcctcatctataacatgaagtgctagcatcagatatttgagagctcttagctctgtacccgggtgcctggtttttggggagtcatccgcagagtcactcacccactgtgtttctggtgccaaggctcttgagggccccactctcatccctcctttccctaccagggactcggaggaaggcataggagatatttccaggcttacgaccctgggctcacgggtacctatttatatgctcagtgcagagcactgtggatgtgccaggaggggtagccctgttcaagagcaatttctgccctttgtaaattatttaagaaacctgctttgtcattttattagaaagaaaccagcatgtgactttcctagataacactgctttctcataataaagactatttgcatttgaaaaaaaaa

SEQ ID NO: 8001 - DNA, 984 bp, Homo sapiens
gcagagtttcaaatcggctgcggtgggcgaggagcagctgtgctgcggctgtgctcggccttagtggtgtcggggtctagtggacagagaagactcttggccaggcagatggcttctcggtggcagaacatggggacctccgtgcgccggagatctctccagcaccaggagcagctggaggacagcaaggagctgcagcctgtggtcagccatcaggagacctctgtaggggccctggggtccctgtgcagacagttccaaaggaggctgcccctgagagccgtcaacctcaacctccgcgcagggccctcctggaaacgcctggaaaccccagagccaggtcagcagggcctccaggctgcagctcgctcagctaagagtgctttgggtgccgtgtcccagagaatccaggagtcctgccaaagtggcaccaagtggctggtggagacccaggtgaaggccaggaggcggaagagaggagcacagaagggcagtggatccccaactcacagcctgagccagatcttgagcttagaaactcatcgtacacttgaccttgagccttctatttgcctcatctataacatgaagtgctagcatcagatatttgagagctcttagctctgtacccgggtgcctggtttttggggagtcatccgcagagtcactcacccactgtgtttctggtgccaaggctcttgagggccccactctcatccctcctttccctaccagggactcggaggaaggcataggagatatttccaggcttacgaccctgggctcacgggtacctatttatatgctcagtgcagagcactgtggatgtgccaggaggggtagccctgttcaagagcaatttctgccctttgtaaattatttaagaaacctgctttgtcattttattagaaagaaaccagcatgtgactttcctagataacactgctttctcataataaagactatttgcatttgaaaaaaaaa

SEQ ID NO: 8002 - DNA, 654 bp, Homo sapiens
aaacgaaatagtagtacgagcgcgtgttatcggacgaggctcggcttagtggtgtcggcggtctagtggacagagaagactcttggccaggcagatggcttctcggtggcagaacatggggacctccgtgcgccggagatctctccagcaccaggagcagctggaggacagcaaggagctgcagcctgtggtcagccatcaggagacctctgtaggggccctggggtccctgtgcagacagttccaaaggaggctgcccctgagagccgtcaacctcaacctccgcgcagggccctcctggaaacgcctggtttttggggagtcatccgcagagtcactcacccactgtgtttctggtgccaaggctcttgagggccccactctcatccctcctttccctaccagggactcggaggaaggcataggagatatttccaggcttacgaccctgggctcacgggtacctatttatatgctcagtgcagagcactgtggatgtgccaggaggggtagccctgttcaagagcaatttctgccctttgtaaattatttaagaaacctgctttgtcattttattagaaagaaaccagcatgtgactttcctagataacactgctttctcataataaagactatttgcatttgaaaaaaaaa

SEQ ID NO: 8003 - DNA, 1551 bp, Homo sapiens
gcagagtttcaaatcggctgcggtgggcgaggagcagctgtgctgcggctgtgctcggccttagtggtgtcggggtctagtggacagagaagactcttggccaggcagatggcttctcggtggcagaacatggggacctccgtgcgccggagatctctccagcaccaggagcagctggaggacagcaaggagctgcagcctgtggtcagccatcaggagacctctgtaggggccctggggtccctgtgcagacagttccaaaggaggctgcccctgagagccgtcaacctcaacctccgcgcagggccctcctggaaacgcctggaaaccccagagccaggtcagcagggcctccaggctgcagctcgctcagctaagagtgctttgggtgccgtgtcccagagaatccaggagtcctgccaaagtggcaccaagtggctggtggagacccaggtgaaggccaggaggcggaagagaggagcacagaagggcagtggatccccaactcacagcctgagccagaagagcacccggctgtctggagccgcccctgcccactcagccgcagacccctgggagaaggagcatcaccgcctctctgtccggatgggctcacatgcccacccattacggcgatcaaggcgggaggctgccttccggagcccctactcctcaacagagcccctctgctctcccagcgagtctgacagtgacctagagcctgtgggggcgggaattcagcatctccagaagctgtcccaagagctagatgaagccattatggcggaagagagtggtgacatcgtctctctcattcatgactgaggaagtgcctgcaggaaacaagccctgtctgaccgccaaggcttcatactcaaggatgtctatgcttccccgtgagcttcctggaaaaaacccccgggagtcgtcagtacccctgggccactgctaacaagcacctaacaaggggcccagagccccctgctccagccacatctggacccatcagtgactgcctgccatagcctgagagtgtcttggggagaccttgcagagggggagaattgttccttctgctttcctaggggactcttgagcttagaaactcatcgtacacttgaccttgagccttctatttgcctcatctataacatgaagtgctagcatcagatatttgagagctcttagctctgtacccgggtgcctggtttttggggagtcatccgcagagtcactcacccactgtgtttctggtgccaaggctcttgagggccccactctcatccctcctttccctaccagggactcggaggaaggcataggagatatttccaggcttacgaccctgggctcacgggtacctatttatatgctcagtgcagagcactgtggatgtgccaggaggggtagccctgttcaagagcaatttctgccctttgtaaattatttaagaaacctgctttgtcattttattagaaagaaaccagcatgtgactttcctagataacactgctttctcataataaagactatttgcatttgaaaaaaaaa

SEQ ID NO: 8004 - DNA, 1506 bp, Homo sapiens
gcagagtttcaaatcggctgcggtgggcgaggagcagctgtgctgcggctgtgctcggccttagtggtgtcggggtctagtggacagagaagactcttggccaggcagatggcttctcggtggcagaacatggggacctccgtgcgccggagatctctccagcaccaggagcagctggaggacagcaaggagctgcagcctgtggtcagccatcaggagacctctgtaggggccctggggtccctgtgcagacagttccaaaggaggctgcccctgagagccgtcaacctcaacctccgcgcagggccctcctggaaacgcctggaaaccccagagccaggtcagcagggcctccaggctgcagctcgctcagctaagagtgctttgggtgccgtgtcccagagaatccaggagtcctgccaaagtggcaccaagtggctggtggagacccaggtgaaggccaggaggcggaagagaggagcacagaagggcagtggatccccaactcacagcctgagccagaagagcacccggctgtctggagccgcccctgcccactcagccgcagacccctgggagaaggagcatcaccgcctctctgtccggatgggctcacatgcccacccattacggcgatcaaggcgggaggctgccttccggagcccctactcctcaacagagcccctctgctctcccagcgagtctgacagtgacctagagcctgtgggggcgggaattcagcatctccagaagctgtcccaagagctagatgaagccattatggcggaagagaggaaacaagccctgtctgaccgccaaggcttcatactcaaggatgtctatgcttccccgtgagcttcctggaaaaaacccccgggagtcgtcagtacccctgggccactgctaacaagcacctaacaaggggcccagagccccctgctccagccacatctggacccatcagtgactgcctgccatagcctgagagtgtcttggggagaccttgcagagggggagaattgttccttctgctttcctaggggactcttgagcttagaaactcatcgtacacttgaccttgagccttctatttgcctcatctataacatgaagtgctagcatcagatatttgagagctcttagctctgtacccgggtgcctggtttttggggagtcatccgcagagtcactcacccactgtgtttctggtgccaaggctcttgagggccccactctcatccctcctttccctaccagggactcggaggaaggcataggagatatttccaggcttacgaccctgggctcacgggtacctatttatatgctcagtgcagagcactgtggatgtgccaggaggggtagccctgttcaagagcaatttctgccctttgtaaattatttaagaaacctgctttgtcattttattagaaagaaaccagcatgtgactttcctagataacactgctttctcataataaagactatttgcatttgaaaaaaaaa

SEQ ID NO: 8005 - DNA, 1381 bp, Homo sapiens
  misc_feature (1381)..(1381): n is a, c, g, or t
gcagagtttcaaatcggctgcggtgggcgaggagcagctgtgctgcggctgtgctcggccttagtggtgtcggggtctagtggacagagaagactcttggccaggcagatggcttctcggtggcagaacatggggacctccgtgcgccggagatctctccagcaccaggagcagctggaggacagcaaggagctgcagcctgtggtcagccatcaggagacctctgtaggggccctggggtccctgtgcagacagttccaaaggaggctgcccctgagagccgtcaacctcaacctccgcgcagggccctcctggaaacgcctggaaaccccagagccaggtcagcagggcctccaggctgcagctcgctcagctaagagtgctttgggtgccgtgtcccagagaatccaggagtcctgccaaagtggcaccaagtggctggtggagacccaggtgaaggccaggaggcggaagagaggagcacagaagggcagtggatccccaactcacagcctgagccagaagagcacccggctgtctggagccgcccctgcccactcagccgcagacccctgggagaaggagcatcaccgcctctctgtccggatgggctcacatgcccacccattacggcgatcaaggcgggaggctgccttccggagcccctactcctcaacagagcccctctgctctcccagcgagtctgacagtgacctagagcctgtgggggcgggaattcagcatctccagaagctgtcccaagagctagatgaagccattatggcggaagagagtggtgacatcgtctctctcattcatgactgaggaagtgcctgcaggtaatgcccacctcccaagagtctttctcactgtccttctcctccatctcatgcatgagcaagttaaagaaaaagcccacagagctgatgggcacagcagagtaggtagtacctacttgccgcttgaagccagagctgctaacctcactgaccccgtcattaacagcacgctgggggcccagtaattaagacacttcaggaacccaaccggaatgagccggaagggtcctattttctaccttagaccacgtgaacaggcgagctgcttgaaggaaaaggccggttgaccgcaaggggtcaaacaagaggtctaatgatgccacggacgtccggagaaaaccacggggacgtgtaccctggggcaactgtgtaaacgactaagggggcgcaccccgtcggcgaattggccctagctgctggagccgaaggatgtgccacaacgagaaggccactacaggaggagacagcaacagcagctgcagaaattgaaagccaccagacacgtagacatgtagtgaccaacgactaagttcgtcgtcggn

SEQ ID NO: 8006 - DNA, 1489 bp, Homo sapiens
gcagagtttcaaatcggctgcggtgggcgaggagcagctgtgctgcggctgtgctcggccttagtggtgtcggggtctagtggacagagaagactcttggccaggcagatggcttctcggtggcagaacatggggacctccgtgcgccggagatctctccagcaccaggagcagctggaggacagcaaggagctgcagcctgtggtcagccatcaggagacctctgtaggggccctggggtccctgtgcagacagttccaaaggaggctgcccctgagagccgtcaacctcaacctccgcgcagggccctcctggaaacgcctggaaaccccagagccagagaatccaggagtcctgccaaagtggcaccaagtggctggtggagacccaggtgaaggccaggaggcggaagagaggagcacagaagggcagtggatccccaactcacagcctgagccagaagagcacccggctgtctggagccgcccctgcccactcagccgcagacccctgggagaaggagcatcaccgcctctctgtccggatgggctcacatgcccacccattacggcgatcaaggcgggaggctgccttccggagcccctactcctcaacagagcccctctgctctcccagcgagtctgacagtgacctagagcctgtgggggcgggaattcagcatctccagaagctgtcccaagagctagatgaagccattatggcggaagagagtggtgacatcgtctctctcattcatgactgaggaagtgcctgcaggaaacaagccctgtctgaccgccaaggcttcatactcaaggatgtctatgcttccccgtgagcttcctggaaaaaacccccgggagtcgtcagtacccctgggccactgctaacaagcacctaacaaggggcccagagccccctgctccagccacatctggacccatcagtgactgcctgccatagcctgagagtgtcttggggagaccttgcagagggggagaattgttccttctgctttcctaggggactcttgagcttagaaactcatcgtacacttgaccttgagccttctatttgcctcatctataacatgaagtgctagcatcagatatttgagagctcttagctctgtacccgggtgcctggtttttggggagtcatccgcagagtcactcacccactgtgtttctggtgccaaggctcttgagggccccactctcatccctcctttccctaccagggactcggaggaaggcataggagatatttccaggcttacgaccctgggctcacgggtacctatttatatgctcagtgcagagcactgtggatgtgccaggaggggtagccctgttcaagagcaatttctgccctttgtaaattatttaagaaacctgctttgtcattttattagaaagaaaccagcatgtgactttcctagataacactgctttctcataataaagactatttgcatttgaaaaaaaaa

SEQ ID NO: 8007 - DNA, 437 bp, Homo sapiens
ccaactggaaatcctaggcagatgtaaacagattttaaaatatgttttgtggcccaggcacagggactcacgtctgtaatccccagcactttgggaggctaaggtaggaggattgcttgagcccgggagttcaagacaagccccaggcgacaaagcaagacccatttcttaactaaataattagctgggtgtgatgggatgtacctgtagtcccagctactcagagggctgaggtgggaagaacgcttgagctcaggagttctagattgcagtgagccgtggtttgccactgcactccagactaggcaacagagtaagaccctgtttctaaaacacaaaaaaatggggtttttaaaattataattaaaagtcaataatgttctttctttattggtggaagaaaggaaaagtccaaatgagttttattcaactaaaaa

SEQ ID NO: 8008 - DNA, 443 bp, Homo sapiens
aaaacccaggtgggcctggtttctagggctcgctgcttttagggccactggggtcggatcccactccacctccactgctcaccaaagcaaacaacatcaactttaccaaatattcctcttgctacagagcaagacatgattcattcagtatcactatatcctcccacacacaaacaaaggatgcaccatgatccagatttctttaggaaattagcagcttaatgaaaacttcttgaacttatatacatgatgattcttccactattttatctgtaaaagatagtcacaggaaaaatcaggcaagcacagacataggacctaaattaagaacaatagaaaattaagaacaggagtcagcaaaacttttcatgtagagaaaaaactagataagaaagaaaccatctgcaggaccaaagggcaccatttattttgaactgtactaa

SEQ ID NO: 8009 - DNA, 329 bp, Homo sapiens
agagtgcacagtcctttctcggagtgtgcaggccccagccagacagactggcacaggtgcatccgcagaaggtcctgcatagcgctgttcctcatggtgctgcttgggatggcagagaatcagagcaacgtaaatgtccgttactaggagagggggaacgaagaaacattgttcaggaaaagtaccgaaacgtggaagtaggcaaaatgtcaattgtgcagccttctaaaatcatgctcaattgtcttaaaaatagtcctgcctgggccgggcactgtaatcccagcactttgggaggccgaggtgggtgcatcacttgaggtcaggag

SEQ ID NO: 8010 - DNA, 399 bp, Homo sapiens
cactttttaaactgtgtcttttgaggaatagaagttttaaattttgatgaaatccagttttaatttctttcttttgtggtagaacctttaattttctaagaaatctttgggccgactgtggtggctcacacctgttatcccaggactttctgggaggccaaggcaggcagctcacttaagcttaggagttccaagaccagctggggcaacatggcgaaatcccgtctctactatgaatacaaaaattagccatccaccgtggcgtatgcctgtagtcccagctactcgggaggctgaggcagagaattgcttgaacccaggaggcggagattgcagtgagccgagatcgcgcgactgcattccagtctgggcgacagagtgagactccatctcaaaaaa

SEQ ID NO: 8011 - DNA, 763 bp, Homo sapiens
caggttctacttgatgtgaaatagcggggagagtgagtagattctattggtaaaaataacaaatatggagaattaacattttaaaaatgaatatataaaaagagatgtttctatgtaatataattaatttcccaaactactggcaggaagaccctttcctgaatcccacctgaacaagtgtttttgttgcttgctttccaagggtgtgtctgcacatcgactctcatcaccttctctgtctgcctctctctgttttatcgcatgacattttcattgagctattgaaattggatgtgtcagacacattaaaagcaatggcagctgtggcaagttagttgatatattttaaaataaaccaagagggccatgcagatgtcaggggaataaattgctctgtttagcaacaagtgatttatttaaccactgtagacagggtccaaaggaatgccaagctgcatacattttggttgggaaaagctgagctattttctcagaaatctctcctgtgggatcaaaataagagtgggagaagtttatgagaagattaattaaattcttgatttgggaatgaccctgaagaatgagttttatttcccatgtgcttcaaaattgacctctcagtgtttctgcaggtgagacacattctggaagcatcaggtattggcaataaccctgacttcatgggcatcactcaaactgcagcagcagcatttctctctagcttgtctttgagggcaaagtgtgatgtttccaagagagtgat

SEQ ID NO: 8012 - DNA, 483 bp, Homo sapiens
taagatggagtctcgctctgtcacccgggagtacactggcacaatctcggctcactgcaacctccgcctcccaggttcaagtgattctcctgcctcagcctcccaagtagctgggactacaagcgcgtcaccaagcccagctaattttgtatttttagtagagatgggttttcactatgttgagcgcatgcctctaaaagctatcatttagatgaggtaagacaaagcatatacaagcacctgatatagtgcaaaaaatataggagttatggaataaggaaaatctttctttcttaaaatagctgcccaagctgaagaaaggctgagcatggcttgtgttgttcttaccaggtattccagaattatttccaaaaccatccatgcaatgtttttcaatatagttctttcccttgttcatgtcttgtaacttcagatgaatcagagtaccaaggttcgaatgatcatcagacctttcacatcaca

SEQ ID NO: 8013 - DNA, 372 bp, Homo sapiens
ccagcctgggcgacagagcgaaactccatctcaaaaaaaaaaagaaaaaaaaaaagaattgtccaatgaggtaaaataaaatcatatagttgaaactactgccaagtacagtggctcatacctgtaatcccagcactcttggaggccaaggcaggcagatcacttgagcacaggagttcgagaccagcctgggcaacatggcaagaccccgtctctacaaaaaaatataaaaaagtagctgggtgtggtggtgtgcatctgtgtgaggctgagatgggaggatcacctaagcctgggagatccaagctgtagtgagcctcagtcatcacaccactgcactccagcctgggcaacggagtgaggcctgtctca

SEQ ID NO: 8014 - DNA, 630 bp, Homo sapiens
cgttgaatgtttcgtgctgcctgctggacgtctcagttggatgaccctttgtaaacattggattctataagtgtaaaactgagcttagcttgaaagcaggacagagaagagattaaaattgtgggctctagaatcaaacctgattcttccagttactagtaacattgccatttctcatgtgtgaaatgggaacagtgacctcacagggtcattgtgagaattaaattcacagtacctagaacagtgccaggtatggagtgagtcccccgtggttgttagctttggtgagtgtcaaccactgccctggcctctcccaccttgagcaccagcactgctacagctgccactccccagggcccctccttccccactgctcttctcatctcagtgaaccacagcaatgcgaggcaacactcagccctcgatgtgtccagggtgccagggcaggcatcttacttgtcgtgtctcacttgatcctggctacagccctttgaggtggggcctgttacattcttcagcctttacagcaatgaagcatccaaggttaaataacttgttcatggtctcagaacactagaatttgtattcagacctgctgatctctgggctcagtctctttgtagttatgtt

SEQ ID NO: 8015 - DNA, 744 bp, Homo sapiens
gtctggacttccccacatcctgctttcatcagctctaagactaggtggtgacatctgcttctcaataaccttcaccaggcttgctgtgaaggtcacctgagataagagacgtgaaaggatgctgaagatgcaaaagcctaagccaggcagccctgcttggcctggcctcctggaaaggggcaatgccccagcccagcacacaaccagggcctcatgatgacaattctgcaaaactggtccttggctcgtcctcccttgccaggatgagactgtgcaaagccccacccacaggcagctgctccaggtgtcgtttaagggctccaaattccttccaactaaaagtatctttccatccctgttggtatagtggttaggggaaaaaaaattaaaagaaaatgaacaatgtattttccacgtcaagatgcctgaacttcccataacagctgtcactttaagaagccataagagaaagggccaggtctccatgggtcattattcttaccaggcggggtcaacttcctctattaacacccatgcacgtatcagaagctacccatgaaaggccaagggcctacagcaaagctcccatgactggaaagtatttaagcataaggaacagaatagtttcgagggaaggacaagaaagagagtcgggaaggctgggcagaacactacttggacaactaaaaaagcaagtggggacatctcaaagagtgggctggcgtcgacgcgaacctgtgtaag

SEQ ID NO: 8016 - DNA, 914 bp, Homo sapiens
gcacctgggacaacaggcttgcaccaccctgcctggctaatttttgtgggttttttggtagagacagtgtctcaccatgttgccaaggctggtctccaactcctgggctcaagcagtcctcccactttggcctcccaaagtgctgggattacaggcgtgaaccaccacacccagtgaggataattatttttattgcctgtaagtttaatattctaagtagaacaatactttttttcacttttttcctccttttaaaaattgagatataatttagtgaaactgtatatcagttctcatgtgtagaatgcagtgagtttgacaattgtatacacctgcatagttcacgtttctatcaagatagagaacatttccatcatgtcagaaactccatttgtgtgctttatcagtcattcctttcccaaccctgccagtctctggttaaccactcttctgattcctgtcccataggtggttttttcctgttccagacattcatataaaccataatcatacaggagtattcatgtttaaaaacataaatattttctattcatttatatatcaggctaagtggtttcataggctaatttgaaaatttgtaagaatatctcataacagtaacatactgcagtgctagtcttattatttagagaaatgtaagccactgactctactttaaggaaacaacctataagagtgcagattgccttcagctaactgtggtactactcttattaggtgtttgtatgctattttgataaatatctttccaaaattttcaagaagccagcgaaacagattgaagaaatgtcttctacatatatggtttggctttaatagctcatcagaaacaggatagtgttatatttgaatcttttaaaataaagttcagatagttcaacaatgactaaaaa

SEQ ID NO: 8017 - DNA, 413 bp, Homo sapiens
aattactcaccctatttctctaaaaggctgcagtagacacatgagtgccaagagaggagcaagaaacccaaacattactgatctcaggccactgtggacacagatgcgcagaccctgatggcttgggtccccatgcacaggctgcagagggaagcccagggactccccctgctcccttcaactgttccaggattttcatttttccacatcctaagtcacattcagctcatcttgtcatagattaactttaaaatgtagcaattcagcttggagagggagagagagagaggaaaaagaagagagctggagggaatctgaaagcggcctgggagtggaagggccaccatgctgccctggacaccaggaacaggaaatcggatttgaggcagagaagctgtaggtggaaggggctt

SEQ ID NO: 8018 - DNA, 480 bp, Homo sapiens
ttttttttcttaacaacccactaaaaatgtagaaagcatttctagcttgtgagccctacaaacaaagctgtggactagagcttgctgaaccttgatctagaatatcccattactaaatattctctcacatgtcattagatatcacctaggagtggagtctctgggctacactacaagcatctgtccagctttacccatgctgtttcaccagcacagggaagttctagaatctccacatctttgtcacactgggcagtgtcagtctttaattttggctattctggaaaatatgacggtattcatttgttttttttaaattgcatttcactgatgactaacgagatcaagattcttttcatacattcattggctgtgttcctttcgtaaagttgtaaagtgcctgaacaagtcttttgcccattttaaaattggatgggcttcctagcgggtgtgtcacgcgggcgcgagtttgtgagtggg

SEQ ID NO: 8019 - DNA, 519 bp, Homo sapiens
ccgaaggcgaagaaggaagctcctgtccctcctaaagctgaagccaaaacgaaggttttgaaggccaagaaggcagtgtttaaaggtgtccacagccacacaaaaaaagatctgcacgtcacccaccttccggcggcccacgacacggcgactccagaggcagcccaaatatcctcggcagagcgcccccaggagaacaagcttgaccactatgctatcatcaagtttctgctgaccactgagtccgccatgaagaagatagaagacagcaacacacttgtgttcgttgtggatgttaaagccaacaaacaccaaatcaaacaggctgtgaagaagctctatgacattgatgtggccaaagtcaacaccctgattaggcctgatggagagaagaaggcatatgttcaactggctcctgattacaatgctttggatgttgccaacaaaattgggatcatctaaactgagtctggctggctaattctgaatatatatatatatatatcttttcaccataaa

SEQ ID NO: 8020 - DNA, 317 bp, Homo sapiens
tttacttctcaagcctagctagatgcctggaatttcccttgaaggaagtcaagattttcctttatctccatactggctgatggtgatcgagtaagcccctaagaggggtccctgctccatctcgagatgctgctagattctacagtgcctaataaacagctctcgcctggccgacaaagagctgcttgctctctggatagcaattccaaagtgaacagacaacatcctgtttggaagactgccactctgttagaagaagcatcaggaaaacctttcttttgagctatttataactaacagcaattgaccaagtatac

SEQ ID NO: 8021 - DNA, 381 bp, Homo sapiens
tccatttctagtataggatcctttgtactagatgatctttccaatatttccatccagtgccaataaattgttttgcttcaagtcactggccctttaaattgaataattagggtcacaagtattggagtagtttccatggaaagtaactttagctacttaaacagtaatctgtctgtgaggactgagttcacaagctgaaaagcattcgtatgcctctggacttcagaacagcaacaatgctgtagttagcagcaatggcatgatggcttcagggcaactgaatatgcaggttggatcttcaagtcaggctatgtcctggagcaccctatatttacccttactctttcccaattttgattgaacacttaaagtatgctagac

SEQ ID NO: 8022 - DNA, 878 bp, Homo sapiens
gcgctgaaagcagagatcggagcagaccagacacagggatggttgaagctgaagatgggaatgaggttggacatgggttccaattggggatggtcctgagaattggacttttttttctgtttgtttgtttgtttttgagacagagtctctctctgtcaccaggctggagtgcagtggcacaatctcggctcactgcaacctctgcctcccaggttcaagcgattctcctgcctcagcttccctagtagctgggactacaggtgcccatcaccacgcccagctaatttttgtatttttagtgaagacgggggtttcaccatgttggccaggatggtctcgatctcttggccttgtgatccacccgcctcgacctcccaaagtgttgggattacaggcgtgagccactgcgcccggctgagaattggacactttcaactggggccctgagaggctggtggcagcacacccagggtcattcagtggggaaggtttccggagtagggacgaagatggagatggggttggcttgggatcaggagtgaggatgggaatgcagatggaatcagaggggaaatggagataagatttggaatggaggccaggtgcggtggctcacgtctggaatcccagcactttgggaggtcaaggtgggaggatcacttgaggccaggagttcagaccagcttgggcaacatggcaagaccccatctctacagaaaaaattttaaaatagctgggcatgatggcgcatgcctgtagtcccatctgctcaggaggcagaggtgcgaggattgcttgagcccaggaatttgaggctgcagtgagctatgcctgcaccactgcactccagcctgggagacagtggaaaatcccaactt

SEQ ID NO: 8023 - DNA, 320 bp, Homo sapiens
atatatcctcactttaataaattatttattatttatatattattaaattaagtattatttttataataaaaataattataattcacttaggtgatggtataacttcaaatttataattgttttacagttctaattacattacagttggggccaaagaaatccaataaccaaattaggtcatataaccaatccaataaccaaattagggcacaacttcaaatttataaaatttgaagttataaagtcacctaaatgaattataattatttttataaaaataataaataattctcatagaaatattagaaaatgcagataag

SEQ ID NO: 8024 - DNA, 442 bp, Homo sapiens
ttaatcactcgacctgaatgcatggcaaggcatttttgtcatcaaaaggatgaggtctgtggtggcttaaaatgtagctgttattatagaagagtgagttacgtcttttctttagaacagaaagagaccaaagctatctcatagaactaaaacccctcaatgacaagtgaggaagtagatgtgagaggtcacgcgacctcctgaggtcccagccttcctaggcggtggagctgtagagagggctcttcactgctgcctggcccatctggggtggcctgcgctcggggacacaggcggatgaggaggatgttgtggagcccactgaaaatgagagtcttaatggtcactaggaaaattccggttgcagactttttacatcacacttgatattaggacagcctacctacttgtttgagtgtcacagcctgatatgtaaaatagt

SEQ ID NO: 8025 - DNA, 911 bp, Homo sapiens
cagtgaagtgtgagcgtacaagatgccatggggatatgaagggagggaatggctaaccaggtcagcagacgtcacaggatgtatttgagctgagtcttgaaggggtgaatgttttgtaattaataattaatgagattttgttactgatggtgcataacatttattgaatattcacaggctctgtgctaacggctttgcatgcttttagtcctcagaactgccctctacggtatagatagtattcctaattccatcagatcaaggacatggaagctttgaagagttaggaaaatgtcctttgatcacatagtagaaaatagcagagctggggcttggacctcaggtctttctgactctaaattccacagccttaactgtcacattatgttgcacaaagtccatccattctacctagggagaaagatggaagagacttcatggggcgagtatttttggcaagtttttaggcacgaaaaagacaaggtagaagaaagatattcttggtaaagggaacagcatttgtaaaggcgcaaagttagtggttccactctgctggaactggagtagaatttctaaaatgtggtcagaatcatgtggaccacatgtcaaaattcagattctgtgacacctttcccagatacactgaattaatatctggaggtgagaagcacaaaagtttgtatggttttctccaaagttccccaagtgattcttaagcatactgaagtttgggaactgctggtgtaacacatagggttgatggtgagtggaaagaagtgagtctaaagaggtaggcaagagtttgcatcattattataaaatcttaaacttggttgggaggccaaggcggaaggatcacttgaggccaggcatttgagaacagcctgggcaacacagactgtctctacaaa

SEQ ID NO: 8026 - DNA, 546 bp, Homo sapiens
atcaactcaaattgggtaaaagacctaaatgtaagacctgaaaccgtaaaaaatactaaaagaaaacctaggaaaaactctggacaattgatctagccaaagaatttttgactaagacttcaacatcacaggcaacaaaaacaaaaacagaaaaatgggacataattaaactgaaaaacttccacatagccaaataaataattaacagagtgaacaaacaacctgaagactgggagaaaatatttgtaaactaagaatccaacacggtactaatatctagaatttacaaggaactcataacaacaacaacaataaaaacaaaccctttaaaaagtagccaaggctgagcatggtggcccatccctgtattctcagcacttggtggggctgaggcagaaagattccttgagctcaggagttggagacaagcctgcctgggcaacattgggacatctcatctctacaaaaatgaaaacattagctaggcatggtggcatgcgcctgtggccccagctaggctgaaaaacaaagtgagaccctgtttct

SEQ ID NO: 8027 - DNA, 624 bp, Homo sapiens
ggaccaagcccttctctgtctcttgggactaggtaagacctgaaattcttatacgctccaaggagatggaatggacagactagaggttcagagccagtctaatttgatatgaaaaggtaaaaaaatttgatacttcttacatctcagttctgtagaagaaactcaaacccattgtgtaattctttcacttgatatttggtataatagtcatggtcatcagctcattctgagcaggagtgctaatgaaggatgtgtgtctgtcaagtccaggctgcttcatacaactcttgtgcactccaccctctatccccccatcatcctcacccccagttcttcttttgacctgaggtctgtttccccatcattaccctgcattgtttgcctctgcccttgcaaaagagactgaataagtatctctcatgtgacagctcctcaaatatttgaaaatagttgttctgtcctttgagttaaatagcagcttttgttgattgtctgtagtctttaaattagtctgtagtctagatagtgtgagttggaatagttcctgacctcaaaaatgttttgatcttccttggggaccttgtctagatctgggaaggagtaccttgaggctgaaaaaatatg

SEQ ID NO: 8028 - DNA, 416 bp, Homo sapiens
agcaacccaggaaagatgtgaattctgtggcattaaaattcagcaactcgcaaaatttggaaaccttaacatttcacttagcaaaatacatatatagtaatgtaaaggccctgagtcttgggttttcatttcaaggtgagcatttgatattggagctgggttatttcttgttttgttctctaatattgtcagaagtaatcctactccttggtttcaacatttcccctctccttttaattgggacacccctactcgtttaccaccagcttgaacacatcacaggtaattgcaagcaataactaaaatagtagttgtgcagctatgaactgtgagcagcttgctctttcccatcctggcaattggttgtcagtttctttccttccatctgaacccagtaacatcacccacgtttcccc

SEQ ID NO: 8029 - DNA, 4859 bp, Homo sapiens
ctgatggatttgcattcaggttccagccctgcgtttcctatattgactccttatacacgacctggcgctccagtttaggaggagacgttgttttgtaatcaaccacgaacgatgaaaccttccatagctgagatgcttcacagaggaaggatgttgtggataattcttctaagcacaattgctctaggatggactaccccgattcccctaatagaggactcagaggaaatagatgagccctgttttgatccatgctactgtgaagttaaagaaagcctctttcatatacattgtgacagtaaaggatttacaaatattagtcagattaccgagttctggtcaagaccttttaaactgtatctgcagaggaattctatgaggaaattatataccaacagttttcttcatttgaataatgctgtgtctattaatcttgggaacaatgcattgcaggacattcagactggagctttcaatggtcttaagattttaaagagactatatctacatgaaaacaaactagatgtcttcagaaatgacaccttccttggcttggaaagtctagaatatctgcaggcagattacaatgtcattaaacgtattgagagtggggcatttcggaacctaagtaaattgagggttctgattttaaatgataatctcatccccatgcttccaaccaatttatttaaggctgtctctttaacccatttggacctacgtggaaataggttaaaggttcttttttaccgaggaatgctagatcacattggcagaagcctgatggagctccagctggaagaaaacccttggaactgtacatgtgaaattgtacaactgaagagttggctggaacgcattccttatactgccctggtgggagacattacctgtgagacccctttccacttccatggaaaggacctacgagaaatcaggaagacagaactctgtcccttgttgtctgactctgaggtagaggctagtttgggaattccacattcgtcatcaagtaaggagaatgcatggccaactaagccttcctcaatgctatcctctgttcattttactgcttcttctgtcgaatacaagtcctcaaataaacagcctaagcccaccaaacagcctcgaacaccaaggccaccctccacctcccaagctttatatcctggtccaaaccagcctcccattgctccttatcagaccagaccaccaatccccattatatgccccactgggtgtacctgtaatttgcacatcaatgaccttggcttgactgtcaactgcaaagagcgaggatttaataacatttctgaacttcttccaaggcccttgaatgccaagaaactgtatctgagtagcaatctgattcagaaaatataccgttctgatttttggaatttttcttccttggatctcttgcatctggggaacaatcgtatttcctatgtccaagatggggcctttatcaacttgcccaacttaaagagcctcttccttaatggcaacgatatagagaagctgacaccaggcatgttccgaggcctacagagtttgcactacttgtactttgagttcaatgtcatccgggaaatccagcctgcagccttcagcctcatgcccaacttgaagctgctattcctcaataataacttactgaggactctgccaacagacgcctttgctggcacatccctggcccggctcaacctgaggaagaactacttcctctatcttcccgtggctggtgtcctggaacacttgaatgccattgtccagatagacctcaatgagaatccttgggactgcacctgtgacctggtcccctttaaacagtggatcgaaaccatcagctcagtcagtgtggttggtgatgtgctttgcaggagccctgagaacctcacgcaccgtgatgtgcgcactattgagctggaagttctttgcccagagatgctgcacgttgcaccagctggagaatccccagcccagcctggagattctcaccttattggggcaccaaccagtgcatcaccttatgagttttctcctcctgggggccctgtgccactttctgtgttaattctcagcctgctggttctgtttttctcagcagtctttgttgctgcaggcctctttgcctacgtgctccgaaggcgtcgaaagaagctgcccttcagaagcaagcggcaggaaggtgtggaccttactggcatccaaatgcaatgccacaggctgtttgaggatggtggaggtggtggtggcggaagtgggggtggtggtcgaccaactctttcctctccagagaaggcccctcccgtgggtcatgtgtatgagtacatcccccacccggttacccaaatgtgcaacaaccccatctacaagcctcgtgaggaggaggaggtggctgtttcatcagcccaagaagcagggagtgcagaacgtgggggtccagggacacaaccaccgggaatgggtgaggctctcctaggaagtgagcagtttgctgagacacccaaggagaaccatagtaactaccggaccttgctggaaaaagagaaggagtgggccctagcagtgtccagctcccagcttaacaccatagtgacggtgaatcaccatcaccctcaccacccagcagttggtggggtttcaggagtagttgggggaactgggggagacttggcagggttccgccaccatgagaaaaatggtggggtggtgctgtttcctcctgggggaggctgtggtagtggcagtatgctactagatcgagagaggccacagcctgccccctgcacagtgggatttgtggactgtctctatggaacagtgcccaaattaaaggaactgcacgtgcaccctcctggcatgcaatacccagacttacagcaggatgccaggctcaaagaaacccttctcttctcggctggaaagggcttcacagaccaccaaacccaaaaaagtgattacctcgagttaagggccaaacttcaaaccaagccggattacctcgaagtcctggagaagacaacatacaggttctaacagagagaagaaaatatattagtgctttttttttttcaaaagaaaaggaaaataaaagaaatatatcccttgctccctttacacttgtcccagtaactccatcctcacgatctttcctaccctgaacaaaactaaaaccgcatgataactagagaatacagatgtatgctctcccctctcagatgcgatttggaggaagggccatactcagatcattaatcaatgaaagtgccttcgcagacttttgccagcaaatgttatcattatttttttatactgaaacttgagactttgactgtgccatgtataagatatactggggatcattgtatggatcctaattaagtaaaattcaatgtgtctttttattttcagtaactattttttttatagttgtagttttgatttaaagggggggaaacaagttgacatttgtcatttgtggctttctttcttatcatcatggcacagattctgtacatgtattaacaatgcagtttgctgcatgcctggaaactgcaagatggggagggagggggcgggtcttgctcgaatgttctcactcactatcttgtctctcatacacatatccatctgcagaccatggtccctaaacctgcagtttcttcctgctggtgcaggtacacacacacacacacacacacacacacacacacacacacactccataccatttccattcaactcaatctgcttagttcgggtttgatccatttttctcctctccatagttctaccacccttcactgctagtgtacagctcacagcatctctcctaccaccctgggaaaagtcacattctaggctggattctactgaagtagaggcctggtggtttaacagccgaagacacacgcctagggatgagcaccctctttgtgacacttcatcctgatgccaagattttttggagaacatctgcactttcttatatatatatataatattaaaaaaagcaactgggtatatatcactaacagctttgtaggaagcacttttaatgttttctctctcacacacaaagattcaaaagaaatgtgcatatatttattctgtaatttcagtgattataaattgtaaaggtaatgtttaatcattgtatagtgattatgcctctggtatagctttcctaataaaaagtttttgaaaaacataatacattatatatagaggatacaaagcttgaaccttaaactccagctatgccatgcctttcgtgcttccattttagaaatgatttcttttacttgttacacagaaagtaatttattaacgggtttgatgcactgtgatgttgataaatcttatatcccaccatctctagtccaaaccaggatacaattgagacttaaaatgtgacttacggtttacttttttttccttgaattatgaatttcagtcttagtaaccagtgatgcactgtttcccaggcaagatgcaagggggagaaaataaagtaactagatcgctaagaagtacaggattaattaggagaagataatctaggatccatacatcttaagataataaatgagataaagaaattggaaagtaaaattgctattgtttttaaaatatgtagtccaattacatgcacaccctcacacacccacacgcttccacacacacccacacaacccaataaatatcaaaggccgtggagccaatttagatggccagaatcctgtgaaagctgtcacttatatttggttaccattttccaaccacttacagcaactggccccaataacgcttgaactaagtcagaggatgctgaatgagtttttcgtcat

SEQ ID NO: 8030 - DNA, 4981 bp, Homo sapiens
agcgaccatttccctgcaagtctcaaaggtggaaacatttaaacggattacaagcgtgattcggtagcctttcggaaagttggtggccagaagaggagaagctacaaggctacagtatgatggatacaattcagcttcgcagagagtttgcccctcctgctgggtagcccctcgcagcaaacctcggagatcctgagcgctctgcaccatagttttgtaatcaaccacgaacgatgaaaccttccatagctgagatgcttcacagaggaaggatgttgtggataattcttctaagcacaattgctctaggatggactaccccgattcccctaatagaggactcagaggaaatagatgagccctgttttgatccatgctactgtgaagttaaagaaagcctctttcatatacattgtgacagtaaaggatttacaaatattagtcagattaccgagttctggtcaagaccttttaaactgtatctgcagaggaattctatgaggaaattatataccaacagttttcttcatttgaataatgctgtgtctattaatcttgggaacaatgcattgcaggacattcagactggagctttcaatggtcttaagattttaaagagactatatctacatgaaaacaaactagatgtcttcagaaatgacaccttccttggcttggaaagtctagaatatctgcaggcagattacaatgtcattaaacgtattgagagtggggcatttcggaacctaagtaaattgagggttctgattttaaatgataatctcatccccatgcttccaaccaatttatttaaggctgtctctttaacccatttggacctacgtggaaataggttaaaggttcttttttaccgaggaatgctagatcacattggcagaagcctgatggagctccagctggaagaaaacccttggaactgtacatgtgaaattgtacaactgaagagttggctggaacgcattccttatactgccctggtgggagacattacctgtgagacccctttccacttccatggaaaggacctacgagaaatcaggaagacagaactctgtcccttgttgtctgactctgaggtagaggctagtttgggaattccacattcgtcatcaagtaaggagaatgcatggccaactaagccttcctcaatgctatcctctgttcattttactgcttcttctgtcgaatacaagtcctcaaataaacagcctaagcccaccaaacagcctcgaacaccaaggccaccctccacctcccaagctttatatcctggtccaaaccagcctcccattgctccttatcagaccagaccaccaatccccattatatgccccactgggtgtacctgtaatttgcacatcaatgaccttggcttgactgtcaactgcaaagagcgaggatttaataacatttctgaacttcttccaaggcccttgaatgccaagaaactgtatctgagtagcaatctgattcagaaaatataccgttctgatttttggaatttttcttccttggatctcttgcatctggggaacaatcgtatttcctatgtccaagatggggcctttatcaacttgcccaacttaaagagcctcttccttaatggcaacgatatagagaagctgacaccaggcatgttccgaggcctacagagtttgcactacttgtactttgagttcaatgtcatccgggaaatccagcctgcagccttcagcctcatgcccaacttgaagctgctattcctcaataataacttactgaggactctgccaacagacgcctttgctggcacatccctggcccggctcaacctgaggaagaactacttcctctatcttcccgtggctggtgtcctggaacacttgaatgccattgtccagatagacctcaatgagaatccttgggactgcacctgtgacctggtcccctttaaacagtggatcgaaaccatcagctcagtcagtgtggttggtgatgtgctttgcaggagccctgagaacctcacgcaccgtgatgtgcgcactattgagctggaagttctttgcccagagatgctgcacgttgcaccagctggagaatccccagcccagcctggagattctcaccttattggggcaccaaccagtgcatcaccttatgagttttctcctcctgggggccctgtgccactttctgtgttaattctcagcctgctggttctgtttttctcagcagtctttgttgctgcaggcctctttgcctacgtgctccgaaggcgtcgaaagaagctgcccttcagaagcaagcggcaggaaggtgtggaccttactggcatccaaatgcaatgccacaggctgtttgaggatggtggaggtggtggtggcggaagtgggggtggtggtcgaccaactctttcctctccagagaaggcccctcccgtgggtcatgtgtatgagtacatcccccacccggttacccaaatgtgcaacaaccccatctacaagcctcgtgaggaggaggaggtggctgtttcatcagcccaagaagcagggagtgcagaacgtgggggtccagggacacaaccaccgggaatgggtgaggctctcctaggaagtgagcagtttgctgagacacccaaggagaaccatagtaactaccggaccttgctggaaaaagagaaggagtgggccctagcagtgtccagctcccagcttaacaccatagtgacggtgaatcaccatcaccctcaccacccagcagttggtggggtttcaggagtagttgggggaactgggggagacttggcagggttccgccaccatgagaaaaatggtggggtggtgctgtttcctcctgggggaggctgtggtagtggcagtatgctactagatcgagagaggccacagcctgccccctgcacagtgggatttgtggactgtctctatggaacagtgcccaaattaaaggaactgcacgtgcaccctcctggcatgcaatacccagacttacagcaggatgccaggctcaaagaaacccttctcttctcggctggaaagggcttcacagaccaccaaacccaaaaaagtgattacctcgagttaagggccaaacttcaaaccaagccggattacctcgaagtcctggagaagacaacatacaggttctaacagagagaagaaaatatattagtgctttttttttttcaaaagaaaaggaaaataaaagaaatatatcccttgctccctttacacttgtcccagtaactccatcctcacgatctttcctaccctgaacaaaactaaaaccgcatgataactagagaatacagatgtatgctctcccctctcagatgcgatttggaggaagggccatactcagatcattaatcaatgaaagtgccttcgcagacttttgccagcaaatgttatcattatttttttatactgaaacttgagactttgactgtgccatgtataagatatactggggatcattgtatggatcctaattaagtaaaattcaatgtgtctttttattttcagtaactattttttttatagttgtagttttgatttaaagggggggaaacaagttgacatttgtcatttgtggctttctttcttatcatcatggcacagattctgtacatgtattaacaatgcagtttgctgcatgcctggaaactgcaagatggggagggagggggcgggtcttgctcgaatgttctcactcactatcttgtctctcatacacatatccatctgcagaccatggtccctaaacctgcagtttcttcctgctggtgcaggtacacacacacacacacacacacacacacacacacacacacactccataccatttccattcaactcaatctgcttagttcgggtttgatccatttttctcctctccatagttctaccacccttcactgctagtgtacagctcacagcatctctcctaccaccctgggaaaagtcacattctaggctggattctactgaagtagaggcctggtggtttaacagccgaagacacacgcctagggatgagcaccctctttgtgacacttcatcctgatgccaagattttttggagaacatctgcactttcttatatatatatataatattaaaaaaagcaactgggtatatatcactaacagctttgtaggaagcacttttaatgttttctctctcacacacaaagattcaaaagaaatgtgcatatatttattctgtaatttcagtgattataaattgtaaaggtaatgtttaatcattgtatagtgattatgcctctggtatagctttcctaataaaaagtttttgaaaaacataatacattatatatagaggatacaaagcttgaaccttaaactccagctatgccatgcctttcgtgcttccattttagaaatgatttcttttacttgttacacagaaagtaatttattaacgggtttgatgcactgtgatgttgataaatcttatatcccaccatctctagtccaaaccaggatacaattgagacttaaaatgtgacttacggtttacttttttttccttgaattatgaatttcagtcttagtaaccagtgatgcactgtttcccaggcaagatgcaagggggagaaaataaagtaactagatcgctaagaagtacaggattaattaggagaagataatctaggatccatacatcttaagataataaatgagataaagaaattggaaagtaaaattgctattgtttttaaaatatgtagtccaattacatgcacaccctcacacacccacacgcttccacacacacccacacaacccaataaatatcaaaggccgtggagccaatttagatggccagaatcctgtgaaagctgtcacttatatttggttaccattttccaaccacttacagcaactggccccaataacgcttgaactaagtcagaggatgctgaatgagtttttcgtcat

SEQ ID NO: 8031 - DNA, 462 bp, Homo sapiens
attcaataaaccagccacagacgttatcatcagatgtgcccagagacaaggtggacaggggcatttgctgtggagaccagagggccagagagagtacagggacctggatagatggctccagcacctcttcttctcccctacacccatatgccatcttgataaacagcagggaaatctgaaaaataccaagtcttcccatagggacagtgttacctcccaaaaactgtttgaataattggcttgaactggattttctgaactgaactaatgctattgttttgtgggtttttttcttcctactgagtagagtagttgtttatgggggacatctgatcctttcattttcttccagagagctaaccacctgttctgacaccatttattgaatagtacctcttttcccccactgatgtgagaggctgcatttttcatctaataaaatcgaatatatatttagatcta

SEQ ID NO: 8032 - DNA, 446 bp, Homo sapiens
cactgccctttgcagcaccagctgattacattgctttttccatgttctagctgttcttttgagccgttttatagccgagcatctccaccagaagagcggataggaaaaaggaaaagagaggaggatttgaccttggtatcttgcttcatttccttctctgacaaaaatttggtgaaaaggttaaaataagttgttacctcccaaaaactgtttgaataattggcttgaactggattttctgaactgaactaatgctattgttttgtgggtttttttcttcctactgagtagagtagttgtttatgggggacatctgatcctttcattttcttccagagagctaaccacctgttctgacaccatttattgaatagtacctcttttcccccactgatgtgagaggctgcatttttcatctaataaaatcgaatatatatttagatcta

SEQ ID NO: 8033 - DNA, 399 bp, Homo sapiens
caagaaatttttaaaaatacagaaaagctcaaaatttttaaaaatacacacacaaaaaaaatcaccctaaacctattattctgctacccagaaataagcattgttaatattttggtgggctttttctatttctatttagggagagctttcaacatttcaccgttcagtatgatatcgattgcagattttttttatactctttatcagtgtaagaaaactccctcctattcttagtttgtagaatttttaaaacagctattgctgttgtccacaggaaagtccctttgtgtctgcactattttaatcccaaaataaagaaaaatctgctaattccacaggtggttatatagatgctggggtttcagcacttcctgtttgaccggaaactctcagtgaagt

SEQ ID NO: 8034 - DNA, 301 bp, Homo sapiens
  misc_feature (283)..(283): n is a, c, g, or t
atgaagagcacaagctggatgacaggagtcttttggagcagttctgagaaggaattgacaaagaggtcataggacagcagcaggaactgcagagagagcaccaggctgtagttactggtctggagcatcttccttctgttttctcggcgcccaagggcacatcccacagttcccagaaaaccgctcctggctgtctccctaccactgagggagaggcttctagttcctttgaatgagagctgtttcccttgctctaaggcaagcacctccaaactccaactgncgttgtcacctcgtgccg

SEQ ID NO: 8035 - DNA, 294 bp, Homo sapiens
tgtctccttgacaaatcctcatctaacctttgcctaaatatttctagagatagaggcttgctactacatactgagaaagccatgtccttttttcactagctctaattgtcacaaagttttctcgtattgatctgaaaactctagcagatttatcacttgagcaagaacatgaacgctcaactgcagttaacagtagatctagacctctgcatatttttacattgggttgtagtaaaacctttctctctaaagatcccagtgtttgcaaacagttttactgctgccatgtgatgg

SEQ ID NO: 8036 - DNA, 445 bp, Homo sapiens
tgaaaaacatacttgaacacagagctgggagttttgacaggtaggctttaggagctttgtcaccaccaccaggacacagggatctcccggcaaggtgctcagggacctgtggggcccagaggccagggggctgggagggcctggagtggccagcagggaggctgcagagccatgcctcctcctcccctaatcaccccagcagaccttcctctgagaagcagcagaccagggagggggcatgtgtcattctctgccagtcactttcttctccactccaccacctatgcatttaacacagaaagtgcatgaggccacgctgtctgcagtcagccaccgccactgctccatccaaggactctgcactggaggccagcaggatgccctgggcttcctgcaggggctaagccatgcatgggtcccagtgcagtcaaggccccaaggcagt

SEQ ID NO: 8037 - DNA, 432 bp, Homo sapiens
ctcttatccacaccttaccccctaccttggatttgttctacagtctccataaatctaattaaatagagctgatgtctctcctactttccaatttcagttggtaagctgaagtgagagcgaggcatgctctctgaaactaacttctgatccttttacccacttaatcccttttactaggattctgatacttccagatttggtcaaaattacctctaagacctcccctaacatgaatgtaacagaaatggattaagtctatgttatgagaggtgtccatgaaaaaagataataataagaaacgggacaggcaaataaatgcttaacaagtattccttaatggcaggtgatactgaaatctattttctagccactcactaggtctttttgctaaagcatttttttcagaatctggggctatgtctatagcggccg

SEQ ID NO: 8038 - DNA, 406 bp, Homo sapiens
tctctctgaactagcaatttatcatacttccattcctcctaatcaaatggtttggggaataatagaaagcatatgcatagtaaaaacttaaaagtgcaaagctagatgcttcagatagtagtcctcatttccttaatgaccacgcacatattcataacacagcattttatacaaatcaggctaaagtacaatctcaaaagaccctggtgctttcaacgtttgaaaaatgagtgcccataaacaatatcaaatcacaatataacttgataattataatgtttatatttcacttattaaatacagaaagactgtttggtcttaaatataggtggtactttcacccttgaatgagaaataaatttatttatttagcaaaaataaatttatatgagaatggaattttgta

SEQ ID NO: 8039 - DNA, 397 bp, Homo sapiens
gagtgaaatgtcccacgagatgggaggagagcagaggtgtgcaggctgagtgaatcagcttccaggagacaggagtcaaaggtggtgccaggcagagaaaggtcatagagttaggaattgcactaaacacagcctgattaggctctggcacctactagctgggaggcctcttgaagtcacaatggcccacttgtaaaacagggacaatatgaccgctgttgtaggactgctggaaggtagagctaatgcctaacccataccatttattaataagtggtaaagacaattataatcccatccttagaggatggttgagttccgctaggaagcccggagagggaaggcattcctgttacgggagattttaaggtggcatttaaggtggggaggggggggc

SEQ ID NO: 8040 - DNA, 423 bp, Homo sapiens
gaactcctgagttctcaattttactatttgattgctactggtaacttgctcaccaaaaggctctaacagtttcactcctgccaatactgaataccaccaccacgcccggctaattttttgtatttttggtagagacggggtttcaccatgttggccaggatgatcttgatcccctgacctggtgatccgcccgcctcggcctcccaaagtgctgggattacaggcgtgagtcactgcgcctggcctcttttattattattactatttttttgataaaaggtactgtaccattgtttaaattcatttttctctagtttcttggtgaggctgggcacctttcctttttgtttttgtttttgttttttttgagacagagtttcactcctgttgcccagcctgggcgataagagcgaaactccgtct

SEQ ID NO: 8041 - DNA, 514 bp, Homo sapiens
gaactcctgagttctcaattttactatttgattgctactggtaacttgctcaccaaaaggctctaacagtttcactcctgccaatactgaataaaaaaaaaaaaaaaaaaaaaactgcagtaaaaagccagctgtacctatacatgatgtacctacttgtatgcatagccttaagtatacctatagaataaattcctaaaagtggaattgttggtgtaggcattaataaatcttgtcaaattgccctccataaaggtttctgccatttttcattctgaccaactacatgtgagaatgtgtatttcctccaaaacatcaatatttgtgtttttaaataaaactacttgagagtcatgtttaaaaaaacaaacaaaggtcgatcgcgacggcgtagatgataattatttttttggagaaagaggtttcgcccggttgcccggctgggagtgcaatgggcgagtctccgctcaagggaccctccacctcctagggttaaggcatttcctggcccggc

SEQ ID NO: 8042 - DNA, 785 bp, Homo sapiens
acctggtgattgattagaagtgaaggtcaacaaccctaattaatgcctccttcttgggaataagcaaatcatagaaagtttgtgcatggggaacagggagactccaggggcagtggagaggcagagaagagtggtatcatgggagcacacagaaatctctgggcatcccctcagtctagctgtggacagtgccctcgttgggctgggaaaggttgggggagagagagctcaccaggaacatgtactaagttgttccatttttactgatgctgatttctattcattcttttgccttatattgtagtaagtgtctactaaatttagatttagtgaatagtctaaatctaaaactctataaattcacttttatcattgtaatttgccactgagaacccaccattcagaacaacagtccaacttcaaattgcttcagtgattatattgttaatatttcctagcttccagaattgaatctcatgaaattcatggaatttggatcaatgtgtgtgggtactgtggtgatccattccctcctgtggactatttctcctttctgaactgaatgcttctttggttttatgtctactcattaatgactacatagtaacccacttctgacaaaggccagtctacactgccaaagtgtttcacttagcatgcctcccagtggaagcagaggtggaatccaaagttttcagttcatgttgctgattcattcaagttactgaagaaatgtccagagactagagactgtggaagttgtttctgttctgtgaaaaaaaaaa

SEQ ID NO: 8043 - DNA, 372 bp, Homo sapiens
cttacccttaatggcatttgcaagttctaaatataggctggaatattaataatcctcagcccctgctaaaaggcagataatctaagagagctcttgataattcataagtcgaggtggacaaaaaattataggttgatgctgtgaaggcagccaggatttatgagtacaagcctggagagaagagaggtgtgaaaaagtaagcataatactaaggtcattttcctataaaagcattttctgaagtaagctgattagagtgagaggctaggaagccaagcatacagccgttgaaaatccaaatcagagtttttaaacatcttttagtgctgagaagacaaaactggaggccatgactcactaagggagaggagc

SEQ ID NO: 8044 - DNA, 260 bp, Homo sapiens
tttttttttgagacagggtctcaccgcacattcaggatggagggcagtgtgaacatagcttactgccacctcaaactcctgggctcaagggatcctccagcctcagcctcctgagtagctgggactacaggtgcaagccaccacgtctgctaattctttaacttttttgtggagacaagctatcattatgttgcccaagcgggtctcaactcgaactcctggcctcaagtgatcctcctgccttggcctcccgaagtgct

SEQ ID NO: 8045 - DNA, 599 bp, Homo sapiens
atatgttacagttgcactcaaaaatcgtggtgactcaacacaacagaatgtaaacccaatcaggacgggggtggctctgctccatattgtaggggaccagggctttgctgtcttcgttggtggctttccaggcctccctgggtgttaacatccagcactcagacagtcacagaggaatgaacacagttgtttgtaatggcggccaagatcgtccaggcccggaagttgtgactatcactttcactgacatttcactggccagaagtcagccatgggccacacctgtctccaaaggaggttgagaaatgtagtccagctgagtaccctggaggacgggaccaggctgtggtgggacagttcagtcttctctagcacagcggtctccaacctttttggcaccaggaatcagtttcgtggaagacaatttttccatggaggaccgagaggggatggttttgggatgaaattgttccacttcagatcatcaggcattagattctcatcaggagcatgcaacctagatccccagcatgcacagttcacaatagggtttgctcccatgagaatctaatgctgctgctgatctgacaggagctgga

SEQ ID NO: 8046 - DNA, 452 bp, Homo sapiens
cccgtgcctccaatttggacgtgataaaacagcgtcgtaaagttttcaccccagagttctctgcttagtaagaagtagaaggaagtctaaacctaagtcatctgatttcagagcccatataattaaatgctctaaatgcagattcccagggtggtggtttctatgagagcctgtcacatacgatgtaggacactgcttctctgtaacgtgtgcaagattcccttgatgatggtgactatgagagcctgtcacatacgatgtaggacagtgcttccctgtaacaggcgcaagattcctgtgatgatggtgactatgagagcctgttacatatgacgtaggacagcacttctctgtaacatgcacaagattcccgtgatgatggtgactatgagagcctgtcacatgtgatgtaggacagtgcttcctctgtaacatgcacaagattcacccgg

SEQ ID NO: 8047 - DNA, 519 bp, Homo sapiens
tgctttcctcaggtgaccttaaccagccttatggttttaactcttacctatatactgacattgcttaaatccttgcccttagactagaattttcttcagattttctattttctgctgcctcccaaatctctcctaggctgtgaaaactcacattttcacatccttctctgagtcagtttttcctctcatatgtttctagagtccttgaccccttggtcttcttgtgctgttccagttcatgccctcatcgttttttatgtgatgtaataactcagcttcttgattggtctctatgcacttctttttgctaccatttctttgtagctgaaagagtgacttatttaaaactcaaaatttgtgcatattgcttacattcctatttaaaatctgtcatgaaggctggggcagtggcttacgccagtaactctaatactttgggaggttgaggcgggaggattgcttgaggctgggagttgaggatcagcctgggcaacaaagtgagatcccatttctacaaaa

SEQ ID NO: 8048 - DNA, 882 bp, Homo sapiens
acctctgggggtggggagtaggaataaggggccttggggcctccataaatctgcaatctgcaccctcctcctagagacagggagatcgtgttctgctttttacatgaggagcagaactgggccatacacgtgttcaagaactaggggagctacctggtagcaagtgagtgcagacccacctcaccttgggggaatctcaaactcataggcctcagatacacgatcacctgtcatatcaggtgagcactggcctgcttggggagagacctgggcccctccaggtgtaggaacagcaacactcctggctgacaactaagccaatatggccctaggtcattcttgcttccaatatgcttgccactccttaaatgtcctaatgatgagaaactctctttctgaccaattgctatgtttacataacacgcatgtactcatgcatcccttgccagagcccatatatgtatgcatatataaacatagcactttttactacatagctcagcacattgcaaggtttgcatttaagttaaaaaaaaaaaaaaaaaaaactaaaggtgaaagatgccacattgaacaaactaaattcccaacccggttctggcaaagaatccagttatcccttccatgaagacgcacataactctcttacttggtctttccattagggacaacataagtcttgttttacatcaaataaaaacaatgttaaaaagtgtgtgaaccttaaaaatggaagtctactagtttacatacctacttcagaggacatggaaatgaccatgggcctgcatttcagggaccaaagcaaattaggcctggcctaaaatacatcagaccttttgtaagagagaatttcaataaagcaaaaaacatgtcacaaga

SEQ ID NO: 8049 - DNA, 461 bp, Homo sapiens
agagacagggtttcaccatgttgcccaggctggtctcaaactcctgagctcaaggtgtcaatcttacttgtggaaagtacgatttcatgtggacatgttgttcttgcaccttgttttgtacggataggaagactgactattttcctatgaaacatcaaaggtcttgtagcccctgtagctgtatccctccagtggcagtgatcagaagtaagtctacaggcttgaataaggcctggtctcctctgtcttgcagctatatggtgaacccacactgcagtcccacctccctttataccagtggtcctcaacctttttggcatcagggaccagtttcatagaaggcaatttttccatggaccaggggtggcaggggtttgcaggatgagtcaagcacattacgtttatcgtgtactttatttctatgatttattacattgtaatatataatgaaataattatac

SEQ ID NO: 8050 - DNA, 348 bp, Homo sapiens
agagacagggtttcaccatgttgcccaggctggtctcaaactcctgagctcaaggtgtcaatcttacttgtggaaagtacgatttcatgtggacatgttgttcttgcaccttgttttgtacggataggaagactgactattttcctatgaaacatcaaaggtcttgtagcccctgtagctgtatccctccagtggcagtgatcagaagtaagtctacaggcttgaataaggcctggtctcctctgtcttgcagctatatggtgaacccacactgcagtcccacctcccttggatgtttcataggaaaatagtcagtcttcctatccgtacaaaaaaagggcggccgcg

SEQ ID NO: 8051 - DNA, 408 bp, Homo sapiens
tgtcttgggaagtttataagaactaattgcagtggcagctcatactgcagctataagctatagaaataatcttttgggtcataatattaaaaatgtccaaaggcagctaaacagcctttggaaataaatgaggctgctttgatttttacctgtgacaatgcacaaatctggcattttctgatttggaaaagttctgagtctggaaattaaactgtcagagttgaaaagtataggaatgtgaggaccaaaagctgtttaatcaaagtgctggatactttttcaaaagggataggaaatagattgtccaataacaatggtaactgtgtgaaatgcatcttcggaacaaggagagatggaagaagaggaagaaggcaagagaaactggagattgctttcccaattgttaaa

SEQ ID NO: 8052 - DNA, 248 bp, Homo sapiens
gcgtcgacgtacaacaaccccgcgtgacacgtttacctgtgtaacaaacattcacatgtaccaccaaacccaaatttcctcctgcaatgggatgtggtctgttttcaggggttgaacaatccctagacttccgttcaataactcaccataatgtcagttccacatggctgggagacctcaggaagcgtacaatcatggcagaaggggaagcagtcaccttcttcacttagtcatcttcgtcgacgcgg

SEQ ID NO: 8053 - DNA, 214 bp, Homo sapiens
ttagtttatgaattcagtcatggcatttatttccttttaggcccatgtatccagaaaagccaaattctttcagttatatatgcaagtcacagatgattctatgtggttttctttgcatatataactgatacgattcatgtatttttaagatagtaagtttgtaagaaaaatattctcctcttaaaagtcaaacaacttgatgagcttccagaaa

SEQ ID NO: 8054 - DNA, 351 bp, Homo sapiens
  misc_feature (244)..(244): n is a, c, g, or t
  misc_feature (293)..(293): n is a, c, g, or t
  misc_feature (299)..(299): n is a, c, g, or t
cccccctataggacttggacagaaacccgagggtcatctttgactttttctttctctttaccacccctaccaaaatgccaccagttgccaagttttgtcagttcaacctgctgagtgtcaggagagagcttcacttctttatcctctcaccaggataatacatttctgagttttaatatctaatgtgacattttaactgagtacctacttttttttttttttgagacaggagaaaggcatgaanccaggaggcagagcttgcagtgagctgagatcacgccattgcactccancctggncaacagtgttaagactctgtctcaaatataaataaataaataaataaataaa

SEQ ID NO: 8055 - DNA, 4123 bp, Homo sapiens
  misc_feature (6)..(6): n is a, c, g, or t
  misc_feature (8)..(8): n is a, c, g, or t
  misc_feature (1927)..(1927): n is a, c, g, or t
ggccgngnctgcgcctcgggggtcggcgtccaggctcggagcgcggcacggagacggcggcagcgctggactaggtggcaggccctgcatcatggaaactctttctaatgcaagtggtacttttgccatacgccttttaaagatactgtgtcaagataacccttcgcacaacgtgttctgttctcctgtgagcatctcctctgccctggccatggttctcctaggggcaaagggaaacaccgcaacccagatggcccaggcactgtctttaaacacagaggaagacattcatcgggctttccagtcgcttctcactgaagtgaacaaggctggcacacagtacctgctgagaacggccaacaggctctttggagagaaaacttgtcagttcctctcaacgtttaaggaatcctgtcttcaattctaccatgctgagctgaaggagctttcctttatcagagctgcagaagagtccaggaaacacatcaacacctgggtctcaaaaaagaccgaaggtaaaattgaagagttgttgccgggtagctcaattgatgcagaaaccaggctggttcttgtcaatgccatctacttcaaaggaaagtggaatgaaccgtttgacgaaacatacacaagggaaatgccctttaaaataaaccaggaggagcaaaggccagtgcagatgatgtatcaggaggccacgtttaagctcgcccacgtgggcgaggtgcgcgcgcagctgctggagctgccctacgccaggaaggagctgagcctgctggtgctgctgcctgacgacggcgtggagctcagcacggtggaaaaaagtctcacttttgagaaactcacagcctggaccaagccagactgtatgaagagtactgaggttgaagttctccttccaaaatttaaactacaagaggattatgacatggaatctgtgcttcggcatttgggaattgttgatgccttccaacagggcaaggctgacttgtcggcaatgtcagcggagagagacctgtgtctgtccaagttcgtgcacaagagttttgtggaggtgaatgaagaaggcaccgaggcagcggcagcgtcgagctgctttgtagttgcagagtgctgcatggaatctggccccaggttctgtgctgaccaccctttccttttcttcatcaggcacaacagagccaacagcattctgttctgtggcaggttctcatcgccataaagggtgcacttaccgtgcactcggccatttccctcttcctgtgtccccagatccccactacagctccaagaggatgggcctagaaagccaagtgcaaagatgagggcagattccttacctgtctgccctcatgatttgccagcatgaattcatgatgctccacactcgcttatgctacttaatcagaatcttgagaaaatagaccataatgattccctgttgtattaaaattgccagtcccccaatcccataggatggcaagcaaagttcttctagaattccacatgcaattcactctggcgaccctgtgctttcctgacactgcgaatacattccttaacccgctgcctcagtggtaataaatggtgctagatattgctactattttatagatttcctggtgcttagccttataaaaaaggttgtaaaatgtacatttatattttatcttttttttttttttttttctgagacgcagtctggctctctgtcgcccaggctggagtgcagtggctcgatctctgctcactgcaagctccgcctcccgggttcacgccattctcctgcctcagcctcccgagtagctgggactacaggcgcccgccaccacgcccggctaattttttgtatttttagtagagacggggtttcaccgtgttagccaggatggtgtcgatctcctgacctcgtgatccacccgcctcngcctcccaaagtgctgggattacaggcttgagccaccgcgcccggctatattttatcttttatctttttctttgacatttaccaatcaccaagcatgcaccaaacactgctttaggcactggggacacaaaggggacagagccatcctcctttgacacctggtcttcagttctgtgcccaacgtatatagttttgacaatgaccaggttggactgtttaatgtctttcaacttaccacgtaatcctcttgtagggatcacatctttctttatgatattgtatttctctacctctaacagtaaaaattccattcaacccttaaagctcacttcaaattcttctttgagaagtttttcctttctccgcaaccagatgtacatatttgaactctctttgtacttggagggcacttctttcgtggtagttcttttatttttattaatctctgtatccttagatagtcctccaacaaccaaaggttgggactctgtcttacatatctgggtgcccctcatagtgcagtaataagtaagttgattatatacgagctatgtaacttatattttttaatggttggatatcactgagtttttttttttaagaatttttttattgaggtaaacttcacataacataaaattaactattttaaagtgagaagttcagtgccacttagtattgttaacaatgttgcataaccaccacctttatttaaagttccaaaaaaaatgttctcctctaaaaggaaaccccatcccattaagcagatactctccattccttccttcctccagcccccagcaaccaccaatctgctttctgtctctatggttttatctattcttgctattttatataaatcgaattgtatgagaccttttgtgtctggcttctttcacttagtacaagtttttgagatttatttacatagtagcatgtatcaacacttcatttttatggccaaataaaattgtattatgtgtttatagcacaatttatttatccactcattcattgatggactttgggttgtttctgacttttggctattgggaatagtgctgctatgaatgtttgtgtacctgtatttgtttgaatgcctattttgcattctcttgggtatatatctaggagtggaactgctgggtcatatgttaattctatgtttagctttttgaggaacagacaaactgttttccacagcagttgaaccattccacattcccaccagcaatgtatgagaattccaatttctgtccacttcctcaccaacacttattattttccttttcctttttttaaaaaaaataagttatggccatcttagtgggtgtgaagtggtatctcattgtgttttttatttgcatttcctatgtaatgagctagaaactaaagtacaaactagatgggacatccagtccctttgatagataatgctgagtaaaaaatgagatgaaagacatttgtttgtttttagaacatgagtgacagtttgttaaaaagctttagaggaggaatgaaaacaaagtgaagtacacttagaaaagggccaagtggacatcttggatgtcaagtgcctagttcagtatcttttttttttttttttttttttttgagacagtgcctcactctgtcacccaggctggagtgtagtggcatgatctgggctcactgcaacctcctcctcctggattcaagcaattctcttgcttcagcctcccaagtagctgagactacaagcacccaccaccacacccggctaattttgtatttttcagtagagacggggtttcgccacattggccgtgttggtcttgaactcctggcctcaagcaatccgcctacctcagcctcccaaagtgctaggattacaggcataagccactgagcccagccctagttcagtatcttttatgtaaattataaacatctgcaacattatgtatcatatgcagatacttattgcatttcttttattagtggtgaaagtgttctatgcatttattggctcttgaatttcctcatctatgaattgtcattcacacacctacttttctgcttcgtttttacatatgtctttgcctattaaagatattatccctctgttttatattttctctcattcttgtattgccttttaaattttgttatgatgtttcattaataaacagtgttttgttttcctctataatcaaa

SEQ ID NO: 8056 - DNA, 4146 bp, Homo sapiens
  misc_feature (1950)..(1950): n is a, c, g, or t
gaattccggtgaagttgaccgggtccacccgaagcttgtgcgcgtgcaggtcgctcagggcggacgcggcacggagacggcggcagcgctggactaggtggcaggccctgcatcatggaaactctttctaatgcaagtggtacttttgccatacgccttttaaagatactgtgtcaagataacccttcgcacaacgtgttctgttctcctgtgagcatctcctctgccctggccatggttctcctaggggcaaagggaaacaccgcaacccagatggcccaggcactgtctttaaacacagaggaagacattcatcgggctttccagtcgcttctcactgaagtgaacaaggctggcacacagtacctgctgagaacggccaacaggctctttggagagaaaacttgtcagttcctctcaacgtttaaggaatcctgtcttcaattctaccatgctgagctgaaggagctttcctttatcagagctgcagaagagtccaggaaacacatcaacacctgggtctcaaaaaagaccgaaggtaaaattgaagagttgttgccgggtagctcaattgatgcagaaaccaggctggttcttgtcaatgccatctacttcaaaggaaagtggaatgaaccgtttgacgaaacatacacaagggaaatgccctttaaaataaaccaggaggagcaaaggccagtgcagatgatgtatcaggaggccacgtttaagctcgcccacgtgggcgaggtgcgcgcgcagctgctggagctgccctacgccaggaaggagctgagcctgctggtgctgctgcctgacgacggcgtggagctcagcacggtggaaaaaagtctcacttttgagaaactcacagcctggaccaagccagactgtatgaagagtactgaggttgaagttctccttccaaaatttaaactacaagaggattatgacatggaatctgtgcttcggcatttgggaattgttgatgccttccaacagggcaaggctgacttgtcggcaatgtcagcggagagagacctgtgtctgtccaagttcgtgcacaagagttttgtggaggtgaatgaagaaggcaccgaggcagcggcagcgtcgagctgctttgtagttgcagagtgctgcatggaatctggccccaggttctgtgctgaccaccctttccttttcttcatcaggcacaacagagccaacagcattctgttctgtggcaggttctcatcgccataaagggtgcacttaccgtgcactcggccatttccctcttcctgtgtccccagatccccactacagctccaagaggatgggcctagaaagccaagtgcaaagatgagggcagattccttacctgtctgccctcatgatttgccagcatgaattcatgatgctccacactcgcttatgctacttaatcagaatcttgagaaaatagaccataatgattccctgttgtattaaaattgccagtcccccaatcccataggatggcaagcaaagttcttctagaattccacatgcaattcactctggcgaccctgtgctttcctgacactgcgaatacattccttaacccgctgcctcagtggtaataaatggtgctagatattgctactattttatagatttcctggtgcttagccttataaaaaaggttgtaaaatgtacatttatattttatcttttttttttttttttttctgagacgcagtctggctctctgtcgcccaggctggagtgcagtggctcgatctctgctcactgcaagctccgcctcccgggttcacgccattctcctgcctcagcctcccgagtagctgggactacaggcgcccgccaccacgcccggctaattttttgtatttttagtagagacggggtttcaccgtgttagccaggatggtgtcgatctcctgacctcgtgatccacccgcctcngcctcccaaagtgctgggattacaggcttgagccaccgcgcccggctatattttatcttttatctttttctttgacatttaccaatcaccaagcatgcaccaaacactgctttaggcactggggacacaaaggggacagagccatcctcctttgacacctggtcttcagttctgtgcccaacgtatatagttttgacaatgaccaggttggactgtttaatgtctttcaacttaccacgtaatcctcttgtagggatcacatctttctttatgatattgtatttctctacctctaacagtaaaaattccattcaacccttaaagctcacttcaaattcttctttgagaagtttttcctttctccgcaaccagatgtacatatttgaactctctttgtacttggagggcacttctttcgtggtagttcttttatttttattaatctctgtatccttagatagtcctccaacaaccaaaggttgggactctgtcttacatatctgggtgcccctcatagtgcagtaataagtaagttgattatatacgagctatgtaacttatattttttaatggttggatatcactgagtttttttttttaagaatttttttattgaggtaaacttcacataacataaaattaactattttaaagtgagaagttcagtgccacttagtattgttaacaatgttgcataaccaccacctttatttaaagttccaaaaaaaatgttctcctctaaaaggaaaccccatcccattaagcagatactctccattccttccttcctccagcccccagcaaccaccaatctgctttctgtctctatggttttatctattcttgctattttatataaatcgaattgtatgagaccttttgtgtctggcttctttcacttagtacaagtttttgagatttatttacatagtagcatgtatcaacacttcatttttatggccaaataaaattgtattatgtgtttatagcacaatttatttatccactcattcattgatggactttgggttgtttctgacttttggctattgggaatagtgctgctatgaatgtttgtgtacctgtatttgtttgaatgcctattttgcattctcttgggtatatatctaggagtggaactgctgggtcatatgttaattctatgtttagctttttgaggaacagacaaactgttttccacagcagttgaaccattccacattcccaccagcaatgtatgagaattccaatttctgtccacttcctcaccaacacttattattttccttttcctttttttaaaaaaaataagttatggccatcttagtgggtgtgaagtggtatctcattgtgttttttatttgcatttcctatgtaatgagctagaaactaaagtacaaactagatgggacatccagtccctttgatagataatgctgagtaaaaaatgagatgaaagacatttgtttgtttttagaacatgagtgacagtttgttaaaaagctttagaggaggaatgaaaacaaagtgaagtacacttagaaaagggccaagtggacatcttggatgtcaagtgcctagttcagtatcttttttttttttttttttttttttgagacagtgcctcactctgtcacccaggctggagtgtagtggcatgatctgggctcactgcaacctcctcctcctggattcaagcaattctcttgcttcagcctcccaagtagctgagactacaagcacccaccaccacacccggctaattttgtatttttcagtagagacggggtttcgccacattggccgtgttggtcttgaactcctggcctcaagcaatccgcctacctcagcctcccaaagtgctaggattacaggcataagccactgagcccagccctagttcagtatcttttatgtaaattataaacatctgcaacattatgtatcatatgcagatacttattgcatttcttttattagtggtgaaagtgttctatgcatttattggctcttgaatttcctcatctatgaattgtcattcacacacctacttttctgcttcgtttttacatatgtctttgcctattaaagatattatccctctgttttatattttctctcattcttgtattgccttttaaattttgttatgatgtttcattaataaacagtgttttgttttcctctataatcaaa

SEQ ID NO: 8057 - DNA, 4094 bp, Homo sapiens
  misc_feature (1950)..(1950): n is a, c, g, or t
gaattccggtgaagttgaccgggtccacccgaagcttgtgcgcgtgcaggtcgctcagggcggacgcggcacggagacggcggcagcgctggactaggtggcaggccctgcatcatggaaactctttctaatgcaagtggtacttttgccatacgccttttaaagatactgtgtcaagataacccttcgcacaacgtgttctgttctcctgtgagcatctcctctgccctggccatggttctcctaggggcaaagggaaacaccgcaacccagatggcccaggcactgtctttaaacacagaggaagacattcatcgggctttccagtcgcttctcactgaagtgaacaaggctggcacacagtacctgctgagaacggccaacaggctctttggagagaaaacttgtcagttcctctcaacgtttaaggaatcctgtcttcaattctaccatgctgagctgaaggagctttcctttatcagagctgcagaagagtccaggaaacacatcaacacctgggtctcaaaaaagaccgaaggtaaaattgaagagttgttgccgggtagctcaattgatgcagaaaccaggctggttcttgtcaatgccatctacttcaaaggaaagtggaatgaaccgtttgacgaaacatacacaagggaaatgccctttaaaataaaccaggaggagcaaaggccagtgcagatgatgtatcaggaggccacgtttaagctcgcccacgtgggcgaggtgcgcgcgcagctgctggagctgccctacgccaggaaggagctgagcctgctggtgctgctgcctgacgacggcgtggagctcagcacggtggaaaaaagtctcacttttgagaaactcacagcctggaccaagccagactgtatgaagagtactgaggttgaagttctccttccaaaatttaaactacaagaggattatgacatggaatctgtgcttcggcatttgggaattgttgatgccttccaacagggcaaggctgacttgtcggcaatgtcagcggagagagacctgtgtctgtccaagttcgtgcacaagagttttgtggaggtgaatgaagaaggcaccgaggcagcggcagcgtcgagctgctttgtagttgcagagtgctgcatggaatctggccccaggttctgtgctgaccaccctttccttttcttcatcaggcacaacagagccaacagcattctgttctgtggcaggttctcatcgccataaagggtgcacttaccgtgcactcggccatttccctcttcctgtgtccccagatccccactacagctccaagaggatgggcctagaaagccaagtgcaaagatgagggcagattccttacctgtctgccctcatgatttgccagcatgaattcatgatgctccacactcgcttatgctacttaatcagaatcttgagaaaatagaccataatgattccctgttgtattaaaattgccagtcccccaatcccataggatggcaagcaaagttcttctagaattccacatgcaattcactctggcgaccctgtgctttcctgacactgcgaatacattccttaacccgctgcctcagtggtaataaatggtgctagatattgctactattttatagatttcctggtgcttagccttataaaaaaggttgtaaaatgtacatttatattttatcttttttttttttttttttctgagacgcagtctggctctctgtcgcccaggctggagtgcagtggctcgatctctgctcactgcaagctccgcctcccgggttcacgccattctcctgcctcagcctcccgagtagctgggactacaggcgcccgccaccacgcccggctaattttttgtatttttagtagagacggggtttcaccgtgttagccaggatggtgtcgatctcctgacctcgtgatccacccgcctcngcctcccaaagtgctgggattacaggcttgagccaccgcgcccggctatattttatcttttatctttttctttgacatttaccaatcaccaagcatgcaccaaacactgctttaggcactggggacacaaaggggacagagccatcctcctttgacacctggtcttcagttctgtgcccaacgtatatagttttgacaatgaccaggttggactgtttaatgtctttcaacttaccacgtaatcctcttgtagggatcacatctttctttatgatattgtatttctctacctctaacagtaaaaattccattcaacccttaaagctcacttcaaattcttctttgagaagtttttcctttctccgcaaccagatgtacatatttgaactctctttgtacttggagggcacttctttcgtggtagttcttttatttttattaatctctgtatccttagatagtcctccaacaaccaaaggttgggactctgtcttacatatctgggtgcccctcatagtgcagtaataagtaagttgattatatacgagctatgtaacttatattttttaatggttggatatcactgagtttttttttttaagaatttttttattgaggtaaacttcacataacataaaattaactattttaaagtgagaagttcagtgccacttagtattgttaacaatgttgcataaccaccacctttatttaaagttccaaaaaaaatgttctcctctaaaaggaaaccccatcccattaagcagatactctccattccttccttcctccagcccccagcaaccaccaatctgctttctgtctctatggttttatctattcttgctattttatataaatcgaattgtatgagaccttttgtgtctggcttctttcacttagtacaagtttttgagatttatttacatagtagcatgtatcaacacttcatttttatggccaaataaaattgtattatgtgtttatagcacaatttatttatccactcattcattgatggactttgggttgtttctgacttttggctattgggaatagtgctgctatgaatgtttgtgtacctgtatttgtttgaatgcctattttgcattctcttgggtatatatctaggagtggaactgctgggtcatatgttaattctatgtttagctttttgaggaacagacaaactgttttccacagcagttgaaccattccacattcccaccagcaatgtatgagaattccaatttctgtccacttcctcaccaacacttattattttccttttcctttttttaaaaaaaataagttatggccatcttagtgggtgtgaagtggtatctcattgtgttttttatttgcatttcctatgtaatgagctagaaactaaagtacaaactagatgggacatccagtccctttgatagataatgctgagtaaaaaatgagatgaaagacatttgtttgtttttagaacatgagtgacagtttgttaaaaagctttagaggaggaatgaaaacaaagtgaagtacacttagaaaagggccaagtggacatcttggatgtcaagtgcctagttcagtatcttttttttttttttttttttttttgagacagtgcctcactctgtcacccaggctggagtgtagtggcatgatctgggctcactgcaacctcctcctcctggattcaagcaattctcttgcttcagcctcccaagtagctgagactacaagcacccaccaccacacccggctaattttgtatttttcagtagagacggggtttcgccacattggccgtgttggtcttgaactcctggcctcaagcaatccgcctacctcagcctcccaaagtgctaggattacaggcataagccactgagcccagccctagttcagtatcttttatgtaaattataaacatctgcaacattatgtatcatatgcagatacttattgcatttcttttattagtggtgaaagtgttctatgcatttattggctcttgaatttcctcatctatgaattgtcattcacacacctacttttctgcttcgtttttacatatgtctttgcctattaaagatattatccctctgttttatatttttagaggaaaacaaaacactgtttattaa

SEQ ID NO: 8058 - DNA, 1022 bp, Homo sapiens
gaattccggtgaagttgaccgggtccacccgaagcttgtgcgcgtgcaggtcgctcagggcggacgcggcacggagacggcggcagcgctggactaggtggcaggccctgcatcatggaaactctttctaatgcaagtggtacttttgccatacgccttttaaagatactgtgtcaagataacccttcgcacaacgtgttctgttctcctgtgagcatctcctctgccctggccatggttctcctaggggcaaagggaaacaccgcaacccagatggcccaggcactgtctttaaacacagaggaagacattcatcgggctttccagtcgcttctcactgaagtgaacaaggctggcacacagtacctgctgagaacggccaacaggctctttggagagaaaacttgtcagttcctctcaacgtttaaggaatcctgtcttcaattctaccatgctgagctgaaggagctttcctttatcagagctgcagaagagtccaggaaacacatcaacacctgggtctcaaaaaagaccgaaggtaaaattgaagagttgttgccgggtagctcaattgatgcagaaaccaggctggttcttgtcaatgccatctacttcaaaggaaagtggaatgaaccgtttgacgaaacatacacaagggaaatgccctttaaaataaaccaggtgggggaagctttttaaaatcctgctagtttgatgaagaagttgaatggaaagatttaactttgtaaaagtgtaagtgacataagcgtaagccaaaaggaatttgaaacttaaagtatttctgaatgaatttcttaactcagtagaaaaaaacggaaggagtaaaagatatttgctgcatatatatattatatatacgtatatataatatatatatatatatgtagtgttttatcactgctcttaactgcctttgataatttctcataaaccattgctgccacctagttttggaaactaaagatcttcctataagcccaatttacttggctagaaagcaa

SEQ ID NO: 8059 - DNA, 1952 bp, Homo sapiens
cgcgagggccactacattcactgggaccacgtcatggtgccgcactgggaccccaagatctcggccagctacccccgcggccgccacagccccccagacgacttgggctccagcttctacccggagctggggccctacagctcccgggaccccgaagtgctgcgggagcatatgacccagctcaaggaagccgccatcggcgtcctggtcctgtcctggtacccacctggcatggctgatgataacggggagccctcagatgacctggtgcccgccattctggacaccgcccatcagtacagcatccaggtggccttccacatccaaccctacaagggccgggatgacatcactgtacatgacaacatcaagtacatcattgacacgtatggctcccatggtgcattttaccgctataagaacagcatgggcaagagcctcccactcttttatatctacgactcatacctgacgtcccctgaggcctgggcccacctcctgacaccaaacgggccccattcgatccgcaacacgccctacgatggggtcttcatagcgctgctggtggaggagggccacacccacgatatcctggccgccggatttgacggcatgtacacctactttgcctccaatggtttctcctttggttcttcccatcagaactggaaagctgtgaagaacttttgtgatgccaacaacctcatgttcatccccagtgtggggcctggctacatagacaccagcattcggccctggaacaaccacaatacgcgcaacagggtcaatggcaagtactatgagacggccctgcaggcggccctgacagtgaggcccgagatcgtttccattacctccttcaatgagtggcacgagggcacccagattgagaaggccattcccaagaagacacccacccgcctgtatttggactacctgcctcaccagcccagcctgtacctggagctgacacgccgctgggcggagcacttcatcaaagagaaggagcagtggctcatgtgaggggcctgtaaatgggcgtgaggtgctgatgtccttgccttgctggaagatgtcaccatgtggggttcagctgaggttgtagccactcactcgttcccaggtcagaggtcagcagatgggtgtttctgggtgggccgtcaggcatgggcctgtgcaacacagagcccgttcctcaggcgagtggtgctgaggtgctctgtggtgatgggaacggcagaggctggcaggtgactgaacttagcccagggcagctccacatcctgggaacactttcatgtaaccccttctagttttgaactctgcagcaggctggtgctgtgtagtggccacccagtcaccacccttggaagggtgtcagggtctgggctcgcatgcaccctgctcccttctgccagcctgcatcctctcctcaggcctccttcccacatcatctgtcttctctaagttagggaaccatatttgagactttcaaaaagggaacttctaggtttaagctcctcccagtagattcctgaacccaattatcaggaaatcatcctgagcactcacaggttcatttaacactcactcatcaagcaccttcctatgtgctaggtgctggggaaaacttgaccaaggaagagttcctgtcctgaagcttccaggacccagctttccttttctggtgtggccttgtagctagtgcctgggcacaggtgtttttctttttgcagttttacctagtgctgggagttcagttctttttcctctagaaaaatacctctgtgctccagagcctaatttttcccagatgcatatttagctctagggagaggactaggaggaaatccccctccctttagctgcctgaactgactgaggcccactcactagagccatgttcagtgctactgtgattagtagtaattaaatatgaactggtattctca

SEQ ID NO: 8060 - DNA, 1855 bp, Homo sapiens
cgcgagggccactacattcactgggaccacgtcatggtgccgcactgggaccccaagatctcggccagctacccccgcggccgccacagccccccagacgacttgggctccagcttctacccggagctggggccctacagctcccgggaccccgaagtgctgcgggagcatatgacccagctcaaggaagccgccatcggcgtcctggtcctgtcctggtacccacctggcatggctgatgataacggggagccctcagatgacctggtgcccgccattctggacaccgcccatcagtacagcatccaggtggccttccacatccaaccctacaagggccgggatgacatcactgtacatgacaacatcaagtacatcattgacacgtatggctcccatggtgcattttaccgctataagaacagcatgggcaagagcctcccactcttttatatctacgactcatacctgacgtcccctgaggcctgggcccacctcctgacaccaaacgggccccattcgatccgcaacacgccctacgatggggtcttcatagcgctgctggtggaggagggccacacccacgatatcctggccgccggatttgacggcatgtacacctactttgcctccaatggtttctcctttggttcttcccatcagaactggaaagctgtgaagaacttttgtgatgccaacaacctcatgttcatccccagtgtggggcctggctacatagacaccagcattcggccctggaacaaccacaatacgcgcaacagggtcaatggcaagtactatgagacggccctgcaggcggccctgacagtgaggcccgagatcgtttccattacctccttcaatgagtggcacgagggcacccagattgagaaggccattcccaagaagacacccacccgcctgtatttggactacctgcctcaccagcccagcctgtacctggagctgacacgccgctgggcggagcacttcatcaaagagaaggagcagtggctcatgtgaggggcctgtaaatgggcgtgaggtgctgatgtccttgccttgctggaagatgtcaccatgtggggttcagctgaggttgtagccactcactcgttcccaggtcagaggtcagcagatgggtgtttctgggtgggccgtcaggcatgggcctgtgcaacacagagcccgttcctcaggcgagtggtgctgaggtgctctgtggtgatgggaacggcagaggctggcaggtgactgaacttagcccagggcagctccacatcctgggaacactttcatgtaaccccttctagttttgaactctgcatcctctcctcaggcctccttcccacatcatctgtcttctctaagttagggaaccatatttgagactttcaaaaagggaacttctaggtttaagctcctcccagtagattcctgaacccaattatcaggaaatcatcctgagcactcacaggttcatttaacactcactcatcaagcaccttcctatgtgctaggtgctggggaaaacttgaccaaggaagagttcctgtcctgaagcttccaggacccagctttccttttctggtgtggccttgtagctagtgcctgggcacaggtgtttttctttttgcagttttacctagtgctgggagttcagttctttttcctctagaaaaatacctctgtgctccagagcctaatttttcccagatgcatatttagctctagggagaggactaggaggaaatccccctccctttagctgcctgaactgactgaggcccactcactagagccatgttcagtgctactgtgattagtagtaattaaatatgaactggtattctca

SEQ ID NO: 8061 - DNA, 2395 bp, Homo sapiens
cgcgagggccactacattcactgggaccacgtcatggtgccgcactgggaccccaagatctcggccagctacccccgcggccgccacagccccccagacgacttgggctccagcttctacccggagctggggccctacagctcccgggaccccgaagtgctgcgggagcatatgacccagctcaaggaagccgccatcggcgtcctggtcctgtcctggtacccacctggcatggctgatgataacggggagccctcagatgacctggtgcccgccattctggacaccgcccatcagtacagcatccaggtggccttccacatccaaccctacaagggccgggatgacatcactgtacatgacaacatcaagtacatcattgacacgtatggctcccatggtgcattttaccgctataagaacagcatgggcaagagcctcccactcttttatatctacgactcatacctgacgtcccctgaggcctgggcccacctcctgacaccaaacgggccccattcgatccgcaacacgccctacgatggggtcttcatagcgctgctggtggaggagggccacacccacgatatcctggccgccggatttgacggcatgtacacctactttgcctccaatggtttctcctttggttcttcccatcagaactggaaagctgtgaagaacttttgtgatgccaacaacctcatgttcatccccagtgtggggcctggctacatagacaccagcattcggccctggaacaaccacaatacgcgcaacagggtcaatggcaagtactatgagacggccctgcaggcggccctgacagtgaggcccgagatcgtttccattacctccttcaatgagtggcacgagggcacccagattgagaaggccattcccaagaagacacccacccgcctgtatttggactacctgcctcaccagcccagcctgtacctggagctgacacgccgctgggcggagcacttcatcaaagagaaggagcagtggctcatgtgaggggcctgtaaatgggcgtgaggtgctgatgtccttgccttgctggaagatgtcaccatgtggggttcagctgaggttgtagccactcactcgttcccaggtcagaggtcagcagatgggtgtttctgggtgggccgtcaggcatgggcctgtgcaacacagagcccgttcctcaggcgagtggtgctgaggtgctctgtggtgatgggaacggcagaggctggcaggtgactgaacttagcccagggcagctccacatcctgggaacactttcatgtaaccccttctagttttgaactctgcagcaggctggtgctgtgtagtggccacccagtcaccacccttggaagggtgtcagggtctgggctcgcatgcaccctgctcccttctgccagcctgcatcctctcctcaggcctccttcccacatcatctgtcttctctaagttagggaaccatatttgagactttcaaaaagggaacttctaggtttaagctcctcccagtagattcctgaacccaattatcaggaaatcatcctgagcactcacaggttcatttaacactcactcatcaagcaccttcctatgtgctaggtgctggggaaaacttgaccaaggaagagttcctgtcctgaagcttccaggacccagctttccttttctggtgtggccttgtagctagtgcctgggcacaggtgtttttctttttgcagttttacctagtgctgggagttcagttctttttcctctagaaaaatacctctgtgctccagagcctaatttttcccagatgcatatttagctctagggagaggactaggaggaaatccccctccctttagctgcctgaactgactgaggcccactcactagagccatgttcagtgctactgtgattagtagtaattaaatatgaactggtattctcaagtaagcattccttttgctctctttaagacctcacagattctgaccttagattctgtgacaaactgatacaggagctgggctggctatggctttaccacaacaagtaggtttgcttaagaaattactaaacaatggctgggcgtggtggctcactcctgtaatcccagcactttgggaggccgagatgggcggatcacgaggtcaggagatcgagaccatcctggctaacagggtgaaaccacgtctctactaaaaatacaaaaaaattagccaggcgtagtggtgggcgcctgtagtcccagctacttgggaggctgaggcaggagaatggcgtgaacccgggaggcggagcttgcagtgagccgagatcacgccactgcactccagcctgggcgacagagcgagactccgtctcaaaaaaaaaaaagttactaaacaaggc

SEQ ID NO: 8062 - DNA, 1588 bp, Homo sapiens
cgcgagggccactacattcactgggaccacgtcatggtgccgcactgggaccccaagatctcggccagctacccccgcggccgccacagccccccagacgacttgggctccagcttctacccggagctggggccctacagctcccgggaccccgaagtgctgcgggagcatatgacccagctcaaggaagccgccatcggcgtcctggtcctgtcctggtacccacctggcatggctgatgataacggggagccctcagatgacctggtgcccgccattctggacaccgcccatcagtacagcatccaggtggccttccacatccaaccctacaagggccgggatgacatcactgtacatgacaacatcaagtacatcattgacacgtatggctcccatggtgcattttaccgctataagaacagcatgggcaagagcctcccactcttttatatctacgactcatacctgacgtcccctgaggcctgggcccacctcctgacaccaaacgggccccattcgatccgcaacacgccctacgatggggtcttcatagcgctgctggtggaggagggccacacccacgatatcctggccgccggatttgacggcatgtacacctactttgcctccaatggtttctcctttggttcttcccatcagaactggaaagctgtgaagaacttttgtgatgccaacaaccacaatacgcgcaacagggtcaatggcaagtactatgagacggccctgcaggcggccctgacagtgaggcccgagatcgtttccattacctccttcaatgagtggcacgagggcacccagattgagaaggccattcccaagaagacacccacccgcctgtatttggactacctgcctcaccagcccagcctgtacctggagctgacacgccgctgggcggagcacttcatcaaagagaaggagcagtggctcatgtgaggggcctgtaaatgggcgtgaggtgctgatgtccttgccttgctggaagggtgtcagggtctgggctcgcatgcaccctgctcccttctgccagcctgcatcctctcctcaggcctccttcccacatcatctgtcttctctaagttagggaaccatatttgagactttcaaaaagggaacttctaggtttaagctcctcccagtagattcctgaacccaattatcaggaaatcatcctgagcactcacaggttcatttaacactcactcatcaagcaccttcctatgtgctaggtgctggggaaaacttgaccaaggaagagttcctgtcctgaagcttccaggacccagctttccttttctggtgtggccttgtagctagtgcctgggcacaggtgtttttctttttgcagttttacctagtgctgggagttcagttctttttcctctagaaaaatacctctgtgctccagagcctaatttttcccagatgcatatttagctctagggagaggactaggaggaaatccccctccctttagctgcctgaactgactgaggcccactcactagagccatgttcagtgctactgtgattagtagtaattaaatatgaactggtattctca

SEQ ID NO: 8063 - DNA, 1171 bp, Homo sapiens
cgcgagggccactacattcactgggaccacgtcatggtgccgcactgggaccccaagatctcggccagctacccccgcggccgccacagccccccagacgacttgggctccagcttctacccggagctggggccctacagctcccgggaccccgaagtgctgcgggagcatatgacccagctcaaggaagccgccatcggcgtcctggtcctgtcctggtacccacctggcatggctgatgataacggggagccctcagatgacctggtgcccgccattctggacaccgcccatcagtacagcatccaggtggccttccacatccaaccctacaagggccgggatgacatcactgtacatgacaacatcaagtacatcattgacacgtatggctcccatggtgcattttaccgctataagaacagcatgggcaagagcctcccactcttttatatctacgactcatacctgacgtcccctgaggcctgggcccacctcctgacaccaaacgggccccattcgatccgcaacacgccctacgatggggtcttcatagcgctgctggtggaggagggccacacccacgatatcctggccgccggatttgacggcatgtacacctactttgcctccaatggtttctcctttggttcttcccatcagaactggaaagctgtgaagaacttttgtgatgccaacaacctcatgttcatccccagtgtggggcctggctacatagacaccagcattcggccctggaacaaccacaatacgcgcaacagggtcaatggcaagtactatgagacggccctgcaggcggccctgacagtgaggcccgagatcgtttccattacctccttcaatgagtggcacgagggcacccagattgagaaggccattcccaagaagacacccacccgcctgtatttggactacctgcctcaccagcccagcctgtacctggagctgacacgccgctgggcggagcacttcatcaaagagaaggagcagtggctcatgtgaggggcctgtaaatgggcgtgaggtgctgatgtccttgccttgctggaagatgtcaccatgtggggttcagctgaggttgtagccatcactagagccatgttcagtgctactgtgattagtagtaattaaatatgaactggtattctca

SEQ ID NO: 8064 - DNA, 459 bp, Homo sapiens
aaaaaatctctgttgaggggggtactgtgtgtctctgaagtggcctctgtgttgcgtctcaggcgtcctggtcctgtcctggtacccacctggcatggctgatgataacggggagccctcagatgacctggtgcccgccattctggacaccgcccatcagtacagcatccaggtgagtctccaagaagaggccacgtgctctctgccctattctggagagttgctctcctccgcccacagggttagtgcctctacagaagttcttggcagtagcccaaagggataacaaatatgtggcaagtgtggttttgggggagggttcagataaatggtgcctatgttgctcttagttttttgaattctaagaaaactgagaaaactaaatataggaccaagagaagactaaataattatcacttttgttaaataataatagaggttaggttgtaaaccctggtg

SEQ ID NO: 8065 - DNA, 589 bp, Homo sapiens
tcaggcgtcctggtcctgtcctggtacccacctggcatggctgatgataacggggagccctcagatgacctggtgcccgccattctggacaccgcccatcagtacagcatccaggtgagtctccaagaagaggccacgtgctctctgccctattctggagagttgctctcctccgcccacagggttagtgcctctacagaagttcttggcagtagcccaaagggataacaaatatgtggcaagtgtggttttgggggagggttcagataaatggtgcctatgttgctcttagttttttgaattctaagaaaactgagaaaactaaatataggaccaagagaagactaaataattatcacttttgttaaataataatagaggttaggttgtaaaccctggtggaaaaagggtaggcaagagccaaagggacctgcagactcaactctctagtgggaggcagtgctggacctcgaggagtaggcaggtgttctcagcaggtgggctcactttcaagaggaaggacggactggacgaagcatttccccacatgtgccaatcaagtaagtcatcccttgcttctgtggtgaag

SEQ ID NO: 8066 - DNA, 1102 bp, Homo sapiens
tgaattttgacgatccactgaatgttgaagctgcagaacatcatttgtaggacaaggaggacttcttgaataaagtcgatgactacatcaagtgttaatgccagatgataaaaggagaagattgcaggcccatggactgtgtgttacagtttgtctctaatgtgaaaaagcagcaagaggcattgccttctctcccctgtcccctgactctccctctcattcccctggattgtcccagtcctgtgaccatgttgtcctgacgaagaccatcttcatgactgcccgttgtagatggagaattcaacataaagacagcaagaaaacgtatttaggtttctaaagagttatctgcttgtcttatgttttaggctgttcttgcattgctataaatgcccaagactgggtgatttataaagaaaagaggtttaattggcttatggtttggcaggctgtagaagcatggcactggcatctacttggcttctggggaggcctcagggagcttttactcatggtggaaggtgaagcaggagcaggcacatcatatggcgagagtggaaacgagagcgcaagggggacagccagatctcacgagaacttactgttgtgttgaaagcaccatgtcgtgagggatccaccccgatgacccaaatacctcccaccaggcctcacctccaacactggggattacatctcaacatgatatttggaagagacatctaaactatatcaccttaacatgtttacttttttgaactcgtactgtttaggctgttggtgatactcttgagaagttgtaatgaactcaaaattgaggctggagctttcttattcttttccccaacaaaattggttttctcccgaagtgatgctcatgatgtgttcagtgtaacttgcagattggaataagaaacctgctacaaattgtgattggatacaaatgcccttatcctctgtgaatgttggccctatctacatgttgtgaagtttcccagaatgcataaagtctttcactgtagacatttttattgaaatgcatattttatttaagtatattttggaccaattaaattaaatttttacaatgtaatgctttattttt

SEQ ID NO: 8067 - DNA, 887 bp, Homo sapiens
tttgagatgtcgtctgaagttgtaagcagaaataatgtagctgctgaaggaataatgcctgggggtggagatctggtgagcttttagtgagcattaggcaatggaaggttctaaaaggccagcagaattctttgaaaagttcatttaaagccctttgtcccaaggctgtaggctgcagagttcttccaggtccacctcctccactttgtgacatttcagcttgcgaggaattaaattgtcgttaaaacacatttcagttctaggcatgagttcaaggtagcctggcgttcctctcgcccctggccatgagaactttgaaagggctttggcagcactggttggcctggcatgaggagctcatagcttgaggctcatgccccacctgtccataatgttcttattttcccatcatgagcatggacttgggtttgttacatgtccgataccattatggtcagtactatgcagatgacgaagcagccctgtcccccgtctgactcccatggctgcttcaagggcagtgtggttatttgctgggcagtggcatggggcttgtgcatttctactgtcactacagagggtttaaaaaaaagacatgggcaggttaagtggaagggaacagtctcacaccactacctttattgcttcttggtacttgggttttcaggaaattcctatcagcagacatcaaaaacagagaatgaagggacgcagttggcatgtgcctgtggtcccagctacttgggaggctgaggtgggagcatcgcttgagcccaggaggtgaaggctgcagtgagtatgatcacgccactgcactccagcctgggtaacagcgcaaccctgtgtgtaaaaataataattttttaaaaagattaaaaccaaaaaaa

SEQ ID NO: 8068 - DNA, 1244 bp, Homo sapiens
gcgagctcggtacccacaccacctgagtcactggattacaggggtgtgctaccatgcctggccaatttttgtatttttagtagagatggggttttgccatgttgcccaggctggtcttgaactcctgacctcaagcgatctgcctgccttggcctcccagagtgctgggattacagatgtgagccaccccacccagctgattttaaaaaacaattttaaaaaaacgtttgaaacagcccaaatttacataaaagttgtaagtacagtagaaagaattttttccctgaaccatttgagggttaagttgccgacctaatgccccatcaccctgaatgcttggtgtgcatttcctataaacaaggacattttcctacctagtcacaatacaaccatcaaaatcaggaaattaacattgatataaaacctctatataaaccttggaccccattaaagttttgccagttgtcctaggaatgttctttgcagcaaagtgatccagttcagaatcgtgggttgcatttggttatcaagtctctagtctcctttagactttcctcagtaaacgttccttggcattcatgaccttgatacttttgaagattacaggctggttatgtttagattgtctctcaattagggtttgtgtgacattttctcatgattagatttaggttgtgtagcttcaggaatataacagaaatgatgctttgttcttctcgtcgtgtgattttgatttatcccattattgataatgttcactttgatcacttgattaaggtgatgtctgccaggcttctccatcataaaattactactagttgtaattaataagtattttgtggggtgatactttgaaactatgtaaatatctcacatcaaagtttaattttattgatttatatctttatggactcatggttttctattcagtgcattataatccattactatcattgtttcttggccagtgggtggcttctgtatccttttggtatgttcccatcattatttgggtgtttccttgctttctgatacaagatgttatgcgctcatcttgtatttctcttgctgcatccctggaatcagccatttctctaaggacctctgtttcttttagtggggaatggtatttagaaggcaactggggctgggtgctgtggcccatgcctgtaatcccagcactttgggatgccaaggtgggaagaacatttgagcctaggaatttaagaccagcctgggcaacg

SEQ ID NO: 8069 - DNA, 394 bp, Homo sapiens
caaaaaaccttgttatgggtttttgaatcaaaacaaaccataaatttgatcagtaggtgttaggaccaatttaaaaccttcattttgcgtgaaatcattttcttaaaactgtttatttgccgggcacagtggctcatgcctgtaatcccagcactttgagagtccaaggcaggtggatcatgaggtcaggagatcaagactatcctggctaacatggtgaaaccctgtctctactaaaaatagaaaaatcagctgggtgtgatggcacacgcctgtaatcccagctactcgggaggctgaggcaggagaatcccttgagctggggaggcagaggttgcagtgagccaagatcacaccactgcactccagcctgggtgacagagtgagactctgt

SEQ ID NO: 8070 - DNA, 290 bp, Homo sapiens
catggctcaccactgcctcgacctcctgggcccaagcaatgattctcctatctcagccctctgagtagctgggaccacaggcctgtgccaccactcctgactaatttttctgtactttttgtagagatggggttttgccatgttgcccaggctagtcttgaactcttgggttcaagccatctgcctgcctggtcttcccaaagagctgggatgacaggtgtgagccaccacacctgtcttgttgaattttctataaacagtcatacaatttgcaaaagaaaacaaaaact

SEQ ID NO: 8071 - DNA, 385 bp, Homo sapiens
tgatgtactttgcagtcaattacagttaattaaattcctttcccattacttgagttttgggtatggagtggcaggtagtttgatccttgtttcattggtggaaaagctgagaaattctttgctccaggccacacagaagggagctgcaggccaggactgagtccaggcttctatctttattgcacattgcctggttgtttggttccactgtcaagaaattcaggacccaggaggcctgcagaacttgctgttgtatcttcctgtctttctcttgtttggatttcttcattcgagtgagagtcaacagggaacccttgccataaaggaactcagtattcatgtttggaaggccatattagactgtgctcttctgctgtctttactt

SEQ ID NO: 8072 - DNA, 297 bp, Homo sapiens
gtagagatagggtctcactatattgcccaggctggtcttgaactcctggcctcaagccaactcccacctcagccttccaaagtgttgggattacaaaatattacaggagtgatcgactgcactgggctaaaaacaagggttttaaatgcttaccatatttttaatgctacatctgattgtgaaggtgggctactcaaagctttttgggaatttacaggctcactaaaatgatcacgatagtgtattaaattgagaaaggcattgaaaatctgtcattcccatgaacaaccaaagggt

SEQ ID NO: 8073 - DNA, 459 bp, Homo sapiens
aagtttgactcctttgaactttaatgtcccaggattgtagtgctggagcaggattagacccaggcaacagcattccagttggctaattctgaagccagttggcagggagcataaaagtaggagggccttgtgccagctgctaagcatacaaggtgtgtatgtgtgtgcgcgccagctaactaagcatacggggtgtgtgtgtgtgtgtgtgtgtgtgtgtctgtgtgtgtgtgtgttggaaggaaagcatcgggaagtaatccaaactagaagggctatggtcatctaccctgtgttgattatggaagtcctttgctttcatgtcacttgcaaatttgaagtgggctggagtggaggtgggggggttgcagttggggcaattctgtctccactctaaaatcagctgggattgtactcagtagaatccttggacacaataaagcaaatagagtattagcc

SEQ ID NO: 8074 - DNA, 501 bp, Homo sapiens
ggctaatccaggacactctcccttcccatctgagatgtggtggagacaggagggtgatagagtgtctctatattaaacacacacacacacacacacacacacacacacacacaaaggcagccagactatgcactaggaactgccctgggaatcccgttgtgttctcataacaatcccatttcacagatgaagaaaccaaggcacagaaatattcagtaacgtgtccaggtgcggtggctcacgcctgtaatcccagtacttcgggaggctgaggcaggcagatcacgaggtcaggagttcgagaccatcctggccaacatggtgaaaccccgtctctactaaaaatacaaaaattagctgggcgtggtgacaggtgcctgtaattctagctactcaggaagctgaggcagaattgcttgaacccgggaggcggaggttgcagtgagcggagatcacaccactgcactccagcctgggtgacagagcaaaactctgtctgag

SEQ ID NO: 8075 - DNA, 374 bp, Homo sapiens
aaaaagtctaagattttaatattttatcattctaagattcttgggggtatctgaattctacggggctttaggagtccctgactcccctaacattctgggaagttaatttttttttgtcttttttttttcttcctttttgtggagaacggggtctcgctatgttgcccaggcaggtctcgaactcctgggctcaagctatcctcccgcctctgcctccctgagagctgggattacaggcgtgaccgccgcgcccggcaagtttctttaattttgtatttggccaaagaccaaaggcaaatccgcccggctgggaggaacgcggtcaggctctggccccagacttcgcgcgaaggcagcttccgcaagcttctccc

SEQ ID NO: 8076 - DNA, 496 bp, Homo sapiens
gtaagactttgtctcaaaacaaacaacaaagaaacaaacaattgcatggagtaggtactgtcagatgctttaagtaataaaggtccttttctgaaaaggagtacacttaccagtattctaaacttaatgaatgcacattttaaaatataaatttatggtgagggaaagcaacctccccttctgactagacttaaaaattctggccgggtgtggtggctcacccctgtaattccagcactttgggagacctagctgggctgatcacttgaggtcaggagttccagggcagcctggctaacatggtgaaaccccatttctactaaatatacaaaaattagccaggcctggtggtgggcgcctgtaatcctagctacttaggaagctgaggcaggagaatcacttgaacctgggaggtggaggttgcagtgagccgagatcttgccactccactcccacctgggtgacagagcaagaccctgtctcaaagaaaaaagaa

SEQ ID NO: 8077 - DNA, 428 bp, Homo sapiens
ttatgagtttgggtttgggaggtacagggcctgggctgattcctgcccctcctgctcaccagctctctgagcctcagtttcctcatctgcgaaatggggcaataatatgtctcatgggaacgctaaggactggatgcttatgaagcattgatcacaggggctggtccatggtgaatgtcagaacatttcatcaatgttcccgttattgatcagtggggagagaatgaactgctcccactggcttttcactgggcgttcaagcctgctgggcttatcccaactccagcttccagacatgagcatagaactcagcctgtattctaggtttgtctggacaaatacccaaaagatgacctctgggttcattataacctggcccatcagctgacactctcagaagccaaggacctggagaagaggtaattgac

SEQ ID NO: 8078 - DNA, 512 bp, Homo sapiens
aacagctcattctgttattgagcttatgtgaatgttttgtttcaggtaatttttttttcagttctaacattttgttttctttcttctttttgtagcagctttctttttttgcagcagcttctgtttctttgctgagagctgtcatttcattcacttcaaatatgtttacctttacttcatacaacatagttagaaatgcttttaaaagttttaaaaaataatgcattcaacatctgggttatttctaggttgacatctgttgactgtcttttctcttatttggtcacattttttggactctttatgacaaataattttggactatatcttaaacatcccaaatgttatattgtgtaggctctgcatcctgttataatcctctggagactattgggattttttgtttatttttttgtttggtcaggcaatcaattttgcttaggttcagattccaaatttctgttttgccttctgtgggcagtggttctaatctcagttcagttttcaaagct

SEQ ID NO: 8079 - DNA, 335 bp, Homo sapiens
gtaggcaggccatagtacaacagtccttgggtgatgccaattctgtgctgatctggcaggctgggggatttgggtgtggccctgcatgagatcagctgcagcagctatgcagagcccatgtcactcttttcccagctccaggcagtgcggtgtgaagagactccttccacttaggagaggaaagtatgcaggggactttgccttggaacctagtaccagctctgccattgtaaactagagtaccagaagagccttgtggaccctgattccaggcagatactcctgaacagtacttctagacccaacccaggcaagaagggaatcagctgccttgg

SEQ ID NO: 8080 - DNA, 300 bp, Homo sapiens
aaactaaatttgacttgcagatgtgttttgaatgacaggcaaattcattttaaaataggtgattcgatatttaaaaagaccagaaaacgtaggaacactggacccatgttcctgtgtgggaacaaatggccacattgaatgaactcttacttctttaggtagggcaggtgctttctggtcggtcatggtccctaccactccctcgtgttttgcctgctgagacttcacctacttactcctgtgtgtcgcctgcttggtccttagggacttgtatttgtgattcctgctttagaaaggtgg

SEQ ID NO: 8081 - DNA, 388 bp, Homo sapiens
gctggaaaaaaacaggttatgtaacttccccaagaataaaagaaaaaaactcaatcatcagtaaccaagcttttaccaacggacctgtggcacacatgtgtgtttatggggtgtgtgtgtgtgtgtgtgtgtgtgtgtgtgtaaaatctcacatccattgcagtgatattacacaaaagttttaaattatatttctacttgcaactctcctttagggtttaaaattaatcattctctttaaagtttttaaaaaattgattacagaataactgctaattatctgtttctagacactgctcacacaggtttccatttttaaaactttttatgtattttttttttaaagacagagtctggctctgtcatccaggctagagtgcaatggtgc

SEQ ID NO: 8082 - DNA, 428 bp, Homo sapiens
gtcagttgagtgcattcagtgtaaggaacagaatgaaaaaagaatggagaaaagtgaatagagacttacagagctgtggcacaacattaaggacaacatttatgtaatgaaaaaccatagaggagaaaaagaaactgggcagaaaaaaaatgtgaataaataatagtcaaactctttttaagttggatagaaaacattaataaatttatccaagaagctccacaaatctcaagtaagatgaaaaaaaaaaagaaatctacaaagagacacatcctagtcaaatggtcgaatgccaaaggcatggagaatcttgaaaacaccaagagagaagtgactcatgtttaagggatcctcagtaaaattaacagctgctttctcatcggaaatgatgtggccagaggcaatgggatgacatacttaaggtactg

SEQ ID NO: 8083 - DNA, 368 bp, Homo sapiens
tagtagagacagggtttcaccatgtttgtcaagctggctcctgacccccgttgatccttttgactgagacttccaaagtgctgggattacaggtgtgagccaccacgttcggccgcttctctttttatgtgtaaaaattaggacagtaatacctgtttcgcagaataggtattgatattgaaatgacatttacgtgcaggcacatggtaaatactaaaattggtgctcctccacccccatgtaaagtttgttaggccaggcctggtggctcatgcctgtaattccaccactttggtaggcctaggtaagtggatctcttgagcccaggagtacaagaccaacttgggcaacatgtcaaaagcttgtct

SEQ ID NO: 8084 - DNA, 892 bp, Homo sapiens
gagggcttcagccctcttagtttgagacccctttccttggtcattgcacaccttcttcccctgatagaagaggcccagactgtctgtccctgtctcagggtcacctcagtgagggacgcgacctccaggtcccctctgagcctctgaacagcccagctttgctcctggagttccgacacataggagggttagaggaatccaaggaggagctttctccaagaattggtggtcagcattgggctacctggagagagtgactgccaagccccatggctgcactgtctgggttggatggggtggtcctgcactgggtgactcatgaccctgaaggtcccccatccacctccatgtcctgggatcccccagtccagacagccttagaggcaggccttcctgagtcaccaggactctataaaaaccacaaacccccagtgggcagacgcaaaccagccaagtgattcagagctagggaacctggggccaggaagcagggctgggagaaagtgagaggccggaacaactaaaaatccagggattggaaagacagacgctgagcacccccaggcagacggaaacagcaggtgctaaatgccactttgtgggccaggtgcggaggctcacacctgtaatcccagcattttgggaggctgaggcaggaggatcacttgagcctaggagtttgatacgagcccaggcaacatagtgagaccccatcaatacaaaaaatttaaaaattagccgggtgtgacagcgcgtgcctgtagtcccagctcttgggatggctgaggcaggaggattgcttgaacctgggagttcgaggctgcagtgagctgtgatcacactactgcattccaacctgggcaacagagcaagcgaccctgtcttaaaaaaa

SEQ ID NO: 8085 - DNA, 259 bp, Homo sapiens
ccttgggcaagttactttaaatctctgagcctcagtttcctcatctgtaagctctaaataataatacttaccttgttagaagttaaaaatacatagatataaaaaccttagcccagtgcttgacatataagccttcaatcaatgctagcaatttcaccattattattactgaataattgtgagaccttgagcaagtcacttaacctcatggtgtccttttctccatttcttgggggtggttttgtgagcattaagtaaa

SEQ ID NO: 8086 - DNA, 482 bp, Homo sapiens
tgagtgtttctattaataagtatctaagtttcaattgtcttgtatctttccctaattctccaaacggttcaatctccagttttattcagggactgggccattttgttctcagagggacaaaactgatctctccatgaaatcccctgcacctcactctgggcagctctaggctcagcagatgtttttctgccattaggaaacagccccttactctcagctcctgtgctaacacccatacccaccagctgggcgttgggacctctcccgtcatatggctgccacttgcttgggaaggaattctccagactccttttactttgtatgtgtttctagggggaattctgaggggaagaagctttgcaggcaacctctgtgcccaggaacatacggctcacaagtcctttgtgccgacagggaatctatctaattgttttagtgtgtgaggctcattgtcagcctagatttccctgaaactctgggcc

SEQ ID NO: 8087 - DNA, 400 bp, Homo sapiens
ggttataagaactggactctaaggaaccattagcttaacggagaatatggaaacagtcacgtgatctgctaacctctatgtatatagctgagtaacccacagttaataagcatgttactttttggctcttataattctgacatggagttgtacttgcagggaaatgggaatgagaatgtggtttgcattatggtcattatttattttatctgttattcaatattcttggggcttgcatatgatgatgtgttccaaatagccattgagaaaacaggatttaatcaaaattgctttggactttatttatttgtccaacttttaaaatatgattattaaataaaattacctagagttaatgggatttggatgacttactatttatgtaccagatgcaattctc

SEQ ID NO: 8088 - DNA, 472 bp, Homo sapiens
ttgacctttttgttgattttcagggttggatggaatggcaaccgtaaaggtcattctgtacagggtggagcttctcctggaagagtttgcccttaacttaggtgacaacatgtgttttctccaccagtgtctacgatgaaccacatcttcctgatcagaaaatatcactttaaaaaaaagactctggggcctggcgcagtggcttacccttgtaatcccagaactttgggaggccaaggtgggcaggtcacttgaggtcaggagtttgagaccagcctggccaacatggtgaaaccccctctctaccacaaaatacaaaaattagacaggcatggtggcacgcgcctgtagtctcagctactcgggaggctgaggtggatttgaattgcttgaacctgggaggcagaggttgcagtgagctgagatggtgccagtgcacttcagcctggggaacagagtgacacttgtctcc

SEQ ID NO: 8089 - DNA, 472 bp, Homo sapiens
actaaaacacttctaatacactaaccatcaatgtttcttgtatgttaggagtgaactgaaagaaaatcttccgcttttgctaaacaattgttaggaacaactaagacacttctaatatactaactatcaatgtttcttgtatattaggagtgaactgaaagaaaatcttcagcttttgcactttttaaaatcaagacacattttggaaatgcagagtagttttctggagcttaaggattggaccaaatggtcccccattgccactttttaacttcaattgccaatacactttctcctctctgtctcatctcaatctgtactactaaaaactcatattcaaaaagcaaaagaatgctcactcagatttttacaaatctatctacatgaggagagaaagttttaacttgcttgagggagtaatttgttgaaacgttattcttccagaaaaagtaaatcattgtgcttcatttca

SEQ ID NO: 8090 - DNA, 344 bp, Homo sapiens
tttttcttctggggaatgtttgaagtcccctttaaaaataatgccttgaggatatttttccctaataccatttaaagaaacttgaaagcatatggctcttgaagtgcacagggttctaatgaagtaatcagtgccctgctcatatgcagacttccacccagagctttcaaacccaacccagatcagtcttttgaatgaagtgaaattctacagaaactcctttcctctctctgccagtgtaaaggcttagtgagccactgtgcttaagtggtgactttcaacctttgaaggatggaaggtgctggaaaagttgtgttaggatcaaaactgtcagtggccaagca

SEQ ID NO: 8091 - DNA, 541 bp, Homo sapiens
agttgctcatcactaaatgggaagccttattaaatagaaatactggcttgtatttaaaatgtttattagtatatatatttgggcaaattttacagtcatagaatagacacagaagaatattaagttaatcagacatgatttagtgagatcaaaaatacaaataatctgaaaatttagtgaaaagttctaaatatactatccataccaagcacatcaatatattttagaaaataactgtattgaccaagctggctgaaaataagaattttgtttttctagagagcactaattgctacttaatgtcaaactaatgacatctcacccacccctcctaaaatcctactaaaataaaattatagatattgaaaaaggaaagaatctataatagcaaagaaaaagggccagagttttgctaagaaatgttctgtagttgggtgagctcaggagttcaagtgatggtcctgccacagcatcctcagtagctagagctataggcgtaaccagtctgggcaacataatgagacccccatctcttaaatta

SEQ ID NO: 8092 - DNA, 360 bp, Homo sapiens
ggtggggggttttggcgtgttctatagctgagctacaagcaaaattagagctttttacttatatactactttgcatggaggtagtctcagggtcccagttacagcactgatttcttgaaaagagtttgatgttctggcccatgcttaatttaaatgagaggctaaaagcagattgtgtaacccaccaatgcccatttgacaggacttgcaccaatctgacctacactttcataagagctcctaagcagagtgctgtactgtgggtcttctgccttaactccaggaatggcagagatgagctactgtttattgagcaccgacaaaggagaggtactctgagtgttgaatgcatgctgtctc

SEQ ID NO: 8093 - DNA, 563 bp, Homo sapiens
ccattccattcgtgttcattcgattccattccattccataccatttcattcaattcctccctgttccattgcgttccatttcattccattccattctagtcgggttgattccattccattccattccattccattctataccattccattccactccattccacacgggttgaatcctttccatcccatcccattccattccattccattccattcttttccattccattccttccactctggttgattccactctattccattccattccattcgaaaccattccattgcattccactcggtttgattccattccattccattccactccattcgattacaatccgttacattccattccattacactcggtttaataacgttccattacattcctttacattctactcggtttgattccagtcaattccattccattctgttccattccacacaatttgataacattccattccattccattccactccattccattccattccactcgggttgaatccaatccatttcattccattccattccattccattcctttccat

SEQ ID NO: 8094 - DNA, 836 bp, Homo sapiens
cgcaccgcacccggcctaaaagtaattacttttaatggcaaaaaaaaaaaaaaaaaagaaatgcaattaattttgcaccaacctaataactaatgcctgatgatctgaagtagaacagtttcatcccaaaaccatcccccaccacagcctgggtgcgtggaaaacttgtcttccatgaaacccatccttgggtccaaaaaggttggggactgctggtctagaggatacagtccacccctctctctagacctgcactatccaatatggtagccattagccatatgaaattttaatgttaattaattaaaataaaatattcagttcctcagttgcaccagccacatttccagggctcaacagccactcgtagctagtggccaccctattggacactgcacatagggaatgtttccattgcaaaaatttctattggatgctgctgctctagatcctcaaaaatcttgctagcgccaaaccatcagaaattcacccacatatttgtaccatcttatttgtatcatctgctggccctctgctgtggaaatgctcttggctcatattgagggatgttaaaagaaacagctcaggagctctttcacagccttatgcccccaccgcctgctccctgctctcaagatcagtagttcttttctggtttcttctcttacagacacaaggaatcttgtaatcgatccttttctctcttcactttggctgctagaaagctgagagccaaaatctaagactaaataggatttcatggcactcattttgtgaaccaccctcagatctgattccatctttattatcttacccttattttccctttgcctcat

SEQ ID NO: 8095 - DNA, 1671 bp, Homo sapiens
  misc_feature (1497)..(1497): n is a, c, g, or t
agtcaaggaggacagtgacatgcatgtgtaggggctggggaccaatctgtcttgggggtcccagagatggatctgctgtgacagagggggccaagaccccgttcagagtgggggagggggagaggagtcacaggttcaacatgaagaacagttttaggaagtgggagggctggggacctacggcccatgcagtgccagatgggaccccatgcaggtgggttgctggaggaggacagggaaacagactgcagttttcagggatgcccttggaccttctgactcagtggcccaactcctggctgctgccctcctcccccactcccaagacctccaggtctgagcagctgtcctgcggttgaggtggacctgttggggaagtccatcaggaacctgccagggcccgaaagagagtgctgggggctctgtggcaggaaatgagggaagtgtccccagccacctccccccttagaggtgtggagattctggtcagtgggagaagctttaaaagagcttgttctccaggccccaaagtagggcaggagaggaggagtggcttccaggcaagtggctagacccagtcacctcattgtgaccttgcactctccagggatgtggtcccctgggtggtgggagctatatacccacattgcagagagcaaaaccaaggaagacgaagcaaccactagctctggttcttcacctcccacccccatcccccaagaaagaacgggtgctggtgcgggccacagggtgctggcagctccggcatcactaagaccggcccccatgcccatgctggagagccattccctgttggctcatattggaaatgggcctgttacccgcagctgcccctctatgccttgggccaggatggacagcccccaggggtagggggatgatgaatgagtagcaactgaaggaaaggtgcctccgctctcatgaaacaagtgaaggatgagacagccggatccttggcactactgttctcagggtgaaaaaaaagcaagctggatcctcatgctgccccactccatatggagcccatccaaactcagaggtgtcagagggggcagaaagaggggactggcctttttagagagaagcaaccctggtcacttgggagcgtgtgcccagggagatggggtggggtggggtcactctttgtctgtgaggaggcaagggcatggctgcccacaccttgtcctactcctgagctgggccgtgtagcatgggcccatgcacctccacccacagtgcagtgttgtggcccctttgccaggctgtgagttgacgggcagcagactccccgggaggggtgaaatgcggagggcacagggcctgtgtgagacgcagggaaagctggagaggccaaaccaggggccccagcagtaggtcggaggtgaagtcgggccaggtgcagtggctcacacctgtaatcccacactttgggaagccaaggcaaggggatcacttgaagccaagagttcaagaccntcttgggcaatacagcaaaaccgtgtccaaaaattaaaagattagccaggtgtggtagcacgtgcctgtaatcccagctactcaggaggctgaggcaggaagatcccttgagcccaggtgttccaggctgcagtgggctatgattgtgccactacactccagcctggcatctca

SEQ ID NO: 8096 - DNA, 781 bp, Homo sapiens
gtggagcacgcactcctggctttaaagtttatacttgcatttgccatacctgataagccacggcatatccagatgaaactagccagactggaatttgagtctttggaggcactcaagcagcagcaaatgaagctcgtgaccgagaacctgaaggaggaaccaatggaaagcgggaaggagaaggcaacctgagtgcccagcgtgcccagctgccctgttggcagaggcctgtgtctgtgccacacctgccacggtggcagggggggtacccggggcagcatcgtggctcctgaacccagacccaatgcttagccaaacgaagtggctcccatgtggcaagcacccttctcagtttcgcagtggcttggctcgggatccttggcagttcccccagccccaccctgtctgctccttcccagttccttcccgggccccacacgctgctccagctgccaactttgctgcagagccactgccgcccttgagcctctcaccatgagtgagccaccagctctccacgttcccctcatagcagtgtcactcccaaccccaccatggcccagggacccgtggacaggttggggatggggtgtgtgcccactgtgctcatcacaggagcctcagttgagagtgagcggggtacagtaaggcagtgcttcccacactggacctctttcctggttctcttttgcaatacattaacagaccctttatcaacataaacaatagtaactgagctattaaaggcaacctctctgactccttctgcctacataggtac

SEQ ID NO: 8097 - DNA, 1119 bp, Homo sapiens
  misc_feature (1080)..(1080): n is a, c, g, or t
gtggagcacgcactcctggctttaaagtttatacttgcatttgccatacctgataagccacggcatatccagatgaaactagccagactggaatttgagtctttggaggcactcaagcagcagcaaatgaagctcgtgaccgagaacctgaaggaggaaccaatggaaagcgggaaggagaaggcaacctgagtgcccagcgtgcccagctgccctgttggcagaggcctgtgtctgtgccacacctgccacggtggcagggggggtacccggggcagcatcgtggctcctgaacccagacccaatgcttagccaaacgaagtggctcccatgtggcaagcacccttctcagtttcgcagtggcttggctcgggatccttggcagttcccccagccccaccctgtctgctccttcccagttccttcccgggccccacacgctgctccagctgccaactttgctgcagagccactgccgcccttgagcctctcaccatgagtgagccaccagctctccacgttcccctcatagcagtgtcactcccaaccccaccatggcccagggacccgtggacaggttggggatggggtgtgtgcccactgtgctcatcacaggagcctcagttgagagtgagcggggtacagtaaggcagtgcttcccacactggacctctttcctggttctcttttgcaatacattaacagaccctttatcaacataaacaatagtaactgagctattaaaaaaaaaaaaaaaaaaaaaaaaaaaaaagaaagaaaaaaaaaagaaaaaggggggggggggataggagattcccggggggggcaaaatttaagggttaccagagttttgttgtaaaaagagggccccaataggagagagcgaattttacaacatagagaatggcagcgttttaacaacgcccgagccgcgaccaaaccgccccgccgggacccttctgaaaggacaccaacacgagcgcgggggcacaacatctggaacaaatatccagacagaagatacagcgccccagcgacactcacacgcgtcaccggctctcggctgccaccacgaccacnattctaccgcgtgaagacttgcccacagattcttggata

SEQ ID NO: 8098 - DNA, 715 bp, Homo sapiens
ggattttgtaaattattatttaatttctattaataagtgagctttaagaatgccgagcaaatgaagctcgtgaccgagaacctgaaggaggaaccaatggaaagcgggaaggagaaggcaacctgagtgcccagcgtgcccagctgccctgttggcagaggcctgtgtctgtgccacacctgccacggtggcagggggggtacccggggcagcatcgtggctcctgaacccagacccaatgcttagccaaacgaagtggctcccatgtggcaagcacccttctcagtttcgcagtggcttggctcgggatccttggcagttcccccagccccaccctgtctgctccttcccagttccttcccgggccccacacgctgctccagctgccaactttgctgcagagccactgccgcccttgagcctctcaccatgagtgagccaccagctctccacgttcccctcatagcagtgtcactcccaaccccaccatggcccagggacccgtggacaggttggggatggggtgtgtgcccactgtgctcatcacaggagcctcagttgagagtgagcggggtacagtaaggcagtgcttcccacactggacctctttcctggttctcttttgcaatacattaacagaccctttatcaacataaacaatagtaactgagctattaaaggcaacctctctgactccttctgcctacataggtac

SEQ ID NO: 8099 - DNA, 941 bp, Homo sapiens
  misc_feature (902)..(902): n is a, c, g, or t
gtggagcacgcactcctggctttaaagtttatacttgcatttgccatacctgataagccacggcatatccagatgaaactagccagactggaatttgagtctttggaggcactcaagcagcagcaaatgaagctcgtgaccgagaacctgaaggaggaaccaatggaaagcgggaaggagaaggcaacctgagtgcccagcgtgcccagctgccctgttggcagaggcctgtccttcccagttccttcccgggccccacacgctgctccagctgccaactttgctgcagagccactgccgcccttgagcctctcaccatgagtgagccaccagctctccacgttcccctcatagcagtgtcactcccaaccccaccatggcccagggacccgtggacaggttggggatggggtgtgtgcccactgtgctcatcacaggagcctcagttgagagtgagcggggtacagtaaggcagtgcttcccacactggacctctttcctggttctcttttgcaatacattaacagaccctttatcaacataaacaatagtaactgagctattaaaaaaaaaaaaaaaaaaaaaaaaaaaaaagaaagaaaaaaaaaagaaaaaggggggggggggataggagattcccggggggggcaaaatttaagggttaccagagttttgttgtaaaaagagggccccaataggagagagcgaattttacaacatagagaatggcagcgttttaacaacgcccgagccgcgaccaaaccgccccgccgggacccttctgaaaggacaccaacacgagcgcgggggcacaacatctggaacaaatatccagacagaagatacagcgccccagcgacactcacacgcgtcaccggctctcggctgccaccacgaccacnattctaccgcgtgaagacttgcccacagattcttggata

SEQ ID NO: 8100 - DNA, 645 bp, Homo sapiens
gtggagcacgcactcctggctttaaagtttatacttgcatttgccatacctgataagccacggcatatccagatgaaactagccagactggaatttgagtctttggaggcactcaagcagcagcaaatgaagctcgtgaccgagaacctgaaggaggaaccaatggaaagcgggaaggagaaggcaacctgagtgcccagcgtgcccagctgccctgttggcagaggcctgtgtctgtgccacacctgccacggtggcagggggggtacccggggcagcatcgtggctcctgaacccagacccaatgcttagccaaacgaagtggctcccatgtggcaagcacccttctcagtttcgcagtggcttggctcgggatccttggcagttcccccagccccaccctgtctgctaccccaccatggcccagggacccgtggacaggttggggatggggtgtgtgcccactgtgctcatcacaggagcctcagttgagagtgagcggggtacagtaaggcagtgcttcccacactggacctctttcctggttctcttttgcaatacattaacagaccctttatcaacataaacaatagtaactgagctattaaaggcaacctctctgactccttctgcctacataggtac

SEQ ID NO: 8101 - DNA, 474 bp, Homo sapiens
gtggagcacgcactcctggctttaaagtttatacttgcatttgccatacctgataagccacggcatatccagatgaaactagccagactggaatttgagtctttggaggcactcaagcagcagcaaatgaagctcgtgaccgagaacctgaaggaggaaccaatggaaagcgggaaggagaaggcaacctgagtgcccagcgtgcccagctgccctgttggcagaggcctgtgtctgtgccacacctgccacggtggcagggggggtacccggggcagcatcgtggctcctgaacccagacccaatgcttacctcagttgagagtgagcggggtacagtaaggcagtgcttcccacactggacctctttcctggttctcttttgcaatacattaacagaccctttatcaacataaacaatagtaactgagctattaaaggcaacctctctgactccttctgcctacataggtac

SEQ ID NO: 8102 - DNA, 812 bp, Homo sapiens
ccgtcctctctcaggccctgtccgcctattcccctcatcctggccatccagggaggaggagacgccagctgcttctcatttcagtgtccttaaaatccctgctggtctgggctcacacagtgcgacattgcatttccaccacaccaactgtctcccatctcctcagagtcagacccagggacttgcaggaagctgcaggcagcatcagagtcaccacttccctggggtcaaagccgctggccaggcttccacagagagcagaggcctcggccactacttaggcttctgtggctcacctggtgtcctgttttctcttaacagcagcaaatgaagctcgtgaccgagaacctgaaggaggaaccaatggaaagcgggaaggagaaggcaacctgagtgcccagcgtgcccagctgccctgttggcagaggcctgtgtctgtgccacacctgccacggtggcagggggggtacccggggcagcatcgtggctcctgaacccagacccaatgcttagccaaacgaagtggctcccatgtggcaagcacccttctcagtttcgcagtggcttggctcgggatccttggcagttcccccagccccaccctgtctgctccttcccagttccttcccgggccccacacgctgctccagctgccaactttgctgcagagccactgccgcccttgagcctctcaccatgagtgagccaccagctctccacgttcccctcatagcagtgtcactcccaaccccaccatggcccagggacccgtggacaggttggggatggggtgtgtgcccactgtgctcatc

SEQ ID NO: 8103 - DNA, 435 bp, Homo sapiens
cactccagcctgggtgacaagagtgaaactccatctcaaaaaaaaaaaaaaaaaaaaactagttccttctgattttgtaaaacagctttatgcatgtggtacattttgccacttatcagagatgtatactgtcatttagagccccttgggtgtaattagcaagggcttccatgtgccagatgacatcatccagacccagggatggaggaacatagaagctaggtgattgtaccagcgaaaaatgtacttggttcatcttttaaccatgtgaggaagattagcgtgttattctgtagtctttgtccagtgtccctgagcccaggagaggcccactgtacagtgtcctggccatcctgatgatagccaggtttataccacaaaaccactgaattccattagaagcataccagttaatgccaggtcactgggatcagt

SEQ ID NO: 8104 - DNA, 407 bp, Homo sapiens
gctttagtgaagagccaccacactcttgttagtaaaataattttaagcctctataacgctcacttgatgttactaaaagggtagaatatagaaaaaaggccaagtctctggatttgaaatttcttagtgtgggccagtaatctgcatttcagcaaatccccttgtgattgtgatatgtcctaaagtttaaagaactgctgtgtacctccttaatgtatttaatcttcaatataaatgaccattcatcaaagaggcttgagcaaaggcatgacacaatcaaacctatggcttccatgttaaaaatagtctcttggagcaagggtgaaaacaaagagaccagtttggaagctactgcaataatcaatgtgggaaatgatggtagactggacaaaaaaaaaaaaggcagc

SEQ ID NO: 8105 - DNA, 503 bp, Homo sapiens
ccaagggacaaagctcatcaatgatgttccactgttctctggggctctggctctaagacctccactgggtcgggtttctggagaagaggcccattctccaaagacccttcagggtcaccacccctttggtcagggtgtggcctcatagcttcttttgaactggaacacatgactgatggctttagagcatacaaaaaataagtttgcgaaaaatatcttaataataatagaaagaaaggaagaagaaacactcctttatgtctctaagaatagatgtgaaacatgtgtgccttggaacaccttctccctctcttgccccacgtgagctggagcttacatgcctgcttgttttcagtactgccgtaaccctgatggtgacatcaatggtccctggtgctacagagtgaatccaagaaaactttttgactactgtgatatccctctctgtggtaagttgccttctgttttggtaaggaaactgcttccttcatatggatttgcaa

SEQ ID NO: 8106 - DNA, 454 bp, Homo sapiens
agatcacctgaggtcaggagtgatctgacctaatcctaaaatcctaatctcagtgagtgctgactgccatccatccagatcagtggaagggtgagtttgatctcttaggggagacaaagctatagaggccaggtctgcctcacttgccgaaccaactcgtcgtttatccagcctgtatctgcaggtgggttggaggggctgctcagtgctgggttaaaagtgtgaattctagagactgtcagccagacctgggttgaaatactggctcccctccttataagctgtgtaaactgggcaaatcacctcatcactttgggcctcagtttcccatctccaaaatctgtaatatggggagactagtaaatacattctagggccattaggagacttaatgagaaagttgacaaaaaacctcttagttttgcagtggcaagcccataacagcagctcaaaa

SEQ ID NO: 8107 - DNA, 510 bp, Homo sapiens
actgatgaaatggacagacatactcagcaagaacttagagtgaacttatatttctaacagtaatggagtggacagtcataagacattcatacagtaaaactattttctagaaataatgaaatagagaaatgttcctaatgaagtataagatgtaaaactgtatatggaatatactgtacatcaaggaaagactgcaaggagataaatattcaagtgcttactctgaatgttagacttataggtgattttttaattttttaatgctttttcatgttatctcagcttcctagttttgatcttataatcaaagaaaaaaacatatctttgctccttctgttatggccactaaaagaatatgaagaaagctgcgtgtggtgttgcatgcctgtagtcccagctatttgggagactgaggcaagaggattgcttgagcccaggaattctaatccagcttgggtaatataacaagacactgtctctaaaaaaaaagttaaataattaaaaattaaa

SEQ ID NO: 8108 - DNA, 342 bp, Homo sapiens
gcaaggaggaactacagaacactgaattttcctttggctgtttcctggtgtatcccagaagtaagaatggttgttgagaggaaccacgaaagtaatagaaaaagtatgctgacataaaaggggttaagaatgacctccaattgaggctgggcgcggtggctcctgcctgtaatcccaggactttgggaggccaaggggggcggatcacctgaggtcagttagagaccagtctggctgacatggcgaaaccctgtctctaccaaaaatacaaaaaaattagtcaggcatggtggtgggcacctgtaatcccagctacttgggaggctgaagcaggagaatcac

SEQ ID NO: 8109 - DNA, 656 bp, Homo sapiens
caggtcttttagacaggtcagcagctttactgtggtctccatttctgacaaagtcagataggaatcaccgttgtcccctctgtaattgttgtcccctctgtaattttcccctctgtaatctcctaagctatgttacctgcctcgtcttccctccctcgccacgtacgtgtgtgggtagacacacaggcccacacatctgccatccctgattcccgcttttctctgatctgcagtattaccgggcccttgtaaatgctttgccccagcaccattgcttccattgtgaggcgtccagacgagcatggcacccatccccttcttgtccagccacccctgcagctctgtttggaacacctcctccttttccatgctgtgtcggctctgcttgtctcctcttgctctttttattgtggcactgtttagtagtcatcttttgttcttttgaggggcatttattgagcaactggcttgtgcagagcatagggagggagatgtaccaaaaggagacggacacgcacctgggagtcctggttcaaatctgtgagctcctccctgtgaggggtgccccgttaaccttgatgagactcagctactgactttttaaatcaagagtgtccaatcttttggcttccctgggccacactggaagagttgtc

SEQ ID NO: 8110 - DNA, 482 bp, Homo sapiens
ctataactaagactgtttgttggtctctgcatatactttcaggtcattaaatgctacagaaatgagaaatgaaatacaaactttttaactcctactcagatgtccaaacagcttcttagttcctgtcagatcagtaataatactgggtttggtctttcttaaaccaagcataatcctgcttatcttagaatgaaacagtattcctattcagaggtaaatagagttaacctttactcgtgtaatttttattgtttgttttaccatttcatggtgttcatactagccccttttcctttccctctaagtgactgctgaggttctcaccatttcagaataaaattcttgtcctttgaggttggaaatttaatgataattgaaaaactgtatgtgtcagtatacttaaaaggaaaggttatatcattctcttcattttggatgtaaaatttacctgttagagaaaatttggaaattatagaaaagta

SEQ ID NO: 8111 - DNA, 413 bp, Homo sapiens
aaaacataggcggaagctccaggacattggtctgggtggtgattatttggatatgaccccaaaagcacaagcaacaaaagcaaaaatatatcagtgggattacattaaactaaaaagcttctgcacggcaaaggaaacaatcaatagggtacagagataactggccgggcacggtggcttacgcctgtaatctcagcactttgggaggctgaggcagatagatcacgaggtcaggagtttgagaccagcctggccaatctggtgaaacactgtctctactaaaaaatacaaaaaattagccgggcacgtggtggcgcatgcctgtagtcccagctactcaggaggctttgacaggagaatcgcttgaacccgggcagtggaggttgcagtgagctgagatagcaccatggcac

SEQ ID NO: 8112 - DNA, 447 bp, Homo sapiens
catgcggtatttgtctttctctgcctggcttatttccctttaagatgttcatgtaggttcatccgtattgttgcaaatggcagaatttccttctttcctaaggctgcatagttctccactgtgtgtgcaccgcattttctctatccactcatccatcggtgcgcgctcaggctgattccacagctgtgcttttggggaatggcgctgtggtgaacgcgggctgcagatgtctcgtcggcagatgagttcatttcctgtcagttatacccggtaatggggtggctggatcgcagggtagttctatttttaatctttgggaggaatctctggcactgccttccacaatgggctacactaattgctgagtgtgtttaggagtctgggcatgcactccttttggctaggctctatttgctggcattacataaactaaaattagcagctgga

SEQ ID NO: 8113 - DNA, 559 bp, Homo sapiens
ctatttgccacttttctttaagtttccagacttggtagcataaagttgttaagataatattctcttagccattgtgtgttacaaatatagtgcaacctactctttcattgcttttgtttgagcaatctagttttaaaaattgtttttaataatttatttaaaataacatttgtttgtttactttatcattagtttgttttttccttcagagatgtcttttctatttatttatccattttttacttttacttaataatcaagctcctctttccctagcttcttttggtgggagctgaaatcattaattttttaattcttttttcttcttttttaatataagcatttgcagttgtaatttttcatcaagtcactcctttacttttacttcacaaaacaagaatcagaaccatacctaggtacaacacaactgttaggatcatcattcagagaaattaaaataattgtgattactatattaagggctcttaacagaaaaaaaaataggggtgtgtaatataaacagagaaatgaaaaaagaaaaaaaaactaagaaaaaaac

SEQ ID NO: 8114 - DNA, 957 bp, Homo sapiens
aaaaaacctaccgattaaactgtgacacaccattgattgtaagacacaccctgattggtgaggtgtaaaaatgggggaaagtggctctcttagaatgaaatatcttagaatgaatttgtgtgagtcaggggcaggtgaaagtcattttgcaggattctaatggcttctccatacacctctctccgaagaaagaaaggacttggggtgttttgctgactcctggcagcattcttggcccaatgtattctgggtttgctcttccccgttggagagccctttgccagagaacagccgctggcttgttgagccaggaagcttaccatgtgagtgcagcttgtgtctgaagaggctgggccagtacagataatacgaatcacatttcactggctttttgatcggctgtttagctcctggcagcttgttcccagcattcatgtttgctgtgagtaggaaacacaaagaacctcgtcttcagaacgagaaagacttggggctggattctagctgtgcccgtggctggcttagtgctcatgattgtggccctgtgcagaccactttgcctccctcagtctcagtttccccacctatcaaaacggatattcattcctgccttgaatgtgttatgtaatgattaaggaaaataaaatgcaagtgttgaagttgatacaggatctttatttcattccagaaaactctgtaaagtttcctcatttaaaaattccttccttctgtggccgggtgtggtggctcacactgtgatcccagcactttgggaggccgaggcaggtggatcacttaaggtcaggagttcaagaccagcctggccaacatagtaaaaccctgtctctacaaaaaatacaaaaattagtcggacatactgtcttgaacccaggaggcagaggtttcagtgagctgagattgtgccgctgcactccagcctaggcaacagagcgagac

SEQ ID NO: 8115 - DNA, 394 bp, Homo sapiens
gaccttcatgagtgtgtgcacacatattcgatgaggatgcttgtatcttggggaggtcctatgaccctgtgatacacgtgtgtgcatacactcatgtccctaccgctggacatggactctgtgtgcccaatgagtgtctgcttgaggccctgcctagccacagacagccttggagagcccacgctcagatggccactccagacctggcaagatgaaaattttaaattggagatagggtgttctggggtggaagtagggttattgaaaaccgcttaggctgggtccagtggctcaagccatctcaaatctgtaaactcagcacattgggaagactcaatgggagttcaaggagttcaaggtcagactggacaacatagcaagactctatctctac

SEQ ID NO: 8116 - DNA, 262 bp, Homo sapiens
gacatacttttaagagttgtatttgtcatatatagaccatgtgtcaggtattgagctaggtacaaggagtacaataaataacacaacacaatgtatgccccaaaaggattttatcagcatcagaagacatatgataacattccaagataaaaagatatagaataaaagagttatagaaatttattaaagatggagtcatggctgagggcctctgaaaaacacaagcgtaatttgaagttagctttgaaatatttaataaagg

SEQ ID NO: 8117 - DNA, 699 bp, Homo sapiens
taacattcgaagattttattttgctgctgtggtggagaatggctgttgaaggtcattaggagctagttaatacaggtcatatttcttgggagagctgatggagattggcctggtgattcctgaagaagtgacaagaagtggacaggtttgagacactaattacagttctagacaccgagtccctcctctgggaccacactcctttacagacctcatctctttaggatgggcagcatcccttcagggctgggactgcttctgccacacctcccagacacataagccgggcctccaagaaggctgtgtcttttgctgaacattccacaggttgtaagagacagagggcagcattcagcttcaggccccctagaccccaagtcctgcatcgtcccagtgtcacaaggcctccagcaatgatggaggacggaggggggctttcctgccgctttccaaagaccaagcctcgaagactttcaagctggacacattccccagggttgcctgaccgccttcctgggaggggaatgctggcagccgagcctgtcaccacccacagaactattgtggtgcctgttacccacaggaaatgagacacaccgcaggccgatccctgcatgatctttgtctcacagtgacgtcctcgttagtcaggtccttttttcctccttctccatcatgctacttgagttctaactgaga

SEQ ID NO: 8118 - DNA, 655 bp, Homo sapiens
tgtccctgctgagaggttccctgtgccagggcagtccaaaaaagttgtccctggggctcctgcccaccccagaatccttttccaaacatgactcatatgtgcaggtggtgaaaggggacacttcggtgatgtctacatttctctccttcctggaagagaggcccctggggaagtcacaggtttgggagagatctggtctactggcaagatactgctttcagagatgcagatgccacctgggtaatgcccatgtctgcagtgcaactgactggtggcaaggggtccaggaagagaatatcaatttaaagcaacgggaaggaggagataaactgacatgcaccagggagctacggtcaggggtttatgtttcagagagagcaaaattgtatcagtgttcacaggccaggctccagactatctgtccagtagaaacttccatgatgatgaaaatgttctacatatgaatgtcctgttcagtagcctctagccacctatgatattaagccctaggaatgtggttcatgaaactgaggaactaattggtttaattttaattcgttaaatttaaatagcctatttgtgggcattgggttcccctactggacagagcaggtctagagtacttcacatgccagggctgctacttgcattgaga

SEQ ID NO: 8119 - DNA, 464 bp, Homo sapiens
ttacagattatatttaatgccagcaaacagcacaacatccctttcaataacagtgagagtaatagtcacaaggtcttagcatgtatagagtgcttaaaatgtgccagacgctgatctaagttttcatgtctgaaataatttttctttacactatgcgtatacgatataatgtttttgaaagcttggctgggtgccgtggcttactctgggaggctgaggtgggaaaatcacttaaagtcaggtgtcccagaccagccaaggcaacatagagagacccctatttctccaaaaaaaaaaacataaaataaaaatattaggtatgatagtgcatgcctgtggttctagctacttggggggctgaggcaggaggatcacttgggttaaggagtttgaggctgcagtgagttgtgattgcaccactgcactctagcctgggtgagagagggagagagagaccccatctc

SEQ ID NO: 8120 - DNA, 547 bp, Homo sapiens
gtgctccaggctccagcctacctggctagaaccaactttcactgttgtccccaaacctgctacatccctcgaaccccagggcccagttccttacctcaggggctttcagaccaaagacatggatatcatcctctacaccctcatgccagccataacatcctacccagcactgtgtctaggattttgcctcccaagcatttttagacccatttcagggcagctgaaggaatctctcattcctttgcttcaactcttccagggccctcaggatggagtccctggtcctcctcctaacatttaaagtctccctgacctcagggccctcaggatggagttcctggtcctctgcctagcgttttaaagcctctctgacctcggggccctcaggatggagtccctggtcctcccactagcatttaaagcctctctgacctcgggctgctgactactttgtctcacctcctctgctacagcagacagtccagtccagcatcctctgagctagtccaccttttcatagccctcagacctctgaagctcaaaatgc

SEQ ID NO: 8121 - DNA, 368 bp, Homo sapiens
atgtttacccatttttaggtcctgactttcatacaaagaagataatcctacaacttctaaccttccatttttacatcctatttacatttttgagatgaatggtgataataaagatattaacaaccaccaaaacaaccaacacttatttagtatttagcatgtatcaggtgttgtcctccaaaccattgctttatttttctacttccccttgatctccatccattgagctccagaagatgagactatctaagtatgaaacttattttggggccgggcgcggtggctcacgcctgtaatccgagctctcagggaggcaagaggcgggaggatagcttgagcccaggagttcgagactgcctgggcaatat

SEQ ID NO: 8122 - DNA, 761 bp, Homo sapiens
tcaccaaattgatgcagtatacaaagaaagaggaaggcaaggaatactggaaccaggagcttcacaggatagtgggaaaaggaagcctaggatgaaagtgaagtgggatcccagggtgacagctttgcagcaggcacacagggcagaagataaagctgaactggggcaaagactacacttgagtaaaatcttgaacaatgtgagtgggaggaggagaaggcctggcaaattagaagcacaaccttgaagggcagagagacaagagtcttgctatgttgcccgggttggttttgaactcctgactcctggcctcaagtgatcctcctgcctcagcctcttatagtgctgggattgcaggtataagacaccacgtccggcccctggaagtttctggagttgtaaaatggcatcaagttgattttaaggaaaactcttctggaagcagagttcaaggtggattggaagaaggcagcctgaagttattctctcttccccatttccattgtccaaaatgttttattgtctttgaaaaagataaacaagcaatcctcattcctcactactacacttccttggtagaaacacaataaatatacagccactttggagaacttcaccaaatcaaatttatttccccatttctgaatgttaagccacaaagaaagtacaaccatcattagaataaatgaaaacagtaaataatgatgagtgggactttccagctctaaagtagacagactatgtgtgaactacaggcagag

SEQ ID NO: 8123 - DNA, 303 bp, Homo sapiens
gtgcagccttatagatggtcatgtgcctggaaatatgcccatcatgcagatcagggttgtaggaaagctcttggcttgacttcatatgctggggttggtgggcaaggaagatgacatggtgtcattgtacataatgatgtccttgtcacagaaggtcatagtgctttgtcaggtgattttcccatgccgacctcctctataagataattttacatagtgggatagtgagattgaataggagtttcaaatctgtgcttctaatctggagtttatgctgagtgggaaatgaaatattagcaagga

SEQ ID NO: 8124 - DNA, 469 bp, Homo sapiens
caatttatagaatatattggttaatataagaataaattttagccatgcacatctattacaaacttcattttatactttgctatttttaaatttcttatgctcttataaaacgtgtgttctggactcacgttggcttccatttcttccctctggcttctattagtttaggctatgagcatagatggaagaggtggctgttgtattggatcaaggatatgagcagagatggatgaggcagcggctgtaatggttcaaggctatgaacatcttgtgaagtaggatgttaaatctgcaaatatcagagtgaatccaaacttatcaattcaacactggattgtaaaacagctcaaaaaaagactaaaaacacagctctacactttaggaggttggggcaggcagattgctcgagctcaggagtgggagacaagtttaggaaacatggaaaaaccctgtctctaaaaaaaaaaaa

SEQ ID NO: 8125 - DNA, 673 bp, Homo sapiens
ttaaattgtcttgatatttaaaaaaataacttctacattctcaggaagaaatacatgaagtaaatcatatctccatgtctgtttccagatttctctcatctttttactatcccaatacattcctaattcctataaacgtagtggcttaaatactgaatacctggcagctcttaaagatcccttaggcagatgatgataattttcagtgtttcgtcatgtttaatagaaatcaaactgacttgtgttttaaaatacaagttgtctgctagtaaagttacatgatttaggtgtgttttaggttttctgcaacaattagctgtgaacccctaatgtagctaagtttatacaaattttataatcaaaattatttatttttatttttttagagtatgtcaaaaacatatagtgtttgctttgtgaaatacatttgcttagagttataaaatatactgtgactcagaaattgtaaagtcagtttgcgttgtaaaaatgaatactaccagcatgtcaaaaggaaaaataatttacatttgtaatataaagtaaaattgtatttaatatatttattggaattttaaatttgcactaacttggaaaactttaagggttatactaatttaatgattaatgtggacccaaatacataatttggccaaaaaagtcattagaatgg

SEQ ID NO: 8126 - DNA, 439 bp, Homo sapiens
gtcccagtgaggtttattcaggtaggctctaagggtaatcatagaatttatagatatatttttatgcacaaaaaggaacctctgtgagagagagatgaaaaggacaattttttaaaaatggcttctaatggcaggggatgtactctctaatttaattttcacaatgaccctgactgaagtattagcagtctcattttacagatgaggaaactgagactcagagaagatgattaacttaacatggtaaaggcaaagtcaggattcatgcccacatctgatagaactaaaagcccagtctaccaaggaatagagaataagtataggttttggacctggataattccggattggaatcctggatctagtactaaatagctgtgtacattggtcaaactaatgaacttccctatgttctaatttcctcatcggcaaaaaaaaa

SEQ ID NO: 8127 - DNA, 122 bp, Homo sapiens
ttttccggatgcactatttctgaatgctctcaatcttctgttgttcttattgcattcttggctttggaccattgcactgccttaatacattatttctatgtgatctctggcctttggctact

SEQ ID NO: 8128 - DNA, 465 bp, Homo sapiens
gatctgtttgtgacaattcatagtactttctctgctacacagcaagatgatacatgtgcactgtgcatgaacaagggacagaaggcagcattcccctttaggacagtgatgatgtggtgagggtctcccttcattcatgtcaccagcccccagcacaatgcttggcacattgttggcacatagtaaatattaaatggaactcttttggggagatacgttttttactccacttagaatctgtttaaacatgaataagttatttaaccttctcttggcctctctttataccaaataagcatgcaatatttagttcttcataaattcgctcattcaacataaatttattgagaaaatattgtgtgcctgatgtgattactagggactgtactttttctagttcattgtaggtgaatgaactgaccaagtaccatgtgacaaagctaggaaagacttacttgaaggaaa

SEQ ID NO: 8129 - DNA, 301 bp, Homo sapiens
gaaaattgagcaaacgaaaattaaagcaatcttaacagtgagggctatgaaaccgttgaaaattctcccaagggaagtgatggaaacctccttgcttgagtcatttcaaagtcgacaaaacaacgaaaaatacatggagggagggatcctgtagtgttggggagcagactcgatgatttcatagttcttttctgtctctgatttccatgttctgtgaaatagtattgcagctaagaaacatgaaatccttcactccgacagtatgttcacagaaaattcatctgaagcacaaagttgaaaa

SEQ ID NO: 8130 - DNA, 436 bp, Homo sapiens
gtccccatacagctcccaggtggaaactccagagcaagcgtgtcattcatacacccctgggcccagagatgtggacgtgtccagcacgcctgttctctccaagtgaccaggaggagacaatccctaggagctgacacaggtgacgaaaggcccgaggtggcccgccttttcccccggccccattcccatgtgtccttccccaggcagggatttgaagtgggcagagtcttccatgttctcccaggagaggttttctgggtgcccctctcccccttcctacggttcccctgccccgccaccctgggcacccctggggctgcctgccgcaccctgcagccgccacctggggaagccggcttttatctcctgagccctgctttgtaaacctcctgcagagttggatgtttataataaaggccgtttatagacctaactc

SEQ ID NO: 8131 - DNA, 765 bp, Homo sapiens
gttagccacgtgcctggagggggccagctttgcagcatttcccgttgctgtacaattcctgagtgtctgcatggccactggatttgtatgtgtgcattttctgattttctaattcaagtgatggtttagggaagaaaaccatgtccgtggtctgtcctgtccaagtggtgaagagcatttgaatccacacagcctaagactccaccttcctgagattcacagtcttcacatgtactttctgtggtggctcagataagcacacccttttgaccaatggaccctttttgactgggaacacggttcttgaccaaggagcccagatcctgcctgtcctcgaagctgcaatagcgaaccgcacactgccctctcgtggcggtccggagggtttcattctgaaactggaggattttcttttcaaatctagacgttaatgttctccttcctgtgcaaagatgctacccgggcacagcttcagcgtgtggtgcacacgaggccacctctttcccgaagtgaggatagacttcagctgttcttgctgcaaaatcttccactgtctgagaggtggtgggttgggtcacagagctcttccctgtgagaacagatccttaaaactgacgtcccattttactgggctgcacgagcactcaaggcaaaatttccttagttttcattaagaagtgccataattcctgttggtgttgtttatttcttatgttaaaaaagaaacaaacgagttgggaaattttcaattgtgtgtaatgcagt

SEQ ID NO: 8132 - DNA, 364 bp, Homo sapiens
  misc_feature (334)..(334): n is a, c, g, or t
  misc_feature (358)..(358): n is a, c, g, or t
cctcgcattttgcactgcagtttcagagttgaatacttgtagttgtgatgttgattgtatgacctacaaagcctaaaatatttgtgtatttgatgctttaaactttggtgacccccagtctattgccttcctactcaaaagtatggtctctggaccagcagtcttggcatcacacatggtataactaaatatgcagaatcataggcttctctctgcactcacaaatacaggcacattgatgctcaaagagaatccaaggaatgtattagggaatatatgggccgtacgtggtgggctcacacctgttaacctcagcttcccaaactgctggggntttacagggttgagccaccacgangggccg

SEQ ID NO: 8133 - DNA, 481 bp, Homo sapiens
ctcttttcaaatcaaattcttaggtgataaaatataaaatgacctctttgtccatttgagctgggctggagagaaacttgacattctcttgtctgcacagatcctaagctataccatccaggtggcacggcactggaggagagccttgttgcagctaaaacctcacataccagaagatatttacttttgttttataaaatttgcagttggaataattatggctcaggatatgtaataatttcctacctctcattggctggaaggttacttaggccatgataagccttccacatttcagagaaggaagaaactctaaacactgaaaatatctgatagtcattctgcaagaggtgcattatacaaagcaatgcataatatgtttatatctatgggtaatacacaaggttccttttaatgtatttgagatttttcaagagtgccaggccatcccatttaggacagccaacatcagcattgtcct

SEQ ID NO: 8134 - DNA, 346 bp, Homo sapiens
cagagccggcactggcataggtgcacacagcctgacttcaaacaggcctatccactgggctggctgtgtgactaacaaataaatgttaagtacgcaaatttacacttggccatgacttgctcaaaattggcttaaaatgctgcagggtatgattctgaatcagtaaacaacaatacatttttcacttcagtcagccaaacacagagttcaaataagattttgaaattagaattcagactcattgccatttaggctgtgaattaacagttaaaaattagtctccgttcacattcagcttaggtttgatgagcaaaactgccaaaagaaagcatctgtttttgcggtt

SEQ ID NO: 8135 - DNA, 918 bp, Homo sapiens
aaagaaagtaactttcaaatctaaaattctgtacctggtaagcatattctttaaatatgaaggtggttgaaaaacgtttcaggcaaaataaactgggagagcatatccctgctaaactctcatttaaagtacctcttagtagaagaaaaataataggagatacagaaaggaaaatggagcaataggtatgagtaaatctaaatgaatgttgacttaggaaacaataatatcttgttgatgtggtgtgcgtatatgtatatcacatagcagcaaatgtactaaaagggtatggaatttatgttctaaggtccatgcatagtctaggaagagggtgaaaagtaccaatattagatgatatgtaaaaatctgttcttgtaatgtctagagtagtcactaaaagaataataagtacatataattaccaaggtgtggagagttgtggggatgtggaatagttaatcagtataaacaaaggccaaaaaaatgagaaaaagaaataaagaacagatggaatataatgagaccttggtaagttggtagatctacaaatatactataattatactaagtgtgaacagacaaaatgttccaaattacaagacaggtttcggactggataagaaggaaaatagaaaaatgtgctattttctttttatgagaaatatctaaaaactcaatgtataaaatacttaatgggaaaagacacaccatataaatattaaccaaaggcaagatggtatagtagacaaaatccattatttgaggtaaagagggacactttgtaaggatgaaagtctctcttcatctgaaagatatgagttgtaaatttatacaggttataaacttacaaaaaaatgacagaatttcaaactaatagaaaactccatagtcacagtggaaaatcttaccactttatgc

SEQ ID NO: 8136 - DNA, 233 bp, Homo sapiens
tttttttttttttttttagtagaaatggggtttcaccatgctgaccaggctggtctcaaactcctgacctcaagtgattcactcaccttggcctcccaaagtcctgggattacaggtgtgagccactgcacccggcctgtttattctatttcttaacaatagccacaacagtacaaacctcatcattacttggggaaaagttgacacagtttaaaatttgtcgacttactgac

SEQ ID NO: 8137 - DNA, 707 bp, Homo sapiens
gcctgtaatcccagctactcgggaggctgaggcaggagaattgcttgaacccaggaggcgaaggttacagtgagccaagatcgcgccactgcactgcagcctgggtaatggggagactccatctccaataaaataaaacaaaataagataagataaaataagataaaataaactggagcagcctggctccagagaccacactccagatcacagctctgtaccaccattcaaggatccagccagtcaccaagtagtttgtattcatctgctataataacttctttgcagttcactgtgacttcgttccctcctacctttgttacttcctttgatggcagcaaaggctgcctcactgatttcactaccaccagtcccatcctgttcatcttggaggtcgcagacagcttcatcttcctgaagtacctctttcgtgcttctgcttccctgttctaaaaccttttttaaaaagttttattgagctgtaactcacaaatcctactacactttacccagttaaggtggacaggccagtgagctttcgtgtattcacagagttgtgtgtcagtaccacaatcaattttaggacatgttcatcacggcaaaggaagccctgtacccctcaaggatttaaactaacgaaaaatcaataaataaatgtggatttgtgctcttgtatttttaagtggattaaaaaacttactacctta

SEQ ID NO: 8138 - DNA, 354 bp, Homo sapiens
atatggattaaagatttacctcaacttgtaagaatcttagaagaaaaccaggaaacattctgtacatcagttttgggaagtaatttatgatgaagttacaaaagcaattgcaacaaaaataaaaattgacaagtgggacttaattatactaaagagcttctgcacatagaaactatcaacagagtgaacagttagcccacagaatgggaggaagtatttgcaaactatgcatctgacaaaggtctaatatccagaatctataaggaacttaaacaattgaataagaaaaaaacaaataataccattaaaaagtgggcaaaagacatgaacagacacttctcaaaaaaagacata

SEQ ID NO: 8139 - DNA, 515 bp, Homo sapiens
tttttttaacttggccgggcatgatgacctatgcctctaatcccagtactttggaaggctgaggcagaagaatcgcttaagatgggaagtttgcggctgcagtgagctacgatcacgccactacacttcagcctgggtgatgcagaaaggaccgtgtctctagaaataaaaataattttttaaaaactgagtaagtcaaatgtaaattttccttttcaaaaacaaattattcagtatgcaaaacattctgttaagacatattttctgataaccttagaatacgtggtacttaaaaactatgactaaaatatttgtggaagaattcattatcttaggtgatacattttaacaattaaaatagttccagaacacggtcttccacctgactttgacgattaaaacaatgttgtcaaaagaatgttctctctgaaaattctgggtctcatccaccaccataggtctcatctaccatcaactgaaataagctaatcagttataaacaagggaatatactt

SEQ ID NO: 8140 - DNA, 401 bp, Homo sapiens
aacatatgatttgtatgtgtgtgtgtatatacatatgtattttccaagcactgttcattgaaagggcctagaagcaattacatctcagtagcaatgacgacaccttgattttggtttctaaaaatcacctgatacacctgtaatcccaacactttgggaagctgaggcaggaggatcccttaagcctaggagttcgagaccagcctgggcaacatggcaagacccccatctctactggaaaacattaaaaatgagctggacatggtgtcacgcatctgtggtcccagctacttgggagactgaggtgggagtatccccttgagtctgggaggtcgaggctgcagtgagccatgatcatgctattgcactccagcctgggtgacagagtaaaacctcttctc

SEQ ID NO: 8141 - DNA, 537 bp, Homo sapiens
gtttcctctccacttcttgctatgacaaggcacaggcagtgcatgtctttgtacttgaagcagggagcacatcatgagtatttccaaggactagagtccaaaggtggaattgccaggttgtttagcattctgatcaacaatggctacttgccccaaggtcgtactgactgatgagagtgtttgctttccctcagccatattgatgaggttctctttttaatatttgctaattttgtgagcaaacaaaaatgtctcattttggctaggtatggtggctcacgcctgtaatcccagcactttgggaggccgaggtgggtggatcacctgaggtcaggagttcgagatcagcctgaccaatatggtgaaaccttatctctactaaaaattagccaggtgtggtggtggaggccagtagtcccaactacttgggaggctgagatgggaggatcacttgagcctgggaggtggaggttgcagtgaactgagattgtgccactgcactccagcctgggtgacagagtgagaccctgtctcaaa

SEQ ID NO: 8142 - DNA, 379 bp, Homo sapiens
aagaaagagctcttttaagtcagaagaaagaaatggaagaaaaatgtgaaagtccatgacagggccattaatcctttatgtaacaaatgggccaggtgcagtggctcatgcctgtaatcccaatactttgggaggctgaggcgggaggattgcttaaagccaggagtttgagaccagcctgggcaacaaagtgagagaccctgtctctacaaaaataataattttaaaaaattagctgggcgaggtggcacacacctttagtcacagctacttgggagactgaggcaggaggatctcctgagcccaggagctcgaggctgcagtgagccatgatcacgccactacagcctgggggagagaatgagaccccatttctaaa

SEQ ID NO: 8143 - DNA, 435 bp, Homo sapiens
taggtgagagcgaattgatactagagatgcagaaatgtaaggcttagaagctcaagtgtccaggaccacacagagctcataagtggcagagccaggatttaaactcaggtttgactgatgtcaaagccactccttatggtctttttgatatttttgctctagagatggtgttcatgattagcttgtttacttaccaaccattttctattcagattataaagcagatctcatttggccgagacttggagatttaagtttttgatatgtaatctatgattgaatttaaatgaggtatggttagaaagttccagcccagttagtaatttagcaccttaaagcattcaacaagcatggttaaccaaaaacctaaatcatactaaatgtttgaagtggtgaacaggagggaatatttttatattgttactagtcagcttt

SEQ ID NO: 8144 - DNA, 357 bp, Homo sapiens
gatggatccatagtgtttgagagtaagcaaagtaatgagtaaagtaattggtttggaacacaggattcatttacagaaggaagagaagataaggttgaagaggtacgtaggagacaattgcaggttcccctgcagctgcggagtttggacaacagggagacatttattcaacatatacatgtgtgcctgctacttgagagatgttgcagtgggtactagctagacatctctgaaaaagatatttgagtttgaagagagtgtgaggaagatgaacttcactgggaaatacagaatagattaccgtgaagataagccagtttaagtagtattgaaacagcccaggttgaaaaaaaaaaa

SEQ ID NO: 8145 - DNA, 433 bp, Homo sapiens
attccagaacaaagaatactgcgagaaaaagtaggctcaggctggggaccccaaaatcacgcatttccctttctccctgaagccagctctcactgcacctagtaggtatacaagagtgcattcatgtgcctacacaaatatgcacacacaaaactaaagaaaggatgtcacttgagcacacagcttcctgccccctccaggagtcctaactgctcagcagagaaaaatagcttagaggagcataaagagacccaagaactcttcctcttggctttcccagtaacttctggaattacatttggaaagtcacttcacccccaagacctgaatctcatcatttataaaaggactgaggctgcaatatgtgaaagatcaggattttcaagctatgttctgagcaaccaaaaggttctgagtgctataaaactctgca

SEQ ID NO: 8146 - DNA, 372 bp, Homo sapiens
tggtctgtatatgtgctaagtggtgtgccaggtgccctcagtccctaccttacatgcagcttgttttagtcatttctttcctggcctctatagacctgtctttgcaacctttacctagcccaagaggtgatgaaagtgcctgtcttctttatactataacaatttgagaattaaattgctaaatggatgccctatcaccctctaacattttagtgtttatttcctgtaagtaaggctttctcctacacaaccatattacaaccaacagaatcaggaaatgttgatacattactaattctcagacccattctagtttcactaattgtctcaataatgtcttttatagcaaaaagatctagttcacaattacat

SEQ ID NO: 8147 - DNA, 449 bp, Homo sapiens
aaaaagtaaagtattatagtaggacttttatttatcacaactctcctgagttttcaaaactttgttttttcttataagaaaatgatgacattcatcgtagaaaattaggaattatagggaaaagaaaagaaaataatatcactcaaagataaccactgttgggtcaggtgtggtggggcatgcctataatcccagcactttgggaggccgagacaggtgggtcgcttgagcctgggagttcaagaccagcctaagcagcatggcaaaaacctgtctctacaaaaaaatacaaaaattagccaggcatggtgatgtgcgtatgtggccccagctacttgggagctgagatgggaggatccacttgagcctgggaggctgaggctgtggtgagctgacattgtgccactgcactccagcctggagcctgggacaaagtgagaccctgtctc

SEQ ID NO: 8148 - DNA, 313 bp, Homo sapiens
caaaaagaaaaaaaatgaagaggaaatttgctgtgaaacttgcttagagatgataacctttctactttgactattgttggcaatcttgccattatttttattgacacagttgttaggtactcatcttcctctccaaccaggggcttggtctatttgtgtttgaaattgattgctgggactgtcacaaagtaatttatatagcaacttattataattagttatcatttgcagtttcctaaatgtgagttgcattttatgcttagcaattgatttttctgtatatctccatgaagcagctcaatgtatgccatcc

SEQ ID NO: 8149 - DNA, 331 bp, Homo sapiens
tatctttccaagttattttactaaattgcttcatacaattgcttttgtcagtcaagtaaaatagtcatttcgattgcattgtatgagcaacatagaaaacaactactgcaaaatataatgggaaattaaactctcacaggttgtaaactgtctccctttgaatccttgtctgaagaaattaatttgaactatgccttctaaataggtacaggtgagtcatctagatttcattaaacatttttattttaaggtttttgttacttggttcttttaaaaagttaaactttgtttgaatttatctttcaagtatttccttttcagcttgttcacc

SEQ ID NO: 8150 - DNA, 514 bp, Homo sapiens
gccttttgcctcctgtcgtgattctgaggcctccccagaccatgtggaactttctatcagatttcgcttcaaaaattttggacctttgttactaggtacataaacatctgaggtgtttattggagctctttgcctagaactgataattggattcatggtattctggagaacaaggaagaaaactgaagcccagaaagcttaatatattacccaaagagttagtccacattgaactgggagttaatccttgtctgtctggctggaaagcttttgctctgtatcttggatgaataaactaaaccttagggaatcttcctagaagaaaccatataacgactcctgtacgagaagttaaattacaacacaaagattgcttggtgagcatgtgatcaaaacagggcaagatgaagacctttagaggccacaagcattttagtgtgcctcccaacttcccttatattattcaaaatataaacaataaaatctacaaagatgtgaaagaagtccaaaaaaa

SEQ ID NO: 8151 - DNA, 550 bp, Homo sapiens
gccttttgcctcctgtcgtgattctgaggcctccccagaccatgtggaactttctatcagatttcgcttcaaaaattttggacctttgttactaggtacataaacatctgaggtgtttattggagctctttgcctagaactgataattggattcatggtattctggagaacaaggaaacaggctgaggaagaataagagacttgcttgaggaagaaaactgaagcccagaaagcttaatatattacccaaagagttagtccacattgaactgggagttaatccttgtctgtctggctggaaagcttttgctctgtatcttggatgaataaactaaaccttagggaatcttcctagaagaaaccatataacgactcctgtacgagaagttaaattacaacacaaagattgcttggtgagcatgtgatcaaaacagggcaagatgaagacctttagaggccacaagcattttagtgtgcctcccaacttcccttatattattcaaaatataaacaataaaatctacaaagatgtgaaagaagtccaaaaaaa

SEQ ID NO: 8152 - DNA, 237 bp, Homo sapiens
tgggattacaggcgtgagccaccgtgcccggcccatcgtatctatttcaaagtgtgaatcaggagagagggtggtatctgctgcgtctgctccttacttacgtaaagaaaggaggttattccaccaagatcatgccattgcattgcagcctgggcaacagagcgagactctgtctcaaaaaaactaaactaaactaaaataataaaaatttaaaaattagaaaagaggctattccag

SEQ ID NO: 8153 - DNA, 446 bp, Homo sapiens
gtggacagacatttggattgttttcagtttgaagctttaatgaataatgctgcagtgaatatttctatacatgtctttgtgtgggcatgtttttattctcctagatggattctaggagtggaattttggggttaaaagttgatgtttagctttttaaagagactgtcaaactcctttccaaagtggatgcccagttgtacattctcaccagcaatgaacaagggttccatttcctccacatccttaccaacacttaatattgtctatctttttattttagccattctagtggctgtttagaagtatcttgttgtggttttaatttgtaccttcctaatgattaacaatgttggatatcttttcatgtatttattagccatctgtatctcttctttggtgaaatgtctgtcaaaatatgttgtccatatttaaataaggttgcttgt

SEQ ID NO: 8154 - DNA, 542 bp, Homo sapiens
gtaccctgtgtctcattcttcctgccaaagactgcaataataaacatgatgaaaaaccattcatattaacactgaaccaaaaaaccctccaagtatggataagggccagtctacccattcatcacctccttagttgccagtcaatttccagtcaagtagcagtgggaatgaattatctaaaagctctctgctagcatacacgtgaaataaaatttagcctcagtctactttcttaaatagaaacttttgctctacctttgagggctgggcgtggtggctcacgactgtaatcccagcactttgggaggccgatgtgagtgcatcatctgaggtcaggagttggagaccagcctggccaacatgacgaaaccccgtctctaccaaaaatacaaaaattagctgggcatggtgatgcacacctgtaattcctgctactcgggaggttgagacagaagaatcgcttgaactcagaaggcagaggttgcagtgagctgagatcatgccactgtactccaacctagacaacagagtgagaatgtcta

SEQ ID NO: 8155 - DNA, 254 bp, Homo sapiens
taattagtggcattttagctttgctaaccattcttttaattctgcttctaagttgttatcttttgtattcatagtttcacagtcccttataaactctcacttagattattgtaactacattctgtttccacttcttattccttgtgtcatgccttgatattttaaccttcagtctttgttggagttaccttcactcacagtttgaattttcccacaaagttagaatgcttcttttctttagcatagtattgaaa

SEQ ID NO: 8156 - DNA, 262 bp, Homo sapiens
ttttttctctctagtgtctctctcatttcaaaaaggcaaagaatcctgaacctcctcctggccacaagtaacctatataacatcaaacctaagcctcctttattctgtttacaaaaactttgcagaataaagattgaatctgtacctccttcctgccttgagaaagtaatccatcaaatagcactctagtttgcaaaaggatttttggatctcaaactccatagaggtttattttattatgtatagattaggatgtggaagg

SEQ ID NO: 8157 - DNA, 324 bp, Homo sapiens
cagtaattcgagacaattatttttctcctgacacaacatcaggtcccatgaaaaatgacacttgctggcctggcgcggtggctcacgcctgtaatcccagcactttgggaggccgaggcgggtggatcacaaggtcaggagatcgagactatcctggctaacatggtgaaaccccgtctctactaaaaatacaaaaaaattagccaggcgtggtggtgggcgcctgtagtccgggaggctgaggcaggaaaatggtgtgaacccaggaggcggagcttgcagtgagccgagatcgtgccactgcactccagcctgggcgacaga

SEQ ID NO: 8158 - DNA, 402 bp, Homo sapiens
aaaaaaaaaaaaaaaaaaaagtatttcaacctttgtgtaagagcacactcaagagtgtgttgtttagtttctatatatttgtaaatttttcagtttttttttttgcttttatcgttgtatactctcattccattttggtcatagaatgtagttcatagaaatttacttttaaaaaatttgataagacttcctttttgtcctaagatgtggtctttcaagggaaatgttgtatgagctattgagaagggtgtgtattctgatgttgttgaggagtgttctccataactctgtttggaataattgttttatactgcctttaagtagtctgttctcttattaacattctttcttgttttatttttattacaaaaagtgtggtattaaaatatattgttctaatta

SEQ ID NO: 8159 - DNA, 250 bp, Homo sapiens
gattaaaggtcagtttgattgaggttttgagctttagctccttgccaaagggaaatgtaattcatgacatgctgggcatctcaattaagcaattacctgtggttgatcctgatgaagtgccaactgaagcctgtgccttggggccccaagtggctgctacacttgactgctatggttataaagatgactagaaagactggtgtgggatggattcttttgcgtgcttttgagtggttataaagagaaatga

SEQ ID NO: 8160 - DNA, 595 bp, Homo sapiens
agcttcaaaatatttttgcaacctaccacagaaagccaggtagttttaaagaccactaagaataaaaatagatctggaagtttggcgcaaggctgagttgagtctttaggtaccaaaatgatctaagtcattggtactgtagcatgggatctagcagataacagggtttgtgaaaagctgtgtaatatgacggaatgtgtttgggctttggaatcaagctggattcaaatgttcgaactgccactttctaagggaccctggccagttaatttaagttccctcatcacagcgttctcatctacttcacagggtttagttagagtgtgtaaagtaggccaggtgtggtcgcccatgcctgtaatcccaacactttgggaggctgaggtgggtggatcacttgaggttaggagttcgaaaccagcctggtcaacgtggtgaaaccctgttaaccaggcatagtggtgtgcgcctgtaatcccagctactcaggaatcttaagacacgagaatcgcttgaacttgggtagtggaggttgcagtgagctgagatcgtgccactacactccagtctaggagacaaagcaaggctccatctc

SEQ ID NO: 8161 - DNA, 227 bp, Homo sapiens
agagtgacaaaagatgcctggcaaacatagaagcttgccctttgaaatgtttgatgttttcctggaaaagtcacagtcaggtgcatttaaaaaggaaaaagcacagaacatcaaagctggaaaggggcttaatctaatccatctactgaatttgactggttgagaaaactgaggcccagagaggggaagggatttgtccaaggtcacacagcagtaagtggctgctg

SEQ ID NO: 8162 - DNA, 718 bp, Homo sapiens
ttcgttcttgtcatccaggctagagtgcaatggtgtgatcttggctcactgcaacctccgcctcctgggtccaagtgattctcctgcctcagcctcccaagtagctgggattataggcgcacgccaccatacccagttaatttttgtatttttagtagagatggggtttcaccatgttggccaggctggtcaggacaacctgttcgctttatagagagggacaaacctggatggcaaagccccttatcaggagtccccatgagtcagtgacagtgaagaccagcccctttcctgcctctgccctgtgtcccatacccttgctgtattatgtggctttcagtgtgattgttttaatcattaggagtgctattttgtttagaagcaacagtggccttcaaataacttaaagtcgcaaaataattatgaaagtatcaactgatgtatctagcttgtggccagttaacaaccactttgtgtgcaccattcataagcataaagttctgtctgaaggaagaaaatagcatctttattattagtcagccataactcattcactgtgtaatgcctcagttattatagggtgagtgccttgcaaagctgtttgataaaagataaatcttaagccaggcatagtggctcacacctataatcccaatgctttgggggctgaaacgggaggatcacttgagggctggagtttgagaccagcgtgggcaac

SEQ ID NO: 8163 - DNA, 389 bp, Homo sapiens
gcaatagtgaaatatcaagtgagtgacgcttgatcaacagcctactgcttaagaaattaagctctgatgtaacagcaactaacttcatataacatttttaccactgaaaaattgtatgatctggaacaaattacttcatcactcttaatttcacttgatccacagtatgggcatagcaatagctcttgattgttgtatttaattctattgagtaaacattatatggtaaataaggaccattattggttttggtagagtttgggtgaggtgattaatggagtgaatcactctgtcatcttgcccttcatatctttttcctggtttcatcacacacataaattgtcaagagtgggtcataaaatgtagctttgtaaatctcttaacttgga

SEQ ID NO: 8164 - DNA, 1299 bp, Homo sapiens
aaaaagtcattagaatgggtaatggttttgtgtggttttccttcaaaatgataatattgaagcaagaaccagcattttatattgataatttttttaatatttctacccagttgaggacagtggaatataagtagatatatttaaaatatctagatatttaaaaagaaagaaaaggttgtttatcccaatctgaattcattctcagcaacaagacagaaaaggtggtttgggttttgcttttaaacagtgtccccctgtctttttcaatttttcccttgaagcctttctcttgttcttcagagtacgcgctgcaggctatctgcagcatcagaatgcctgggcaggctgttgaaagtatggattcctgagcccaacccttaacttaatgattccctgtctctggagatgcaacatagaaatctctgtttttattaacaagcgcctcaggcgattcttaagcatactgaaatttgaaagcttctggtctgaacctcatgtattcacctagggcttttgctaggtgggataccatgccgaaaaattgaattaattgtatgttcttaaaattgtttttcttctactccactgtcctcttccctcaaaatcacttttctaaaagaactctatgaaaaacttatttgtatcatacccaaattgatatatttgtctgaactctgttacataaaaattggtatgattcatacgtggaatcagtttttggactgtgacccatgcagtgttgggggacaaggagttgcttcaggagttagtgcagtgcgcctccaaggggcagtgagccatggaaggcgcctgccttctcactgcagtcaatgcagccacacttgtgtatactgagtgctgcttcagatctcagtagataaaataattcccacatttaaaatgattctgctattttttataaagggtttgaaagccactactataatgactttgtcacctaattgattttctactaatttttacatattcagaaacttcgtgtttttttggtggacagaatattttggaggtctccgtcgctgtttagaatgtggccacttggctgtttcacagtttttaaagctattttattgaatagtaaagcagtgaacttagcctttgttctttgtgtttctaatttaagcatatagtctatttaatttttgatatgtaaatacacatcaatacatatatatttacccatgtggccctgtgtagtcagtgcatgaggcttgcatagcccagaaaggtacattccagggttctggggaaagaattttaaaatgccatcctctaata

SEQ ID NO: 8165 - DNA, 288 bp, Homo sapiens
cactccatttctctgtgaattgtctccttttccatggttcactctgcagtcactcggcctccctcaccctcagccctcctgagcctcccgcagcacctggcctgcccaactcccaccgaagcgccagcctctgggtgtctgcactccttgctttgggctcccaagggtggtgggagaaaattatacaactttgtggacttgacttcctacaggttcatggtcttcagcctttggtgggccctcagggggaccagcaagtcttctagatgtcccctccttatctggccg

SEQ ID NO: 8166 - DNA, 436 bp, Homo sapiens
gagaaaggtgctcctttcctcttttagttttctctcacccttccttcttttcacatctatttcttactgtttcctgcacagtgcttgtcttttctctgacattgtatgagcaatttctttgatacaatggtagtctccaattatgctactgggcaagccagcctagaggttgtggaacagaaaggctctcagaccaacttaagtcactcatatcgcaagttttattgaatcagctgaaaatatccagtactttcaaggggaaagatgtgagaaaggttcacccacttagcttaaggtgcaagcaggtggcaggaccacacgacccgatcctcagtgactcagtgttcatgtgaccggtgttctcttctacattgaccttccaagctcatggggtagttactttggaacaaggaggctctgcagagaaaactgcctg

SEQ ID NO: 8167 - DNA, 564 bp, Homo sapiens
ctgcctcagcctcccaaagttttgggattgtaaaggatttgtgaggtactgagcctggcctctgattgaattttaactgatttttattcttttttttcttacctctgttattcaagttggaaacaattgaatgtgatttcctgttaactacaaaaatatttatagtcatttttagagcatagatgttaagtagttaatttattttctgtaaagatttgtaagtcttttgaagtcattatcatttgaggaaaattattttacaaacttcgcatttctctttggataaaacaccactttaaaattgcacaaataagggccaggtgtagtggctcttgcctgtaatcctggcacttcaggacgcctagtggggaggatcgcctgagcccaggagttctagatcagcctgggtaacgttagctgagcatggtggcgtgtgcctctggtcctggctacttgggaggctgaggtgggaagattgcttgagcccaggaggtcaaaactgcagtgagccataattgccccactgcactccagtctgggcgacatagggaaatcttgtctcaa

SEQ ID NO: 8168 - DNA, 4119 bp, Homo sapiens
  misc_feature (31)..(31): n is a, c, g, or t
  misc_feature (178)..(178): n is a, c, g, or t
  misc_feature (793)..(793): n is a, c, g, or t
  misc_feature (890)..(890): n is a, c, g, or t
  misc_feature (1106)..(1106): n is a, c, g, or t
  misc_feature (1206)..(1206): n is a, c, g, or t
  misc_feature (3655)..(3655): n is a, c, g, or t
  misc_feature (3767)..(3767): n is a, c, g, or t
  misc_feature (3820)..(3820): n is a, c, g, or t
  misc_feature (3910)..(3911): n is a, c, g, or t
cttctacatcgcgaatatccctcgccggccnggcgcccggcgccatctgctggacccgttccggctggggcgcacagacctgggcgcggggtcgggcgattgggttctccctgccttttcaatgtcctgcggggcggtggctcactgtctctcgccccagcccttccagctgggtccngacaccaggccccccgcacccttcggctcgccagatgtggctactttcctttagtcccggagccttcaagccctgggtccctgaggggtagacctgggcggggtggggccgcgaagcagggatccagggcgcctgcgcggaggaggcgggctccgaggggccgcacaccggccactcgcccctccctgcccggggttgccatggggacgcgtgcagacgccggcccgagagggctgcgaggggcaacttcttagagtggcccatcggtcggtctagggaggggagggtcagcgtggcaaggtgtgtgtcgggggcagagggaaggagggaaggagtgctggggagaaggggcagtagtgtcggggtaggaagggacagttgttggggagaagaggcagttgtggagggagagggagcaaggaatatttgtgtgggggagggggaggagaaggggcagttgtgacagctgggggggaagagccattctgaggggaaatttgcctgctggtaaccagtttaaggataccagctgctggtataaatactgctggataaatactgctggatttatactgcaggataaatactgctggcccctgcggtatttcctagtantagagtgagccccgacttagcagagcagttcctcctggggcctgcggtgtgggatcgcgtggtgaaccccacggtgcatgcgcctcaggctctagtntgaggcaggaaagcgcagcttgatgcttctctggagactgatggaggaagcctccttgctgtagttggttttattgatttgctggcctaacagaacgtttttccttggagcaaagtacaaatccttcaagtttgaaattcataacctgagatcaatgcctgtggcagcctgtggggatgaggaaggagagccacaggtgccgttaggctgcagccnaatgaaaagagagtgcccagcgcctcagactttgcgcctgggattctgagcacctgtccgagatccccgcttcctgccatcctacctttctgagagaggnaccactgtgaccttcctcgtgccccaattgctttttcctcatgacacaatttgaaatttatgattggatgacttttgtccttctttcttccaatctgttctcagggcattttgagtcaaataaatgatcctgactgatcttaaccattagcacagagttcctcagccaactctgctaagagacctcagtacacacaaaacagtgttcctgcccctcaggacttcaaagcgatagacccaggttttgcctgcacgatgtccagcaaagctgagaagaagcagcgattgagtggccgaggaagctcccaggcaagctggtcagggcgggccactcgggctgctgtggccacacaggagcaggggaatgccccggctgtcagtgagccagagctgcaggctgagctccccaaggaggagcctgagccacggttggagggacctcaagcacagagtgaagaatcagtggagcccgaggcagatgtgaagcccctcttcctttcccgagctgcgctgacaggactggcggatgcagtgtggacacaggagcatgatgccattctggaacactttgcccaggaccctacagaatccatcctcaccatcttcattgacccttgttttgggctgaagctagagctgggcatgcctgtacagacccagaaccagcttgtctacttcattcgccaagcaccagttcccatcacctgggagaacttcgaggcaactgtgcagtttgggacggtgcggggcccctatatcccggccctgcttcggctgctcggtggagtctttgcccctcagatctttgcaaacacaggctggcctgagagcattagaaatcattttgcttctcatctgcacaagttcttggcctgcctgacagacactcggtacaaactggaggggcacacggtcctctacatccctgcagaggccatgaacatgaagcctgagatggtgataaaggacaaagagctggtgcaacggctagagacctccatgatccactggacccggcagataaaggagatgctcagtgcccaggagactgtggagacaggagaaaatttaggtcctctggaggagattgagttctggcgcaaccgatgcatggacctgtctggcatcagtaagcagctggtgaagaagggagtgaagcacgttgaatccatcctgcaccttgccaagtcgtcctacttggcgccctttatgaaactggcacagcagatccaggatggctctcgtcaagcacagtcaaacctgacctttttgtcaatcctgaaggaaccttaccaggagttggctttcatgaagcccaaggacatctctagcaagctccctaagctgatcagtctcatccgcatcatctgggtcaactctccccactacaacactcgggagagactgacctcgctcttccgaaaggtatgtgactgtcagtatcacttcgcccgctgggaagatggcaagcagggtccccttccttgcttctttggtgcccaggggccacagataacacggaacttgctggagattgaggacatctttcataaaaatctgcacacgctgcgagccgttcgcgggggtatcctggatgtcaagaacacctgttggcatgaagactacaataagttccgtgccggaatcaaggacctggaggtgatgacccagaacctgatcacctcagccttcgagttggtgcgggacgtgccgcacggcgtgcttctgctggacaccttccacaggcttgcctcccgcgaggctatcaagcggacttatgacaagaaggcggtggatctctacatgctgttcaatagcgagctggccctggtgaaccgtgaacggaacaagaaatggccagacctggagccctacgtggcccagtattccggaaaggcgcgctgggtgcacatcctccggcgtcgcatcgacagagtcatgacctgccttgctggtgctcatttcctgccccgtattgggactggaaaggagagtgtgcacacctatcagcagatggtccaggccattgatgagctggttcgaaaaaccttccaagagtggacatcaagtctggacaaggattgcattcggcggttggataccccattgctgcgaatcagccaggagaaggcgggcatgctggatgtcaactttgacaagtacaggagccacctggccccttttccctatactccccttctgcagctctcccaagaatttcactcccatcttttgactcctctcttcattattctctctctttctcatacaatatgtttgctatcgtcattttacttttttttttcttcttttatttttgtctctccccacctcccaccctgctatcaacattttaattttacaacttatcttaaaacacaacaaaacaaaacaatgatcggccaggcacggtggctcacacctgtaatcccagcactttgggaggctgnggtgggcgcatcgcttgagcccaggagtttgagaacagcctgggcaacatggcaaaacccagtctctgcaaaaaatacaaagattagctgggcgtggtggcacaagcctgtngtctcagctacttgggagggtgaggtgggaggatcgcctgagcccgggaggcngaggctgcagtgagctgagatcacaccactacactccagcctgggcgacagagtgaccctgcctcaaaaacaaaaatcaaaaaccactcnnctatctgactaaaccagtgatgtcgctgttctgccactagatggccataatggctcagctaagtcacccaaaccctgtccctttcctgactgttggtggggctgtcagaccatgccttcttctacagcttcattgttatgaaactgtcatataattatttaaaatgtaattaatcaattaactaatttattaaaaatatatagtgagc

SEQ ID NO: 8169 - DNA, 3151 bp, Homo sapiens
  misc_feature (31)..(31): n is a, c, g, or t
  misc_feature (178)..(178): n is a, c, g, or t
  misc_feature (2687)..(2687): n is a, c, g, or t
  misc_feature (2799)..(2799): n is a, c, g, or t
  misc_feature (2852)..(2852): n is a, c, g, or t
  misc_feature (2942)..(2943): n is a, c, g, or t
cttctacatcgcgaatatccctcgccggccnggcgcccggcgccatctgctggacccgttccggctggggcgcacagacctgggcgcggggtcgggcgattgggttctccctgccttttcaatgtcctgcggggcggtggctcactgtctctcgccccagcccttccagctgggtccngacaccaggccccccgcacccttcggctcgccagatgtggctactttcctttagtcccggagccttcaagccctgggtccctgaggggtagacctgggcggggtggggccgcgaagcagggatccagggcgcctgcgcggaggaggcgggctccgaggggccgcacaccggccactcgcccctccctgcccggggttgccatggggacgcgtgcagacgccggcccgagagggctgcgaggggcaacttcttagagtggcccatcggtcggtctagggaggggagggtcagcgtggcaaggttttgcctgcacgatgtccagcaaagctgagaagaagcagcgattgagtggccgaggaagctcccaggcaagctggtcagggcgggccactcgggctgctgtggccacacaggagcaggggaatgccccggctgtcagtgagccagagctgcaggctgagctccccaaggaggagcctgagccacggttggagggacctcaagcacagagtgaagaatcagtggagcccgaggcagatgtgaagcccctcttcctttcccgagctgcgctgacaggactggcggatgcagtgtggacacaggagcatgatgccattctggaacactttgcccaggaccctacagaatccatcctcaccatcttcattgacccttgttttgggctgaagctagagctgggcatgcctgtacagacccagaaccagcttgtctacttcattcgccaagcaccagttcccatcacctgggagaacttcgaggcaactgtgcagtttgggacggtgcggggcccctatatcccggccctgcttcggctgctcggtggagtctttgcccctcagatctttgcaaacacaggctggcctgagagcattagaaatcattttgcttctcatctgcacaagttcttggcctgcctgacagacactcggtacaaactggaggggcacacggtcctctacatccctgcagaggccatgaacatgaagcctgagatggtgataaaggacaaagagctggtgcaacggctagagacctccatgatccactggacccggcagataaaggagatgctcagtgcccaggagactgtggagacaggagaaaatttaggtcctctggaggagattgagttctggcgcaaccgatgcatggacctgtctggcatcagtaagcagctggtgaagaagggagtgaagcacgttgaatccatcctgcaccttgccaagtcgtcctacttggcgccctttatgaaactggcacagcagatccaggatggctctcgtcaagcacagtcaaacctgacctttttgtcaatcctgaaggaaccttaccaggagttggctttcatgaagcccaaggacatctctagcaagctccctaagctgatcagtctcatccgcatcatctgggtcaactctccccactacaacactcgggagagactgacctcgctcttccgaaaggtatgtgactgtcagtatcacttcgcccgctgggaagatggcaagcagggtccccttccttgcttctttggtgcccaggggccacagataacacggaacttgctggagattgaggacatctttcataaaaatctgcacacgctgcgagccgttcgcgggggtatcctggatgtcaagaacacctgttggcatgaagactacaataagttccgtgccggaatcaaggacctggaggtgatgacccagaacctgatcacctcagccttcgagttggtgcgggacgtgccgcacggcgtgcttctgctggacaccttccacaggcttgcctcccgcgaggctatcaagcggacttatgacaagaaggcggtggatctctacatgctgttcaatagcgagctggccctggtgaaccgtgaacggaacaagaaatggccagacctggagccctacgtggcccagtattccggaaaggcgcgctgggtgcacatcctccggcgtcgcatcgacagagtcatgacctgccttgctggtgctcatttcctgccccgtattgggactggaaaggagagtgtgcacacctatcagcagatggtccaggccattgatgagctggttcgaaaaaccttccaagagtggacatcaagtctggacaaggattgcattcggcggttggataccccattgctgcgaatcagccaggagaaggcgggcatgctggatgtcaactttgacaagtacaggagccacctggccccttttccctatactccccttctgcagctctcccaagaatttcactcccatcttttgactcctctcttcattattctctctctttctcatacaatatgtttgctatcgtcattttacttttttttttcttcttttatttttgtctctccccacctcccaccctgctatcaacattttaattttacaacttatcttaaaacacaacaaaacaaaacaatgatcggccaggcacggtggctcacacctgtaatcccagcactttgggaggctgnggtgggcgcatcgcttgagcccaggagtttgagaacagcctgggcaacatggcaaaacccagtctctgcaaaaaatacaaagattagctgggcgtggtggcacaagcctgtngtctcagctacttgggagggtgaggtgggaggatcgcctgagcccgggaggcngaggctgcagtgagctgagatcacaccactacactccagcctgggcgacagagtgaccctgcctcaaaaacaaaaatcaaaaaccactcnnctatctgactaaaccagtgatgtcgctgttctgccactagatggccataatggctcagctaagtcacccaaaccctgtccctttcctgactgttggtggggctgtcagaccatgccttcttctacagcttcattgttatgaaactgtcatataattatttaaaatgtaattaatcaattaactaatttattaaaaatatatagtgagc

SEQ ID NO: 8170 - DNA, 1611 bp, Homo sapiens
  misc_feature (1147)..(1147): n is a, c, g, or t
  misc_feature (1259)..(1259): n is a, c, g, or t
  misc_feature (1312)..(1312): n is a, c, g, or t
  misc_feature (1402)..(1403): n is a, c, g, or t
ttttttttttcacttgccatcactcacagtgatgtttttagacatttgaagctaaaccaaatagcttaggactttggagtttggaaggaaagcaggaaccctcatgctgtcttcttttttaggtatgtgactgtcagtatcacttcgcccgctgggaagatggcaagcagggtccccttccttgcttctttggtgcccaggggccacagataacacggaacttgctggagattgaggacatctttcataaaaatctgcacacgctgcgagccgttcgcgggggtatcctggatgtcaagaacacctgttggcatgaagactacaataagttccgtgccggaatcaaggacctggaggtgatgacccagaacctgatcacctcagccttcgagttggtgcgggacgtgccgcacggcgtgcttctgctggacaccttccacaggcttgcctcccgcgaggctatcaagcggacttatgacaagaaggcggtggatctctacatgctgttcaatagcgagctggccctggtgaaccgtgaacggaacaagaaatggccagacctggagccctacgtggcccagtattccggaaaggcgcgctgggtgcacatcctccggcgtcgcatcgacagagtcatgacctgccttgctggtgctcatttcctgccccgtattgggactggaaaggagagtgtgcacacctatcagcagatggtccaggccattgatgagctggttcgaaaaaccttccaagagtggacatcaagtctggacaaggattgcattcggcggttggataccccattgctgcgaatcagccaggagaaggcgggcatgctggatgtcaactttgacaagtacaggagccacctggccccttttccctatactccccttctgcagctctcccaagaatttcactcccatcttttgactcctctcttcattattctctctctttctcatacaatatgtttgctatcgtcattttacttttttttttcttcttttatttttgtctctccccacctcccaccctgctatcaacattttaattttacaacttatcttaaaacacaacaaaacaaaacaatgatcggccaggcacggtggctcacacctgtaatcccagcactttgggaggctgnggtgggcgcatcgcttgagcccaggagtttgagaacagcctgggcaacatggcaaaacccagtctctgcaaaaaatacaaagattagctgggcgtggtggcacaagcctgtngtctcagctacttgggagggtgaggtgggaggatcgcctgagcccgggaggcngaggctgcagtgagctgagatcacaccactacactccagcctgggcgacagagtgaccctgcctcaaaaacaaaaatcaaaaaccactcnnctatctgactaaaccagtgatgtcgctgttctgccactagatggccataatggctcagctaagtcacccaaaccctgtccctttcctgactgttggtggggctgtcagaccatgccttcttctacagcttcattgttatgaaactgtcatataattatttaaaatgtaattaatcaattaactaatttattaaaaatatatagtgagc

SEQ ID NO: 8171 - DNA, 822 bp, Homo sapiens
tagaggcagcattaaattaaaatttaattaaaatattaaaaataaagtaaaaaattcaaatatacaacagtagactgtctggcttgcatacaaagaaggccattgcccctttgggtgagccgggcaaggtcagggtctaagaagcgcctctggtgagaagcggttgtcaggctctgatggctgcgggaggagtgactcctcccaggatgagggtctgtgtcctctcagtgctcactcaagttccgtatttccaagtccttccagggggcgtaacgcacgtgagaactgccatttctgtcacagatacgtggccgcatgcatttccaggaaatgtccttggttcgcgaactacagctggcacaatccagcccagggcgttctgtgagctgtagtctccagcaagtgaattccaaaaaaacctcaaagacctcaaagaccatacagggtggacagcgtagtagcagggtttgggaagagaggagctcttttgctagcaaaggcgagagctcgcctggtacaaggtctgcccacgtcccgggagataaacattagtgtgagcgcacgctagacccagaagagtttgccacggccgcacggttttctgggaagtgtagtttcttggtcccggcgccattgtccttaaaagtagagggtggcccttggttccgaggtgtatctttcacctcatcagtatgactatatgccccaggacacttcccgcatggtcctaactgccgggctctgggacgacagccccaggcggtttagttttttaggaaaccgagatctgtttgcccgcggcgccccaggtccgcgcggccg

SEQ ID NO: 8172 - DNA, 458 bp, Homo sapiens
gtagggagaaagatgaagagctcatcccctactgcacaaccagaagtggcaggtatcacttgtactcacttcccatgttcagaacttaagtcacatgaccacatctagcttcaaaagagtctggaagtatagtcttttactaagtgacccttgcacctacctaaaacctagttctacttataaaggaagaaggggatatatagtagtcactatcataattaaattgcataaacaagtaatgaaatcggtataaatttatgttggtagacatttaattgaaagtttattgcttttgactttatagttttctgtattttagttgtgtttaaaaaaaaaagtgggagggttgttcttaaacattttttttttaggcccttgaaaagtctgtcagctccaagtgctgtgtctaatggatacaaaatctctgtggatcatgaggccactaaccagagaaggaa

SEQ ID NO: 8173 - DNA, 374 bp, Homo sapiens
tcttcagaaacatatgaatgcctgttgtgtgccccaggctcagtgctgtgtgatagaaaatattcaccagtctttaaggaacttctaatctttcagggaaagagataaataattagaggttagtataataacaactatgatggagaaaagagcaaagtactgaactagcacagaaaagggggccatgggccgggcacagtggctttcacctgttatctcagcagattgggagacttaggcaggaggattgcttgagcccaggaattttaggctgccgttagctatgataatgccactgcacttcagcctgggtgacagagtgagaccttgtctctaaccaccatcctgtgcctcccacccccgccaaaaaaaaa

SEQ ID NO: 8174 - DNA, 419 bp, Homo sapiens
acaatgattgagagaaagacaaactcctttcctaaaaagacacgttaagcagagggcattaggaaaacagatctttaaaaatatttcatagttatgtggttttgttgtaaagacaagtatgtatttataaaaactcatagctgtggccaggcgcggtggctcatgcctgcaatcccagcactttgggaggccaaggcaggtggatcacgaggtcaggagatcgagaccatcctgactaacatgtgaaaccctgtctccactaaaaacacaaaaaaatttagctgggcgtggtggcgggtgcctgtagtcccagctactctggaggctgaggcaggagaatggcctgaacccggcaggtggagcttgcagtggccgagatcgtgccattgcattctggcctgggcgacacagtgagactc

SEQ ID NO: 8175 - DNA, 512 bp, Homo sapiens
caacatcaaaagctgtaactctgcccttttctcttcgtatccatgtcagacgcagggtaactgggagagctttcaatatcaacagcagctcatcttactgataaacaggcgcagacagaagcagatggtttctaggcacagaaagcagtgggtgaaagtggtacactcccgtttctatcttcagagagtgtaaaatattttatcctgaatgacatgctcctaagttaaaataatatttatttgggtaggcctgctatacaggaaatgttaagataccgaaaacggtacactggaaacaatatgaatcgtgcaacaaaagcgagtgaactctgaagatgagggaagtgagtcgcaccacagacagcagtgggggatagcaactctaacaaagtctccgctcctgcgaagagctcattcaagcacctcccttttaaagggtattcctaataccctttggaagtttcttcttcccttcactcacaatttcccttctctgaggttccaaggatgtg

SEQ ID NO: 8176 - DNA, 353 bp, Homo sapiens
tcgctgtcctctttttacaaataaggaaaatcaggctgagggaggggaaggctgactccttctgactcccatctctcagctcctaccaagatcctagggccttgtgccctccactgctaagcgagatttcctaacttcagcacacaccccagcctggcacgtgggccctggggaggagaatgattgctccatctgcagagacagccctgcggggtggagccgcatgaagttacttgaggtgaacaaggggagtgctcaggcatgaggactttggacttgggaatggatgaagcgggagtggggaggacttgtgctgaggcgcttaatggagagggtcccctgggaatcgcccc

SEQ ID NO: 8177 - DNA, 317 bp, Homo sapiens
acatccccccatatactttattgacttagagacaagatcaccctctgttgctcagccggagtgcagtgtcacaatcacagctcactgcagcctcaacctcctgggttccagtgatccgcccacctcagcctcttgagtagctgggactacaggtgcataccaccacacctggctaattttaaaaaaatttttatttttagtaaagacaagttctcactatactgcccaggttggcctcccaaagtattgggattacaagggtgagccacggtacctggccccatgtactttaagtcatcactaataaaatgtataga

SEQ ID NO: 8178 - DNA, 386 bp, Homo sapiens
aaagatagatgaaggtcagtctttgtctctgctccctcaatctgctggaatctgcctccgcccaagaggtcattaccataagcaatttggtgaatatctgcacatatacatgaatgtgcacatgttttattctttacacaaatgaaaacatatgctatagactgttctgtagcttctttttcatataacaaaacgtcaataagtttccagttcagcttatgttttgttgtaactgcatagtatttactagtatttcattatacaaatgtattagaatttagtaaacagactaaaaaaggttacatcctttttctaaacatccttttttctttctttctttcttgctataataaatacttttgtataaacacttctgtgcatttgta

SEQ ID NO: 8179 - DNA, 466 bp, Homo sapiens
tacatctgttcataatcgaaaagtgataaagtttttgcatatgccacaattaacaccacccacaagcacaaaaaagttaggatgaaaatgttcttccaagaatatggtggaataattgtagcctattgaaaattcataaatgaaaattggagtattgtagacagcattcttgaatcacatgtttgtttctgtgtgtaatactgatgactgtcttaaaatttctaacttccaaataaatcatactccactggattataagggcttcaagtgtgggggctgtctcactttcataagcccagtgtcttgcgcattgtctgaaacacagtagatgttttgataaacgtttgggccaggcttgggggcttacacctgtaatcccaacactttaggaggctgaggctggaggatggcttgtgcccaagagtttgagaccagcctgggtaacatagtgagaccctatctctac

SEQ ID NO: 8180 - DNA, 1302 bp, Homo sapiens
cgcggacaaggccaggctagccttgagctccgtcgggcagggcgccgggattggtgtccggcagagcgtgagccagcggtgcgaagtcggcgagcgggagtgaaagaagaaaagctagagagcgaaggcaaagccgaggagagagggccgcggtcggcgaaggaatctgactgcacggttgcgtcgctcacttccggaggctccctcaggcgggcggctccctagtggctaaaggcaaagcattccggggcgcggcgcatgaagttgagcttcgtccctgctagccgccgctttctccccaaaaatacatcctagccttaatgtttatgcctccattgccccagttcttatctgttttgctcaatgtctcatagctacaagaaggcaatttctgacgaagccctccgtcccttccaaatggattattttggcgggcttccacccggacagtatgccacccgaatgactggacaagtgcacgggagcggctgtcatttgcggagtgcgccttgcgatctaggcgcctcacagcgcaaattatccagtaatttctctgaaatcgatgctggtttgttttcccaaggcaaatcagcagcttatacagacattggggccacaaagccggtggaacaacgggagacggcttcctgagtgtcaggtcctccaagatgagcttaaacttcgggtggtgggcaggctcggtaggcgggaaaggcccgtgtccagatgaatgcagtccatgtttatattgatgaaagacacgtataccatttggtccagctcaaccattcttaacaagtgctggctgtgagcactggtgtgtgtgtgcctgcgtgcaaccagcaatgtaagtgatgaccagctgcatgatgccttaatttgagtggacaaagtcggtcaagaaccactttcaggcttctgggtctccaagtctttgtctccctgtatccaaacgaggcattccaagtttgacagcatggaacattgcatgtccgaaataccaaccgtgaaactgggtaaaaagcttcaggaggtgatattgatgtgtatagtttaggaaataaaacccaatacttacttcaaagaacgtaatttgtggctttttagagagaaggatactttgacagttttcatttgtcgtctacatgtatatggtacgtttcattctgccttttaattaatttggtattttactatgaaaactactttgtattaataaaataatgtatttccaatgttataagttgtgttataacagtttcaaaagccaaataaacaagatgcattttgaaaaaaaaaatt

SEQ ID NO: 8181 - DNA, 5123 bp, Homo sapiens
cgggcccctcgccactaccgccgccgccgccgccgtgagtcccgcggagccgcgcgcgcccccggctgggccgagccgctggccgacgagcggagcctcaggagccggcggggacgccatgcgagccagcgtctcccttctctcctggacagaaggccgtgtcctgggacttctctgatggcgagaggctgcggctgtaccaggaagaaacatattgccgagtggatgccgccgcgcagcgtgtttgcttgaggcagaagcttcagcatctgctgggataactggaggaagaaatatgaagccttagcggctttacccgggaagcgagtttcgagatggcggctcagcggatccgagcggccaactccaatggcctccctcgctgcaagtcagaggggaccctgattgacctgagcgaagggttttcagagacgagctttaatgacatcaaagtgccttctcccagtgccttgctcgtagacaaccccacacctttcggaaatgcaaaggaagtgattgcgatcaaggactattgccccaccaacttcaccacactgaagttctccaagggcgaccatctctacgtcttggacacatctggcggtgagtggtggtacgcacacaacaccaccgaaatgggctacatcccctcctcctatgtgcagcccttgaactaccggaactcaacactgagtgacagcggtatgattgataatcttccagacagcccagacgaggtagccaaggagctggagctgctcgggggatggacagatgacaaaaaagtaccaggcagaatgtacagtaataaccctttctggaatggggtccagaccaatccatttctgaatgggaacgtgcccgtcatgcccagcctggatgagctgaatcccaaaagtactgtggatttgctcctttttgacgcaggtacatcctccttcaccgaatccagctcagccaccacgaatagcactggcaacatcttcgatgagcttccagtcacaaacggactccacgcagagccgccggtcaggcgggacaaccccttcttcagaagcaagcgctcctacagtctctcggaactctccgtcctccaagccaagtccgatgctcccacatcgtcgagtttcttcaccggcttgaaatcacctgcccccgagcaatttcagagccgggaggattttcgaactgcctggctaaaccacaggaagctggcccggtcttgccacgacctggacttgcttggccaaagccctggttggggccagacccaagccgtggagacaaacatcgtgtgcaagctggatagctccgggggtgctgtccagcttcctgacaccagcatcagcatccacgtgcccgagggccacgtcgcccctggggagacccagcagatctccatgaaagccctgctggaccccccgctggagctcaacagtgacaggtcctgcagcatcagccctgtgctggaggtcaagctgagcaacctggaggtgaaaacctctatcatcttggagatgaaagtgtcagccgagataaaaaatgacctttttagcaaaagcacagtgggcctccagtgcctgaggagcgactcgaaggaagggccatatgtctccgtcccgctcaactgcagctgtggggacacggtccaggcacagctgcacaacctggagccctgtatgtacgtggctgtcgtggcccatggcccaagcatcctctacccttccaccgtgtgggacttcatcaataaaaaagtcacagtgggtctctacggccctaaacacatccacccatccttcaagacggtagtgaccatttttgggcatgactgtgccccaaagacgctcctggtcagcgaggtcacacgccaggcacccaaccctgccccggtggccctgcagctgtgggggaagcaccagttcgttttgtccaggccccaggatctcaaggtctgtatgttttccaatatgacgaattacgaggtcaaagccagcgagcaggccaaagtggtgcgaggattccagctgaagctgggcaaggtgagccgcctgatcttccccatcacctcccagaaccccaacgagctctctgacttcacgctgcgggttcaggtgaaggacgaccaggaggccatcctcacccagttttgtgtccagactcctcagccaccccctaaaagtgccatcaagccttccgggcaaaggaggtttctcaagaagaacgaagtcgggaaaatcatcctgtccccgtttgccaccactacaaagtacccgactttccaggaccgcccggtgtccagcctcaagtttggtaagttgctcaagactgtggtgcggcagaacaagaaccactacctgctggagtacaagaagggcgacgggatcgccctgctcagcgaggagcgggtcaggctccggggccagctgtggaccaaggagtggtacatcggctactaccagggcagggtgggcctcgtgcacaccaagaacgtgctggtggtcggcagggcccggcccagcctgtgctcgggccccgagctgagcacctcggtgctgctggagcagatcctgcggccctgcaaattcctcacgtacatctatgcctccgtgaggaccctgctcatggagaacatcagcagctggcgctccttcgctgacgccctgggctacgtgaacctgccgctcacctttttctgccgggcagagctggatagtgagcccgagcgggtggcgtccgtcctagaaaagctgaaggaggactgtaacaacactgagaacaaagaacggaagtccttccagaaggagcttgtgatggccctactgaagatggactgccagggcctggtggtcagactcatccaggactttgtgctcctgaccacggctgtagaggtggcccagcgctggcgggagctggctgagaagctggccaaggtctccaagcagcagatggacgcctacgagtctccccaccgggacaggaacggggttgtggacagcgaggccatgtggaagcctgcgtatgacttcttactcacctggagccatcagatcggggacagctaccgggatgtcatccaggagctgcacctgggcctggacaagatgaaaaaccccatcaccaagcgctggaagcacctcactgggactctgatcttggtgaactccctggacgttctgagagcagccgccttcagccctgcggaccaggacgacttcgtgatttgaatgggtcccctcccctcctgctgctctggagtgcaagccctcttctgccctgcgtgccctgctgtcaccgcggagctgaagagggaggaaggggcggctgctcagacagatttagggcccgccagctaggctacacccatcatgcgccgccctcctccatcgagggagaggcctgaagggactgcctactgcagctcgttgccaatcacatagctttctatttgttaagtataaatttaaatttaaaatcacttttttaacgaatggggggaagggatctatgagaaaggtggtatctaatttttttatggaccataaaggtttaaaagaaaataggggcacaggctgttgaggtttttatgttgttatagacctttttaaattatgttagagatgtatataggtatttaaaggtcactgggagcgtttctgattcccggccacactttgcatttcaacactcagcccggaaagatgctcgttcggttgttggacctctttcactccctgcgtgtaagaaggtgaatcacgtgggaaaaagtggcttttcagtaaacgggtacagctcattctttctgagaaggccccaggtcctgctccctcctcggatttgattgtcttccgtgctttgcctcactcgtagtaaatgaccatccatagaatatgtgaatctttggtgagcttcagtgggcagagtgaagtcccgcattagcatttaggtgccctgagctgtttctgccaatagattagaaagcagccatgagttgacagtctttagggcccctgccagtgtgcaattagtcattgacaagaacaatgccatttgagagtgaggtggtccctgctgctacgaggccattgtactgttttttccttgaggtcaaagcagtgcttcccatagagtttgctgcctcttctgtggacaggaagaaaacttcatgaccgaatcagagccttggtggccactgactctcgtgcttattgcagatgctgtggttggcctcacaagcaacgccttatgctgatgtgcagaggtgccagctgccatttgccaaactctgcatttcatttcatctaaggcttaacccctcttccttcctggtgtacctgtgtctcctcggaaggaagtcatagtttagatgaaaccattttttgtacaatgtaaagatcatctgagcaagatgagcattttgtaaaaatgaaaatgtgactcacataaaatcaggaacttgacacagtgttgcattaataactttagggtgcagacatgctgtgtgaatctcacaatgcgtcgtagatgtcgcgtgttggaagggagcaggaggaaggactgatactggcaaatcagtagagtgaggtgatccttagcaacgtgccaggacacttcctgtgtgcctgcagttgtcagggaccatttgggatcccgaatctcattctctaaaactgctttcttgaaacatgttacttccttagtataatcaatgtatactcccttactggcctgaaacgttgtatagctacttattcagatactgaagaccaacggactgaaaaaaagaacaaacattagctattttatgctgcaagaaccaggacacacaattcgccaatcatcccaccatataaccttcgattgtgcttctcaactccaccccataatttctcccagagaccatctatcaccttttccccaaagaagaaacaaaaccagttgcaccttaaaccatggatattttttcctcaggggctttaaatagtttcctatgcaacgtgtcttgtagcacaaataaaattctacaaaagttgcagtaaattttatttggatattttaacctgttaagtgtgtgtgtgttttctgtacccaaccagactttaaataaaacaaacatgaaacct

SEQ ID NO: 8182 - DNA, 481 bp, Homo sapiens
cagttccgtctgtcgcattgatgttggctggttctgctctcaaaggcgccggctctgtagtgatgtcagcgccgtgtgacttgaggaggagaccccactgctgcgcgtctcccttctctcctggacagaaggccgtgtcctgggacttctctgatggcgagaggctgcggctgtaccagcgaatccactttctgttgccacccgtggaacgttctcactcttccaagaagccaggctagcagctcccccaccccagcagccgcgggacagagcccaggttgggtggtgtgtacacaaaggagggattgttctcacgtcgccctgcgacgagatggggatggacccgcggttagaggtcaccctccctggggcgtcaggggagcatttgtccttgaaacacgctggcaaaaaatgttccaaggaagcctcagctggtgtttgtgaggaagagctggattaaatggtgttctggtaaaatgtt

SEQ ID NO: 8183 - DNA, 2985 bp, Homo sapiens
taaaacacaggttgccctaatctaaaagcccctattccccgggggccaaaaacggggaaggggttttcctccaaaggaagcaacgaagtcgggaaaatcatcctgtccccgtttgccaccactacaaagtacccgactttccaggaccgcccggtgtccagcctcaagtttggtaagttgctcaagactgtggtgcggcagaacaagaaccactacctgctggagtacaagaagggcgacgggatcgccctgctcagcgaggagcgggtcaggctccggggccagctgtggaccaaggagtggtacatcggctactaccagggcagggtgggcctcgtgcacaccaagaacgtgctggtggtcggcagggcccggcccagcctgtgctcgggccccgagctgagcacctcggtgctgctggagcagatcctgcggccctgcaaattcctcacgtacatctatgcctccgtgaggaccctgctcatggagaacatcagcagctggcgctccttcgctgacgccctgggctacgtgaacctgccgctcacctttttctgccgggcagagctggatagtgagcccgagcgggtggcgtccgtcctagaaaagctgaaggaggactgtaacaacactgagaacaaagaacggaagtccttccagaaggagcttgtgatggccctactgaagatggactgccagggcctggtggtcagactcatccaggactttgtgctcctgaccacggctgtagaggtggcccagcgctggcgggagctggctgagaagctggccaaggtctccaagcagcagatggacgcctacgagtctccccaccgggacaggaacggggttgtggacagcgaggccatgtggaagcctgcgtatgacttcttactcacctggagccatcagatcggggacagctaccgggatgtcatccaggagctgcacctgggcctggacaagatgaaaaaccccatcaccaagcgctggaagcacctcactgggactctgatcttggtgaactccctggacgttctgagagcagccgccttcagccctgcggaccaggacgacttcgtgatttgaatgggtcccctcccctcctgctgctctggagtgcaagccctcttctgccctgcgtgccctgctgtcaccgcggagctgaagagggaggaaggggcggctgctcagacagatttagggcccgccagctaggctacacccatcatgcgccgccctcctccatcgagggagaggcctgaagggactgcctactgcagctcgttgccaatcacatagctttctatttgttaagtataaatttaaatttaaaatcacttttttaacgaatggggggaagggatctatgagaaaggtggtatctaatttttttatggaccataaaggtttaaaagaaaataggggcacaggctgttgaggtttttatgttgttatagacctttttaaattatgttagagatgtatataggtatttaaaggtcactgggagcgtttctgattcccggccacactttgcatttcaacactcagcccggaaagatgctcgttcggttgttggacctctttcactccctgcgtgtaagaaggtgaatcacgtgggaaaaagtggcttttcagtaaacgggtacagctcattctttctgagaaggccccaggtcctgctccctcctcggatttgattgtcttccgtgctttgcctcactcgtagtaaatgaccatccatagaatatgtgaatctttggtgagcttcagtgggcagagtgaagtcccgcattagcatttaggtgccctgagctgtttctgccaatagattagaaagcagccatgagttgacagtctttagggcccctgccagtgtgcaattagtcattgacaagaacaatgccatttgagagtgaggtggtccctgctgctacgaggccattgtactgttttttccttgaggtcaaagcagtgcttcccatagagtttgctgcctcttctgtggacaggaagaaaacttcatgaccgaatcagagccttggtggccactgactctcgtgcttattgcagatgctgtggttggcctcacaagcaacgccttatgctgatgtgcagaggtgccagctgccatttgccaaactctgcatttcatttcatctaaggcttaacccctcttccttcctggtgtacctgtgtctcctcggaaggaagtcatagtttagatgaaaccattttttgtacaatgtaaagatcatctgagcaagatgagcattttgtaaaaatgaaaatgtgactcacataaaatcaggaacttgacacagtgttgcattaataactttagggtgcagacatgctgtgtgaatctcacaatgcgtcgtagatgtcgcgtgttggaagggagcaggaggaaggactgatactggcaaatcagtagagtgaggtgatccttagcaacgtgccaggacacttcctgtgtgcctgcagttgtcagggaccatttgggatcccgaatctcattctctaaaactgctttcttgaaacatgttacttccttagtataatcaatgtatactcccttactggcctgaaacgttgtatagctacttattcagatactgaagaccaacggactgaaaaaaagaacaaacattagctattttatgctgcaagaaccaggacacacaattcgccaatcatcccaccatataaccttcgattgtgcttctcaactccaccccataatttctcccagagaccatctatcaccttttccccaaagaagaaacaaaaccagttgcaccttaaaccatggatattttttcctcaggggctttaaatagtttcctatgcaacgtgtcttgtagcacaaataaaattctacaaaagttgcagtaaattttatttggatattttaacctgttaagtgtgtgtgtgttttctgtacccaaccagactttaaataaaacaaacatgaaacct

SEQ ID NO: 8184 - DNA, 337 bp, Homo sapiens
gtcacagcatttcaggggcaaagtagcaaagaaaaatcctctaaatggaacattataaaaggtcagcagagcaagacaaaaatatatattgctgtccatgttataaaagctgtcaaaaatccaaggcagcgtcactaagaagcctctttctaaaggcagatgcctggagtgagaataaaacattaactcattaacctttttattataaacatgtttattaatttcttaagagagaagggagttctatgagggaattggacttatgacaaataagttgtgatgagttcaatagaattgaaaaaagtgaaacacttctaattcacttagcaagacctta

SEQ ID NO: 8185 - DNA, 654 bp, Homo sapiens
caaacagaaagcccagactcgatgaatttatcttttcttcaaagtagagaaagggtagctcttttcttcccaggaaattgtttatccatttaataatttttaaaaatcactggagttgggtgtggtggctcatgcctggtaatctcagcactttgagaggccgaagtgggcagatcacttgagctcaggagttcgagaccagcctgggcaacatagtgaaaccctgtctatacagaaaatacaaaaattagctgggtgtggtggcatgcaactgttgtcctagctactctggagcctgaggtgggaggatcacttgagcctggaaggcggaggttgcagtgagccatgatcgcaccactgcactccagcctggatgacagagtgataccctgtctaaaaaaaaaaaaataactgggataaaacaactcgaaagacccttataaagattttacccgtaactctgtagagcaaataacttcctgctttaggcaaagctctttgtgtgtaagttcgattggaagaggagggctggtggggggagattctctactttggtcatgagattaacattaaaagtttgaggaaggttgctctatatattggctgcctgtttctaagactgaaaataaaagcacagtaaaatatcaacaagta

SEQ ID NO: 8186 - DNA, 369 bp, Homo sapiens
ccgttctctggcggacggggctgtggaccagttcagccgcccctccccaccccaccagggcgctgcggcctcactcccacgtccacgggcaggcccagcccctcctggccttcaggtgacctcagctgcccggctggccccaactccaccgcacaacgcagactgcgggtccccaggcctggacccctggccccgtcccgcccgcgcatgtcggggaagctctgctccggcagccctcggggtggtgctgggaggtcgcgcagaactgaaggggctaggttcgagaacgccgaggatggggtctgcgaccgcctccccgcacctagttctccgccccacctgcggcgtctgcaggtcctacaaggcgca

SEQ ID NO: 8187 - DNA, 736 bp, Homo sapiens
gcactgtttcaaacttagctgctgctattgctgctgtttggtaataaattctagtccccttttgacttcgatcaaaatctgatgccctaactcagctagaatgagttttcccattgcccatgtgtctatttttgttaaacggtggaccctaatcaaccgaggaggtgtttgttatagaaaaccaatgactaggaatcaccttctcagatacagaatatgaggccccaaggggtgaggggaggtgtccatggttactagacctgggggtctcctgacttctaggctgcgagggaaaatatcacagagtatgctctgattcctagagggccagaggggctcctttgtgatcccaagttctggttcaccttctatatggagttgtgttctggtcttaagggacttacccttccattccatcactttctgccatcaaaactttcctttctgttttctaagacaatatcaatggctgtggatattgaacaattgtctgataaaagtgatttttgacattaaggatctaagtgctcatatttgagagtctgatctagtgaccctcatgaataacaatcacaccttacttagtactgggattttccctttacagttgatgtttacttacatgattgacctgcgtaacagtttaaaacaggtaggaccacgaggtcaggagattgagaccatcctgacaaatatggtgaaaccctgtctctactaaaaatacaaaaaaacaaaa

SEQ ID NO: 8188 - DNA, 397 bp, Homo sapiens
aatttgctcgagcatcaagaccctgataataaagacagaaaaatgctgaaacagcagaattttaaaccaagttcccctctgcagcacaagaaactcaggtaagtttccagtgtccaaagcctacactcacaaacacaaacacgaagccctccctttgcaaccctcaagtacccagaacctgctgaagaaaaccatctttcaccaccttttgttaaggttcctcagtattagtggaaaagctttattctcacaaagatatccaacaatgctaatttttacatggcatgttatttccttaggcaagattaatagaaaacctgaaaaattcgcaacaagcacacaaagactagcttctgtaacacaacctgaccccacccatatcacaccattttagaag

SEQ ID NO: 8189 - DNA, 424 bp, Homo sapiens
attaaaggtttctgggtttaatatgctttaacacagttaagattaattttatttttatatttttttgagacggatatcactctgtcacacaggctggagtgcaatggtgtggtctcggctcactgccagctccacctcccgggttcaagtgattctcccgcctcagcctcttgagtagctgggattacaggcatgcaccaccacacctggctaatttttgtatttttagtagagacggggtttcaccatgttggccaggctggtctcgaactcctgacctcttgatttgcccgcctcagcctcccaaagtgctgggattacaggcatgagccaccgcgcctggcccagattatttttatttttaactcctgtgttttctcctaatatttgtatagtttatttcgctgggggcaagggttgaagg

SEQ ID NO: 8190 - DNA, 121 bp, Homo sapiens
tttctttttttaacagcaatataatgaatgcattcaaaactttgagctgtgggctgtacttagatgtagacatgcttttctgatgaaatataattatatactctgaggaataagatgtcta

SEQ ID NO: 8191 - DNA, 716 bp, Homo sapiens
tgtagggggatccctaacctacacagattctggttgccatggtctaattgctaccccagtggcaggaataatagaacaggcatcatagtccataggcacctaggcttccaagcagttcacagattttggtcatgtgccaggtctctagttagtacttcactggcaagtgctggcttgaattaataaaagcagcattgaaatatctgtgggttttgtctttagcttccacttcactcagctatttttttgtttttgtagtatctttcaactgattgtgtggcatgaattcatttagataccacaactcagaatggcattccaaaggcaagagtggaaatgtctcaacttggtaaataaaaatagcaaccagattcagccatcagacggtaattagtggagctggaagctagccattccaaggactaactatccttgataaagacgccaaggctctttagctttgcatgctcaatctctccttttctgttttcttccttcctttactcagatttttctattctatttcactcaagtaccatctgttattccttttcacacacttttcagacccttcttttattcctgcccattctgcatacctcatcgttaaaaggcgggtaattctacaaagattccaattagtgtattgtttgacggctgatcaggttttcccccttttaagatgaaccactgaataaatggtgtaaagaatgtaa

SEQ ID NO: 8192 - DNA, 1740 bp, Homo sapiens
gcattgtggttcagtggtagaattctcgcctgccacgcgggaggcccgggttcgtttcccggccaatgcaccagaagatgtagttaatagaatttaatcttttctaagtgcacattgaagttgccttttatgttcatattatgttcatattttatttgaaaaatctatagcatttttattgtgctgaaagcattaatatttgcagcactttgtgagacaggcaaaattatctttttgctgacttggaaactgcaagagttaaaagacttgcttggaatcacacatggcagatagaggataaggaaaagatggcctttcagttcctcatcagtaccttgctactacagtgtctgcagattggtgtcttacattcagctatgatttgttcgccaaggtaccgtgtcttcttactgaagttgttttggctggcgcttgcctccgttcagagggaactgagttacctaactttatgatgctaagagccaggaaggtactgggatctgggatgctaggcacctaaccagtctagactgaactccatactaagctgtttttctgtgttaaggcatcaagagtagatggtggtcctgattttctgagatatattatctctgaattatctacataaataactgaaacttttatgtaattttaaaactagtcaatcatgttaccacccttttgaggggcaccaaatttgagacccttacccccaatttattaattaatagctgttttaatcacctaatagctgatcacctaatgactaacagtcattttcatcctggaaaatgggaactaactttgactttgaaaagtgctgttattaaatgtgtgattcataagaactgaacatattttctttattattttccttcaggattcaactttaattgactccaaatgatgttatggtcattctgtttttctgatacgagaatagattgttctgagaacctagaatattcattgcctttatgaatctagaattgactttaaatttaggttattgtgtttgtcatttgcgctaaaaaaaaaattgccctggggaataccaaacttctcggtacattcgtgtggtgtgaaagtcaaaattgccaattaggttctattttgaccaaatagttgaatgttgtagacagttgtaaattttgaacctgttctaatttgccttttgccagatggcgcatttaactttgtggcatatcatcgactttcaaggaaagatttacttttcatcagattaaagttgaggaaggattttctttctaaatactgaggctctgaatttcccaagttggataccccagacagctagagtgatcttaaaagtgactctgagagttgacttaggaagtgtagacatttatccaaaatctgtatttactcctgacttacattacaaatacagagttttatttttaaagaaaatttcaataaaaagcaccatttaattaaaatctactcaccatcaaactttttaaaaagaacataagccaatgtcaggagttggagaccagcctggccaacatagtgaaacgctgtctctactagaaaaaaaaaagaaatacaaaaattagctgggcatggtggtgcgtgcctgtagttccagctccttgggaggctgaggcagtagaatcgcttgaacccgggaggcggaggttgcagtgagcccagatcatgcccgtgcactccagcctgggcaacagagagagactacgtctcaaaaaaaagaaaaaa

SEQ ID NO: 8193 - DNA, 464 bp, Homo sapiens
gtcaactctgtcaaccaagggcatcaatggccacgtgtgtggttttctccgatttatccaacttctttgcactgagttcttattcaagtgaagtattccggtcttgtgacttgtacttcaggtcaggaggacgtcctgctgcacgctcaggcggtcgctcctcctttccacaagacccaggcccgcaccgttcgccccggggctcccatggcccccgacctccagtctccagcaacgatggatccccacagaccaggcagggggcgaagggcgcacacccacctcccgggagtcagtgggaataaccccgggcgctcccaggatacgtcccacacccggagccgcacgggcccatccccgccaggtctgggcaggcagccggagcccgggaccccgcctcccccgcacctagggtcccggccgagctcgaccgctgaggtcccgttcccactcccactcccagc

SEQ ID NO: 8194 - DNA, 1256 bp, Homo sapiens
cgcccacaaagccacaggcaggtgcaggcgcagccgcggcgagagcgtatggagccgagccgttagcgcgcgccgtcggtgagtcagtccgtccgtccgtccgtccgtcggggcgccgcagctcccgccaggcccagcggccccggcgcctcgtctccccgcacccggagccacccggtggagcgggccttgccgcggcagccatgtccatgggcctggagatcacgggcaccgcgctggccgtgctgggctggctgggcaccatcgtgtgctgcgcgttgcccatgtggcgcgtgtcggccttcatcggcagcaacatcatcacgtcgcagaacatctgggagggcctgtggatgaactgcgtggtgcagagcaccggccagatgcagtgcaaggtgtacgactcgctgctggcactgccacaggaccttcaggcggcccgcgccctcatcgtggtggccatcctgctggccgccttcgggctgctagtggcgctggtgggcgcccagtgcaccaactgcgtgcaggacgacacggccaaggccaagatcaccatcgtggcaggcgtgctgttccttctcgccgccctgctcaccctcgtgccggtgtcctggtcggccaacaccattatccgggacttctacaaccccgtggtgcccgaggcgcagaagcgcgagatgggcgcgggcctgtacgtgggctgggcggccgcggcgctgcagctgctggggggcgcgctgctctgctgctcgtgtcccccacgcgagaagaagtacacggccaccaaggtcgtctactccgcgccgcgctccaccggcccgggagccagcctgggcacaggctacgaccgcaaggactacgtctaagggacagacgcagggagaccccaccaccaccaccaccaccaacaccaccaccaccaccgcgagctggagcgcgcaccaggccatccagcgtgcagccttgcctcggaggccagcccacccccagaagccaggaagcccccgcgctggactggggcagcttccccagcagccacggctttgcgggccgggcagtcgacttcggggcccagggaccaacctgcatggactgtgaaacctcacccttctggagcacggggcctgggtgaccgccaatacttgaccaccccgtcgagccccatcgggccgctgcccccatgctcgcgctgggcagggaccggcagccctggaaggggcacttgatatttttcaataaaagcctttcgttttgca

SEQ ID NO: 8195 - DNA, 1295 bp, Homo sapiens
cgcccacaaagccacaggcaggtgcaggcgcagccgcggcgagagcgtatggagccgagccgttagcgcgcgccgtcggtgagtcagtccgtccgtccgtccgtccgtcggggcgccgcagctcccgccaggcccagcggccccggcgcctcgtctccccgcacccggagccacccggtggagcgggccttgccgcggcagccatgtccatgggcctggagatcacgggcaccgcgctggccgtgctgggctggctgggcaccatcgtgtgctgcgcgttgcccatgtggcgcgtgtcggccttcatcggcagcaacatcatcacgtcgcagaacatctgggagggcctgtggatgaactgcgtggtgcagagcaccggccagatgcagtgcaaggtgtacgactcgctgctggcactgccacaggaccttcaggcggcccgcgccctcatcgtggtggccatcctgctggccgccttcgggctgctagtggcgctggtgggcgcccagtgcaccaactgcgtgcaggacgacacggccaaggccaagatcaccatcgtggcaggcgtgctgttccttctcgccgccctgctcaccctcgtgccggtgtcctggtcggccaacaccattatccgggacttctacaaccccgtggtgcccgaggcgcagaagcgcgagatgggcgcgggcctgtacgtgggctgggcggccgcggcgctgcagctgctggggggcgcgctgctctgctgctcgtgtcccccacgcgagaagaagtacacggccaccaaggtcgtctactccgcgccgcgctccaccggcccgggagccagcctgggcacaggctacgaccgcaaggactacgtctaagggacagacgcagggagaccccaccaccaccaccaccaccaacaccaccaccaccaccgcgagctggagcgcgcaccaggccatccagcgtgcagccttgcctcggaggccagcccacccccagaagccaggaagcccccgcgctggactggggcagcttccccagcagccacggctttgcgggccgggcagtcgacttcggggcccagggaccaacctgcatggactgtgaaacctcacccttctggagcacggggcctgggtgaccgccaatacttgaccaccccgtcgagccccatcgggccgctgcccccatgctcgcgctgggcagggaccggcagccctggaaggggcacttgatatttttcaataaaagcctttcgttttgcaaaaaaaacacaaaaaaacaaaacaaaagcaaacaaaaaa

SEQ ID NO: 8196 - DNA, 1181 bp, Homo sapiens
cgcccacaaagccacaggcaggtgcaggcgcagccgcggcgagagcgtatggagccgagccgttagcgcgcgccgtcggtgagtcagtccgtccgtccgtccgtccgtcggggcgccgcagctcccgccaggcccagcggccccggcgcctcgtctccccgcacccggagccacccggtggagcgggccttgccgcggcagccatgtccatgggcctggagatcacgggcaccgcgctggccgtgctgggctggctgggcaccatcgtgtgctgcgcgttgcccatgtggcgcgtgtcggccttcatcggcagcaacatcatcacgtcgcagaacatctgggagggcctgtggatgaactgcgtggtgcagagcaccggccagatgcagtgcaaggtgtacgactcgctgctggtggcgctggtgggcgcccagtgcaccaactgcgtgcaggacgacacggccaaggccaagatcaccatcgtggcaggcgtgctgttccttctcgccgccctgctcaccctcgtgccggtgtcctggtcggccaacaccattatccgggacttctacaaccccgtggtgcccgaggcgcagaagcgcgagatgggcgcgggcctgtacgtgggctgggcggccgcggcgctgcagctgctggggggcgcgctgctctgctgctcgtgtcccccacgcgagaagaagtacacggccaccaaggtcgtctactccgcgccgcgctccaccggcccgggagccagcctgggcacaggctacgaccgcaaggactacgtctaagggacagacgcagggagaccccaccaccaccaccaccaccaacaccaccaccaccaccgcgagctggagcgcgcaccaggccatccagcgtgcagccttgcctcggaggccagcccacccccagaagccaggaagcccccgcgctggactggggcagcttccccagcagccacggctttgcgggccgggcagtcgacttcggggcccagggaccaacctgcatggactgtgaaacctcacccttctggagcacggggcctgggtgaccgccaatacttgaccaccccgtcgagccccatcgggccgctgcccccatgctcgcgctgggcagggaccggcagccctggaaggggcacttgatatttttcaataaaagcctttcgttttgca

SEQ ID NO: 8197 - DNA, 901 bp, Homo sapiens
cgcccacaaagccacaggcaggtgcaggcgcagccgcggcgagagcgtatggagccgagccgttagcgcgcgccgtcggtgagtcagtccgtccgtccgtccgtccgtcggggcgccgcagctcccgccaggcccagcggccccggcgcctcgtctccccgcacccggagccacccggtggagcgggccttgccgcggcagccatgtccatgggcctggagatcacgggcaccgcgctggccgtgctgggctggctgggcaccatcgtgtgctgcgcgttgcccatgtggcgcgtgtcggccttcatcggcagcaacatcatcacgtcgcgggcctgtacgtgggctgggcggccgcggcgctgcagctgctggggggcgcgctgctctgctgctcgtgtcccccacgcgagaagaagtacacggccaccaaggtcgtctactccgcgccgcgctccaccggcccgggagccagcctgggcacaggctacgaccgcaaggactacgtctaagggacagacgcagggagaccccaccaccaccaccaccaccaacaccaccaccaccaccgcgagctggagcgcgcaccaggccatccagcgtgcagccttgcctcggaggccagcccacccccagaagccaggaagcccccgcgctggactggggcagcttccccagcagccacggctttgcgggccgggcagtcgacttcggggcccagggaccaacctgcatggactgtgaaacctcacccttctggagcacggggcctgggtgaccgccaatacttgaccaccccgtcgagccccatcgggccgctgcccccatgctcgcgctgggcagggaccggcagccctggaaggggcacttgatatttttcaataaaagcctttcgttttgca

SEQ ID NO: 8198 - DNA, 961 bp, Homo sapiens
actatacggctaggtagcgaggcctggtgttgagcagaacatctgggagggcctgtggatgaactgcgtggtgcagagcaccggccagatgcagtgcaaggtgtacgactcgctgctggcactgccacaggaccttcaggcggcccgcgccctcatcgtggtggccatcctgctggccgccttcgggctgctagtggcgctggtgggcgcccagtgcaccaactgcgtgcaggacgacacggccaaggccaagatcaccatcgtggcaggcgtgctgttccttctcgccgccctgctcaccctcgtgccggtgtcctggtcggccaacaccattatccgggacttctacaaccccgtggtgcccgaggcgcagaagcgcgagatgggcgcgggcctgtacgtgggctgggcggccgcggcgctgcagctgctggggggcgcgctgctctgctgctcgtgtcccccacgcgagaagaagtacacggccaccaaggtcgtctactccgcgccgcgctccaccggcccgggagccagcctgggcacaggctacgaccgcaaggactacgtctaagggacagacgcagggagaccccaccaccaccaccaccaccaacaccaccaccaccaccgcgagctggagcgcgcaccaggccatccagcgtgcagccttgcctcggaggccagcccacccccagaagccaggaagcccccgcgctggactggggcagcttccccagcagccacggctttgcgggccgggcagtcgacttcggggcccagggaccaacctgcatggactgtgaaacctcacccttctggagcacggggcctgggtgaccgccaatacttgaccaccccgtcgagccccatcgggccgctgcccccatgctcgcgctgggcagggaccggcagccctggaaggggcacttgatatttttcaataaaagcctttcgttttgca

SEQ ID NO: 8199 - DNA, 1617 bp, Homo sapiens
taagtgcaaggacaacaaaagtattataagggatgttaaaaaggcttgtgagtccaatagaggttaacaaaaaaggaaagtggtaagaaaaataatgaatgttacatttgtgatagaatgaatcatttaacagaaggacaaagagtgaactgtcagcagggagatgaggaacagtcactgacgaaatggaaaaacgtgtgtctgtgggctgtaggatcagcgtatgtgctcagaggcttgttggcttttggtaattcagctgaagagtaggaaattgtaactccagagccaagtatagtaaaagggccgctggagacattttgggaaaccatgagtggggctgtaggttcatggtcctttcaagcctatacgacctcagagtgagaggggtggtggcatagttggaatctgtaggttccaagacatttctgtagttctttcaaagtttatcagggatggtatctgccagaacagtttcagtatagatgtgactcacctatttttgaaaaaaatgtttgctacagtgtaaagaaaggaggattgtggacattttaaagttctgaagaattggttaactcctatttggtagaaatgaatcttgagactgtaagcttaactcccatccctccctttagcaattttggacttttgaataaatatagttacaaattgccttttggaatttactgtgttgacaagtaattgagcttctgtacatgttaagtataagatatggagaaggatgctggtgtttgtgtttatgtgtgtgtgtgtgtgtatgttttttttttttttaaatgacatgcacatttgagtggtagactgtttatattttgatttttcttccagggcagaaattggtacctatatacacacaccttgctttgcttatagactgattttgaatccagtttcagaggttcagcattcatatgggtccagctgaatggtgatattcccttcaacactcatgtgttctgactgtgtttgcttttctaagggctaacttacagtctgcctgacacacagtgcctggttctttagcattatggagcctgttccttgtatatggtttccttctaagtgacagggctgagctaactggaatttaccaagatacctttggacgtactacattttcactcatagagtagttggtagcatttttttcttcttcttttttattctcttttctcttcttttaaaattaataggagcagagcagaaaatttatcccaattaggtagaagttaaattctgtttagaatttataaaatgttaggagttcaactgtgccaggtatgggtggctcacactgtaatgccaagactttgggaggctgaggtgggaggattgcttgaagccaggagtttgagactagcctggacagtgtagcaagaccgggtctctgcaaaaaaacaaacaaacaaacaaaaaaaaacattaaaaaattagccgggcatggtggcacatacttgtagtcccagcaattctggaggctgaggcagggggattgcttgagcttcctagacttgagcctagaaattcaaggctgcagtgagctatgattgagccactatattccagcagcctaggtgacgagcacgaccctgtctc

SEQ ID NO: 8200 - DNA, 500 bp, Homo sapiens
cattcctttggagtcagaactgaaatgttcacaaggagaaaagggcaactccacctcagcagaggaacacagcagaaaatgggtttctgactggctgttccctagacatgcttgttttgtcatcctcattccctgccccacttgcgtgcccgccccaccccaatcaaagttcctgtaggaatacctcaaagatcccttgtcaacagccagctacccatcaaggctacttgatgatcaaatcagcctttcctaggccttttcctaaaggattttaatctctgtccttgttcttccctggatttttttccaccactctttggcttaataaatgcctttccagaaggcttcagcgcggctggaagtatacttgaacggcaattctaagtccttattagctctatagtgatcaggtgaaggaataattgatctcaatcaggaacacctggttttataattgcacaaatgattataattcaataataaaagtcaatttaactaac

SEQ ID NO: 8201 - DNA, 573 bp, Homo sapiens
cattcctttggagtcagaactgaaatgttcacaaggagaaaagggcaactccacctcagcagaggaacacagcagaaaatgggtttctgactggctgttccctagacatgcttgttttgtcatcctcattccctgccccacttgcgtgcccgccccaccccaatcaaagttcctgtaggaatacctcaaagatcccttgtcaacagccagctacccatcaaggctacttgatgatcaaatcagcctttcctaggccttttcctaaaggattttaatctctgtccttgttcttccctggatttttttccaccactctttggcttaataaatgcctttccagaaggcttcagcgcggctggaagtatacttgaacggcaattctaagtccttattagctctatagtgatcaggtgaaggaataattgatctcaatcaggaacacctggttttataattgcacaaatgattataattcaataataaaagtcaatttaactaacttaattcagattgctttaacctctcgcagacagttaaaaaatgaacaagcaaacaggaaagggaaaagaaaag

SEQ ID NO: 8202 - DNA, 300 bp, Homo sapiens
ggagatggcaagggagggatcctgcttggatgaaaagtctttagggaccatctcaggttactctcaggtgccctctgagttagtgtgttctaagtaaggggttctaagcctcctattgtggctcatccctgacagtgtcagcaccagctagctcccctaaccccacagctcagggtccactttgcttctgcatcctgcatgttccttttcctgctgaaaagcagattccccagcgagcagcagaatcctgtttctccctgtaggcccctctgctccttatgagtggtgttttgtgggatt

SEQ ID NO: 8203 - DNA, 388 bp, Homo sapiens
gtgaagggcattgccaaagtggaatcagtaaggcttggcagttgaccttgtttgttggagagaagggataagattttaaagctacatgtctgaaagaatgatgctgctgattgaaataaaggaagaaaggatgcatttcgggctccaacctgtcctaggaaggcctagacctcaaacaccaacacctccatgcatttcctctttggctactatgtcttttccctgacttctgcctctccagctctctgggctgctgcttccacctgttcatctgacttagaccctccctgctgggtccttgttcacctactcatttggtgcttcgtctgccatcagtacctccattgcagctggtgggatgtcagtcaccatctcttatatttgcttc

SEQ ID NO: 8204 - DNA, 372 bp, Homo sapiens
gctgatgataagctggtggagagtctgttaactcaaggcctgattctaatgaatttgggattccttgctgaaaaaaagactgggctgggtgtggtggctcatgcctgtaatcccagcactctgggaggctgaggcgggcggatcacctgaggtcagagtttgagaccatcctggccaatatggcgaaaccccgtctctactaaaaatacaaaaaattagccgggcctggtggcgggcgcctataatcccaactactagggaggctgaggcaggagaatcacttgaacgcgggatgcagaggttgcagtgagccgagattgcgccattccactccagcctgggcaacaagagcgaaactccacctcaaaaaaa

SEQ ID NO: 8205 - DNA, 388 bp, Homo sapiens
tcagaacaaagttttaatttctctccttactagaaatgatggaggataggaatctcaaatgttgacattttaacacatttacatatattatattatatacatatttctgctattccataggtaagagttaagcttaaaattagcccagcaggattagcggtttagttctctttttaacatattttgcagatgctaaggttttggcacggaaagagaaaaatttctaacttcccatcccagttacagattaagtatgtaaaatcttcagatactctttaaaaaactgtttagagtaatagggcttttcattttgtttttaggatttttctttggattcaagtacaggatttaatatattaaattttatcttactagatttggcccattc

SEQ ID NO: 8206 - DNA, 437 bp, Homo sapiens
ccatccttccaaaggctcaggaggagtctgttcctttgcctctcccagattctggtggatgcccacgttgcttgtttcaaggtgctcagcaggcagcctcatccccgccccgcctccacttccatctcgcgcctctctcgaacctcctgcctcgctctgtcacttacgtggttcttgtacttgctttgggcccccaggatcccaggtccaggatgttcccacctcaaaatcctgaatttaatcgtgtttgccaattcttctttttgccatgtaaggtagtggatttgcaggctctgggggttgggacgtgggcgccggagattctcattgtctcatttgtaaggtgcattgctcctcaccaacatctgcagaagcctgggtcccccacagtgtccctccaaagtccagaatcccatccaatcaggcatgggggattg

SEQ ID NO: 8207 - DNA, 374 bp, Homo sapiens
caaagtccagaaataaacatgcatatgtaatgtatatgtgtgtatgagttaaaagttaaaatgaaattattagattgttttttaatataaaaaatatgccacaagttcaacactataatatttatatttgtcgactgactagttaatatcttttaaccatgatgaaaaaaataatattcagcaagaaaagtaagaaggattgaaataaaaattatccatcttgaaagtggaaaccatgacttggcatatgaaagaaataacatgttattttttgctactagttacacagtataatttttagcagtgttctcatcccagatgacagaaatcaccatcacaccctaaataacaaacagcatggactgtggatgaaa

SEQ ID NO: 8208 - DNA, 428 bp, Homo sapiens
gcctccagctgagaaagcaaagccaactcacagttccttggctgtcccgcggagcctgcggtggcaaaccacctccttcagaagggtctgtggattctcctggcttttctgtccttgccggagtcccactgctcccgaacacatgccctgaggcagcgtgcctgcacaaccagcttccatctgaacgcttcagacatgcgctgcattcagggcagggacttttcttggacagagaagctgagaagtatcagataaagatgacctgcatgtactggaaaataatctgtggtttatatgtaggcggatggaagcaaaccagggtaatatacatttagaggcagagggctctcacaatatcctcttcaaaaaacattaggatgaaaacagttgcagaacatttctagtaaaatatatcattaaaacttagg

SEQ ID NO: 8209 - DNA, 383 bp, Homo sapiens
gtatattcaagagacagacgctgtctcagaggtcattagggatggctctgggcctatcagctggtgtctgcaactagagatccaagcaatcccttccaactgggatattgtccaccagggagttgtctggtacacccaaggtctgccagccgtctttttgtttggctgcctctcttggatgacacccttgaaaactggaatccaagttacaaatgatatcttttaatttatctcaaatatctgcttgctactatattaaactggggacatacaaacccacccctgccccccatttccttgctaggctatataaaacttaaacttcaccttcctctctccacaccaaagtgtagccaaggctaagatgttaaaatgaatatgtt

SEQ ID NO: 8210 - DNA, 643 bp, Homo sapiens
gacactcacaggtttgaccccaaggttaagctttgcatttcgaccttgtaagccatgtactgtggtgcccatctggacagctgagttttagcagatgctggtgaccatctgctgaagacatctagcatgctctctatgctactggaatgtacgaacctgtctttctgagtcatttcaaaggacagctcattttccaggttttatccagcgctgtgggctgccccagcatcatagtttctgtaaagaatccttgtcttgtgttacctatacccccacttcaagatattcctactcctacaacggagcgctgattgaatagtactcccactgtgtgaacccagagctgctcaggtttcgtcttgcccctgctttaacagccccactttcctcatgcagacaggagctgtggtagttaattagccctcacaagctggataattaattttcagtaagtggctcagtcttccaattttaaaggggtttaatgaaatcttagaggtaaatgaaatgcttaaaatctgtgcccatttaatagaattctctatcaataggtacctgcctctagcccatctccatggggtccttttgtcctttgactcaacaagtcacacaagaatctctggtggagtgagtctctgtctcc

SEQ ID NO: 8211 - DNA, 434 bp, Homo sapiens
aaacagaattgaggaaatgcaaagtgaagaaattgtagctgtcaggaacaagagaagagggatgggaaacctgctactgaggtttggaggtattcctctggagttttcacttataccattctctcatgcccaggaagctgctcatcaccaaaccacaagtcttcctctaactcagtcacaactaagcttctatccagacactgatgatactgtaactgttttgttgtgcttctgattagttgccctgtcaaccataagcagcctataaacagggcctggctccatccttgttacttccccattgcactgaattcagtatttttccctcaaggtagatagttgtggggcagcatccctaaaaatatctagttatattatggcatccagtaaatgtttccttaattacttacctccattaacaagctttatgcaaa

SEQ ID NO: 8212 - DNA, 732 bp, Homo sapiens
ccgaagtttagaaaccagcttattgccaaagggaaaaaggatagcccaaaggacaagaaaacacttctcactatgaattggtttggaagtaacttcttcaggtgtcctgaggatctttccttactcaacatatactcacctctgttgtcacacatgtcatctgaagatgaacattttatttccaacttgagaggccatgtaccagccagcgctgtggtgaagcagcctgttcggggagccagtggcaggacgacaatcacagcaattgtccagactggcgggggctggagcaccggtctcttcagtgtctgcagagataggagaatttgtttctgtggtctattctgtcctatgtgtcttgagtgtgacatcgccaggcattatggagagtgtctttgttggccgttgttacctgggtccacctttgcactgagaattggcaccagggagagacataaaatacagggcacactgtgtgaagactggctggcggtgcactgctgttgggctttttccatctgccaggtggcccgggaactcaagatgaggacctcccaagtctatgaaatctgtgcagtcccaatgactaaggacaccctggtttgacagcaagataactcctcctccttactccccaacaccctcctctcaaacctctcagtggaacaattgctttttcctaagtttttactgaaatggtatgaaaataaatgatttcccccctaaaaactc

SEQ ID NO: 8213 - DNA, 300 bp, Homo sapiens
gggcagcttattcataaggaagcccctcgtacttcatggtaaaccaactagaaagatacagctcctgacttttccaaacctaacaaaagaaaaaaacactgaggtttttcttcactgtgtcagtgaaaaagaagactattacctcgacctggtaatatgcagcttatagagatgtttttcacctatagcatctccttgcactatcaattattttacctgttgtttctcaattataattactgtaaggcacttcaaaaaaagagatttttttaaaaagcagaaatggaaatatattaattt

SEQ ID NO: 8214 - DNA, 390 bp, Homo sapiens
accagttttagtggcagtgggaaatgcctggttcctccttgtcattacctttttggtttcaatgcatctttacaaagatgattcatgatcttgtgcttggctctgactgtggaccatagatagtgctatgtccagtctcctggcgccgtcttcctcacgtactgctgaccttctgtggcaggtgaacccagcactacacatcactcttgtcagaggggtgggagctcccattacacctccttctgtgagcagctttcaaaaatacttctcctggaaacaaaacaagtggtggctgctttataagaatgcagtgcaagatctaaagcgttccttttctttcttttaagctttagttaaattaataaacattggttaaatgaatgacctgtg

SEQ ID NO: 8215 - DNA, 560 bp, Homo sapiens
cactaacacacatgtaagtgcctggcacagtaaaaactcatcagtgatagctgccgtcaccatcaccgccattattcatcattgattcatgcttaggctcacgggtccttagctacaaagcttttggtatgtgagtactgcacatgtgtaatccacgctgttagaacaaggctcctttttgttacaggaatgggggtaccactgctaagatagtgtgactagaagttagctcattctaagactttttttggttattgagagaaaaatcatagaaagttggtaccatcagggaccacagggtgctgtttccacctgtatcccccatactcactaactgaggctcccaagggtagatagcttgtcaaggccccacagttagttcacagtcaagttgctattagaattcagatctcattttcatctgctcccatttcattttattccatggatttacttgccttggagatttggaaggggaagaaaataattggcagagaccatgatggttttggtcctgggtgtggctgtgtcccacaccggtgctcatgtcggggtggagc

SEQ ID NO: 8216 - DNA, 442 bp, Homo sapiens
gactcttactataattacattaggaggtgggtggggggcagtaactaggtttagttgaggtcatgagggtggagcccacacaatgggattagtgcccttggaagaggaaacacctgagctgtttctctccctgtcatgtaaggatacagtgagaagtcagccatttacgagccaggaagagggtcctcaccaagaacttaatctgccagtacattgattttggacttcgcagctttcagtactatgagaaataaacttccattgtttaagccacccagtctatggtattttgttatagcagcccaagcagattaaggtatccactcttcatgttctgttccaactaaccaatctcagtgggtctcttgaccacccagtgttcagcagacaacaagtgctcacttacagccctgtcaaatttaccatcccctaaggacaaaaa

SEQ ID NO: 8217 - DNA, 847 bp, Homo sapiens
cagttgtctgtgattctcaatatagtaacgataagcctcttggaatatggaggccgctgcggacggcccggctgagacccaaagcccggtggaaaaagacagcccggcgaagacccaaagcccagcccaagacacctcaatcatgtcgagaaataacgcagatacaggcagagttcttgccttaccagagcacaagaagaagcgcaagggaaacttgccagccgagtccgttaagatcctccgcgactggatgtataagcatcggtttaaggcctacccttcagaagaagagaagcaaatgctgtcagagaagaccaatttgtctttgttgcagatttctaactggtttatcaatgctcgcagacgcattctcccggatatgcttcaacagcgtagaaacgaccccatcattggccacaaaacgggcaaagatgcccatgccacccacctgcagagcaccgaggcgtctgtgccggccaagtcagggcccagtggtccagacaatgtacaaagcctgcccctgtggcccttgccaaagggccagatgtcaagagagaagcaaccagatccggagtcggcccctagccagaagctcaccggaatagcccagccgaagaaaaaggtcaaggtttctatcacatccccgtcttctccagaacttgtgtctccagaggagcacgccgacttccagcagcttcctgctgctagtcgatgcagcagtacaaagggctgccgagctggagctagagaagaagcaagagcctaatccatgattgatgatgttccaaaaacccaagtagtcagtcccttatgtactgtggtaaacctgtttatgttcaccccaaaa

SEQ ID NO: 8218 - DNA, 399 bp, Homo sapiens
agtagctgggactacaggtatgtgccaccacgcctggctaattttttttattttttgtagagatggggttttgccatgttgcccagtctggtcttgaactcctgagccaagtgatcctcccacctcagccccccaaagtgctgggattacatgtgtgagtcaccgcgcccaactcactttaatctttttaccctcctaatttatagtaacctgtactgactatatctctaatatcccaacttctcctggattctctgctctcaatcacttgaactttcatctcacaggaaccgtgagcagccaaggtggacctacatcagtcaaaatgctcctgtctgcaagaaataatactctatttagactatcttaaactaatatattaacctctcattgtagagc

SEQ ID NO: 8219 - DNA, 621 bp, Homo sapiens
actttttcttcccttgcattttagaataggctggtatctcatttgaacgggggagcagacttgatctcaaatgaagctgtgcccaggagccaggcttagcatattgagatttttatagataccttaaaaaataaaatatttaaacctctcttttcttcctttttctatgaaataggttttttctctagtttacaaatgacatgaaaataggttttatttgtgttttatctgctttattttttgatgcttagacaacagttagacttactgagctcctaaaaaaacgaggaagaagtccttatttgtgaaaagcactttatgagtaattgtatagacagtatgtggctgcgtcactgatcatcttgtaagggtgtaacagtcttgtctgtaaagtggctgcagtgccttctgtagtgtgttttatttttggtagggagaggtgaagccttctgaaaaatttgagagcaactacagaggattgtttgtaactgtgtagtattcctgatggacttttttcatcgttagagtcaaggacctagacttttgccactgaaataatattgaccaaaaaaatagtttataaaagggatttgtgaatagaaaattcagtgtgatcatttg

SEQ ID NO: 8220 - DNA, 421 bp, Homo sapiens
ccatatgtaggttcctttgaaacaatagtgctcactagggaccccagagggaagctcaggttaaggtccaggtatgaatgggtggatatacgtaaaggccaaaacagcacagcataaagcagagattctcaatgctggctgtagactggcataactggggagcttccccagaaattctaacttaattctgtctccaatgggcactgggcattggtgttgcttagtactcccaggtaattctaacctgcagccagtgttgggaagcactgatgtagaggctaagagcttggggcggggcgtggtggctcacacctgtaatcccagcactttgggaggcataggccgcgactcccctagcggtcaggcattagagcctgactggcacaaacgatcgagacaaccgcatctctcaaaacacaac

SEQ ID NO: 8221 - DNA, 590 bp, Homo sapiens
ccatatgtaggttcctttgaaacaatagtgctcactagggaccccagagggaagctcaggttaaggtccaggtatgaatgggtggatatacgtaaaggccaaaacagcacagcataaagcagagattctcaatgctggctgtagactggcataactggggagcttccccagaaattctaacttaattctgtctccaatgggcactgggcattggtgttgcttagtactcccaggtaattctaacctgcagccagtgttgggaagcactgatgtagaggctaagagcttggggcggggcgtggtggctcacacctgtaatcccagcactttgggaggcataggcaggtggatcacctgaggtcaggagttcgaggccagcctggccaacgtggtgaaacgctgtctctactaaaaaaaaaaaaaaaaatacaaaagttagctgggcgtggtggcaggtgcctgcagtcgccgctactcgagaggctgaggcaagagaatcccttgaacccgggaggcggagattgcagtgagtcgagatcgcgtcattgcactccagcctgagcgacagagtgagacttcatctcaaaaaa

SEQ ID NO: 8222 - DNA, 418 bp, Homo sapiens
aatatgattgatgatcagttgagcttgaccagagtccttgtatgtaatggagaaaagatttattgaaaaacaactcagaaagcactttattgatttccctagattattagttggtattaattattcaaaactcactgaacttcccggcaaatgtctcaatcacttaaccgaaaatttgtgcattctaataaacgtgataaataaagctattatagataggtgcttgaatttgttgaccatgcatttgttagaatatctatgattgctaattaagttagaactgtatagattatgatttgttgcaaatgtgatgtatctttggttgtatattttcagactaattacatcaaacaacatttaactgttttgccccagattattttataattaaatattccaatttctgttaaaaaaaaaa

SEQ ID NO: 8223 - DNA, 367 bp, Homo sapiens
gaacatatgttaatttgataaaaataaagataagtttaaaaacaaatatatcaagtaaaaatattccttagtcagtgccttaggtgagaggaatacaaagatgaataaagaccatctccaacttaaaaatattacagtctaatacaacataggacatagccaggaagatttttttaattgctttttaattgcttgttagtgtttatctctttccaggaaaatagaaaggagttctgactaactgaattttcttttattccaaagtatttttattttaatttgtgtgggtacatagtaggtgtatatatttataggggtacattagatgttttgatacaggcatgtaatgtgtaataatcacatcatg

SEQ ID NO: 8224 - DNA, 389 bp, Homo sapiens
ttttttttttgcaaataatactttactgaaaaattacctagagtaaaatgcataaagcttaagtgtatagctcagtgaatttttacaactaaagtagtccccccttattcttgcggatacgttccaagatccctagtggatgcctgaaaccttgaatagtaccgaactctgcaggggccctcaatccctgggctgccaatcagtacaggtctgtggcctggtaggagggaggccgcagagcaagaagtgagcatccagcaagctttacctcctgagctccactccctgtccggtcagctgtggcattcaattttcataggcgtgcgaaccctattgtgaactgtgcatgggaaggatctaggttgggtgctccttatgagaatctagct

SEQ ID NO: 8225 - DNA, 423 bp, Homo sapiens
atctccgcctcacaggttcaagtgattctcctgcctcagcctcccaagtagctgggattacaggcatgcgccaacctgctcggctaattttgtatttttagtagagatggggtttctccatgttggtcaggctggcctcaaactcccgacttcaagtgatccaacctcctcggcctcccgaagtgttgggattacaggcgtgagtcactgcgcccggcctgagtttgtatagttctttatgtattttggatacaagtcctttatcagatgtgatttgcaaataccttctcactgtttgtggcttgtcttttcgttgcctcaacagtgtcctccaaagagcagagattcttaattttgagaaagttcaattcgtcattttttccctttttttcttttttaattttttttttcagtcaggatctc

SEQ ID NO: 8226 - DNA, 725 bp, Homo sapiens
ctttttgaacagcgaaagagagacttttaatgacagtcttgcaagatcaggtgtctggagtgcaggtacacctgggacagtttcaacaaactatttcttccctagtgtgcaagtccctcccccaattcctcattagctgagtactacggggttatagtcttcctgggcatcgcctattggtagttgtattaagacttcaagtatgttctttagggtctttttgctgcattttttgctgcattttgttgcagccacccataatacatggcgactgtctcaagactctgagcatttgacttatggccctagtgactgcacttaggtgatggcaagctagcccaaactaaattctttgatgaggtggggaggggggtcattgagggggccctgaccagtaggctcctggacactgggtcaaagggaaagcaggaaggaggggattgtggcttagtatattttgcttctttatctctttgtttccatgtggcctgcttaaacatattctaaggcacttatgaaaatgaaccttcttcacatgtaggttattttttacacttacctcctctttttctttttaccctttttggtcttattttcacttacatatctttgtttattaactgttctggaagttttttactttcttcattataggaggagaagtttagtttggcttttaataatagtaagtcattctgttgggacattaggggcatttgtttact

SEQ ID NO: 8227 - DNA, 475 bp, Homo sapiens
aactggttggggatacagtgaaaccatatcacatctaaaccagaaatatcacctatgtaaatttcaaatagctaaattaatttctgaacagatttttggtcagatactaccaattcctttgttaatgaagaaacctcttcccatggggtgccaaagtaaaaagacagaatgcataattgccaaaaaatgtaatgattaggagtgatttctctgactatttaaattttatttgcaagatatcattagtctgtgcttatttccatctagcagggtatatggatagactataacccaacatatgtcaaataattttggtgggtagctcatttgaactaatatggaaactcctcgaagacaaaaatgtaataatacattagcaatgtaatgctatcataaattagaaatgaaaaatgttgttctatttttggggtattaatttttcctactgaacatgtacattcattcagaactgtag

SEQ ID NO: 8228 - DNA, 933 bp, Homo sapiens
gacttccacagactggtcttctaatgtgaacctgctgccaacctgaccccttccctccaggagccaggtagggcctgagggaagctgtggaggcaggccctaccaagaggaaggatggtacagctcatggcaccttagtcctcagcctgatgaagggtacacagagattctctcagatatggaagtaagacctaagtccctttcattggggatcagtcccattaaaactttacacccaagtgtcctggttaacttgaagcagccgagatgggcacacacgggtctttgcctccccctccttccctagcaggctccccatgcgggaagatctgatgatgttcaggaaacaggctagacctcagctccaatgttttgacatcaagtactattttccttccgactgctgtacggtataaagcacagcaggatccaagccttgcacaaaggggtggggggggcagtgtctcctctggctgtcctgtttgtttgtttctcatatgggggtggggggtacctgcactgtctgtacctttctgagaagaacagagaccgagacctgcccccttaccaagcgccactgcatggtttgggtgggggggggggcggggggctagcttctcacagcaggaggcctttgcccccacagcccctccacgcctgcctcagggcctgagaagccaccacttgcatcccccttgtggttagagtcctgattttactgcaaaggtgttcatgttccttgtgaagtgtgggctcttaggaagcctgtgggctcctctgagcagttggcctttgtagctgcaacagcagccacctgcaggttgggtgaagtgccctgacactgctgtagcccccttctaacttctaaccgaagacaagacagacacccatgttcttaaataaataaaagtaagcctaagcaagagattgttc

SEQ ID NO: 8229 - DNA, 366 bp, Homo sapiens
tgccaccacgcctggttaatttttgtattttcagtagagatggggtttcgccatgttggccaggctgatctcgaactcctgacctcaggtgatccacccgcgtcagcctcccaaagtgctggaattacaggtgtgagccactgcttccagcccaaaatatcttaagtagataattgcacgactaatctctgcttttctctcccagcagccttccaaattcatgtctcacagctgacagagttgttcctgccttcagattcatgacctggctctgtgttccagctcaggctttctctctcatatcacctcttgcctctctgttgcccccatattttcccctctggttggttggtgctcctttggaac

SEQ ID NO: 8230 - DNA, 987 bp, Homo sapiens
cttaggctcgaggaaaatctctgtggatggaacaatattcctgctttcacagagtgtacagaccttgataggagccagtgtttctctggtaatcccaatgaaaaaggatgacagtgacacaaattgggaccttcatgagaactggacatttggtctccttgaatgtgctcctttgtgcagaaaaaaccgagattgtgtcacagcactccagcctggacaacagagtaagactccatctcaaaaaacaaactataaactaatttcctcccaaagttagttcagcctacacccaggagtgaacaaggacagcttggaagttagagtaaagatggagttggttaggtcagatctctttcactgcctcagttacattttgcaatggtggtttgctctcatgagctaggccaaggctagacttcaccagatgctgcatccgtgttcaacactttgccctccctaatctttgtttcaaagagtgctccctcagttaatcacatgcttctaaatccttgtcttaggttctgcttctagggaacctgacccttacgtatgtacatatgcatgaacatgcatacatacatgtacatatgtatgtacttacaatgactttttaattttcagctggaagtgatgtttattggatcagtagtgatgcaggggatggcagagggagaaaaactatgatgcagggaccatggcagcctcaacaggcccctaaagctgctctggagctaagaaggccgggcctttatgttcttacattgatcagtcattaggtacaggcctcctgggaaggggcatgaccttgggtgaggctgcttttggatgtggaggtgacccctgaagagactgacagccagatgccttctgctgactgtactaccagtaactgagctaacaagcccttcatggaaaggtattttgggccacattttaccatacatctcagagagaacaggaaaggtggcatctctgccatgctacatc

SEQ ID NO: 8231 - DNA, 459 bp, Homo sapiens
aaatgggaacaataatactgcctatttcagtgggttgctgtggccatttaatatggtaataaacaagtgcccaatacgtgttagctattgtcgccatctgactgaggagttgactgtgatttgtcaaaaattgtgtctcaggctattaaaactagacagcactgttaactgtctaatggtgtgatatttccaaagagggctggatgagaaaagggttagtgttcttaaaggccacattaggtaagagacagatatgggaatgctgttattctcagcactcagggctatggatttatagtcttcaggaagaaaccacattaactaggttgtgcattgtcagcgaaagtactgataaagtactgaaagttgacaaggaggacagtatgaatttctcttaaaggctgatctacatgagaaaagtaaacacttgctgctgtagtgggtactcggtgaaaaaat

SEQ ID NO: 8232 - DNA, 531 bp, Homo sapiens
tctggaagccactggctgccccaaggcccccgataggttcccaaggcagctggccccctcagggctggtgtcacggagccgccgtccttccctgatccaggacttggcatctggccacacttttatgactcatctttacccatctgtggccacagactcaggagctggcttccccagagccaccagggaacacgagccccagcggtgcccagagcgcataatatgtactcactcgatcccactttacaaggagcagagcacttcaactttagcaaggccgggacccaccccaggcctttgggcagcgctcccctgggtctgggctgtggcagcatcacactgctcatgacaacagcattctgccctctctcaaccagcgattcctgggctccctctgctccaccaaatgactccccagtcacccctcaggagctgctggcactgtcaggtctgtcttctgttccatgctcttctgtcaataaactccccgcatggagacctctgtgccacaggatgtggcaggtttatgac

SEQ ID NO: 8233 - DNA, 317 bp, Homo sapiens
agcttcggtgtggcttttctgcggccagcttctttgaggcctttttctttcatggatggtagagagcagtctacagcctgagacccatcacaaggttccttgtgagacacctgggggactccaaacagccggaatccatctgcccactggtccggagacagggatcctccgcctccttccagggttgatggctcaggaggccttctctgcaggggaccaggacacaggaaagccaggaagagatgagctgggaagggagctgttgggggccattctggttttaaaaataaagcaggactttcgttgcttgttataaa

SEQ ID NO: 8234 - DNA, 321 bp, Homo sapiens
actttatatatcctttgttgaaacttttgtgtagaatcctggaataaatcattagtcttatgcaaaactgtgtctacttcttaaaacttgaattgaggaaggaaatgctttgtaccaagatggcaaatattttattataagaacatttctgtttcttcctctcatactactatgttcattgtactgtatcttcctctgagagggtttaaactctttagagaactgccttaatttttgtatgtattggagcaacataatcagtgtttgcaatgttttgataaaagtaaattcttaataataaaattgttataatctcccata

SEQ ID NO: 8235 - DNA, 1333 bp, Homo sapiens
gaaactgactgacgttaagtccttagtaaatatttgctattactttagtcccagctttattgttcattagctgttggggcatggggatgaacctctctgagccctatttccctcatctataaaatgaacatactagctgggcatggtggctcgcgcctgtaattccagcactttgggaatgtgaggcaggaagatcccttaagcccaggagttcgaggctgcagtgagctatgattgtgccagtgcactccagcctggatgacaaagtgagagctgtctctaaaataaataaagtaaataaatgaataaaataaaatgaaccaatgaatttccaccccctggaaatataataagcttcaaatgagataaaatatgaagagtttagtgtggcgcctggttgtcaatggatgctcgacaaatgttaatttctcctccttttcttactgccttccttcctgctttcctccttttttctaataggatggaaagcacctctgatagctcattgaattcatctctcctccagtttgcttgtttcatggaagatttaaagttgttttctgtgacgtcactggcatgaggctgtgaaacctaccagtgagataagttaagcttcctaagggttacctctgtcatctgcatgatgcagaaagactgtgagcctgggatgtgtgtagtgatgacaggcaaagagagttttaaaagttgtcttaatttttacaggcttctggaggatctgttgctgattgcactggtgagttttgggttttttttccatctccccattcctgactgtctcccctatggttcacccaatgtctatgagttattttagcttccagtaatatttccatttcagtcaaaacaacaatgaaataagcctggcaaagaaaaatctatatgatagctggttttacaaaggaaggcataattacaaaatactatagttgcttttggtttctgtggggtcaacaacacctaaccaagagttttatcaataaaaacaacctttgaaaaaatgagtgattattgattatgactataaagtatagatcttttgaagtatctgcattcattcagcctccagatggatgagtttttacttgtctgtaatccatccatccatcctttcattcattttatttattcgatgaatatttttaagtgctttgtgccaggtactgtgacacgttcaggggatgaaatggcaaaaaaagaactgtatttgtcctcatagggtgtacggtctacctagtgtacacatcacatgcttgtcatcatttaaacacactccaagactcatcaaatgtcctgaaatgcatcagaaaaagaa

SEQ ID NO: 8236 - DNA, 774 bp, Homo sapiens
gaatttcacattagcagagtcagaatataaaaatgtaactttacctctctatacatgatcataacttcactctctagccattgtttttcactaaaggcagtgaagagtctttggggatgagggttctggccccgtcactgatgctttcattggccatgaaggctttgctggttgttggtgccatccatttctctgtgttcccttttctctttatgttagtcccactgggccccctccgttctgactgtgagagttctccaggcttgcaggcttgtgctcagctgtttcagtgcctctctggagcatgcaccttgggaagtgctatgtgggtctcagaccaccctcctggtgcaggggcctgcttagggctgagcctctttaggaggactgcactctgggaagaaccaatgatgtgtctgggatttctgttagctagatctctcataaattccaagtcttagtttgggatggaaagaggtagaggatctggacttttcagagacttagtagcatctttaaaagaaaaatacttagttcttccagtggaaagctgtgggttccaagagatatctgctgtgcatttatgggcctattttagagcagaataccaaaatattcaccataattttaaaaataaatattaaataattaaaaaattggtacagcctgccaggagctcagtgtgcaatggtgacatccagcctgtgaggccacctggtgcggcttgggaacccgcagaagcctgcactgaagcccagcaaacccctcatccta

SEQ ID NO: 8237 - DNA, 420 bp, Homo sapiens
gaatgctatttgtccattgttattctggaactgaaaccccaaattatagtcacactatactatgacttgtagtcccatttcataggttgcatgatgaactaatggaaaggctggaaaacatcatggagaaagtcagcaacacagccatgtcttggatgctgggtgtgtactatgtgtatcatagcaacaagcaaaagggcagagatgacacttttaaggtttgtcacccaaaaggttttaaagagcaactcacaacggaattgaagtgaactacaaggtgtttgaagtcaactgcctttggcaattagttttaattacatattgtttcccctttttgctaacattattcctgggtctttttaatctatgggatggggggtttctggggatagccagcctttgactttatcttctcttatt

SEQ ID NO: 8238 - DNA, 355 bp, Homo sapiens
tttctaagtagccagggtatccagatggcgtcatggcttccaacccaccctgctttccttttctttttctaattaattattaatagaatcaagaaaggacaatacaatcaatgaaaaaggataggcccttcccttttccaaagccagtttgggagccatgacagagcagcttggccatggcctccctagcgcaggggatcatctgacgagaggagagagccggccagtgagtcactgtcaacaatgataaatcagaggccggctgcaatggctcacgcctgccatcccagcacttttgagaggatcacctgaccccaggagttggagaccagcctgggcagcatggcaaaacccc

SEQ ID NO: 8239 - DNA, 353 bp, Homo sapiens
tgagatataggaaaaacccaagtgtctgtgttcccccactctcacacccatgtaacataacacttctcacaccagatgtggggggatttctcctcataccccaagtgagtctccagcagataccagctgggtgtcctacaatgtaactcagtcctgacactctatctggagacagtgtcagatcccacaagttaaggttcagtcccacaagaccgccccactgcagatgccaatcccaagttccaggctgtgacctgtactggacaaattctgtttttctacatgaccctccgtggatttgattactttcctggagtggctcacagaactcaggggaacacgttacttttatt

SEQ ID NO: 8240 - DNA, 660 bp, Homo sapiens
  misc_feature (369)..(369): n is a, c, g, or t
ttcttttccagtttcctccatgcatctgtggacaccaaggcagctctgcctctgagtattggcggaccatcggccatgtcacgtggggagcagctgagcctcacgtctttcatgatttagcagcctagcctgggttcatcacatgttggctcaacttggttgcaagagagaatggaagcaacgccccttgaggcctaaattcaagctgacacaactcacttctactccagtctatttcaaaagcaactcgagaagccagctcagattcaaggggtggagaaatagaccccacttttttaatgggaggaacttgcaacgttacattagaaaatgggcatgggattcaggggagggatgggagaatccatnggcctttttccacaatttataatatacacctcgtaccttatgtaacttgtctaacttaattctcacaatagcactgaaggttaaggcaaaattcctattttacaggtgaagaaactgagaaccagacatgttagtctggattaggcaggacagatggtgagtgatgaatccaacactgggacttgggtgtgtctgactccaaagcctgtgctcagtaccacgacggagctctgcctccctacataatgctgcagtgaagggtggtggtattactaagtattatacggctca

SEQ ID NO: 8241 - DNA, 373 bp, Homo sapiens
tttacaacctttgcatgtgcttcaagtttttcatgtttaagatacaaatataacctcaagcaatttgttttcatcttgtagtcataaaacatgtgcaggacacagaaatcctttagctcttaaaggacacactattaaacataacttatttatctgaatatcaactatgtttacatgttgataaagagtatagttctgaaccaaataattaaattgtgccattcatatcacttagctgattcttattttaaataattcaagttatattcatatctaccttgtagattataagagctacattatatatttctaagcaattttaaattaattttgcaaagtagttttcagtataggtcatatacatttagtgtcc

SEQ ID NO: 8242 - DNA, 415 bp, Homo sapiens
tttattcagaatggggactatgttgctcatgttctctaaagacaattttgactattaagttgatgtatgacaaatttgtttttaaaataattctgcaacttaatgtgatttatatagattgacttgaaagatgtaggatttcattctttcattaatttgttcatgcacgtaactaatatttaatgaacatgtatcgcggcctagggatttttttttccatctcctgggatatagtggtaaaccagacaagcaaaaaccatgccctcttggagcctatgttgttgtgattcttttccttttgtctcattagcagtttgtgtattgaacttgctgcagagctggggaggctgtgcaggcattactgactccagcattgcttctttgctagggactatgttgtttgcagcctgatccg

SEQ ID NO: 8243 - DNA, 445 bp, Homo sapiens
gagcaccctgcaacctgtttttagaaagaggaggctgcaggcgggcgcggtggctcacattttttctcattataaagcatatatactcaatatatataatttaatacattctgagtctttccatgttaaaattcatctgcaacaccattttaagtgctgaatattatactgtaaggacgtaccataataataagcagcacttttattatgtgccacacgttttatctcactcaattctcacagcaaccccatgaggtaggcattattatcaccttcattttgcctcagaaaaactgagggctacagtgattaagcaacttgtccaaggggttatgcagtcattgctagaactggaattcaaatacacgtaacgaaggctctttcgattgacctattccctattgttagacattcaggctgttgccatattttttgctagctctta

SEQ ID NO: 8244 - DNA, 425 bp, Homo sapiens
aagtaagccctgatgactctcactggcctcctgctgcacctgtccttatatttgacctgttaggttggttactttaaaaagccagttacggggaggctcatttaaaaagacataacacctgtgaaagattattttaacgtggaatatatgactggacaattatttgccaatctgatgaagtagggccacaggttttgttttcattattctgtatctactgatcagcatatccacttgcttgcacaggctacacctataatgtccacaacttccagttgcctcttatgtaacaatagaacaagaacataaagatacagaggaaagctgagagcaattctaaatgtctatggttttttctttatctcttgttgttatacatccatatctgattcaacaataaaacatgtaacattgcttatccagta

SEQ ID NO: 8245 - DNA, 756 bp, Homo sapiens
cttaaagttgaaaggtaacgggattggctgccaactccagcttcagagggggaacgtgggccagtagaaggcagggaaggtgtaggggagccggtgcgttcatccaccttttgccaaggttgaggtttccaagtgcagacggcttctctccttgggctgagcggtgcgcaccgtccgtctccgcggactggagtctgccctgatgccccactggccagtcggcgctgactgttgcatggagcccccgagggtgctccacagcgcggccttacacccagggggcgacccctggcccctgagccgcgatccatgtagcactcctccccgcccctccaccccagccaccgcctctgttcacaccgcacccctgccgggcggccggcccctactcccgcggctctgaccgccgttctgtaaataactggtgtgcacctgcgtactaatctcacgactgttaacttccaactttgacgaggccatgcgagcgacacgcgcgactggggaaggtgcaatactgtcctgggcatatgcactttggtttatcagggatattttattagtgttttgtatgtatttaatgacgtattctataggttccattgtctttgcttttctggttttttttatgagacgttagcgtgtgccaaagtgactgtgaaaatgacctttcattcttactaatgatggaaagacctcctgtcatgcatcccacaaataaactcaataaaagttccatgaaactgggaaaatgggttt

SEQ ID NO: 8246 - DNA, 343 bp, Homo sapiens
aggtcttactatgtttcccaggctgggctcacactcctggactcaagcaatcctcccaccccatcctctcaaagtgctgggattataggcgtgagccaacacacccagcttgtatttgttgttgtctgtacaaatcttctactcatttttaagttggattgtttgttgctatgttgttgagttttatagttttgttttttttttttgacggagtttcgctcttgttgcccaggctggagtgcaatggcgtgatctcagctcaccacaatctccgcctcacaggttcaagtgattctcctgcctcagcctcccaagtagctgggattacaggcatgcgccaacc

SEQ ID NO: 8247 - DNA, 3454 bp, Homo sapiens
cgcagtcttctcccatcaggatcaaagctaactgaaggagtatccagttgctggtttctaacagctgaaggcaatgaatggctacttcaaggacagatagcagctggagatatagagaacatttccagtcaaccaacaatttcactacaaattcctgatgattgcttatcacttgaagccattgtatctgtcagtgtgtttctttattactgtagtgcagacagcagtgcttgtatgatgaaggcaattttgttcagtcagcctttacaaataacggatacacagcaaggttgcatagctccagtagagctcaggtatgtattttagccagccagctagctagcaacccattgccaccacctactgtctcccatcctgactatcactgtaatttaaggaaagaaaacttcagttctgcctctggataccaagatgcccattgctcagttcagacaactgatattaaaataaagctatgctccttacttacttcttttattataaacaaattcctttgctttggctgatactagctgagtcattgatcatcattggtaccatgatattgtaatctatgctgctatttggcacaagactgaagttcacactacagtagagaatactataagataatttgcaataaatactgataataataataccagatattttaactaactttttctacctttattaatagcaatcagcacacttgaatgtgtaaatttcacagtaactttaggcagaacttaagctccaggccacatttgtataagaacaccaagtattcaaggcataaagtctgttgtaagccaaaaaaaagtcttttcatcactgtagaagcttaaggagtacatcagtggtaaatacgatctttattctcttctgtggttttctcagttgagatatttttaaaagagagttttgatctatttttattataaattatttgttatttaacataccattatgaatgccttaaaactttgtacagataaagttggacatagaatctctaaggactgactcctttaactgtttttgagtgactacattaccagataatgaatgagtccccagaaatattatgactttcaaggaaaaagggactttaggacacattacttagtgtctgtgataaataatttattgtgacagctaaatctgatggttacatatcttgttttggaaatgtacatttcacttgtaagcattaaatgcagatttgttgagtttaggttttgaggttttttttcgttcccatattcagaatttaaattatgatcatttattgtgatgtttttaaaaatcacttttaagccttaaaagtgaaattttcagtgtgaggtgctttcatgctattaatagatacagtatatcctaatatattagtcttcaaaatattaaggccgaaacagtgatttaatgatactattttttaatttttgttgttttttatccctaaaaaaagatattggaaaggttttttttctattgtcataatttataactacttaaaagcctaatcttgttttccttaagacctattcaacatgtttgtgatttaatcagcttacaagggtttaaaaacatcaggtgaaccatgtttatttattcagtaaatatttatagacaatatggcataatatgcttcccttccctgtaaaaacagtgctaaatttgaagtgtaatcttttttaaacatcattgtctatttttaattttgtttgaaatgtagtattagtttgttttattcataaggttagctgaatctctgaagtaaggatgtataaatcatgacattgatttaattagtcatctactgaagctacttttaaagagaaatatagatataaaattaaaaggaatcctgtttaaaattatatgtaattacctcataaaccttttctctccacaagcaatcaaaaaaatgaaatgttctgtaataaaagggtgtataacatactctcttttatgagaataggccttagttattttattttatttttgagacgtagtctggctctgtagcccaggctgggagggcagtggcgcgatcttggctcactgcaacctctacctcctgggttcaagagattttcctgcctcagcctcccaagtagctgggattacaggcgtacaccaccatgcccagctaatttttttgtgtttttagtagagacagggtttcaccatgtcagtcaggctggtcccaaactcctggcctcaggtgatccgcctgcctctgtctcccaaagtgctgggattacaggtgtgagccaccttgccctactggccttagttaatttttaatctcatttgacttattatgtttctcatttctagatggacaggatgagaatattttggcccaatcattttctgtttaaggacttaaacaatttcacactctaaatgaagtatatacaattttaatttactaatttagaaatatctgagtttatttttcaatataatatacaaacacagtgtttgttatacatgttcatgtacagtgaaaatgcaaaggcattttttagactctattccccttcatttgtctagacagttttaggttagccttagcttatacttttcttgactttcaaaatacagttttattgaacattcttattcttacccactgccagtctgcattgttttttacattaaaagtattatttatagtagactaatatgattttgaataaaatcacacttaagcaatatagataggttcctagaatttatgacgaggataaacctctcacataagaggaagcactagaaagtttatttttaaaacttgttgatccatattctataaggactaatgcatattttttatcttttgcttttcttgttggataaattattatgtccagtgatagtttaaaaagaacaagattttagtgtaagtcacctcacttgaaatgccagtaatgtggtattacacacattttatataatacctggaatctttgccctaaattattctgctggtttgtcgctatttttttcctctcctctttattatttcacaaatggtagaatttcttgatatgattcttgtaaagagtttagcttatcttgaacattctgtcttaagcaaatatttaacaagagaaaactttgtagtttaatcacccataagtgtaactttagcaaaattcaatgactatgaaaaataatttttttcttaactgttctaataatatttagttataatattatcaaaccttcagaaagttataaatcctaacagccagaaaaaaaaatttactatgtgtatatttatataggtgtgtgtatacacaaagattaagaattattcatgaatcttttatggccaatatacttttgagcttgtataactgagataagttactctttgcttgtttttctgtagttggaaaatttaggaagttattaaaaatacatatctctataatgt

SEQ ID NO: 8248 - DNA, 2162 bp, Homo sapiens
cgcagtcttctcccatcaggatcaaagctaactgaaggagtatccagttgctggtttctaacagctgaaggcaatgaatggctacttcaaggacagatagcagctggagatatagagaacatttccagtcaaccaacaatttcactacaaattcctgatgattgcttatcacttgaagccattgtatctgtcagtgtgtttctttattactgtagtgcagacagcagtgcttgtatgatgaaggcaattttgttcagtcagcctttacaaataacggatacacagcaaggttgcatagctccagtagagctcaggtatgtattttagccagccagctagctagcaacccattgccaccacctactgtctcccatcctgactatcactgtaatttaaggaaagaaaacttcagttctgcctctggataccaagatgcccattgctcagttcagacaactgatattaaaataaagctatgctccttacttacttcttttattataaacaaattcctttgctttggctgatactagctgagtcattgatcatcattggtaccatgatattgtaatctatgctgctatttggcacaagactgaagttcacactacagtagagaatactataagataatttgcaataaatactgataataataataccagatattttaactaactttttctacctttattaatagcaatcagcacacttgaatgtgtaaatttcacagtaactttaggcagaacttaagctccaggccacatttgtataagaacaccaagtattcaaggcataaagtctgttgtaagccaaaaaaaagtcttttcatcactgtagaagcttaaggagtacatcagtggtaaatacgatctttattctcttctgtggttttctcagttgagatatttttaaaagagagttttgatctatttttattataaattatttgttatttaacataccattatgaatgccttaaaactttgtacagataaagttggacatagaatctctaaggactgactcctttaactgtttttgagtgactacattaccagataatgaatgagtccccagaaatattatgactttcaaggaaaaagggactttaggacacattacttagtgtctgtgataaataatttattgtgacagctaaatctgatggttacatatcttgttttggaaatgtacatttcacttgtaagcattaaatgcagatttgttgagtttaggttttgaggttttttttcgttcccatattcagaatttaaattatgatcatttattgtgatgtttttaaaaatcacttttaagccttaaaagtgaaattttcagtgtgaggtgctttcatgctattaatagatacagtatatcctaatatattagtcttcaaaatattaaggccgaaacagtgatttaatgatactattttttaatttttgttgttttttatccctaaaaaaagatattggaaaggttttttttctattgtcataatttataactacttaaaagcctaatcttgttttccttaagacctattcaacatgtttgtgatttaatcagcttacaagggtttaaaaacatcaggtgaaccatgtttatttattcagtaaatatttatagacaatatggcataatatgcttcccttccctgtaaaaacagtgctaaatttgaagtgtaatcttttttaaacatcattgtctatttttaattttgtttgaaatgtagtattagtttgttttattcataaggttagctgaatctctgaagtaaggatgtataaatcatgacattgatttaattagtcatctactgaagctacttttaaagagaaatatagatataaaattaaaaggaatcctgtttaaaattatatgtaattacctcataaaccttttctctccacaagcaatcaaaaaaatgaaatgttctgtaataaaagggtgtataacatactctcttttatgagaataggccttagttattttattttatttttgagacgtagtctgaggcaggagaatggcgtgaacccgggaggcggagcttgcagtgagtcgagatggcgccactgcactccagcctgggcgacagagcgagactctgtctcaaaataaaataaaataaaataaaaaataaaacaaataaagac

SEQ ID NO: 8249 - DNA, 797 bp, Homo sapiens
cgagaaggggaagaattttatttatctgccactaatccccatgtgtctcatacccaaatctaggattttcctcttcccacctggagtatccggcgtgcatggtttatccacaattaaagcagactgcaggctgctcccctcaccagaaagccgctcccttaagcagccatagattacatgccctggctctgcctgccagagaaagccggtggatttgattttgttagcaagagctgactgagaccctagcagctgcattctactttacatattaaagagtggaaatacaaataggacagtccttttgccactgcaagagcagggggggttaggtgggtagaaaggcaggattttacttgtggaaatcagtgcctgccttccatccacaaaaaccagatgtcaatatggaggaggcacatgtcagcggcgcctgggaagcctgagttccagctttccctccccacaaccctgctctgtaactgtgggcagagcatgtctgctccaagagcctcagtttacacccctgaaaaatggagttaatgccttacagggattttatgagccacagtaagagattatgtgtgaaagaaaaataaaaagcattttgctattattcttagggtatctggccacatttccattatctctgactaaggtaccaaccaccgatttctgagttcagtaggagacagtgagacagaggccaaggaaccccaaccctgggcctaaaagtggtccagtcagtgtttgcaaactggcggacactcactagtgggtcatgcaattgattccatgga

SEQ ID NO: 8250 - DNA, 417 bp, Homo sapiens
gtgaaatattagttggaggatgaagcagatagtgaggaaagttgagccaataatgacgtgaagtccgtggaagcctgtggctacaaaaaatgttgagccgtagatgccgtcggaaatggtgaagggagcctcagtttacacccctgaaaaatggagttaatgccttacagggattttatgagccacagtaagagattatgtgtgaaagaaaaataaaaagcattttgctattattcttagggtatctggccacatttccattatctctgactaaggtaccaaccaccgatttctgagttcagtaggagacagtgagacagaggccaaggaaccccaaccctgggcctaaaagtggtccagtcagtgtttgcaaactggcggacactcactagtgggtcatgcaattgattccatgga

SEQ ID NO: 8251 - DNA, 1757 bp, Homo sapiens
  misc_feature (3)..(3): n is a, c, g, or t
  misc_feature (5)..(5): n is a, c, g, or t
  misc_feature (7)..(7): n is a, c, g, or t
  misc_feature (9)..(9): n is a, c, g, or t
ggnangngncctgggcgggccctgcgtcaggttgcagtttcacttttagctctgggcacctccagctcctgctcgccggacggctcccagggagagcagacgcgccagacgcgccaccctcggggcgccgacggtcacggagcatggggtcggcctttgagcgggtagtccggagagtggtccaggagctggaccatggtggggagttcatccctgtgaccagcctgcagagctccactggcttccagccctactgcctggtggttaggaagccctcaagctcatggttctggaaaccccgttataagtgtgtcaacctgtctatcaaggacatcctggagccggatgccgcggaaccagacgtgcagcgtggcaggagcttccacttctacgatgccatggatgggcagatacagggcagcgtggagctggcagccccaggacaggcaaagatcgcaggcggggccgcggtgtctgacagctccagcacctcaatgaatgtgtactcgctgagtgtggaccctaacacctggcagactctgctccatgagaggcacctgcggcagccagaacacaaagtcctgcagcagctgcgcagccgcggggacaacgtgtacgtggtgactgaggtgctgcagacacagaaggaggtggaagtcacgcgcacccacaagcgggagggctcgggccggttttccctgcccggagccacgtgcttgcagggtgagggccagggccatctgagccagaagaagacggtcaccatcccctcaggcagcaccctcgcattccgggtggcccagctggttattgactctgacttggacgtccttctcttcccggataagaagcagaggaccttccagccacccgcgacaggccacaagcgttccacgagcgaaggcgcctggccacagctgccctctggcctctccatgatgaggtgcctccacaacttcctgacagatggggtccctgcggagggggcgttcactgaagacttccagggcctacgggcagaggtggagaccatctccaaggaactggagcttttggacagagagctgtgccagctgctgctggagggcctggagggggtgctgcgggaccagctggccctgcgagccttggagggaggcgctggagcagggccagagccttgggccggtggagcccctggacggtccagcaggtgctgtcctggagtgcctggtgttgtcctccggaatgctggtgccggaactcgctatccctgttgtctacctgctgggggcactgaccatgctgagtgaaacgcagcacaagctgctggcggaggcgctggagtcgcagaccctgttggggccgctcgagctggtgggcagcctcttggagcagagtgccccgtggcaggagcgcagcaccatgtccctgccccccgggctcctggggaacagctggggcgaaggagcaccggcctgggtcttgctggacgagtgtggcctagagctgggggaggacactccccacgtgtgctgggagccgcaggcccagggccgcatgtgtgcactctacgcctccctggcactgctatcaggactgagccaggagccccactagcctgtgcccgggcatggcctggcagctctccagcagggcagagtgtttgcccaccagctgctagccctaggaaggccaggagcccagtagccatgtggccagtctaccatggggcccaggagttggggaaacacaataaaggtggcatacgaaggaaa

SEQ ID NO: 8252 - DNA, 840 bp, Homo sapiens
  misc_feature (806)..(806): n is a, c, g, or t
tatgcaggctggtactggtctggggtgtagggatctcgccggacggctcccagggagagcagacgcgccagacgcgccaccctcggggcgccgacggtcacggagcatggggtcggcctttgagcgggtagtccggagagtggtccaggagctggaccatggtggggagttcatccctgtgaccagcctgcagagctccactggcttccagccctactgcctggtggttaggaagccctcaagctcatggttctggaaaccccgttataagtgtgtcaacctgtctatcaaggacatcctggagccggatgccgcggaaccagacgtgcagcgtggcaggagcttccacttctacgatgccatggatgggcagatacagggcagcgtggagctggcagccccaggacaggcaaagatcgcaggcggggccgcggtgtctgacagctccagcacctcaatgaatgtgtactcgctgagtgtggaccctaacacctggcagactctgctccatgagaggcacctgcggcagccagaacacaaagtcctgcagcagctgcgcagccgcggggacaacgtgtacgtggtgactgaggtgctgcagacacagaaggaggtggaagtcacgcgcacccacaagcgggagggctcgggccggttttccctgcccggagccacgtgcttgcagggtgagggccagggccatctgagccagaagaagacggtcaccatcccctcaggcagcaccctcgcattccgggtggcccagctggttattgactctgacttggacgtccttctctccgaanagaggctccccccggagccactccaaagccgcca

SEQ ID NO: 8253 - DNA, 474 bp, Homo sapiens
  misc_feature (3)..(3): n is a, c, g, or t
  misc_feature (5)..(5): n is a, c, g, or t
  misc_feature (7)..(7): n is a, c, g, or t
  misc_feature (9)..(9): n is a, c, g, or t
ggnangngncctgggcgggccctgcgtcaggttgcagtttcacttttagctctgggcacctccagctcctgctcgccggacggctcccagggagagcagacgcgccagacgcgccaccctcggggcgccgacggtcacggagcatggggtcggcctttgagcgggtagtccggagagtggtccaggagctggaccatggtggggagttcatccctgtgaccagcctgcagagctccactggcttccagccctactgcctggtggttaggaagccctcaagctcatggttctggaaaccccgttataagtgtgtcaacctgtctctatcaggactgagccaggagccccactagcctgtgcccgggcatggcctggcagctctccagcagggccctcttggagcagagtgccccgtggcaggagcgcagcaccatgtccctgccccccgggctcctggggaacagctggggcgaa

SEQ ID NO: 8254 - DNA, 295 bp, Homo sapiens
  misc_feature (35)..(35): n is a, c, g, or t
tggaacgagggcagctggggcgaaggaagcaccgngcctgggtcttgctggagtcgcagaccctgttgtgggccgctcgagctggtgggcagcctcttggagcagagtgccccgtggcaggagcgcagcaccatgtccctgtgcccgggcatggcctggcagctctccagcagggcagagtgtttgcccaccagctgctagccctaggaaggccaggagcccagtagccatgtggccagtctaccatggggcccaggagttggggaaacacaataaaggtggcatacgaaggaaa

SEQ ID NO: 8255 - DNA, 1838 bp, Homo sapiens
  misc_feature (3)..(3): n is a, c, g, or t
  misc_feature (5)..(5): n is a, c, g, or t
  misc_feature (7)..(7): n is a, c, g, or t
  misc_feature (9)..(9): n is a, c, g, or t
ggnangngncctgggcgggccctgcgtcaggttgcagtttcacttttagctctgggcacctccagctcctgctcgccggacggctcccagggagagcagacgcgccagacgcgccaccctcggggcgccgacggtcacggagcatggggtcggcctttgagcgggtagtccggagagtggtccaggagctggaccatggtggggagttcatccctgtgaccagcctgcagagctccactggcttccagccctactgcctggtggttaggaagccctcaagctcatggttctggaaaccccgttataagtgtgtcaacctgtctatcaaggacatcctggagccggatgccgcggaaccagacgtgcagcgtggcaggagcttccacttctacgatgccatggatgggcagatacagggcagcgtggagctggcagccccaggacaggcaaagatcgcaggcggggccgcggtgtctgacagctccagcacctcaatgaatgtgtactcgctgagtgtggaccctaacacctggcagactctgctccatgagaggcacctgcggcagccagaacacaaagtcctgcagcagctgcgcagccgcggggacaacgtgtacgtggtgactgaggtgctgcagacacagaaggaggtggaagtcacgcgcacccacaagcgggagggctcgggccggttttccctgcccggagccacgtgcttgcagggtgagggccagggccatctgagccagaagaagacggtcaccatcccctcaggcagcaccctcgcattccgggtggcccagctggttattgactctgacttggacgtccttctcttcccggataagaagcagaggaccttccagccacccgcgacaggccacaagcgttccacgagcgaaggcgcctggccacagctgccctctggcctctccatgatgaggtgcctccacaacttcctgacagatggggtccctgcggagggggcgttcactgaagacttccagggcctacgggcagaggtggagaccatctccaaggaactggagcttttggacagagagctgtgccagctgctgctggagggcctggagggggtgctgcgggaccagctggccctgcgagccttggagggaggcgctggagcagggccagagccttgggccggtggagcccctggacggtccagcaggtgctgtcctggagtgcctggtgttgtcctccggaatgctggtgccggaactcgctatccctgttgtctacctgctgggggcactgaccatgctgagtgaaacgcagcacaagctgctggcggaggcgctggagtcgcagaccctgttggggccgctcgagctggtgggcagcctcttggagcagagtgccccgtggcaggagcgcagcaccatgtccctgccccccgggctcctggggaacagctggggcgaaggagcaccggcctgggtcttgctggacgagtgtggcctagagctgggggaggacactccccacgtgtgctgggagccgcaggcccagggccgcatgtgtgcactctacgcctccctggcactgctatcaggactgagccaggagccccactagcctgtgcccgggcatggcctggcagctctccagcagggcagagtgtttgcccaccagctgctagccctaggaaggccaggagcccagtagccatgtggccagtctaccatggggcccaggagttggggaaacacaataaaggtggcatacgaaggaaaaacagaacacacaacaaacacacaacaaaaacaaaaaaaaagagggcgcggcaaaaaaacccagggcgcccaaataaacca

SEQ ID NO: 8256 - DNA, 1952 bp, Homo sapiens
tatgcaggctggtactggtctggggtgtagggatctcgccggacggctcccagggagagcagacgcgccagacgcgccaccctcggggcgccgacggtcacggttcccgggccggtgctgttcccgcccccagctgccttctggcccagcctccactttcagcagacccagcactcagaggcttcctggggcagctgcagcccctccacagtggcccaggtgccccctatcccagcggaggcccgctatggcctctgacccccaaagcctcagccttggacaggtggctcatggagctccaggcacagagaaggccctggaggacgcagctggggagcatggggtcggcctttgagcgggtagtccggagagtggtccaggagctggaccatggtggggagttcatccctgtgaccagcctgcagagctccactggcttccagccctactgcctggtggttaggaagccctcaagctcatggttctggaaaccccgttataagtgtgtcaacctgtctatcaaggacatcctggagccggatgccgcggaaccagacgtgcagcgtggcaggagcttccacttctacgatgccatggatgggcagatacagggcagcgtggagctggcagccccaggacaggcaaagatcgcaggcggggccgcggtgtctgacagctccagcacctcaatgaatgtgtactcgctgagtgtggaccctaacacctggcagactctgctccatgagaggcacctgcggcagccagaacacaaagtcctgcagcagctgcgcagccgcggggacaacgtgtacgtggtgactgaggtgctgcagacacagaaggaggtggaagtcacgcgcacccacaagcgggagggctcgggccggttttccctgcccggagccacgtgcttgcagggtgagggccagggccatctgagccagaagaagacggtcaccatcccctcaggcagcaccctcgcattccgggtggcccagctggttattgactctgacttggacgtccttctcttcccggataagaagcagaggaccttccagccacccgcgacaggccacaagcgttccacgagcgaaggcgcctggccacagctgccctctggcctctccatgatgaggtgcctccacaacttcctgacagatggggtccctgcggagggggcgttcactgaagacttccagggcctacgggcagaggtggagaccatctccaaggaactggagcttttggacagagagctgtgccagctgctgctggagggcctggagggggtgctgcgggaccagctggccctgcgagccttggagggaggcgctggagcagggccagagccttgggccggtggagcccctggacggtccagcaggtgctgtcctggagtgcctggtgttgtcctccggaatgctggtgccggaactcgctatccctgttgtctacctgctgggggcactgaccatgctgagtgaaacgcagcacaagctgctggcggaggcgctggagtcgcagaccctgttggggccgctcgagctggtgggcagcctcttggagcagagtgccccgtggcaggagcgcagcaccatgtccctgccccccgggctcctggggaacagctggggcgaaggagcaccggcctgggtcttgctggacgagtgtggcctagagctgggggaggacactccccacgtgtgctgggagccgcaggcccagggccgcatgtgtgcactctacgcctccctggcactgctatcaggactgagccaggagccccactagcctgtgcccgggcatggcctggcagctctccagcagggcagagtgtttgcccaccagctgctagccctaggaaggccaggagcccagtagccatgtggccagtctaccatggggcccaggagttggggaaacacaataaaggtggcatacgaaggaaa

SEQ ID NO: 8257 - DNA, 1615 bp, Homo sapiens
gaggacatcctggagccggatgccgcggaaccagacgtgcagcgtggcaggagcttccacttctacgatgccatggatgggcagacgcgccaccctcggggcgccgacggtcacggagcatggggtcggcctttgagcgggtagtccggagagtggtccaggagctggaccatggtggggagttcatccctgtgaccagcctgcagagctccactggcttccagccctactgcctggtggttaggaagccctcaagctcatggttctggaaaccccgttataagtgtgtcaacctgtctgacaggcaaagatcgcaggcggggccgcggtgtctgacagctccagcacctcaatgaatgtgtactcgctgagtgtggaccctaacacctggcagactctgctccatgagaggcacctgcggcagccagaacacaaagtcctgcagcagctgcgcagccgcggggacaacgtgtacgtggtgactgaggtgctgcagacacagaaggaggtggaagtcacgcgcacccacaagcgggagggctcgggccggttttccctgcccggagccacgtgcttgcagggtgagggccagggccatctgagccagaagaagacggtcaccatcccctcaggcagcaccctcgcattccgggtggcccagctggttattgactctgacttggacgtccttctcttcccggataagaagcagaggaccttccagccacccgcgacaggccacaagcgttccacgagcgaaggcgcctggccacagctgccctctggcctctccatgatgaggtgcctccacaacttcctgacagatggggtccctgcggagggggcgttcactgaagacttccagggcctacgggcagaggtggagaccatctccaaggaactggagcttttggacagagagctgtgccagctgctgctggagggcctggagggggtgctgcgggaccagctggccctgcgagccttggagggaggcgctggagcagggccagagccttgggccggtggagcccctggacggtccagcaggtgctgtcctggagtgcctggtgttgtcctccggaatgctggtgccggaactcgctatccctgttgtctacctgctgggggcactgaccatgctgagtgaaacgcagcacaagctgctggcggaggcgctggagtcgcagaccctgttggggccgctcgagctggtgggcagcctcttggagcagagtgccccgtggcaggagcgcagcaccatgtccctgccccccgggctcctggggaacagctggggcgaaggagcaccggcctgggtcttgctggacgagtgtggcctagagctgggggaggacactccccacgtgtgctgggagccgcaggcccagggccgcatgtgtgcactctacgcctccctggcactgctatcaggactgagccaggagccccactagcctgtgcccgggcatggcctggcagctctccagcagggcagagtgtttgcccaccagctgctagccctaggaaggccaggagcccagtagccatgtggccagtctaccatggggcccaggagttggggaaacacaataaaggtggcatacgaaggaaa

SEQ ID NO: 8258 - DNA, 1652 bp, Homo sapiens
  misc_feature (3)..(3): n is a, c, g, or t
  misc_feature (5)..(5): n is a, c, g, or t
  misc_feature (7)..(7): n is a, c, g, or t
  misc_feature (9)..(9): n is a, c, g, or t
ggnangngncctgggcgggccctgcgtcaggttgcagtttcacttttagctctgggcacctccagctcctgctcgccggacggctcccagggagagcagacgcgccagacgcgccaccctcggggcgccgacggtcacggagcatggggtcggcctttgagcgggtagtccggagagtggtccaggagctggaccatggtggggagttcatccctgtgaccagcctgcagagctccactggcttccagccctactgcctggtggttaggaagccctcaagctcatggttctggaaaccccgttataagtgtgtcaacctgtctatcaaggacatcctggagccggatgccgcggaaccagacgtgcagcgtggcaggagcttccacttctacgatgccatggatgggcagatacagggcagcgtggagctggcagccccaggacaggcaaagatcgcaggcggggccgcggtgtctgacagctccagcacctcaatgaatgtgtactcgctgagtgtggaccctaacacctggcagactctgctccatgagaggcacctgcggcagccagaacacaaagtcctgcagcagctgcgcagccgcggggacaacgtgtacgtggtgactgaggtgctgcagacacagaaggaggtggaagtcacgcgcacccacaagcgggagggctcgggccggttttccctgcccggagccacgtgcttgcagggtgagggccagggccatctgagccagaagaagacggtcaccatcccctcaggcagcaccctcgcattccgggtggcccagctggttattgactctgacttggacgtccttctcttcccggataagaagcagaggaccttccagccacccgcgacaggccacaagcgttccacgagcgaaggcgcctggccacagctgccctctggcctctccatgatgaggtgcctccacaacttcctgacagatggggtccctgcggagggggcgttcactgaagacttccagggcctacgggcagaggtggagaccatctccaaggaactggagcttttggacagagagctgtgccagctgctgctggagggcctggagggggtgctgcgggaccagctggccctgcgagccttggagggaggcgctggagcagggccagagccttgggccggtggagcccctggacggtccagcaggtgctgtcctggagtgcctggtgttgtcctccggaatgctggtgccggaactcgctatccctgttgtctacctgctgggggcactgaccatgctgagtgaaacgcagcacaagctgctggcggaggcgctggagtcgcagaccctgttggggccgctcgagctggtcttgctggacgagtgtggcctagagctgggggaggacactccccacgtgtgctgggagccgcaggcccagggccgcatgtgtgcactctacgcctccctggcactgctatcaggactgagccaggagccccactagcctgtgcccgggcatggcctggcagctctccagcagggcagagtgtttgcccaccagctgctagccctaggaaggccaggagcccagtagccatgtggccagtctaccatggggcccaggagttggggaaacacaataaaggtggcatacgaaggaaa

SEQ ID NO: 8259 - DNA, 1560 bp, Homo sapiens
  misc_feature (3)..(3): n is a, c, g, or t
  misc_feature (5)..(5): n is a, c, g, or t
  misc_feature (7)..(7): n is a, c, g, or t
  misc_feature (9)..(9): n is a, c, g, or t
ggnangngncctgggcgggccctgcgtcaggttgcagtttcacttttagctctgggcacctccagctcctgctcgccggacggctcccagggagagcagacgcgccagacgcgccaccctcggggcgccgacggtcacggagcatggggtcggcctttgagcgggtagtccggagagtggtccaggagctggaccatggtggggagttcatccctgtgaccagcctgcagagctccactggcttccagccctactgcctggtggttaggaagccctcaagctcatggttctggaaaccccgttataagtgtgtcaacctgtctatcaaggacatcctggagccggatgccgcggaaccagacgtgcagcgtggcaggagcttccacttctacgatgccatggatgggcagatacagggcagcgtggagctggcagccccaggacaggcaaagatcgcaggcggggccgcggtgtctgacagctccagcacctcaatgaatgtgtactcgctgagtgtggaccctaacacctggcagactctgctccatgagaggcacctgcggcagccagaacacaaagtcctgcagcagctgcgcagccgcggggacaacgtgtacgtggtgactgaggtgctgcagacacagaaggaggtggaagtcacgcgcacccacaagcgggagggctcgggccggttttccctgcccggagccacgtgcttgcagggtgagggccagggccatctgagccagaagaagacggtcaccatcccctcaggcagcaccctcgcattccgggtggcccagctggttattgactctgacttggacgtccttctcttcccggataagaagcagaggaccttccagccacccgcgacaggccacaagcgttccacgagcgaaggcgcctggccacagctgccctctggcctctccatgatgaggtgcctccacaacttcctgacagatggggtccctgcggagggggcgttcactgaagacttccagggcctacgggcagaggtggagaccatctccaaggaactggagcttttggacagagagctgtgccagctgctgctggagggcctggagggggtgctgcgggaccagctggccctgcgagccttggagggaggcgtcctgccctgtcttggcaggtgggcagcctcttggagcagagtgccccgtggcaggagcgcagcaccatgtccctgccccccgggctcctggggaacagctggggcgaaggagcaccggcctgggtcttgctggacgagtgtggcctagagctgggggaggacactccccacgtgtgctgggagccgcaggcccagggccgcatgtgtgcactctacgcctccctggcactgctatcaggactgagccaggagccccactagcctgtgcccgggcatggcctggcagctctccagcagggcagagtgtttgcccaccagctgctagccctaggaaggccaggagcccagtagccatgtggccagtctaccatggggcccaggagttggggaaacacaataaaggtggcatacgaaggaaa

SEQ ID NO: 8260 - DNA, 926 bp, Homo sapiens
aggctgtactggtcggagttgttagatccttccagccacccgcgacaggccacaagcgttccacgagcgaaggcgcctggccacagctgccctctggcctctccatgatgaggtgcctccacaacttcctgacagatggggtccctgcggagggggcgttcactgaagacttccagggcctacgggcagaggtggagaccatctccaaggaactggagcttttggacagagagctgtgccagctgctgctggagggcctggagggggtgctgcgggaccagctggccctgcgagccttggagggaggcgctggagcagggccagagccttgggccggtggagcccctggacggtccagcaggtgctgtcctggagtgcctggtgttgtcctccggaatgctggtgccggaactcgctatccctgttgtctacctgctgggggcactgaccatgctgagtgaaacgcagcacaagctgctggcggaggcgctggagtcgcagaccctgttggggccgctcgagctggtgggcagcctcttggagcagagtgccccgtggcaggagcgcagcaccatgtccctgccccccgggctcctggggaacagctggggcgaaggagcaccggcctgggtcttgctggacgagtgtggcctagagctgggggaggacactccccacgtgtgctgggagccgcaggcccagggccgcatgtgtgcactctacgcctccctggcactgctatcaggactgagccaggagccccactagcctgtgcccgggcatggcctggcagctctccagcagggcagagtgtttgcccaccagctgctagccctaggaaggccaggagcccagtagccatgtggccagtctaccatggggcccaggagttggggaaacacaataaaggtggcatacgaaggaaa

SEQ ID NO: 8261 - DNA, 1253 bp, Homo sapiens
  misc_feature (3)..(3): n is a, c, g, or t
  misc_feature (5)..(5): n is a, c, g, or t
  misc_feature (7)..(7): n is a, c, g, or t
  misc_feature (9)..(9): n is a, c, g, or t
ggnangngncctgggcgggccctgcgtcaggttgcagtttcacttttagctctgggcacctccagctcctgctcgccggacggctcccagggagagcagacgcgccagacgcgccaccctcggggcgccgacggtcacggagcatggggtcggcctttgagcgggtagtccggagagtggtccaggagctggaccatggtggggagttcatccctgtgaccagcctgcagagctccactggcttccagccctactgcctggtggttaggaagccctcaagctcatggttctggaaaccccgttataagtgtgtcaacctgtctatcaaggacatcctggagccggatgccgcggaaccagacgtgcagcgtggcaggagcttccacttctacgatgccatggatgggcagatacagggcagcgtggagctggcagccccaggacaggcaaagatcgcaggcggggccgcggtgtctgacagctccagcacctcaatgaatgtgtactcgctgagtgtggaccctaacacctggcagactctgctccatgagaggcacctgcggcagccagaacacaaagtcctgcagcagctgcgcagccgcggggacaacgtgtacgtggtgactgaggtgctgcagacacagaaggaggtggaagtcacgcgcacccacaagcgggagggctcgggccggttttccctgcccggagccacgtgcttgcagggtgagggccagggccatctgagccagaagaagacggtcaccatcccctcaggcagcaccctcgcattccgggtggcccagctggttattgactctgacttggacgtccttctcttcccggataagaagcagaggaccttccagccacccgcgacaggccacaagcgttccacgagcgaaggcgcctggccacagctgccctctggcctctccatgatgaggtgcctccacaacttcctgacagatggggtccctgcggagggggcgttcactgaagacttccagggcctacgggcagaggtggagaccatctccaaggaactggagcttttggacagagagctgtgccagctgctgctggagggcctggagggggtgctgccagtccagatgagcatgttagcctagaaagacgcactactgcacaggaaaatcattctgcacgtaccagacataaaatgctgcaagcttttgtactaatggcgagagtgtaagaaaatgggctctacttcagtgatcctgtggctggac

SEQ ID NO: 8262 - DNA, 877 bp, Homo sapiens
  misc_feature (3)..(3): n is a, c, g, or t
  misc_feature (5)..(5): n is a, c, g, or t
  misc_feature (7)..(7): n is a, c, g, or t
  misc_feature (9)..(9): n is a, c, g, or t
  misc_feature (843)..(843): n is a, c, g, or t
ggnangngncctgggcgggccctgcgtcaggttgcagtttcacttttagctctgggcacctccagctcctgctcgccggacggctcccagggagagcagacgcgccagacgcgccaccctcggggcgccgacggtcacggagcatggggtcggcctttgagcgggtagtccggagagtggtccaggagctggaccatggtggggagttcatccctgtgaccagcctgcagagctccactggcttccagccctactgcctggtggttaggaagccctcaagctcatggttctggaaaccccgttataagtgtgtcaacctgtctatcaaggacatcctggagccggatgccgcggaaccagacgtgcagcgtggcaggagcttccacttctacgatgccatggatgggcagatacagggcagcgtggagctggcagccccaggacaggcaaagatcgcaggcggggccgcggtgtctgacagctccagcacctcaatgaatgtgtactcgctgagtgtggaccctaacacctggcagactctgctccatgagaggcacctgcggcagccagaacacaaagtcctgcagcagctgcgcagccgcggggacaacgtgtacgtggtgactgaggtgctgcagacacagaaggaggtggaagtcacgcgcacccacaagcgggagggctcgggccggttttccctgcccggagccacgtgcttgcagggtgagggccagggccatctgagccagaagaagacggtcaccatcccctcaggcagcaccctcgcattccgggtggcccagctggttattgactctgacttggacgtccttctctccgaanagaggctccccccggagccactccaaagccgcca

SEQ ID NO: 8263 - DNA, 959 bp, Homo sapiens
  misc_feature (3)..(3): n is a, c, g, or t
  misc_feature (5)..(5): n is a, c, g, or t
  misc_feature (7)..(7): n is a, c, g, or t
  misc_feature (9)..(9): n is a, c, g, or t
  misc_feature (798)..(798): n is a, c, g, or t
ggnangngncctgggcgggccctgcgtcaggttgcagtttcacttttagctctgggcacctccagctcctgctcgccggacggctcccagggagagcagacgcgccagacgcgccaccctcggggcgccgacggtcacggagcatggggtcggcctttgagcgggtagtccggagagtggtccaggagctggaccatggtggggagttcatccctgtgaccagcctgcagagctccactggcttccagccctactgcctggtggttaggaagccctcaagctcatggttctggaaaccccgttataagtgtgtcaacctgtctatcaaggacatcctggagccggatgccgcggaaccagacgtgcagcgtggcaggagcttccacttctacgatgccatggatgggcagatacagggcagcgtggagctggcagccccaggacaggcaaagatcgcaggcggggccgcggtgtctgacagctccagcacctcaatgaatgtgtactcgctgagtgtggaccctaacacctggcagactctgctccatgagaggcacctgcggcagccagaacacaaagtcctgcagcagctgcgcagccgcggggaccagctggccctgcgagccttggagggaggcgctggagcagggccagagccttgggccggtggaagcccctggacggtccagcaggtgctgtcctggagtgccctggtgttgtctccggaatgctggtgccggaactcgctatccctgttgtctacctgctgggggcactgaccatgctgagtgaaacacnagcacaagctgctggcggaggcgctggagtcgcagaccctgttggggccgctcgagctggtgggcagcctcttggagcccagtagccatgtggccagtctaccatggggcccaggagttggggaaacacaataaaggtggcatacgaaggaaaaaaaaaaa

SEQ ID NO: 8264 - DNA, 579 bp, Homo sapiens
  misc_feature (3)..(3): n is a, c, g, or t
  misc_feature (5)..(5): n is a, c, g, or t
  misc_feature (7)..(7): n is a, c, g, or t
  misc_feature (9)..(9): n is a, c, g, or t
ggnangngncctgggcgggccctgcgtcaggttgcagtttcacttttagctctgggcacctccagctcctgctcgccggacggctcccagggagagcagacgcgccagacgcgccaccctcggggcgccgacggtcacggagcatggggtcggcctttgagcgggtagtccggagagtggtccaggagctggaccatggtggggagttcatccctgtgaccagcctgcagagctccactggcttccagccctactgcctggtggttaggaagccctcaagctcatggttctggaaaccccgttataagtgtgtcaacctgtctatcaaggacatcctggagccggatgccgcggaaccagacgtgcagcgtggcaggagcttccacttctacgatgccatggatgggcagatacagggcagcgtggagctggcagccccaggacaggcaaagatcgcaggcggggccgcggtgtctgacagctccagcacctcaatgaatgtgtactcgctgaatgtggccagtctaccatggggcccaggagttggggaaacacaataaaggtggcatacgaaggaaa

SEQ ID NO: 8265 - DNA, 477 bp, Homo sapiens
  misc_feature (3)..(3): n is a, c, g, or t
  misc_feature (5)..(5): n is a, c, g, or t
  misc_feature (7)..(7): n is a, c, g, or t
  misc_feature (9)..(9): n is a, c, g, or t
ggnangngncctgggcgggccctgcgtcaggttgcagtttcacttttagctctgggcacctccagctcctgctcgccggacggctcccagggagagcagacgcgccagacgcgccaccctcggggcgccgacggtcacggagcatggggtcggcctttgagcgggtagtccggagagtggtccaggagctggaccatggtggggagttcatccctgtgaccagcctgcagagctccactggcttccagccctactgcctggtggttaggaagccctcaagctcatggttctggaaaccccgttataagtgtgtcaacctgtctatcaaggacatcctggagccggatgccgcggaaccaggtgcctgatgtggtgctgaggcaggagaatgccgtgaacccgggaggcagaacttgcagtgagcagagatcgtgccactgcactccggcctgggggacaaagcgagactccgtctca

SEQ ID NO: 8266 - DNA, 996 bp, Homo sapiens
  misc_feature (3)..(3): n is a, c, g, or t
  misc_feature (5)..(5): n is a, c, g, or t
  misc_feature (7)..(7): n is a, c, g, or t
  misc_feature (9)..(9): n is a, c, g, or t
ggnangngncctgggcgggccctgcgtcaggttgcagtttcacttttagctctgggcacctccagctcctgctcgccggacggctcccagggagagcagacgcgccagacgcgccaccctcggggcgccgacggtcacggagcatggggtcggcctttgagcgggtagtccggagagtggtccaggagctggaccatggtggggagttcatccctgtgaccagcctgcagagctccactggcttccagccctactgcctggtggttaggaagccctcaagctcatggttctggaaaccccgttataagtgtgtcaacctgtctatcaaggacatcctggagccggatgccgcggaaccagacgtgcagcgtggcaggagcttccacttctacgatgccatggatgggcagatacagggcagcgtggagctggcagccccaggacaggcaaagatcgcaggcggggccgcggtgtctgacagctccagcacctcaatgaatgtgtactcgctgagtgtggaccctaacacctggcagactctgctccatgagaggtgggcccgaagagggcagggcagggcagggccccacccaccccaagcaaccctgcttttatttatttatttatttaaattattttttgaggtgaggttttgctatctcggccagggtggtcttgaactcctggcctcaagcagtcctcctgcctcggcctcccaaagtgctgggattacaggggtgagccactgtgccaggtcccagccttgctcttgggaaggtcacaaccttggggcatcaggaaagtcccagaggcaaaagagcgctgtggccggaaccagcttgcaggaaggaagctgcaggggtcatctggggcctccgctgccaggactggatcctaaggaccggactgagccccaggctgctgtgaggacaaggggtggtgtgaacacgggggcccaggtgagggggccgcacctcgagtctggacttggagtcc

SEQ ID NO: 8267 - DNA, 699 bp, Homo sapiens
gcccctcggagcagctcccagccctgcgcttggctgcggagcgaagtcacctggcggcgggctgccccggcacccggcccgcacccgcaccccacggcccggtgccagggcccagcccgaggcccatctccatgcctcagggtgagggccagggccatctgagccagaagaagacggtcaccatcccctcaggcagcaccctcgcattccgggtggcccagctggttattgactctgacttgggtgagctggagttgggggtgtctcgggcccaggccctggcagagaaacagggaggcctggggagagctacccgccagcttgggctgccgtgggcccctggctgaacaacgtcctgtgtctggcaggtggctgaggtcctgtgctctggtgtgtgggtgattgggcagggcctgagctggacaggggagctcctagtaggggaggggaggggatgctgggatctaggtgacatgcctgtccctgtctgctcccgtctggctgccagacgtccttctcttcccggataagaagcagaggaccttccagccacccgcgacaggccacaagcgttccacgagcgaaggcgcctggccacagctgccctctggcctctccatgatgaggtgcctccacaacttcctgacaggtcagtgccctcctgaccgccccggggacctttggtgggctctcctgccc

SEQ ID NO: 8268 - DNA, 2093 bp, Homo sapiens
  misc_feature (3)..(3): n is a, c, g, or t
  misc_feature (5)..(5): n is a, c, g, or t
  misc_feature (7)..(7): n is a, c, g, or t
  misc_feature (9)..(9): n is a, c, g, or t
ggnangngncctgggcgggccctgcgtcaggttgcagtttcacttttagctctgggcacctccagctcctgctcgccggacggctcccagggagagcagacgcgccagacgcgccaccctcggggcgccgacggtcacggagcatggggtcggcctttgagcgggtagtccggagagtggtccaggagctggaccatggtggggagttcatccctgtgaccagcctgcagagctccactggcttccagccctactgcctggtggttaggaagccctcaagctcatggttctggaaaccccgttataagtgtgtcaacctgtctatcaaggacatcctggagccggatgccgcggaaccagacgtgcagcgtggcaggagcttccacttctacgatgccatggatgggcagatacagggcagcgtggagctggcagccccaggacaggcaaagatcgcaggcggggccgcggtgtctgacagctccagcacctcaatgaatgtgtactcgctgagtgtggaccctaacacctggcagactctgctccatgagaggcacctgcggcagccagaacacaaagtcctgcagcagctgcgcagccgcggggacaacgtgtacgtggtgactgaggtgctgcagacacagaaggaggtggaagtcacgcgcacccacaagcgggagggctcgggccggttttccctgcccggagccacgtgcttgcagggtgagggccagggccatctgagccagaagaagacggtcaccatcccctcaggcagcaccctcgcattccgggtggcccagctggttattgactctgacttggacgtccttctcttcccggataagaagcagaggaccttccagccacccgcgacaggccacaagcgttccacgagcgaaggcgcctggccacagctgccctctggcctctccatgatgaggtgcctccacaacttcctgacagatggggtccctgcggagggggcgttcactgaagacttccagggcctacgggcagaggtggagaccatctccaaggaactggagcttttggacagagagctgtgccagctgctgctggagggcctggagggggtgctgcgggaccagctggccctgcgagccttggagggaggcgctggagcagggccagagccttgggccggtggagcccctggacggtccagcaggtgctgtcctggagtgcctggtgttgtcctccggaatgctggtgccggaactcgctatccctgttgtctacctgctgggggcactgaccatgctgagtgaaacgcagcacaagctgctggcggaggcgctggagtcgcagaccctgttggggccgctcgagctggtgggcagcctcttggagcagagtgccccgtggcaggagcgcagcaccatgtccctgccccccgggctcctggggaacagctggggcgaaggagcaccggcctgggtcttgctggacgagtgtggcctagagctgggggaggacactccccacgtgtgctgggagccgcaggcccagggccgcatgtgtgcactctacgcctccctggcactgctatcaggactgagccaggagccccactagcctgtgcccgggcatggcctggcagctctccagcagggcagagtgtttgcccaccagctgctagccctaggaaggccaggagcccagtagccatgtggccagtctaccatggggcccaggagttggggaaacacaataaaggtggcatacgaaggaaaaagaaaaaaaaaaaaaaaaacagaaagaaaaaacaagaaaggggggagggcactgccaaggagataatactcccccggagggggggccacgagagtgttgacgtgcaccccggctcttgggtgtgtggacacggggggccccaaatagagggggaggcgccctagttaatgaaaccgcagaggccaaggggccgccgtggttctaggacacagctgctgtaccaggggggagacaacgcgggcaccatcgggggagcaccctggtgcggaaggaaccagcgctaatgactacgggcgcgggggagccctacagtgcgcgcacacagaaacgccacg

SEQ ID NO: 8269 - DNA, 2022 bp, Homo sapiens
  misc_feature (3)..(3): n is a, c, g, or t
  misc_feature (5)..(5): n is a, c, g, or t
  misc_feature (7)..(7): n is a, c, g, or t
  misc_feature (9)..(9): n is a, c, g, or t
ggnangngncctgggcgggccctgcgtcaggttgcagtttcacttttagctctgggcacctccagctcctgctcgccggacggctcccagggagagcagacgcgccagacgcgccaccctcggggcgccgacggtcacggagcatggggtcggcctttgagcgggtagtccggagagtggtccaggagctggaccatggtggggagttcatccctgtgaccagcctgcagagctccactggcttccagccctactgcctggtggttaggaagccctcaagctcatggttctggaaaccccgttataagtgtgtcaacctgtctatcaaggacatcctggagccggatgccgcggaaccagacgtgcagcgtggcaggagcttccacttctacgatgccatggatgggcagatacagggcagcgtggagctggcagccccaggacaggcaaagatcgcaggcggggccgcggtgtctgacagctccagcacctcaatgaatgtgtactcgctgagtgtggaccctaacacctggcagactctgctccatgagaggcacctgcggcagccagaacacaaagtcctgcagcagctgcgcagccgcggggacaacgtgtacgtggtgactgaggtgctgcagacacagaaggaggtggaagtcacgcgcacccacaagcgggagggctcgggccggttttccctgcccggagccacgtgcttgcagggtgagggccagggccatctgagccagaagaagacggtcaccatcccctcaggcagcaccctcgcattccgggtggcccagctggttattgactctgacttgggtgagctggagttgggggtgtctcgggcccaggccctggcagagaaacagggaggcctggggagagctacccgccagcttgggctgccgtgggcccctggctgaacaacgtcctgtgtctggcaggtggctgaggtcctgtgctctggtgtgtgggtgattgggcagggcctgagctggacaggggagctcctagtaggggaggggaggggatgctgggatctaggtgacatgcctgtccctgtctgctcccgtctggctgccagacgtccttctcttcccggataagaagcagaggaccttccagccacccgcgacaggccacaagcgttccacgagcgaaggcgcctggccacagctgccctctggcctctccatgatgaggtgcctccacaacttcctgacagatggggtccctgcggagggggcgttcactgaagacttccagggcctacgggcagaggtggagaccatctccaaggaactggagcttttggacagagagctgtgccagctgctgctggagggcctggagggggtgctgcgggaccagctggccctgcgagccttggagggaggcgctggagcagggccagagccttgggccggtggagcccctggacggtccagcaggtgctgtcctggagtgcctggtgttgtcctccggaatgctggtgccggaactcgctatccctgttgtctacctgctgggggcactgaccatgctgagtgaaacgcagcacaagctgctggcggaggcgctggagtcgcagaccctgttggggccgctcgagctggtgggcagcctcttggagcagagtgccccgtggcaggagcgcagcaccatgtccctgccccccgggctcctggggaacagctggggcgaaggagcaccggcctgggtcttgctggacgagtgtggcctagagctgggggaggacactccccacgtgtgctgggagccgcaggcccagggccgcatgtgtgcactctacgcctccctggcactgctatcaggactgagccaggagccccactagcctgtgcccgggcatggcctggcagctctccagcagggcagagtgtttgcccaccagctgctagccctaggaaggccaggagcccagtagccatgtggccagtctaccatggggcccaggagttggggaaacacaataaaggtggcatacgaaggaaa

SEQ ID NO: 8270 - DNA, 1608 bp, Homo sapiens
  misc_feature (3)..(3): n is a, c, g, or t
  misc_feature (5)..(5): n is a, c, g, or t
  misc_feature (7)..(7): n is a, c, g, or t
  misc_feature (9)..(9): n is a, c, g, or t
ggnangngncctgggcgggccctgcgtcaggttgcagtttcacttttagctctgggcacctccagctcctgctcgccggacggctcccagggagagcagacgcgccagacgcgccaccctcggggcgccgacggtcacggagcatggggtcggcctttgagcgggtagtccggagagtggtccaggagctggaccatggtggggagttcatccctgtgaccagcctgcagagctccactggcttccagccctactgcctggtggttaggaagccctcaagctcatggttctggaaaccccgttataagtgtgtcaacctgtctgtctgacagctccagcacctcaatgaatgtgtactcgctgagtgtggaccctaacacctggcagactctgctccatgagaggcacctgcggcagccagaacacaaagtcctgcagcagctgcgcagccgcggggacaacgtgtacgtggtgactgaggtgctgcagacacagaaggaggtggaagtcacgcgcacccacaagcgggagggctcgggccggttttccctgcccggagccacgtgcttgcagggtgagggccagggccatctgagccagaagaagacggtcaccatcccctcaggcagcaccctcgcattccgggtggcccagctggttattgactctgacttggacgtccttctcttcccggataagaagcagaggaccttccagccacccgcgacaggccacaagcgttccacgagcgaaggcgcctggccacagctgccctctggcctctccatgatgaggtgcctccacaacttcctgacagatggggtccctgcggagggggcgttcactgaagacttccagggcctacgggcagaggtggagaccatctccaaggaactggagcttttggacagagagctgtgccagctgctgctggagggcctggagggggtgctgcgggaccagctggccctgcgagccttggagggaggcgctggagcagggccagagccttgggccggtggagcccctggacggtccagcaggtgctgtcctggagtgcctggtgttgtcctccggaatgctggtgccggaactcgctatccctgttgtctacctgctgggggcactgaccatgctgagtgaaacgcagcacaagctgctggcggaggcgctggagtcgcagaccctgttggggccgctcgagctggtgggcagcctcttggagcagagtgccccgtggcaggagcgcagcaccatgtccctgccccccgggctcctggggaacagctggggcgaaggagcaccggcctgggtcttgctggacgagtgtggcctagagctgggggaggacactccccacgtgtgctgggagccgcaggcccagggccgcatgtgtgcactctacgcctccctggcactgctatcaggactgagccaggagccccactagcctgtgcccgggcatggcctggcagctctccagcagggcagagtgtttgcccaccagctgctagccctaggaaggccaggagcccagtagccatgtggccagtctaccatggggcccaggagttggggaaacacaataaaggtggcatacgaaggaaa

SEQ ID NO: 8271 - DNA, 2103 bp, Homo sapiens
  misc_feature (3)..(3): n is a, c, g, or t
  misc_feature (5)..(5): n is a, c, g, or t
  misc_feature (7)..(7): n is a, c, g, or t
  misc_feature (9)..(9): n is a, c, g, or t
ggnangngncctgggcgggccctgcgtcaggttgcagtttcacttttagctctgggcacctccagctcctgctcgccggacggctcccagggagagcagacgcgccagacgcgccaccctcggggcgccgacggtcacggagcatggggtcggcctttgagcgggtagtccggagagtggtccaggagctggaccatggtggggagttcatccctgtgaccagcctgcagagctccactggcttccagccctactgcctggtggttaggaagccctcaagctcatggttctggaaaccccgttataagtgtgtcaacctgtctatcaaggacatcctggagccggatgccgcggaaccagacgtgcagcgtggcaggagcttccacttctacgatgccatggatgggcagatacagggcagcgtggagctggcagccccaggacaggcaaagatcgcaggcggggccgcggtgtctgacagctccagcacctcaatgaatgtgtactcgctgagtgtggaccctaacacctggcagactctgctccatgagaggcacctgcggcagccagaacacaaagtcctgcagcagctgcgcagccgcggggacaacgtgtacgtggtgactgaggtgctgcagacacagaaggaggtggaagtcacgcgcacccacaagcgggagggctcgggccggttttccctgcccggagccacgtgcttgcagggtgagggccagggccatctgagccagaagaagacggtcaccatcccctcaggcagcaccctcgcattccgggtggcccagctggttattgactctgacttgggtgagctggagttgggggtgtctcgggcccaggccctggcagagaaacagggaggcctggggagagctacccgccagcttgggctgccgtgggcccctggctgaacaacgtcctgtgtctggcaggtggctgaggtcctgtgctctggtgtgtgggtgattgggcagggcctgagctggacaggggagctcctagtaggggaggggaggggatgctgggatctaggtgacatgcctgtccctgtctgctcccgtctggctgccagacgtccttctcttcccggataagaagcagaggaccttccagccacccgcgacaggccacaagcgttccacgagcgaaggcgcctggccacagctgccctctggcctctccatgatgaggtgcctccacaacttcctgacagatggggtccctgcggagggggcgttcactgaagacttccagggcctacgggcagaggtggagaccatctccaaggaactggagcttttggacagagagctgtgccagctgctgctggagggcctggagggggtgctgcgggaccagctggccctgcgagccttggagggaggcgctggagcagggccagagccttgggccggtggagcccctggacggtccagcaggtgctgtcctggagtgcctggtgttgtcctccggaatgctggtgccggaactcgctatccctgttgtctacctgctgggggcactgaccatgctgagtgaaacgcagcacaagctgctggcggaggcgctggagtcgcagaccctgttggggccgctcgagctggtgggcagcctcttggagcagagtgccccgtggcaggagcgcagcaccatgtccctgccccccgggctcctggggaacagctggggcgaaggagcaccggcctgggtcttgctggacgagtgtggcctagagctgggggaggacactccccacgtgtgctgggagccgcaggcccagggccgcatgtgtgcactctacgcctccctggcactgctatcaggactgagccaggagccccactagcctgtgcccgggcatggcctggcagctctccagcagggcagagtgtttgcccaccagctgctagccctaggaaggccaggagcccagtagccatgtggccagtctaccatggggcccaggagttggggaaacacaataaaggtggcatacgaaggaaaaacagaacacacaacaaacacacaacaaaaacaaaaaaaaagagggcgcggcaaaaaaacccagggcgcccaaataaacca

SEQ ID NO: 8272 - DNA, 1460 bp, Homo sapiens
  misc_feature (3)..(3): n is a, c, g, or t
  misc_feature (5)..(5): n is a, c, g, or t
  misc_feature (7)..(7): n is a, c, g, or t
  misc_feature (9)..(9): n is a, c, g, or t
  misc_feature (1299)..(1299): n is a, c, g, or t
ggnangngncctgggcgggccctgcgtcaggttgcagtttcacttttagctctgggcacctccagctcctgctcgccggacggctcccagggagagcagacgcgccagacgcgccaccctcggggcgccgacggtcacggagcatggggtcggcctttgagcgggtagtccggagagtggtccaggagctggaccatggtggggagttcatccctgtgaccagcctgcagagctccactggcttccagccctactgcctggtggttaggaagccctcaagctcatggttctggaaaccccgttataagtgtgtcaacctgtctatcaaggacatcctggagccggatgccgcggaaccagacgtgcagcgtggcaggagcttccacttctacgatgccatggatgggcagatacagggcagcgtggagctggcagccccaggacaggcaaagatcgcaggcggggccgcggtgtctgacagctccagcacctcaatgaatgtgtactcgctgagtgtggaccctaacacctggcagactctgctccatgagaggcacctgcggcagccagaacacaaagtcctgcagcagctgcgcagccgcggggacaacgtgtacgtggtgactgaggtgctgcagacacagaaggaggtggaagtcacgcgcacccacaagcgggagggctcgggccggttttccctgcccggagccacgtgcttgcagggtgagggccagggccatctgagccagaagaagacggtcaccatcccctcaggcagcaccctcgcattccgggtggcccagctggttattgactctgacttggacgtccttctcttcccggataagaagcagaggaccttccagccacccgcgacaggccacaagcgttccacgagcgaaggcgcctggccacagctgccctctggcctctccatgatgaggtgcctccacaacttcctgacagatggggtccctgcggagggggcgttcactgaagacttccagggcctacgggcagaggtggagaccatctccaaggaactggagcttttggacagagagctgtgccagctgctgctggagggcctggagggggtgctgcgggaccagctggccctgcgagccttggagggaggcgctggagcagggccagagccttgggccggtggaagcccctggacggtccagcaggtgctgtcctggagtgccctggtgttgtctccggaatgctggtgccggaactcgctatccctgttgtctacctgctgggggcactgaccatgctgagtgaaacacnagcacaagctgctggcggaggcgctggagtcgcagaccctgttggggccgctcgagctggtgggcagcctcttggagcccagtagccatgtggccagtctaccatggggcccaggagttggggaaacacaataaaggtggcatacgaaggaaaaaaaaaaa

SEQ ID NO: 8273 - DNA, 568 bp, Homo sapiens
gcggccgctgggggcaggtggcgggtgggagggagggaggtgggctttcccggtgggcgttcagaaacccccttttacctgactctctcccagtgctgagtgaaacgcagcacaagctgctggcggaggcgctggagtcgcagaccctgttggggccgctcgagctggtgggcagcctcttggagcagagtgccccgtggcaggagcgcagcaccatgtccctgccccccgggctcctggggaacagctggggcgaaggagcaccggcctgggtcttgctggacgagtgtggcctagagctgggggaggacactccccacgtgtgctgggagccgcaggcccagggccgcatgtgtgcactctacgcctccctggcactgctatcaggactgagccaggagccccactagcctgtgcccgggcatggcctggcagctctccagcagggcagagtgtttgcccaccagctgctagccctaggaaggccaggagcccagtagccatgtggccagtctaccatggggcccaggagttggggaaacacaataaaggtggcatacgaaggaaa

SEQ ID NO: 8274 - DNA, 709 bp, Homo sapiens
  misc_feature (3)..(3): n is a, c, g, or t
  misc_feature (5)..(5): n is a, c, g, or t
  misc_feature (7)..(7): n is a, c, g, or t
  misc_feature (9)..(9): n is a, c, g, or t
ggnangngncctgggcgggccctgcgtcaggttgcagtttcacttttagctctgggcacctccagctcctgctcgccggacggctcccagggagagcagacgcgccagacgcgccaccctcggggcgccgacggtcacggagcatggggtcggcctttgagcgggtagtccggagagtggtccaggagctggaccatggtggggagttcatccctgtgaccagcctgcagagctccactggcttccagccctactgcctggtggttaggaagccctcaagctcatggttctggaaaccccgttataagtgtgtcaacctgtctatcaaggacatcctggagccggatgccgcggaaccagacgtgcagcgtggcaggagcttccacttctacgatgccatggatgggcagatacagggcagcgtggagctggcagccccaggacaggcaaagatcgcaggcggggccgcggtgtctgacagctccagcacctcaatgaatgtgtactcgctgagtgtggaccctaacacctggcagactctgctccatgagaggcacctgcggcagccagaacacaaagtcctgcagcagagagtgtttgcccaccagctgctagccctaggaaggccaggagcccagtagccatgtggccagtctaccatggggcccaggagttggggaaacacaataaaggtggcatacgaaggaaa

SEQ ID NO: 8275 - DNA, 465 bp, Homo sapiens
gtctgcctgtcctgaccgaggctttccagggccctgtaagcacctgggcagtgccagcccttctgtccctacagatggggtccctgcggagggggcgttcactgaagacttccagggcctacgggcagaggtggagaccatctccaaggaactggagcttttggacagagagctgtgccagctgctgctggagggcctggagggggtgctgcgggaccagctggccctgcgagccttggagggaggcggagcgggggagggtgcccggggcacacaaggcctgcccagccagccagactcacctgcccttcccgtgcccacagctggagcagggccagagccttgggccggtggagcccctggacggtccagcaggtgctgtcctggagtgcctggtgttgtcctccggaatgctggtgccggaactcgctatccctgttgtctacctgctgggggcactgacca

SEQ ID NO: 8276 - DNA, 1873 bp, Homo sapiens
  misc_feature (1)..(2): n is a, c, g, or t
nnagcctcgggaggtggtggagtgacctggccccagtgctgcgtccttatcagccgagccggtcccagctcttgctcctgcctgtttgcctggaaatggccacgcttctccttctccttggggtgctggtggtaagcccagacgctctggggagcacaacagcagtgcagacacccacctccggagagcctttggtctctactagcgagcccctgagctcaaagatgtacaccacttcaataacaagtgaccctaaggccgacagcactggggaccagacctcagccctacctccctcaacttccatcaatgagggatcccctctttggacttccattggtgccagcactggttcccctttacctgagccaacaacctaccaggaagtttccatcaagatgtcatcagtgccccaggaaacccctcatgcaaccagtcatcctgctgttcccataacagcaaactctctaggatcccacaccgtgacaggtggaaccataacaacgaactctccagaaacctccagtaggaccagtggagcccctgttaccacggcagctagctctctggagacctccagaggcacctctggaccccctcttaccatggcaactgtctctctggagacttccaaaggcacctctggaccccctgttaccatggcaactgactctctggagacctccactgggaccactggaccccctgttaccatgacaactggctctctggagccctccagcggggccagtggaccccaggtctctagcgtaaaactatctacaatgatgtctccaacgacctccaccaacgcaagcactgtgcccttccggaacccagatgagaactcacgaggcatgctgccagtggctgtgcttgtggccctgctggcggtcatagtcctcgtggctctgctcctgctgtggcgccggcggcagaagcggcggactggggccctcgtgctgagcagaggcggcaagcgtaacggggtggtggacgcctgggctgggccagcccaggtccctgaggagggggccgtgacagtgaccgtgggagggtccgggggcgacaagggctctgggttccccgatggggaggggtctagccgtcggcccacgctcaccactttctttggcagacggaagtctcgccagggctccctggcgatggaggagctgaagtctgggtcaggccccagcctcaaaggggaggaggagccactggtggccagtgaggatggggctgtggacgccccagctcctgatgagcccgaagggggagacggggctgccccttaagtgtcggtgaatagtgaggctggaggccggaatctcagccagcctccagcaccttccctctcaccatcccactgccccctcgctcccatgtttccacccggcaccctgatcctcacccgaatctcctttttttttttcttttgagacagagtttcgctttgtcgcccaggctggagtgcaatgcacgatctcagttcactgcaacctctgcctcctaagttcaggcgattctcctgcctcagcttcccgagtaactgagattacaggcacccaccaccatgcccagctgcttttttgtatttttggtagagatggggtttcaccatgttggctaggctggtctcaaactcctgacctcaggtgatctacctgcctcagcctcccaaagtgctgagattacagacatgagcctccgcgccttgcctcctcacccacctcttcactctgaatcctcatgaggcttctcagccctggatttcctgctgccatcctcacccagcacccacaactagcgcctgggcagggcagggctggcacctctcaacgtctgtggactgaatgaataaaccctcctc

SEQ ID NO: 8277 - DNA, 2288 bp, Homo sapiens
  misc_feature (1)..(2): n is a, c, g, or t
nnagcctcgggaggtggtggagtgacctggccccagtgctgcgtccttatcagccgagccggtcccagctcttgctcctgcctgtttgcctggaaatggccacgcttctccttctccttggggtgctggtggtaagcccagacgctctggggagcacaacagcagtgcagacacccacctccggagagcctttggtctctactagcgagcccctgagctcaaagatgtacaccacttcaataacaagtgaccctaaggccgacagcactggggaccagacctcagccctacctccctcaacttccatcaatgagggatcccctctttggacttccattggtgccagcactggttcccctttacctgagccaacaacctaccaggaagtttccatcaagatgtcatcagtgccccaggaaacccctcatgcaaccagtcatcctgctgttcccataacagcaaactctctaggatcccacaccgtgacaggtggaaccataacaacgaactctccagaaacctccagtaggaccagtggagcccctgttaccacggcagctagctctctggagacctccagaggcacctctggaccccctcttaccatggcaactgtctctctggagacttccaaaggcacctctggaccccctgttaccatggcaactgactctctggagacctccactgggaccactggaccccctgttaccatgacaactggctctctggagccctccagcggggccagtggaccccaggtctctagcgtaaaactatctacaatgatgtctccaacgacctccaccaacgcaagcactgtgcccttccggaacccagatgagaactcacgaggcatgctgccagtggctgtgcttgtggccctgctggcggtcatagtcctcgtggctctgctcctgctgtggcgccggcggcagaagcggcggactggggccctcgtgctgagcagaggcggcaagcgtaacggggtggtggacgcctgggctgggccagcccaggtccctgaggagggggccgtgacagtgaccgtgggagggtccgggggcgacaagggctctgggttccccgatggggaggggtctagccgtcggcccacgctcaccactttctttggcagacggaagtctcgccagggctccctggcgatggaggagctgaagtctgggtcaggccccagcctcaaaggggaggaggagccactggtggccagtgaggatggggctgtggacgccccagctcctgatgagcccgaagggggagacggggctgccccttaagtgtcggtgaatagtgaggctggaggccggaatctcagccagcctccagcaccttccctctcaccatcccactgccccctcgctcccatgtttccacccggcaccctgatcctcacccgaatctcctttttttttttcttttgagacagagtttcgctttgtcgcccaggctggagtgcaatgcacgatctcagttcactgcaacctctgcctcctaagttcaggcgattctcctgcctcagcttcccgagtaactgagattacaggcacccaccaccatgcccagctgcttttttgtatttttggtagagatggggtttcaccatgttggctaggctggtctcaaactcctgacctcaggtgatctacctgcctcagcctcccaaagtgctgagattacagacatgagcctccgcgccttgcctcctcacccacctcttcactctgaatcctcatgaggcttctcagccctggatttcctgctgccatcctcacccagcacccacaactagcgcctgggcagggcagggctggcacctctcaacgtctgtggactgaatgaataaaccctcctcttacaaatgccaaaattcattcagctttgatgataaacactgaggcccaatggcctttatcatctagggagtatgaagaatgagcaagaggctaactcagcgtgagttaccctgggaaaggaaagaagaaatggttcatataggacacacatagataccttcaagggtgtttgtagagttgtttcttaagtagttggtttccttcacagaaagttcttaaactcagaatatacccatccatgcaccccaccagcaatacaaagaccccaaacaaaaaattactatattcttaccctacgcatggcttcctcctcttcttgacgcttttcataatgtgcaaagtcatcaaagattgaggtggtatgcttgaaagtagcaattattttaagcacttgcttagctttttcaagggacg

SEQ ID NO: 8278 - DNA, 2404 bp, Homo sapiens
cctctgagcccagccctccctagcatcaccacttccatcccattcctcagccaagagccaggaatcctgattccagatcccacgcttccctgcctccctcaggtcccagctcttgctcctgcctgtttgcctggaaatggccacgcttctccttctccttggggtgctggtggtaagcccagacgctctggggagcacaacagcagtgcagacacccacctccggagagcctttggtctctactagcgagcccctgagctcaaagatgtacaccacttcaataacaagtgaccctaaggccgacagcactggggaccagacctcagccctacctccctcaacttccatcaatgagggatcccctctttggacttccattggtgccagcactggttcccctttacctgagccaacaacctaccaggaagtttccatcaagatgtcatcagtgccccaggaaacccctcatgcaaccagtcatcctgctgttcccataacagcaaactctctaggatcccacaccgtgacaggtggaaccataacaacgaactctccagaaacctccagtaggaccagtggagcccctgttaccacggcagctagctctctggagacctccagaggcacctctggaccccctcttaccatggcaactgtctctctggagacttccaaaggcacctctggaccccctgttaccatggcaactgactctctggagacctccactgggaccactggaccccctgttaccatgacaactggctctctggagccctccagcggggccagtggaccccaggtctctagcgtaaaactatctacaatgatgtctccaacgacctccaccaacgcaagcactgtgcccttccggaacccagatgagaactcacgaggcatgctgccagtggctgtgcttgtggccctgctggcggtcatagtcctcgtggctctgctcctgctgtggcgccggcggcagaagcggcggactggggccctcgtgctgagcagaggcggcaagcgtaacggggtggtggacgcctgggctgggccagcccaggtccctgaggagggggccgtgacagtgaccgtgggagggtccgggggcgacaagggctctgggttccccgatggggaggggtctagccgtcggcccacgctcaccactttctttggcagacggaagtctcgccagggctccctggcgatggaggagctgaagtctgggtcaggccccagcctcaaaggggaggaggagccactggtggccagtgaggatggggctgtggacgccccagctcctgatgagcccgaagggggagacggggctgccccttaagtgtcggtgaatagtgaggctggaggccggaatctcagccagcctccagcaccttccctctcaccatcccactgccccctcgctcccatgtttccacccggcaccctgatcctcacccgaatctcctttttttttttcttttgagacagagtttcgctttgtcgcccaggctggagtgcaatgcacgatctcagttcactgcaacctctgcctcctaagttcaggcgattctcctgcctcagcttcccgagtaactgagattacaggcacccaccaccatgcccagctgcttttttgtatttttggtagagatggggtttcaccatgttggctaggctggtctcaaactcctgacctcaggtgatctacctgcctcagcctcccaaagtgctgagattacagacatgagcctccgcgccttgcctcctcacccacctcttcactctgaatcctcatgaggcttctcagccctggatttcctgctgccatcctcacccagcacccacaactagcgcctgggcagggcagggctggcacctctcaacgtctgtggactgaatgaataaaccctcctcatccacccctatttatctccatcaccatttccccctctttcttgttcctggaaacggctgctgagtctccatcggccaaacttatctgccctgtgatttctttgacaattctccttttcccccagaacccaccctgggttgaccagagtctgggaagaaggacaagagaacccggcaaactccctcctaggattaactttgtaaagcacccttgccctgtagctgcaagggctgtggaacctgggcagcccgcaaccacctttagctctgggccccccaggccagcctggagcatggctgggtggggccaccagcccatgctctcaggcgggcctgtgatctttcccagggcacatggactgtaggctggccctggcccacaccaccacactctccccagccatggacagaggcagccagaggcctcacggtttctcctccgagtttctggctgggtgtagttctcagaaaccccagtgcctgcgtgtgt

SEQ ID NO: 8279 - DNA, 1744 bp, Homo sapiens
  misc_feature (1)..(2): n is a, c, g, or t
  misc_feature (1453)..(1453): n is a, c, g, or t
  misc_feature (1458)..(1458): n is a, c, g, or t
  misc_feature (1463)..(1463): n is a, c, g, or t
  misc_feature (1474)..(1480): n is a, c, g, or t
  misc_feature (1482)..(1483): n is a, c, g, or t
  misc_feature (1486)..(1486): n is a, c, g, or t
  misc_feature (1506)..(1506): n is a, c, g, or t
  misc_feature (1516)..(1516): n is a, c, g, or t
  misc_feature (1522)..(1523): n is a, c, g, or t
  misc_feature (1528)..(1528): n is a, c, g, or t
  misc_feature (1538)..(1538): n is a, c, g, or t
  misc_feature (1548)..(1548): n is a, c, g, or t
  misc_feature (1556)..(1556): n is a, c, g, or t
  misc_feature (1559)..(1559): n is a, c, g, or t
  misc_feature (1563)..(1564): n is a, c, g, or t
  misc_feature (1571)..(1573): n is a, c, g, or t
  misc_feature (1578)..(1579): n is a, c, g, or t
  misc_feature (1597)..(1597): n is a, c, g, or t
  misc_feature (1604)..(1604): n is a, c, g, or t
  misc_feature (1607)..(1608): n is a, c, g, or t
  misc_feature (1628)..(1630): n is a, c, g, or t
  misc_feature (1644)..(1644): n is a, c, g, or t
  misc_feature (1675)..(1676): n is a, c, g, or t
  misc_feature (1681)..(1681): n is a, c, g, or t
  misc_feature (1683)..(1683): n is a, c, g, or t
  misc_feature (1725)..(1725): n is a, c, g, or t
nnagcctcgggaggtggtggagtgacctggccccagtgctgcgtccttatcagccgagccggtcccagctcttgctcctgcctgtttgcctggaaatggccacgcttctccttctccttggggtgctggtggtaagcccagacgctctggggagcacaacagcagtgcagacacccacctccggagagcctttggtctctactagcgagcccctgagctcaaagatgtacaccacttcaataacaagtgaccctaaggccgacagcactggggaccagacctcagccctacctccctcaacttccatcaatgagggatcccctctttggacttccattggtgccagcactggttcccctttacctgagccaacaacctaccaggaagtttccatcaagatgtcatcagtgccccaggaaacccctcatgcaaccagtcatcctgctgttcccataacagcaaactctctaggatcccacaccgtgacaggtggaaccataacaacgaactctccagaaacctccagtaggaccagtggagcccctgttaccacggcagctagctctctggagacctccagaggcacctctggaccccctcttaccatggcaactgtctctctggagacttccaaaggcacctctggaccccctgttaccatggcaactgactctctggagacctccactgggaccactggaccccctgttaccatgacaactggctctctggagccctccagcggggccagtggaccccaggtctctagcgtaaaactatctacaatgatgtctccaacgacctccaccaacgcaagcactgtgcccttccggaacccagatgagaactcacgaggcatgctgccagtggctgtgcttgtggccctgctggcggtcatagtcctcgtggctctgctcctgctgtggcgccggcggcagaagcggcggactggggccctcgtgctgagcagaggcggcaagcgtaacggggtggtggacgcctgggctgggccagcccaggtccctgaggagggggccgtgacagtgaccgtgggagggtccgggggcgacaagggctctgggttccccgatggggaggggtctagccgtcggcccacgctcaccactttctttggcagacggaagtctcgccagggctccctggcgatggaggagctgaagtctgggtcaggccccagcctcaaaggggaggaggagccactggtggccagtgaggatggggctgtggacgccccagctcctgatgagcccgaagggggagacggggctgccccttaagtgtcggtgaatagtgaggctggaggccggaatctcagccagcctccagcaccttccctctcaccatcccactgccccctcgctcccatgtttccacccggcaccctgatcctcacccgaatctcctttttttttttcttttgagacagagcaanccccncctanaaaaaaaaaannnnnnncnnaanccccaaatatggtataagancaaatatatnagttannaaaanaattgtaaanggcttattgnactcatanccncccnnaaacacnnnccccnnaattatgtaatccccccngaaaatnccnncaatataatgttaagtgggnnnaaaagcaagttacncctctgtaatacataagattttagttttgtnnggggnangggccaaccatatatggcacttatagggagaacaaaagagcncaaggcaaatgttttccat

SEQ ID NO: 8280 - DNA, 3504 bp, Homo sapiens
gggcaggtgttaagcgataaaggggggcagaacaagtcttttatccggccatttaattggtcaccttaagaaagaatcctatcttcccaccgcagctgagaagacacttctaagaggtacagctaaaaggtggaggactgatagacaacttagaggttggtttcgggaacgataaaacaagtaacgggctgcccggcctgcgccgcggagtcccgaggagcctgcgctgtgctcctctcgcggtgtctcgtcatctccgggaagactcggcgcctgggtccgcgctctctgggtaagctttccgggaagctttcccgggagctcgctggtcctggccccagaagcctgcggacccgcccagggaggataagcagctgaaagaccgcgcggtgccgctccgaggccccgggacgtgggcccatggtcggcctggcgccacctttccgggggaagccacgcgcaccaggcatcgcacgcggctctgcacccgcgccgccggacctgaaacccggcggagggcacacggggctgccgctgcgggccccggaccaacccatgcttactccggagcctgtaccggcgccgacgggtcggacctccctgcgcggtgtcgcccagcgggttcgtgcgaaaggcggggccgactacacgcggtgccgcgccctgagaccgtttatctgcagtcaacgcagcctcccggctcagcctgggaagatgcgcgaatcgggaaccccagagcgcggtggctagaccgggctccgccgcctcccccacagcccctttcctaatcgttcagacggagcctggtcgacttcgccggagactgccagatctcgttcctcttccctgtgtcatcttcttaattataaataatgggggatgaagataaaagaattacatatgaagattcagaaccatccacaggaatgaattacacgccctccatgcatcaagaagcacaggaggagacagttatgaagctcaaaggtatagatgcaaatgaaccaacagaaggaagtattcttttgaaaagcagtgaaaaaaagctacaagaaacaccaactgaagcaaatcacgtacaaagactgagacaaatgctggcttgccctccacatggtttactggacagggtcataacaaatgttaccatcattgttcttctgtgggctgtagtttggtcaattactggcagtgaatgtcttcctggaggaaacctatttggaattataatcctattctattgtgccatcattggtggtaaacttttggggcttattaagttacctacattgcctccactgccttctcttcttggcatgctgcttgcagggtttctcatcagaaatatcccagtcatcaacgataatgtgcagatcaagcacaagtggtcttcctctttgagaagcatagccctgtctatcattctggttcgtgctggccttggtctggattcaaaggccctgaagaagttaaagggcgtttgtgtaagactgtccatgggtccctgtattgtggaggcgtgcacatctgctcttcttgcccattacctgctgggtttaccatggcaatggggatttatactgggttttgttttaggtgctgtatctccagctgttgtggtgccttcaatgctccttttgcagggaggaggctatggtgttgagaagggtgtcccaaccttgctcatggcagctggcagcttcgatgacattctggccatcactggcttcaacacatgcttgggcatagccttttccacaggctctactgtctttaatgtcctcagaggagttttggaggtggtaattggtgtggcaactggatctgttcttggatttttcattcagtactttccaagccgtgaccaggacaaacttgtgtgtaagagaacattccttgtgttggggttgtctgtgctagctgtgttcagcagtgtgcattttggtttccctggatcaggaggactgtgcacgttggtcatggctttccttgcaggcatgggatggaccagcgaaaaggcagaggttgaaaagataattgcagttgcctgggacatttttcagccccttctttttggactaattggagcagaggtatctattgcatctctcagaccagaaactgtaggcctttgtgttgccaccgtaggcattgcagtattgatacgaattttgactacatttctgatggtgtgttttgctggttttaacttaaaagaaaagatatttatttcttttgcatggcttccaaaggccacagttcaggctgcaataggatctgtggctttggacacagcaaggtcacatggagagaaacaattagaagactatggaatggatgtgttgacagtggcatttttgtccatcctcatcacagccccaattggaagtctgcttattggtttactgggccccaggcttctgcagaaagttgaacatcaaaataaagatgaagaagttcaaggagagacttctgtgcaagtttagaggtgaaaagagagagtgctgaacataatgtttagaaagctgctacttttttcaagatgcatattgaaatatgtaatgtttaagcttaaaatgtaatagaaccaaaagtgtagctgtttctttaaacagcatttttagcccttgctctttccatgtgggtggtaatgatctatatcaccaaccttaatctctctgcctttttttttcaaacaccccttcatcatccatcttaatttgcataaggacatatctactttaatgtactaccacagtttacagttaatgtgggaaagaccagcttcagtatcctcttcagctaggattgccctaacttttaactttcacagtttcctgattcatatttgcccaggctctgatgccttgaattggttttggctctcttttttggatctgtttttgttgttaaacatcataatgcagtctctcattaatttttaccatcatttaccctgataatctgcctcttctccatttctccttcccttactacctttctttgaattactgtaactgattggtcccaccaaaattttaaagtacatgaagtatcttcattggttcatcctcttgccccctccagatgtcaaaaaactttatcctgccccctagctgaccacccaggttcctttatttcagtggcccatgtgagtctaccttcccctaaggagtgccctaatccagccctttttttgtttcttatgacccatatctttaggctcttcccatttctaggtgggagataggtaagtttcaaatctatgccagtcttatgaatattacattagggtaatgtgctataatgaagaaataaaaaatacagtgcttaaaagaaaataaaattctatttctgtctaatgaaaaaaaaaaaaaaaaaaaaaaaaaaagggggggcccttttttagggggagatcaccaatgggtgggggggaccctggtacactgtatcctgagaacgtgggaggggcgtacaaggggtctcatacggtgctcactacag

SEQ ID NO: 8281 - DNA, 3367 bp, Homo sapiens
gggcaggtgttaagcgataaaggggggcagaacaagtcttttatccggccatttaattggtcaccttaagaaagaatcctatcttcccaccgcagctgagaagacacttctaagaggtacagctaaaaggtggaggactgatagacaacttagaggttggtttcgggaacgataaaacaagtaacgggctgcccggcctgcgccgcggagtcccgaggagcctgcgctgtgctcctctcgcggtgtctcgtcatctccgggaagactcggcgcctgggtccgcgctctctgggtaagctttccgggaagctttcccgggagctcgctggtcctggccccagaagcctgcggacccgcccagggaggataagcagctgaaagaccgcgcggtgccgctccgaggccccgggacgtgggcccatggtcggcctggcgccacctttccgggggaagccacgcgcaccaggcatcgcacgcggctctgcacccgcgccgccggacctgaaacccggcggagggcacacggggctgccgctgcgggccccggaccaacccatgcttactccggagcctgtaccggcgccgacgggtcggacctccctgcgcggtgtcgcccagcgggttcgtgcgaaaggcggggccgactacacgcggtgccgcgccctgagaccgtttatctgcagtcaacgcagcctcccggctcagcctgggaagatgcgcgaatcgggaaccccagagcgcggtggctagaccgggctccgccgcctcccccacagcccctttcctaatcgttcagacggagcctggtcgacttcgccggagactgccagatctcgttcctcttccctgtgtcatcttcttaattataaataatgggggatgaagataaaagaattacatatgaagattcagaaccatccacaggaatgaattacacgccctccatgcatcaagaagcacaggaggagacagttatgaagctcaaaggtatagatgcaaatgaaccaacagaaggaagtattcttttgaaaagcagtgaaaaaaagctacaagaaacaccaactgaagcaaatcacgtacaaagactgagacaaatgctggcttgccctccacatggtttactggacagggtcataacaaatgttaccatcattgttcttctgtgggctgtagtttggtcaattactggcagtgaatgtcttcctggaggaaacctatttggaattataatcctattctattgtgccatcattggtggtaaacttttggggcttattaagttacctacattgcctccactgccttctcttcttggcatgctgcttgcagggtttctcatcagaaatatcccagtcatcaacgataatgtgcagatcaagcacaagtggtcttcctctttgagaagcatagccctgtctatcattctggttcgtgctggccttggtctggattcaaaggccctgaagaagttaaagggcgtttgtgtaagactgtccatgggtccctgtattgtggaggcgtgcacatctgctcttcttgcccattacctgctgggtttaccatggcaatggggatttatactgggttttgttttaggtgctgtatctccagctgttgtggtgccttcaatgctccttttgcagggaggaggctatggtgttgagaagggtgtcccaaccttgctcatggcagctggcagcttcgatgacattctggccatcactggcttcaacacatgcttgggcatagccttttccacaggctctactgtctttaatgtcctcagaggagttttggaggtggtaattggtgtggcaactggatctgttcttggatttttcattcagtactttccaagccgtgaccaggacaaacttgtgtgtaagagaacattccttgtgttggggttgtctgtgctagctgtgttcagcagtgtgcattttggtttccctggatcaggaggactgtgcacgttggtcatggctttccttgcaggcatgggatggaccagcgaaaaggcagaggttgaaaagataattgcagttgcctgggacatttttcagccccttctttttggactaattggagcagaggtatctattgcatctctcagaccagaaactgtaggctgcaataggatctgtggctttggacacagcaaggtcacatggagagaaacaattagaagactatggaatggatgtgttgacagtggcatttttgtccatcctcatcacagccccaattggaagtctgcttattggtttactgggccccaggcttctgcagaaagttgaacatcaaaataaagatgaagaagttcaaggagagacttctgtgcaagtttagaggtgaaaagagagagtgctgaacataatgtttagaaagctgctacttttttcaagatgcatattgaaatatgtaatgtttaagcttaaaatgtaatagaaccaaaagtgtagctgtttctttaaacagcatttttagcccttgctctttccatgtgggtggtaatgatctatatcaccaaccttaatctctctgcctttttttttcaaacaccccttcatcatccatcttaatttgcataaggacatatctactttaatgtactaccacagtttacagttaatgtgggaaagaccagcttcagtatcctcttcagctaggattgccctaacttttaactttcacagtttcctgattcatatttgcccaggctctgatgccttgaattggttttggctctcttttttggatctgtttttgttgttaaacatcataatgcagtctctcattaatttttaccatcatttaccctgataatctgcctcttctccatttctccttcccttactacctttctttgaattactgtaactgattggtcccaccaaaattttaaagtacatgaagtatcttcattggttcatcctcttgccccctccagatgtcaaaaaactttatcctgccccctagctgaccacccaggttcctttatttcagtggcccatgtgagtctaccttcccctaaggagtgccctaatccagccctttttttgtttcttatgacccatatctttaggctcttcccatttctaggtgggagataggtaagtttcaaatctatgccagtcttatgaatattacattagggtaatgtgctataatgaagaaataaaaaatacagtgcttaaaagaaaataaaattctatttctgtctaatgaaaaaaaaaaaaaaaaaaaaaaaaaaagggggggcccttttttagggggagatcaccaatgggtgggggggaccctggtacactgtatcctgagaacgtgggaggggcgtacaaggggtctcatacggtgctcactacag

SEQ ID NO: 8282 - DNA, 2620 bp, Homo sapiens
gggcaggtgttaagcgataaaggggggcagaacaagtcttttatccggccatttaattggtcaccttaagaaagaatcctatcttcccaccgcagctgagaagacacttctaagaggtacagctaaaaggtggaggactgatagacaacttagaggttggtttcgggaacgataaaacaagtaacgggctgcccggcctgcgccgcggagtcccgaggagcctgcgctgtgctcctctcgcggtgtctcgtcatctccgggaagactcggcgcctgggtccgcgctctctgggtaagctttccgggaagctttcccgggagctcgctggtcctggccccagaagcctgcggacccgcccagggaggataagcagctgaaagaccgcgcggtgccgctccgaggccccgggacgtgggcccatggtcggcctggcgccacctttccgggggaagccacgcgcaccaggcatcgcacgcggctctgcacccgcgccgccggacctgaaacccggcggagggcacacggggctgccgctgcgggccccggaccaacccatgcttactccggagcctgtaccggcgccgacgggtcggacctccctgcgcggtgtcgcccagcgggttcgtgcgaaaggcggggccgactacacgcggtgccgcgccctgagaccgtttatctgcagtcaacgcagcctcccggctcagcctgggaagatgcgcgaatcgggaaccccagagcgcggtggctagaccgggctccgccgcctcccccacagcccctttcctaatcgttcagacggagcctggtcgacttcgccggagactgccagatctcgttcctcttccctgtgtcatcttcttaattataaataatgggggatgaagataaaagaattacatatgaagattcagaaccatccacaggaatgaattacacgccctccatgcatcaagaagcacaggaggagacagttatgaagctcaaaggtatagatgcaaatgaaccaacagaaggaagtattcttttgaaaagcagtgaaaaaaagctacaagaaacaccaactgaagcaaatcacgtacaaagactgagacaaatgctggcttgccctccacatggtttactggacagggtcataacaaatgttaccatcattgttcttctgtgggctgtagtttggtcaattactggcagtgaatgtcttcctggaggaaacctatttggaattataatcctattctattgtgccatcattggtggtaaacttttggggcttattaagttacctacattgcctccactgccttctcttcttggcatgctgcttgcagggtttctcatcagaaatatcccagtcatcaacgataatgtgcagatcaagcacaagtggtcttcctctttgagaagcatagccctgtctatcattctggttcgtgctggccttggtctggattcaaaggccctgaagaagttaaagggcgtttgtgtaagactgtccatgggtccctgtattgtggaggcgtgcacatctgctcttcttgcccattacctgctgggtttaccatggcaatggggatttatactgggttttgttttaggtgctgtatctccagctgttgtggtgccttcaatgctccttttgcagggaggaggctatggtgttgagaagggtgtcccaaccttgctcatggcagctggcagcttcgatgacattctggccatcactggcttcaacacatgcttgggcatagccttttccacaggctctactgtctttaatgtcctcagaggagttttggaggtggtaattggtgtggcaactggatctgttcttggatttttcattcagtactttccaagccgtgaccaggacaaacttgtgtgtaagagaacattccttgtgttggggttgtctgtgctagctgtgttcagcagtgtgcattttggtttccctggatcaggaggactgtgcacgttggtcatggctttccttgcaggcatgggatggaccagcgaaaaggcagaggttgaaaagataattgcagttgcctgggacatttttcagccccttctttttggactaattggagcagaggtatctattgcatctctcagaccagaaactgtaggcctttgtgttgccaccgtaggcattgcagtattgatacgaattttgactacatttctgatggtgtgttttgctggttttaacttaaaagaaaagatatttatttcttttgcatggcttccaaaggccacagttcaggctgcaataggatctgtggctttggacacagcaaggtcacatggagagaaacaattagaagactatggaatggatgtgttgacagtggcatttttgtccatcctcatcacagccccaattggaagtctgcttattggtttactgggccccaggcttctgcagaaagttgaacatcaaaataaagatgaagaagttcaaggagagacttctgtgcaagtttagaggaagcgcggattctattactggaaactttgggactgaaaggccaaagcttctgggcccaccatcaacgcagctccgctttcatttctttcacatacaactttccacataagatttcatgcggaaaaaaaaaa

SEQ ID NO: 8283 - DNA, 2372 bp, Homo sapiens
gggcaggtgttaagcgataaaggggggcagaacaagtcttttatccggccatttaattggtcaccttaagaaagaatcctatcttcccaccgcagctgagaagacacttctaagaggtacagctaaaaggtggaggactgatagacaacttagaggttggtttcgggaacgataaaacaagtaacgggctgcccggcctgcgccgcggagtcccgaggagcctgcgctgtgctcctctcgcggtgtctcgtcatctccgggaagactcggcgcctgggtccgcgctctctgggtaagctttccgggaagctttcccgggagctcgctggtcctggccccagaagcctgcggacccgcccagggaggataagcagctgaaagaccgcgcggtgccgctccgaggccccgggacgtgggcccatggtcggcctggcgccacctttccgggggaagccacgcgcaccaggcatcgcacgcggctctgcacccgcgccgccggacctgaaacccggcggagggcacacggggctgccgctgcgggccccggaccaacccatgcttactccggagcctgtaccggcgccgacgggtcggacctccctgcgcggtgtcgcccagcgggttcgtgcgaaaggcggggccgactacacgcggtgccgcgccctgagaccgtttatctgcagtcaacgcagcctcccggctcagcctgggaagatgcgcgaatcgggaaccccagagcgcggtggctagaccgggctccgccgcctcccccacagcccctttcctaatcgttcagacggagcctggtcgacttcgccggagactgccagatctcgttcctcttccctgtgtcatcttcttaattataaataatgggggatgaagataaaagaattacatatgaagattcagaaccatccacaggaatgaattacacgccctccatgcatcaagaagcacaggaggagacagttatgaagctcaaaggtatagatgcaaatgaaccaacagaaggaagtattcttttgaaaagcagtgaaaaaaagctacaagaaacaccaactgaagcaaatcacgtacaaagactgagacaaatgctggcttgccctccacatggtttactggacagggtcataacaaatgttaccatcattgttcttctgtgggctgtagtttggtcaattactggcagtgaatgtcttcctggaggaaacctatttggaattataatcctattctattgtgccatcattggtggtaaacttttggggcttattaagttacctacattgcctccactgccttctcttcttggcatgctgcttgcagggtttctcatcagaaatatcccagtcatcaacgataatgtgcagatcaagcacaagtggtcttcctctttgagaagcatagccctgtctatcattctggttcgtgctggccttggtctggattcaaaggccctgaagaagttaaagggcgtttgtgtaagactgtccatgggtccctgtattgtggaggcgtgcacatctgctcttcttgcccattacctgctgggtttaccatggcaatggggatttatactgggttttgttttaggtgctgtatctccagctgttgtggtgccttcaatgctccttttgcagggaggaggctatggtgttgagaagggtgtcccaaccttgctcatggcagctggcagcttcgatgacattctggccatcactggcttcaacacatgcttgggcatagccttttccacaggctctactgtctttaatgtcctcagaggagttttggaggtggtaattggtgtggcaactggatctgttcttggatttttcattcagtactttccaagccgtgaccaggacaaacttgtgtgtaagagaacattccttgtgttggggttgtctgtgctagctgtgttcagcagtgtgcattttggtttccctggatcaggaggactgtgcacgttggtcatggctttccttgcaggcatgggatggaccagcgaaaaggcagaggttgaaaagataattgcagttgcctgggacatttttcagccccttctttttggactaattggagcagaggtatctattgcatctctcagaccagaaactgtaggcctttgtgttgccaccgtaggcattgcagtattgatacgaattttgactacatttctgatggtgtgttttgctggttttaacttaaaagaaaagatatttatttcttttgcatggcttccaaaggccacagttcaggtatgatggataggatggcttagcattttaactgctatttctgcatgacaccttgaaatattgaataagagggcttgtttaaatttagtgaaaataaataattgaagt

SEQ ID NO: 8284 - DNA, 541 bp, Homo sapiens
gacaaacttgtgtgtaagagaacattccttgtgttggggttgtctgtgctagctgtgttcagcagtgtgcattttggtttccctggatcaggaggactgtgcacgttggtcatggctttccttgcaggcatgggatggaccagcgaaaaggtgaatttcattttaagtttttctgctcatgactcttttctaatgagattaagttggctttccagatactttcttagcatcaaattaataatagtatttcattataataagctatcttaatgtgcatatacaaatgtacacccagtgttcatcttttttttccccttacacatcaatctataactcgatgtctttacttaaaatatatcatggtcatactaccgtaacgccttccttattctttgtaatggctacggagtattgcattttatagatatttacgttgtttctagttttctgccaagataaacagtgcttcaataatatatccttacataccatatttcatctgagtctgtcaattctaaaaaacacaattattttatatgac

SEQ ID NO: 8285 - DNA, 285 bp, Homo sapiens
aacagttccgtcgacctttttaaagaaacagataagtttccagaacaaagaatatttgaagattttattgtaaattcagaaaactttacagctactacgaggatgacctagcctgagtcccaactaacatcttcatttctttagtgaaaggagacagagagttagctgctttgaactctaggattgtgctcattttatctgtcttcattgatgaccttcatagtctgatatccatttccaaaggaagatgacttcaatctaagagcctcaaagaagacgtcgacg

SEQ ID NO: 8286 - DNA, 442 bp, Homo sapiens
agacagaatttcgctcttgttgctcaggctggagtgcaatgggtgatctcagctcactgcaacctccgcctcctgggttcaagagattctcctgcctcagactaaaaggaatctcttccaaattgagttcccaatttgaaacaagaacatgtagttatgttttactacattttaacttaaacatgaatataaaaatatgggaaaatgagcttcaaaatgaactttaaatgaaattatgaaatcaaagaccccagaaattaaaatgtgattcattttcccataaatttacattcttatatattctctattgaaagtcaaggtaaatgtaatttacgatttattcaaactgaaaaagttgctgggcatggcagctcacacctataatcccagtactcgagagctgaggtgggagaatcacttgagcccaggagtttgagaccag

SEQ ID NO: 8287 - DNA, 449 bp, Homo sapiens
ttcacactgggagccctaacacagagcctctgacctgcagctcatacccctgattattcaactgtgcccatggataggcatccctctgcccgctccggcccagccccttgtctcttcctgcatccatttctgactgagcccccctgactgatttgacactggctttgcccagatgcctgtggcaggatctctgtagttgggctggtgtcctagtccctggcctccctcaaccccactagccagccctgttgctgaagacttggcatgccttgtatccaaccccactccttaggaccccaagggaaatcacctccttttcccctcactgccccagaaaatggagaaggaagaagggggaacagaaaggaaggaggaaggcttgccgttttattcattcatctttattactttatttaatcaactcttcctaggggcttagggcagaaatt

SEQ ID NO: 8288 - DNA, 537 bp, Homo sapiens
agatgttccaggagtagaattcctgactgctgtgtgaaagtgaactgctactccatctctgaaacatatctgagaaacggggcagaaaaccagtgtaaactgctcgtggtgaaattattgaacattgaagtgtgaggcttgtcctaagagcacgtcacctcccttgacacagattctgcatgtccttccctctggtaggatcctccagttccgtttctcagcgaagtaaccagaggttccagtctgctcttgctttctgggaggaagacagagcacctagtaatagattcccagggtactgattggcaccacacatgactcagaggggacctaagccatcagcaggctgctctaaggacctacctcagggcactcagacagcctcaccaatcagaggctcaggagagggttttcctcactgccctccttgtgtgcactggtttcctgtttagagcagcatttagcagcaccacacacctcagatgtagaggatgaacctctcttatatgaaataaaatgatgtccagcaactactgt

SEQ ID NO: 8289 - DNA, 491 bp, Homo sapiens
agagttccaatctccagtacaagttttgttttccagtaaactgtttcattgtatttgatgcttcataaatgtatctaaatctagctcatcatgcactgctagctacacctaatcatacacacatgtctgaattactccactcctatttaaaggaaaagaacaaaaagtaagaatggcagatgtgttcataattaatatcctactgggttaatcagtagatcctcaggaatgctatgagggttttgatgtattcagaaaatcactgcctttatctatagacctctttaaagacaaacatacaacagttagtttttagaagatgtgatccttgcaaataagatagtaaataatattgtcacagacttgcctctttgaataacctaattccatgcttgattttatatgtttaagtgaggaatttatggttcatatttacagccagtgatatgtgcaaggattgctgtttactaacatcacactcaaaatttctt

SEQ ID NO: 8290 - DNA, 699 bp, Homo sapiens
ttgtagagatggggtttcactatgttgttcaggctggtctcgaactctgagctcaagtgatccgtccgtctcagcctcccaaagtactgggattacaggagtgagccgctgcacccaggctggactagttcaacacatgtggctagtgattaccatactaggacagcatgataacgaagcacaaatcagagggccagacactatgccaaaaagaggggaaagaggtgactgaacagaaggctggcagttcagggtgaggaaactgaggtttacaaagaaaacccaacaacaatgagctaaatagatgctgaggcttactatgggatggcagcatgagacaggaaagttagggaccactaattccacgcatgctgtgagagctgtgtgtgccggggacagaaagaagatgaaaaccaagctccagaagattgacagtacatatcgaattaatgtgcacacagataaccaaacgacctaggttggtccaagtgggcagagtaggttactcagggtgttcatcacacaagtgcaccggccaggagctgactggggctggatcctgacccaactccacctaacaagctgtgaggctgggcactgtggctcatgcctgtaatctccgcactttgggaggctgaggtggtggatcactttaggtcaggagttcaagaccagcctggctaacatggtgaaaccccg

SEQ ID NO: 8291 - DNA, 738 bp, Homo sapiens
ggattggggacccctgcactaaaaaactgttagaactaataagtaagttcagcaaagtggcagcataaaagatgcagaaattgattgttctgtatacaagtaatgaacaaagtagaattaagaaaacaatttaaaaaggccttaaagagaataaaatatctagaaataaattgataaaagaagtgcaagacatgtatcttgaatactagaaaacataattgaaagaaattgaagacaatgaaaaggcattccatgttcatcgattagaaaattcagtattattaagatggcagtacttctcaaagtgatctacatattcaacacaattcctatcaaatctcagctgacttcagaatctgacaagctgattctgagattcatatgcaaattcaaaggagctagaataaccaaaagaatcttagaagaacaaagttggaaccctcacaattttcaattttaaatcttcctacaggctgggcacgtttgctcatgcccataatcccaaccccttggaggccgaggcaggaggatcagttgagtccaggagcttgagaccatcctgggccacatagtgagaccctgtctctatttttataaatttacatacaatcaaaatcttcctacaaagctagagtgctcaagattgtgtggtactggcattatgataaacgtatagatcaataatagaattgagagtctagaaattaattccacacattttataagctcaactgattt

SEQ ID NO: 8292 - DNA, 98 bp, Homo sapiens
ctataatgccaacactttgggaggcctaggtgggcagattgcctgagctcaggagtttgagagcagcctgggtaacatggcaaaactccgtctctgca

SEQ ID NO: 8293 - DNA, 556 bp, Homo sapiens
tggcatctcatctaattgcccagggatgggactgcaagaacactcgaatgcacaaagcaaaagaaagtctcagcatggcaagaaatatcgacagatagaacgcttagcaggatcctggccgggagaccccatgggtgcagtctgcttgctgtaattgccggctggagtggaaaagaaaagactctgttttaaagctctcgaagcattcgtctctggttttagcagaacatataacatcttctgtaatttctatgtaaatacttgacagttgaaaagaattctttttttttcttcctatccagactataatttatggtggtttagtgggaaaaggggttaatttgatttaaaaactgaaaatgattctctatttggctttttaaaaagtatttatttaaaaaactctgcacagaacagacagaggggagacaaaggattctattgtatgactgacctaggcgtgccatgtctctttgctccctacacagacagaggcctggcctgaagcacgcaagattatgcacacatgggtccaatctttgtcacctgtcaccta

SEQ ID NO: 8294 - DNA, 284 bp, Homo sapiens
aaaagaaaatacaatttgacttatagataattaacttacagaacttagtagaactaataagtagtataggtagaatataacatgattataaagccataaatagttaataacacaaaattgagatatatctaacttttcaggtaactacaaggaagggtagtcctacctacccacatcttacctcttagggctattgaccacaaattactggctaggactatgactctgtgtggtattactgtgttcctgtcactggatattcaaagcaaagcttttattcaaaa

SEQ ID NO: 8295 - DNA, 657 bp, Homo sapiens
gggaagtataattatgcgtaggaagtgattgagaaccataatacaatctaccacaattctccaactagtaggtagtttgacttatatgaatagatagtggcttttatttgctctctatatgtagagaaataagtaaaacgtttttggtgtcaagttgaatggtggcatgtctattattacagtagtcttctctgtagttggtgataagggaaagggagtaatgccaattgaaaaacatgtagatatgtctgttggattttgattatttttgctagtggagaatagtatcacaaatattttgaaggtgctaataaccaaaacataattttcattgaacttgggacatattatttttcctttcctttcttggctttgtttctgaatttatctatctctttttagcctgctagacttcagataatagtaatttgctaacacttgagtgcttatgcttggtgtgccaaacattgttctaagcacttaatatgtgttaatacatttacttctcacaactcattgaagtaggtggaatgtaatattaatccattttacagatgaaattaagatagcatttaaataacttgtccaaaggcacacagttaataactggcatggaaacagatataaaagccagtgaattattcattttctgtagtt

SEQ ID NO: 8296 - DNA, 462 bp, Homo sapiens
gctgggacttcaggcgtgtgccaccatgcccagctaatgtttgtattttcagtagagacagggtttcaccatgttggccaggctggtctcaaactcctgacctcaggtgagccacctgccttggcctcccaaagtgctggcattacaggcatgagccactacacctggcctagagctgttttttaaagcacatgtgtgcatatatagaaatgtgttatataaacggtggtatttgagatattttcttttcttttcttttctttttgagacagagtctcactctgtcgcccaggctgtacctcatgatccacccgccttggcctcccagagtgctgggattacaggcatgagccaccatgcccagctggtctcgaacttctgccctcaggtgatccacctgcatcagcctcccaaagtgctgggattataggtgtgagctactgcatccagccctgagaaact

SEQ ID NO: 8297 - DNA, 157 bp, Homo sapiens
cctgggcgcctcccagggacttggtttgatttaaacaaaaataaaggtggcattgggtagcctgtgtgccaggagacggcttccctgcaaaagggacgccagcagtagccctgcgtccttccatatcacatccttccacgtgatagacacgtgtcaa

SEQ ID NO: 8298 - DNA, 427 bp, Homo sapiens
attgttattttctttttttttttttttttgagacagagtctcgcactgtcgcccaggctggagtgcagtggcacggtcttggctcactacaaccaccacctcccaggttcaagcgattctccttgcttcagcttcctgagtagctgggattataggcactcaccaccaagcccggctcattttttttggattttcagtagagacaggatttcactatgttggccaggctggtctcaaactcctgacctcatgatacacctgcctctgcctcccaaagtgctgggattacaggcatgagccactgcgcccagcctctctttattttctgttctcataatgcaagtaatcatgtgaaaattttgagattcattattttacagccaggtaattacactcaagttgattagtgattaggattgtcagggac

SEQ ID NO: 8299 - DNA, 452 bp, Homo sapiens
agcatgtaacccaggactgttctagcacggagtaagtgcccaatccatgttagcacttctgctatagccgccggcgggtctgccatgcttagtgtatactgggtgctcacttaatccttgcggaatgaatgtgggtggcaccttcccatgtaggtacttttctgcctgtgtggcatgcacgtttctgttggggacaccttgtgtagagatagatgtgtatcatacactcacacacgctctctcatctacaccaaagggagtgcacagggctgtcctcctggttgagggtccacgagcattttattgtgattaaatatttatccggggcttgtactatgaacattgcattttatggcagataaaatgatgtcatgtaaaaaaaggcttgaaaagctgtgtggccccattcacagaaaaggcagctgtcactagggaagcagagctgggagacg

SEQ ID NO: 8300 - DNA, 286 bp, Homo sapiens
aagagactagaggatgattgattagtagagcagccagaatatacataatatttaccaattaagtttgctgtcttacatgtgtgcacttcacggtaccccaaataattataacagtaacgtcagaggtcactgatcacagatgaccataccagatgttatagtaatgaaaagtttgaaataccacaagaattaccaaaatgttatatagagacacaaaggaaggagatgcttttggaaaaatggtgcccgtaaacttgctcaattcagggctgccacaaaccctcaa

SEQ ID NO: 8301 - DNA, 439 bp, Homo sapiens
agagtttgaaatctgtaagcaggccagtatgttgtaaagtacggaagaactggtttgccgtcttaaggcagaatttcttcttccccaaagaaatctccacttttgcttttaaggtcttctggctgattgatgaggcccacccacattattgggtggcctaatctccttaaactcaactgtgttaaccacattgacaaaataccttcacagtaacacctagattagtgtttgattgagtaactgtgtataatagcttagcaaatatgacacataaatgaatcttcaccattcaaaattatcagataaaaatctggaactatagccataggaggtaagtatgagttaatttgttttactagaattttgaatagcatatatactttccaaatcaccagtggggaaaaaatgaaagaaaccataaaataaataataaaataga

SEQ ID NO: 8302 - DNA, 774 bp, Homo sapiens
ggctgaaatgttgtgaaaatataggattggtctgtctcttccctgccacattccaagatttgaggcatgatatatatttcttagccctcaaggaatttagacttcttcagcttaggcccttgtcagcacatgaactgtcttaattcaaattggaagagaccatagtgggcatctgtttgtcctggctgctacagaactcctcaatttcttatccaacctctgcttataaatacttccaggccgggcgcagtggctcacacctgtaatcccaacacttcgggtggccaaggtgggtggatcacctgaggtcaggagttcaagaccagcctggccaacatcgtgaaaccccggttatactaaaaatacaaaaattagctgggtgtggtggtgtgcacctggcgcaagtcccagctacttgggagactgagacaggagaatcacttgaacctgggaggcagaggttgcagtgagccgagatcgtgccactgcactccagtctgggcaacaaagcaagactccgtctaaaaaaaaaaaaaaaaaacaacttccaatgatggggaactcattaacatttgttaaattttgtttgtttttcattataaaaatgatacatccttattatagaaactttggaagatgctaaaaataagacgtgaaaaaggaggggaggacccgtataccatctagaggctcctattaccttgttgtatttcttttttccccccgttcttgacgtgtattttttttcataactgcataaaatttcattgagtc

SEQ ID NO: 8303 - DNA, 591 bp, Homo sapiens
aaattgtttcctaagaaggttaatacattaccaaagtttcagaatgaggacatgttcatgtgaattttttaaggcaactccttttggcatctatgagagtagctgtgcttttattttacttagatttgtgggaaatatatgctaataatgttccagcctgaaaaaataacaggtatcaagatactcaagtccttaagctgaccttgttagaaatcctgggaaaggaaagctgactgttccaaagctgtcagtggggtgccagacattcactgtttgaacttaaaaacttggtgcatgttggctgggcacagtggctcacgcttgtaatcccagcactttgggaggccgaggcaggtggatcacaagttcagtggttctagaccagcctggccaacacagtgaaaccccgtctctactaaaaatacaaaaattagctgggtgtggtggcgggtgcctgtaaccccagctactcgggaggctgaggcaagagaatcgcttgaacccgggaggcagaggttgcagtgagccgagatcgtgcccctgcactccagcttgggcaacagagctagactccgtctcaaaaaaaaaaaa

SEQ ID NO: 8304 - DNA, 465 bp, Homo sapiens
gattggtcttgatagtcattgctataaagtcatggtatgaagggcatacaaggcagaaggagcagcataaggcaatttttttgtggtgtttctttgtttgtttttgagagctgttaagtaattccaggagagtaagagaatgaaggaagataaggttataaaatttggcaggaccaggcacagtggtggttcatgcctataatcccgaggccaaggcaggaggatcactggagcccaggagttcaagactagcctgggcaacatagacaaaaacaaaacaacaaaaatttttaaaaattttttaaattagctgggcattgtggtgtacacctgtactcccagctattgggaaggctgaggtgggaggatgcttgagcccaggaggtggaggctgcgagtgagcagtgatggcaccactgcactccagcctgggtgacacagtgagactttgtctcaaaaaaaaaa

SEQ ID NO: 8305 - DNA, 547 bp, Homo sapiens
aggagagggaaccgcgacagaaaaaacgcgatagaagaaagttcgaaacacagtgattctcaaacaggcaaaaattatataccccatgaagaaaggaaagagaacagagtacgagcataagccaaaaacagttgcttcacatcctacaacccagagggcactcctcaacaaaagtgatcaggctaaaatgtcaacagtgctccccaggttgagaaactgaattttaaactcaacctctagtttagatgaccactaggtctcaccgaatgaggagtttacagctcagaaacaaatctagaaaacttaacagccttggccaagcacaatggctcatgcctgtaatcccggcatgttgaactggatggtgaaaccccatctctaccaaaaaatacaaaaattaggtgggcatgctggtgtgtgcctgtagccccagctactcaggaggctgaggtgggggtgatcacctgagctccccaggtcgaggctgcagtgagttgtgatcgtgacactgcactcccgcctgggtgacagagccagaccctgtctc

SEQ ID NO: 8306 - DNA, 323 bp, Homo sapiens
tatttttcttcttctttaaaagagtacttgctgtgtaatccctaacagcttctttgagaactccaaccacctgtactccccacaggatgcagcttataaaggttcaccctctggctcccttgcttcatccaccgccttcatcctgaatcacttgccctgacccatttcccactcacacccatcttctgacattgtttgtttccaatttttcatttcccgtctgatcgttcccctcaggtctcagtactacttttgcagctacaaactttgcttctcttcttgactatgtttttgttttcctccagcatcactgcctccagcag

SEQ ID NO: 8307 - DNA, 454 bp, Homo sapiens
tatttgtcattctgtgcctggcttatttcatttaatatacagacctgcaatctcatccattttgtctgcagtggagaggagtttcttcctttttaggctgaataatacttcactgggtgtgtataccacagtttcttcattgaaacaaatttctgaagagcaaatattttaaagatgtcttggaatgtgaaacttcacggatactgtgcccattttattcttttctatttcccatcttatgtatatgcaagtgtataacaaagcagccatcaatgtgtgtataaatctgtaacttcaacaaatgtaaaatgtaaatgctaagtggtggctgggcgcggtcgctcatgcctgtaatcccagcactttgggaggcggaagcaggcggatcacctgaggtcaggagttcaagaccagcctgaacaaaatggagaaacactgtctctattaacaatac

SEQ ID NO: 8308 - DNA, 436 bp, Homo sapiens
aagcagtgtagaggaatatggggaaagagtttagttaggcttgttaaatttgaggtagctattaaacagccaagtggatatataagtctacactaaacatcactgtgtatcatgaaaataagatgactctcttttgtacaaaggacttgtcattgaagaagtgagtcagtctggaaactgctctgaacagaataagaggtaggatgggataggtaaatcatagtggggtgagttatggccaaaaaaaaaatcttatcaggtgttgattataaattcacaaattacttgatatgttataataaaaatttaactatctaagctcaggtttgcctcacaagtgtcaaagaacaagtcatttaccttgaagagttaagaacatggcagaagttcgtgaccagcctgggcaacatggtgaaaccccgtctctaccaaaaat

SEQ ID NO: 8309 - DNA, 347 bp, Homo sapiens
gcagtgatccgagatcatgcgactgcactccagcctgggcaagagtgagactctatctcaatatttttttaaaaagaaaattttggaggagtgcacagatcatgtatcaagaccttatgggtggggcctttgtaaggactttggcttttattccgagaagctattgcacattggagagctttttcgtgggtttttgccagggtgtctttaccctttctggcttactatgacttgtaaacttctgtatgtgtctagtccatactgctttttgggctttctaagttttctatttaaagtattagcacaggatttccttcgacttgaaccacacaaagctcgcaggaaca

SEQ ID NO: 8310 - DNA, 359 bp, Homo sapiens
atgagatagtgacagggttgtagtgcttatacttagattgagtgctagaaatgttggtaatgaggaatccagcaaagatactgccaattgttaggtgtttaattgattttagtaatgttttctttaagcaactatatccaaaatatcacttcaacatgtgacattagccacatttcaagagcttcagtctcccctgtgctagacagcacagctctagatatctcttccctaagatctctgtgatacggacaagagacagggaaatacggggtagaagagaatggttccccagcaaaggccctacccttaagcctggagactctcagccctaagtaggaacaggcatttctgttaccttt

SEQ ID NO: 8311 - DNA, 454 bp, Homo sapiens
gagagctagcaccatgagcttcaacaccctgtacctactacaatttcagaagcagagctgcctgctacagcaaactggaaaatgtgatgccttcgtgaaatttcccgtcgctaaagatactctacacatgccccttgaccaagaaatagcacttatgggaactctacagatggatttctacacatctgaagtgatgcattggccacactattcttaatggcattgtttgtaatggccccaaattggaaatcacctaaagtccatccctacaggacttgtttaataaattatgaattatccatactttacatctattaaaaaatgaatacttgggccaggctcacatctgtaatcccagcattttgggaggccaaggcaggtggatcgcttgagttcgagaccagcctgagcaacatggtgaaactctgtctctaccaaaaatgcaaaaaaaaaa

SEQ ID NO: 8312 - DNA, 410 bp, Homo sapiens
cccaagacatacacaaggatgttcatagcagctttattccaaaatagtgaaaaacaaaacaatccccaaatgcacagcaatagggaaaacagacaaataaattgtggtatatttatacagtggaatactatgcaacaacaaaaaaggatgaagcataatactacacacagcgtgagtgagtctcacagacacagtgttaacagagagaatccagacacaaaagagcctatctatgcatgattccatttatatgaagttcaaagacatgcagagctaatctatggtgatagagataagaatggtggttacactgaaatgggaggatcgctcaaacccgggaggcggaggctgcagtgaaccatgatggagctgcactccagctttggagacagagcgagaccctgtctcta

SEQ ID NO: 8313 - DNA, 182 bp, Homo sapiens
tttgtgttatttttacttagttgccttcacacaagtatttttagtagagaacatacaggtaattaaagctgtgatcttaaacacgaaaaaagcatattaattcacagtaaactgctctttgggaagtcaaagttgctgtaataggactgctcagattcttaaaaaattaaatacagtgtata

SEQ ID NO: 8314 - DNA, 199 bp, Homo sapiens
ttgggcagtttcttaaaaaactaaacatactcttaccatacagttgagctccttggtatttacccaaaggagtgaaaactatatctgcctaaaaaccttcacattgttgtttatagcatggttggcaagtttataattgccagaacttggaagcagccaagatgtttttcagtaggtgaatgaaaaagtaaactgtgtt

SEQ ID NO: 8315 - DNA, 425 bp, Homo sapiens
tcttttttttcctgtggctttaaaatatttcatgatatggatacagggagcacagggaggggaacaacacacactggggcctattgggggagggcagtggggagagcattaggaaaaatagctaacgcatgccggtcttaatacctagctgatggattgataggtgcagcaaaccaccatggcacacgtttacctatgtaacaaacctgcacatctggcatgtgtaccccagaacttaaaataaaataaaataaaacttaaaaaagaacatatggaaagctggataatgccacaaaagggttaatgttagcaagcttgggatggaggcactatgcaccatcatcatgtatttttccatcttaagcagcataccactcctaaataaaacaaaatcattttgcagaaaataaaacacttcatgacag

SEQ ID NO: 8316 - DNA, 452 bp, Homo sapiens
aaaaaaatctcttacatatttttgaagtacttttaatttaccaaacatttattagaaattaaccactttactgggcacggtggctcacgcctgtaatcccagcactttgggaggccaaggtgggtggatcacgaggtcaggagtttgagaccagcctggccaacatgttgaaaccctgtctctactaaaaatataaaaattagccaggcgtggtggcgtgcacctgtaatcccagctactcaggaggctgaggcaggaaatcgcttgaaccggggagggagaggtggcagtgagctgagattgcaccactgcactctagtctgggcaacagagcaagactctggctgggtgtgggtgggggttggtgaggggaagttaaccactttatcaaaacatcttatgtacacaagtctatgtacctactgtgtactcacaaaaattaaaaagaaaaa

SEQ ID NO: 8317 - DNA, 307 bp, Homo sapiens
gtcagaggccactggaagagggtgtctttgggacatgcagtctttcctcacagtggggtagcgggaggatgtgtgggcacaggctggatccctgtttggtgtagggcttgtaagcttgcactctggtcagattgcatgactctggctctgaccacagctgtgtgacttcaggcaaattacttaacttctctgggcctcatgggtcttacttgcaagctgaggacaatcacagtacctacttcatgggctcgttgtagagattaaaggcacatgtgtatgaaaagcacttggcacagggctaggtgtg

SEQ ID NO: 8318 - DNA, 342 bp, Homo sapiens
gatccagtcagtggctctcctgctacccatggtctgaagttgcgggcacattgcacatactttcctggattagagaactctccaagccctccctcctgccctgcttcagagagcatgccaatttggcttctgcccatctccagcaatggttcctgtggatcctctgcctagcaacaggatttaccaatggatcagtggcagggcagaatagaaaggaaccagggatggctcccagaggatgttttaccttaagcaaccagagagatgaaggtgccacatagacagatggaaaactgttatttaggacacatttggaactcagctagtcaggggagcaaggat

SEQ ID NO: 8319 - DNA, 361 bp, Homo sapiens
atattttcagtgggcctttccagtcatttaatgaagaaattattttaaacataaaaatatgcttgaaacagctcattacagaatccacatcactataatcttatgcttggcctcaggaatgttatacaatggtttgagttcaaagtaaagaaaactgaattaaaacatgtagtagattttgtggggttttgtgtgtgtgtgtgcatgtgtgtgtttttaaaggtacaattgcttaaccagatattcctgtttctctgactggaatataaataaaaccagaacacaatccagaaaagcttgctttaccacaagcagatcaaatcggtattgggctacaaggaacacagaacaagaatctctt

SEQ ID NO: 8320 - DNA, 724 bp, Homo sapiens
gactacagaaagaaaactgaaaacaaatttgtacttaaacattgcaaggcttgttattgctgtatatgtatatattttgttgttgttgacttacaaatttgcttaaaaggttagtcagaattctaagacgttcagtttggtttcaccatgacagttatactgtacaaaatgggcacagtcagcctgacaaagtgacctgctgtaccctcagaactcttaacaacccctacagaagggacagactatttctagatgcttcttttaacaattgatgttttctgcttgtgtaactgctcaagctgaaaaagttagcaattaccacccagtgtgcaaaatagcattttattcgttctgaaaacacccctcttaaaccttaactaaaagagcacctactgtttcaggattctgttattaaataaattcttgttcactccctttgtgattttataacatttgaacatttctcttcttgccccccattttgtgggataaaaacaactctacttcaaatcctatggtatttaattatttccgagcgttattttgaggttttactttgtactagtaaattcctttacttcagtgattctcagccttggctatccattgaatttaaatgtgaagtattttttaaaatgctgaagctgggacttactcctccttcatgtttttaatacagccactttgactgtaaacaattaaatgtatgtgttcactgttactg

SEQ ID NO: 8321 - DNA, 236 bp, Homo sapiens
gtaatttgtatgcgccagaagttctgataatgtatgccgtcccctgcctcagagagtttagattctggaaaggagggcagatactgaacaagcccaagaagtctcacagagcagaaaggcagtgggctataaaacttttaaccagaggatttaatgtactcttggggagccagggaaggcttccttgaagagaagtacgatctctgtcaacagcacactctacagtgacatctaaa

SEQ ID NO: 8322 - DNA, 428 bp, Homo sapiens
ccattgtacttcagcctgggcaacaagagtgaaactttgtctcaaaaaataaaaaaagaaaagaaaagaattaggctgggcacagtggctcatgattgtaaccccagcactttgagaggccaacgcaggaggattgctcaagcccaggaattcaagaccagcctgggcaacatagtgagaccttgtctctacacataataaaaaaattagccaggcgtggtgttgtgtgcctgtggtcagggctactcaggaggctgaggtgggaggatggcttgagcctgggcagttgaggctgcagtgatggctgcactgcacttcaacctggggacagagtgataccctatctcaagaaaagaaatagttacttatttcattctgatcacattttccagtacaaatacatggaggtcccaagtgccaaagttaca

SEQ ID NO: 8323 - DNA, 399 bp, Homo sapiens
cagcacagcctttcgccttcccaatatgcgtgggcgtgggccgtggtgttgtaagtcaccaggacagtgtctgtggctgatgtcccgctgcctgagataggtgcggctcagcacagcctttcgccttcccaatatgcgtgggcgtgggccgtggtgttgtaagtcaccaggacagtgtctgtggctgatgtcccgctgcctgagataggtgcggctcagcacagcctttcgccttcccaatatgcgtgggcgtgggccgtggtgttgtaagtcaccaggacagtgtctgtggctgatgtcccgctgcctgggatatacgtgtggggcttgaagtgtgcttgaagtggagatggggtttacgggggatcctggggggccccagacaacccaaggaccctg

SEQ ID NO: 8324 - DNA, 966 bp, Homo sapiens
  misc_feature (8)..(8): n is a, c, g, or t
tgcatttntgctactagggtgacgtgtcggggctatgtatgacagcttttcgtgtacctagggttggctgccagagtccctgtgaatcaagatttgggcatgttcttggtcaccatttcctgctacaccagaggtggccgaatcatctccacttcttcgcgttcggtgatggtgatggctgcattaccgctcagacctgctccagatgctggacacactggtcttctctagcctcctgctatttggctttgcagagcagaagcagctgctggaggtggaactctacgcagactatagagagaactcgtacgtgccgaccactggagcgatcattgagatccacagcaagcgcatccagctgtatggagcctacctccgcatccacgcgcacttcactgggctcagatacctgctatacaacttcccgatgacctgcgccttcataggtgttgccagcaacttcaccttcctcagcgtcatcgtgctcttcagctacatgcagtgggtgtgggggggcatctggccccgacaccgcttctctttgcaggttaacatccgaaaaagagacaattcccggaaggaagtccaacgaaggatctctgctcatcagccagggcctgaaggccaggaggagtcaactccgcaatcagatgttacagaggatggtgagagccctgaagatccctcagggacagagggtcagctgtccgaggaggagaaaccagatcagcagcccctgagcggagaagaggagctagagcctgaggccagtgatggttcaggctcctgggaagatgcagctttgctgacggaggccaacctgcctgctcctgctcctgcttctgcttctgcccctgtcctagagactctgggcagctctgaacctgctgggggtgctctccgacagcgccccacctgctctagttcctgaagaaaaggggcagactcctcacattccagcacttt

SEQ ID NO: 8325 - DNA, 902 bp, Homo sapiens
  misc_feature (8)..(8): n is a, c, g, or t
tgcatttntgctactagggtgacgtgtcggggctatgtatgacagcttttcgtgtacctagggttggctgccagagtccctgtgaatcaagatttgggcatgttcttggtcaccatttcctgctacaccagaggtggccgaatcatctccacttcttcgcgttcggtgatgctgctatttggctttgcagagcagaagcagctgctggaggtggaactctacgcagactatagagagaactcgtacgtgccgaccactggagcgatcattgagatccacagcaagcgcatccagctgtatggagcctacctccgcatccacgcgcacttcactgggctcagatacctgctatacaacttcccgatgacctgcgccttcataggtgttgccagcaacttcaccttcctcagcgtcatcgtgctcttcagctacatgcagtgggtgtgggggggcatctggccccgacaccgcttctctttgcaggttaacatccgaaaaagagacaattcccggaaggaagtccaacgaaggatctctgctcatcagccagggcctgaaggccaggaggagtcaactccgcaatcagatgttacagaggatggtgagagccctgaagatccctcagggacagagggtcagctgtccgaggaggagaaaccagatcagcagcccctgagcggagaagaggagctagagcctgaggccagtgatggttcaggctcctgggaagatgcagctttgctgacggaggccaacctgcctgctcctgctcctgcttctgcttctgcccctgtcctagagactctgggcagctctgaacctgctgggggtgctctccgacagcgccccacctgctctagttcctgaagaaaaggggcagactcctcacattccagcacttt

SEQ ID NO: 8326 - DNA, 141 bp, Homo sapiens
aaaaagagaaaatagccttactctatacataataaactcaagatatgttacaaatttacatgtgaaatccgaaatactataatatttaaggaatagctaagtagaataacactgaaatttaacataatgaaacatttcctt

SEQ ID NO: 8327 - DNA, 629 bp, Homo sapiens
gcggaaatgagagcccagagagggtcaggcagcaaagcagtggccttgtggcccggagggaagaggggttacaagccagggccatcggaaactggaagggaagtcgccatgggtctggggtagagggaagggagaggcccttctaccctttgcccagactcctgagcaaggctttgccctgctccccacccttcccacacacccactcagctgcaggcctggccattaaatgtgggtgtctgacccataggttggaccatgagaccctagtggctgagggaggcctgggtgaggctctgggaggcaggactgaaaccagcaagggattcactgctgctcatgccctatggcacaacccccttatttatggggctgccttcccttccccagacctcgagtttccgttttcaagaacctttttcttcctatcttccttagggccccagggcctagcacacagcagtcactcacagtgtcctgtatttgtccagctaaatggagtgaatgaatcagtggtgaatgaatgaaaagggaaagtttctcaattggaagcatctagcccttgtggttttttttaaacctttttgaaatatatattgtaaaatagcattcacagaaaagctgaaaaa

SEQ ID NO: 8328 - DNA, 333 bp, Homo sapiens
ggatgatgaaaatattctggaattaaatagtattgatggtcatggtcacacagcattatgaatatacaaaaagccactgaattgtatactttaaaggggtgaattttatggcatgtgaattataccccaatttaaaaatatttgaaatctaaccataagggacatgttattcatatatgctcttcatgttcatgattcagccaatctattttaattttggaagtcttcaaactttaaatggatttctctaaattatcttttctggagtgaagttagaattattgatgtgagaggatatttcttctctgacatgttttatttacgtaggtcatt

SEQ ID NO: 8329 - DNA, 920 bp, Homo sapiens
ttagctggagtggcatataactcccactttcatacacagttggcatttctactgctgcctggagagacatcatagttgctatcaaggctggcaggcaccacagtttgtttcctttcaccctagttttctcatatttgtgtatagtcatttgtggagcattggtggcccagtatctctttaagcctttttttgtcattttttttagtgtcttatactacccacaatgtgggctgtacacctgtcgctctgcctccacccccacaaaccaaaagtaagttctgtggtaacaaggatgggaattatttctaggttgcagtccatgagctgggaaaggaggcagtgctcttgggagaaacagcagaggcctcaagtttcgggctgaagccaacagagtcccaaccagtgggcgtatcccaagatgaagaattttggaatacatacgagggtctgcaagaacagctcagcaggaatactcataaagagactgagcctgtgtatgagaggggtaaggagcttcatgataattttcttctcctgggagctgtgataatagtttattcacccaaaatgtcatgggcattttttgaataccctgctctgtggatttgtaaaaccagccttgatagcaactatgatgtccttccaggcagcagtagaaatgccaactgtggatgaaagtgggagtaggcctagagaacagaaatatctaaaccacagaactcttggtaataacagtgtgaactctgttccttagactagtggagaggaaggaaagaaatggagtgggaaggcttggggccacttcatccttgtaaaatacagaaggaattgagatcagatgggctgttagtggcagaatgtgaaaacagttgtgtaccaggaaaaacataataaaagacaaaaaacttcatctcctacca

SEQ ID NO: 8330 - DNA, 522 bp, Homo sapiens
cctgacctagaccgtatacagaggagtagaagctgctgtgttaaagggctggcaggcaccacagtttgtttcctttcaccctagttttctcatatttgtgtatagtcatttgtggagcattggtggcccagtatctctttaagcctttttttgtcattttttttagtgtcttatactacccacaatgtgggctgtacacctgtcgctctgcctccacccccacaaaccaaaagtaagttctgtggtaacaaggatgggaattatttctaggttgcagtccatgagctgggaaaggaggcagtgctcttgggagaaacagcagaggcctcaagtttcgggctgaagccaacagagtcccaaccagtgggcgtatcccaagatgaagaattttggaatacatacgagggtctgcaagaacagctcagcaggaatactcataaagagactgagcctgtgtatgagaggggtaaggagcttcatgataattttcttctcctgggagctgtgataatagtttattca

SEQ ID NO: 8331 - DNA, 468 bp, Homo sapiens
  misc_feature (17)..(17): n is a, c, g, or t
  misc_feature (19)..(20): n is a, c, g, or t
acaactttgttataaancnncctgggtgcttggtcacctcctcccatagaaattcggctgatttcccccttggctagcccagctgacggagtcaagagcaaaccaagaaaaactacagaagtgacaggaacaggtcttggaaggaacagaaagaaactgtcttcctatccaaagcaaattttacgcagaaaaatgctgtaatttcttgggaagattttaatgtacacctatttgtaaagtcatcagaatagtgtggattattaaatatctagtttggaagaaaataatttatataaattattgtaaatttttatgtaaacagaaggtcttcaataagtaaagtaactccatatggagtgattgtttcagtccaggcaatttttctattttatattaagacttcatacatttatatatgtaaatatggcttattaatggaatgttaaataaaatgtatacttcacagtc

SEQ ID NO: 8332 - DNA, 4336 bp, Homo sapiens
  misc_feature (28)..(28): n is a, c, g, or t
  misc_feature (55)..(55): n is a, c, g, or t
ggggcaactgggctcagcaaagtccgcncggggtcacgccattctcctgcctctntgtatagtagagacggggtttcaccttgttagccaggatggtctcgatctcctgacctcatgatccacccgcctcggcctcccaagtcagtctagtctttattgtaatcagaaccataaaggcaaaatgaaccaatattcattatatatattacatgtaggtgaatggatattttgcatgttaatgaattttagtaaatagattgccagggaagccttgtcctgttttctttagtattttaaatcattggcagttcatcttcatttgaaaataaatgccaggcacatagtaagagctcagtaaatataggtaaagggaaggaggacgacgcaaactctttttaaaaatcagttgctatgtgcagttcttaattctgttttgcgatgaataattttctgactttttgaatgcatggtagcactttggattacattaatatacttgactgtatttgcatgtggctatcatagttaccagtgaatatagaggtctgattaaatgggatactaaattcttttgttttttcagtataactcaataaatgcgcattctgattacagactgctagatttggttgttcagcctgtcccccggccttctcagtgttcggagtttattcagcaaagctccatgaaatctcctttgtacctagtatcccgttcactgccctcaagttcgcaattaaaaggatcgcctcaggccatctccagggcttcagaattacatttgcttgaaactcctcttgtagttaagaaagctaaaagtttggccatgtcagttactacttctggattttctgagttcactcctcagtccatcctgaggtctactcttcgatcaacacctttagcatctccctctccatcacctggaaggtctcctcaacgacttaaagaaactagaatttcatttgtggaagaagatgtccacccaaaatggattcctggggctgcagatgatagcaaattagaagtatttactacacctaaaaaatgtgcagttccagtggaaactgaatggctgaagagcaaagataggaccacatcttttttcctgaacagccctgaaaaggagcatcaagaaatggatgaggggtcacaaagtttagagaaactggatgtgagcaaaggaaacagcagtgtttcaatcacatccgatgagactaccttagagtatcaggatgcaccgtcaccggaagaccttgaagagactgttttcacggcctctaagcccaaaagctcttccactgcactaactactaatgtaactgaacaaactgaaaaggatggagataaagatgtatttgcatcagaagtaactccttcagacctacagaaacaaatgggcaatttagaagatgcagaaacaaaggatctcttagttgcagcagaggcattttcagaattgaatcacttaagcccggttcaaggaactgaagcttctctttgtgcaccatcagtctatgaagggaaaatcttcacccagaagtccaaggtaccagtgttggacgaaggattaacatctgttgaaacctacacccctgcaattagagcaaatgacaataaatctatggctgatgtccttggtgatggtggaaactcctcgctcactatctctgaaggtcctattgtctctgagcgcaggcttaaccaggaagtagcgctgaacttaaaagaagatcatgaagtagaagttggtgtactaaaagaaagtgttgacttaccagaagaaaagcttcccatttctgacagccctcctgatactcaagaaattcatgtgattgaacaagaaaagcttgaagctcaagattcaggagaagaggctaggaatctttcatttaatgagttatatccctctggaacacttaagcttcagtacaattttgatactattgaccaacagttttgtgacttagctgataacaaagacactgctgaatgtgacattgctgaagtagatggggaactttttgtggctcaaagcaactttaccttgatattggaaggtgaagaaggagaagttgagccaggtgattttgcatcatctgatgtgttacctaaagcagctaacacagcaactgaagaaaaacttgtatgcagtggggaaaatgataatcatggacaaattgcaaatttgccatctgccgtaactagtgaccaaaagtcccaaaaagtagacactttaccatatgtgcctgaacctattaaagtagcaattgcagaaaatttactagatgtaattaaagacacaagaagtaaagaaattacttcagatacaatggaacagtccattcatgaaacaatacctttagtgagccaaaacataatgtgtcccactaaattggtcaaatctgcatttaagactgctcaggaaacaagcacaatgactatgaatgtcagccaggttgatgacgtggtttcctccaaaactcgtacgagaggtcaacgtatccaaaacgtgaatgtcaaatcagcacaacaggaagcatcagcagatgttgctactcctaagatgccagggcagtcagtcaggaagaaaactaggaaggcaaaagaaatttctgaagcttctgaaaacatctattctgatgtcagaggactatctcagaaccagcaaatacctcaaaattctgttacgcctaggagaggaaggagaaagaaagaagttaatcaggacatactagaaaacaccagttctgtggaacaagaattacagatcactacaggtagggaatcaaaaagattaaaatcatctcagctgttggaaccagcagttgaagaaactactaaaaaagaagttaaggtttcatctgttacaaaaaggactcctagaagaattaaaagatctgtagaaaatcaggaaagtgttgaaattataaatgatctaaaagttagtacggtaacaagtcctagcagaatgatcagaaaattgagaagtactaatttagatgcttctgaaaatacaggaaataagcaagatgataaatccagtgacaagcagctgcgtattaaacatgttagaagggtcagagggagagaagttagtccatcagatgtgagagaagactccaaccttgagtcatctcagttgactgttcaagcagaatttgatatgtctgccatacctagaaaacgtggtagaccaagaaaaatcaatccatctgaagatgtaggatctaaggctgttaaggaagagagaagccccaagaagaaagaagctcccagcattagaaggagatctacaagaaataccccagctaaaagtgaaaatgttgatgttggaaaaccagctttaggaaaatccattttagtgccaaacgaggaactttcgatggtgatgagctctaagaaaaaacttacaaaaaagactgaaagtcaaagccaaaaacgttcattgcactcagtatcagaagaacgcacagatgaaatgacacataaagaaacaaatgagcaggaagaaagattgctcgccacagcttccttcactaaatcatcccgcagcagcaggactcggtctagcaaggccatcttgttgccggacctttctgaaccaaacaatgagcctttattttctccagcgtcagaagttccaaggaaagcaaaagctaaaaaaatagaggttcctgcacagctgaaagaattagtttcggatttatcttctcagtttgtcatctcacctcctgctttaaggagcagacaaaaaaacacatccaataagaacaagcttgaagatgaactgaaagatgatgcacaatcagtagaaactctgggaaagccaaaagcgaaacgaatcaggacgtcaaaaacaaaacaagcaagcaaaaacacagaaaaagaaagtgcttggtcacctcctcccatagaaattcggctgatttcccccttggctagcccagctgacggagtcaagagcaaaccaagaaaaactacagaagtgacaggaacaggtcttggaaggaacagaaagaaactgtcttcctatccaaagcaaattttacgcagaaaaatgctgtaatttcttgggaagattttaatgtacacctatttgtaaagtcatcagaatagtgtggattattaaatatctagtttggaagaaaataatttatataaattattgtaaatttttatgtaaacagaaggtcttcaataagtaaagtaactccatatggagtgattgtttcagtccaggcaatttttctattttatattaagacttcatacatttatatatgtaaatatggcttattaatggaatgttaaataaaatgtatacttcacagtc

SEQ ID NO: 8333 - DNA, 4406 bp, Homo sapiens
ctctacaggatcctctcttctccgaaaggcaacattgcaataggttgaatatagaggagttactgaagcacatgtatgaagtctgtcaggaaatgggcttgatggaagatttactgaagttaccatttacagacactgagcaggaatgtttagtgaaatttttgcagtccagtgccagcgttcagaatcatgaattccttttagtgcaccatttgcagcgtgccaattatgtgcctgccttgaagctgaaccaaactctgaagattaatgttatgaatgatcgtgatcctcgtttgcgggagagatcactggctcgaaattctatattagaccagtatggaaaaatccttcctagagtccatcgaaaattagccattgaacgagctaagccttatcatctgtcaacatcatcagtttttcgattagtttctagacccaaaccattatcagcagttccaaagcaagttgtaacaggaactgtgttgacaagatctgttttcatcaacaatgtgttatctaaaattggagaagtttgggcaagcaaagaacctataaatagcaccacacctttcaatagttctaaaatagaagaaccatctcctatagtgtattcgctcccagctccagagctgcctgaggcattttttggaacaccaatttcaaaagcatcacaaaaaatttctagactgctagatttggttgttcagcctgtcccccggccttctcagtgttcggagtttattcagcaaagctccatgaaatctcctttgtacctagtatcccgttcactgccctcaagttcgcaattaaaaggatcgcctcaggccatctccagggcttcagaattacatttgcttgaaactcctcttgtagttaagaaagctaaaagtttggccatgtcagttactacttctggattttctgagttcactcctcagtccatcctgaggtctactcttcgatcaacacctttagcatctccctctccatcacctggaaggtctcctcaacgacttaaagaaactagaatttcatttgtggaagaagatgtccacccaaaatggattcctggggctgcagatgatagcaaattagaagtatttactacacctaaaaaatgtgcagttccagtggaaactgaatggctgaagagcaaagataggaccacatcttttttcctgaacagccctgaaaaggagcatcaagaaatggatgaggggtcacaaagtttagagaaactggatgtgagcaaaggaaacagcagtgtttcaatcacatccgatgagactaccttagagtatcaggatgcaccgtcaccggaagaccttgaagagactgttttcacggcctctaagcccaaaagctcttccactgcactaactactaatgtaactgaacaaactgaaaaggatggagataaagatgtatttgcatcagaagtaactccttcagacctacagaaacaaatgggcaatttagaagatgcagaaacaaaggatctcttagttgcagcagaggcattttcagaattgaatcacttaagcccggttcaaggaactgaagcttctctttgtgcaccatcagtctatgaagggaaaatcttcacccagaagtccaaggtaccagtgttggacgaaggattaacatctgttgaaacctacacccctgcaattagagcaaatgacaataaatctatggctgatgtccttggtgatggtggaaactcctcgctcactatctctgaaggtcctattgtctctgagcgcaggcttaaccaggaagtagcgctgaacttaaaagaagatcatgaagtagaagttggtgtactaaaagaaagtgttgacttaccagaagaaaagcttcccatttctgacagccctcctgatactcaagaaattcatgtgattgaacaagaaaagcttgaagctcaagattcaggagaagaggctaggaatctttcatttaatgagttatatccctctggaacacttaagcttcagtacaattttgatactattgaccaacagttttgtgacttagctgataacaaagacactgctgaatgtgacattgctgaagtagatggggaactttttgtggctcaaagcaactttaccttgatattggaaggtgaagaaggagaagttgagccaggtgattttgcatcatctgatgtgttacctaaagcagctaacacagcaactgaagaaaaacttgtatgcagtggggaaaatgataatcatggacaaattgcaaatttgccatctgccgtaactagtgaccaaaagtcccaaaaagtagacactttaccatatgtgcctgaacctattaaagtagcaattgcagaaaatttactagatgtaattaaagacacaagaagtaaagaaattacttcagatacaatggaacagtccattcatgaaacaatacctttagtgagccaaaacataatgtgtcccactaaattggtcaaatctgcatttaagactgctcaggaaacaagcacaatgactatgaatgtcagccaggttgatgacgtggtttcctccaaaactcgtacgagaggtcaacgtatccaaaacgtgaatgtcaaatcagcacaacaggaagcatcagcagatgttgctactcctaagatgccagggcagtcagtcaggaagaaaactaggaaggcaaaagaaatttctgaagcttctgaaaacatctattctgatgtcagaggactatctcagaaccagcaaatacctcaaaattctgttacgcctaggagaggaaggagaaagaaagaagttaatcaggacatactagaaaacaccagttctgtggaacaagaattacagatcactacaggtagggaatcaaaaagattaaaatcatctcagctgttggaaccagcagttgaagaaactactaaaaaagaagttaaggtttcatctgttacaaaaaggactcctagaagaattaaaagatctgtagaaaatcaggaaagtgttgaaattataaatgatctaaaagttagtacggtaacaagtcctagcagaatgatcagaaaattgagaagtactaatttagatgcttctgaaaatacaggaaataagcaagatgataaatccagtgacaagcagctgcgtattaaacatgttagaagggtcagagggagagaagttagtccatcagatgtgagagaagactccaaccttgagtcatctcagttgactgttcaagcagaatttgatatgtctgccatacctagaaaacgtggtagaccaagaaaaatcaatccatctgaagatgtaggatctaaggctgttaaggaagagagaagccccaagaagaaagaagctcccagcattagaaggagatctacaagaaataccccagctaaaagtgaaaatgttgatgttggaaaaccagctttaggaaaatccattttagtgccaaacgaggaactttcgatggtgatgagctctaagaaaaaacttacaaaaaagactgaaagtcaaagccaaaaacgttcattgcactcagtatcagaagaacgcacagatgaaatgacacataaagaaacaaatgagcaggaagaaagattgctcgccacagcttccttcactaaatcatcccgcagcagcaggactcggtctagcaaggccatcttgttgccggacctttctgaaccaaacaatgagcctttattttctccagcgtcagaagttccaaggaaagcaaaagctaaaaaaatagaggttcctgcacagctgaaagaattagtttcggatttatcttctcagtttgtcatctcacctcctgctttaaggagcagacaaaaaaacacatccaataagaacaagcttgaagatgaactgaaagatgatgcacaatcagtagaaactctgggaaagccaaaagcgaaacgaatcaggacgtcaaaaacaaaacaagcaagcaaaaacacagaaaaagaaagtgcttggtcacctcctcccatagaaattcggctgatttcccccttggctagcccagctgacggagtcaagagcaaaccaagaaaaactacagaagtgacaggaacaggtcttggaaggaacagaaagaaactgtcttcctatccaaagcaaattttacgcagaaaaatgctgtaatttcttgggaagattttaatgtacacctatttgtaaagtcatcagaatagtgtggattattaaatatctagtttggaagaaaataatttatataaattattgtaaatttttatgtaaacagaaggtcttcaataagtaaagtaactccatatggagtgattgtttcagtccaggcaatttttctattttatattaagacttcatacatttatatatgtaaatatggcttattaatggaatgttaaataaaatgtatacttcacagtc

SEQ ID NO: 8334 - DNA, 4483 bp, Homo sapiens
ctctacaggatcctctcttctccgaaaggcaacattgcaataggttgaatatagaggagttactgaagcacatgtatgaagtctgtcaggaaatgggcttgatggaagatttactgaagttaccatttacagacactgagcaggtaattacttaccgatgtaaacttgtcagaaattcaagataaattggtagtttacaatctatcttgttcttttctaggaatgtttagtgaaatttttgcagtccagtgccagcgttcagaatcatgaattccttttagtgcaccatttgcagcgtgccaattatgtgcctgccttgaagctgaaccaaactctgaagattaatgttatgaatgatcgtgatcctcgtttgcgggagagatcactggctcgaaattctatattagaccagtatggaaaaatccttcctagagtccatcgaaaattagccattgaacgagctaagccttatcatctgtcaacatcatcagtttttcgattagtttctagacccaaaccattatcagcagttccaaagcaagttgtaacaggaactgtgttgacaagatctgttttcatcaacaatgtgttatctaaaattggagaagtttgggcaagcaaagaacctataaatagcaccacacctttcaatagttctaaaatagaagaaccatctcctatagtgtattcgctcccagctccagagctgcctgaggcattttttggaacaccaatttcaaaagcatcacaaaaaatttctagactgctagatttggttgttcagcctgtcccccggccttctcagtgttcggagtttattcagcaaagctccatgaaatctcctttgtacctagtatcccgttcactgccctcaagttcgcaattaaaaggatcgcctcaggccatctccagggcttcagaattacatttgcttgaaactcctcttgtagttaagaaagctaaaagtttggccatgtcagttactacttctggattttctgagttcactcctcagtccatcctgaggtctactcttcgatcaacacctttagcatctccctctccatcacctggaaggtctcctcaacgacttaaagaaactagaatttcatttgtggaagaagatgtccacccaaaatggattcctggggctgcagatgatagcaaattagaagtatttactacacctaaaaaatgtgcagttccagtggaaactgaatggctgaagagcaaagataggaccacatcttttttcctgaacagccctgaaaaggagcatcaagaaatggatgaggggtcacaaagtttagagaaactggatgtgagcaaaggaaacagcagtgtttcaatcacatccgatgagactaccttagagtatcaggatgcaccgtcaccggaagaccttgaagagactgttttcacggcctctaagcccaaaagctcttccactgcactaactactaatgtaactgaacaaactgaaaaggatggagataaagatgtatttgcatcagaagtaactccttcagacctacagaaacaaatgggcaatttagaagatgcagaaacaaaggatctcttagttgcagcagaggcattttcagaattgaatcacttaagcccggttcaaggaactgaagcttctctttgtgcaccatcagtctatgaagggaaaatcttcacccagaagtccaaggtaccagtgttggacgaaggattaacatctgttgaaacctacacccctgcaattagagcaaatgacaataaatctatggctgatgtccttggtgatggtggaaactcctcgctcactatctctgaaggtcctattgtctctgagcgcaggcttaaccaggaagtagcgctgaacttaaaagaagatcatgaagtagaagttggtgtactaaaagaaagtgttgacttaccagaagaaaagcttcccatttctgacagccctcctgatactcaagaaattcatgtgattgaacaagaaaagcttgaagctcaagattcaggagaagaggctaggaatctttcatttaatgagttatatccctctggaacacttaagcttcagtacaattttgatactattgaccaacagttttgtgacttagctgataacaaagacactgctgaatgtgacattgctgaagtagatggggaactttttgtggctcaaagcaactttaccttgatattggaaggtgaagaaggagaagttgagccaggtgattttgcatcatctgatgtgttacctaaagcagctaacacagcaactgaagaaaaacttgtatgcagtggggaaaatgataatcatggacaaattgcaaatttgccatctgccgtaactagtgaccaaaagtcccaaaaagtagacactttaccatatgtgcctgaacctattaaagtagcaattgcagaaaatttactagatgtaattaaagacacaagaagtaaagaaattacttcagatacaatggaacagtccattcatgaaacaatacctttagtgagccaaaacataatgtgtcccactaaattggtcaaatctgcatttaagactgctcaggaaacaagcacaatgactatgaatgtcagccaggttgatgacgtggtttcctccaaaactcgtacgagaggtcaacgtatccaaaacgtgaatgtcaaatcagcacaacaggaagcatcagcagatgttgctactcctaagatgccagggcagtcagtcaggaagaaaactaggaaggcaaaagaaatttctgaagcttctgaaaacatctattctgatgtcagaggactatctcagaaccagcaaatacctcaaaattctgttacgcctaggagaggaaggagaaagaaagaagttaatcaggacatactagaaaacaccagttctgtggaacaagaattacagatcactacaggtagggaatcaaaaagattaaaatcatctcagctgttggaaccagcagttgaagaaactactaaaaaagaagttaaggtttcatctgttacaaaaaggactcctagaagaattaaaagatctgtagaaaatcaggaaagtgttgaaattataaatgatctaaaagttagtacggtaacaagtcctagcagaatgatcagaaaattgagaagtactaatttagatgcttctgaaaatacaggaaataagcaagatgataaatccagtgacaagcagctgcgtattaaacatgttagaagggtcagagggagagaagttagtccatcagatgtgagagaagactccaaccttgagtcatctcagttgactgttcaagcagaatttgatatgtctgccatacctagaaaacgtggtagaccaagaaaaatcaatccatctgaagatgtaggatctaaggctgttaaggaagagagaagccccaagaagaaagaagctcccagcattagaaggagatctacaagaaataccccagctaaaagtgaaaatgttgatgttggaaaaccagctttaggaaaatccattttagtgccaaacgaggaactttcgatggtgatgagctctaagaaaaaacttacaaaaaagactgaaagtcaaagccaaaaacgttcattgcactcagtatcagaagaacgcacagatgaaatgacacataaagaaacaaatgagcaggaagaaagattgctcgccacagcttccttcactaaatcatcccgcagcagcaggactcggtctagcaaggccatcttgttgccggacctttctgaaccaaacaatgagcctttattttctccagcgtcagaagttccaaggaaagcaaaagctaaaaaaatagaggttcctgcacagctgaaagaattagtttcggatttatcttctcagtttgtcatctcacctcctgctttaaggagcagacaaaaaaacacatccaataagaacaagcttgaagatgaactgaaagatgatgcacaatcagtagaaactctgggaaagccaaaagcgaaacgaatcaggacgtcaaaaacaaaacaagcaagcaaaaacacagaaaaagaaagtgcttggtcacctcctcccatagaaattcggctgatttcccccttggctagcccagctgacggagtcaagagcaaaccaagaaaaactacagaagtgacaggaacaggtcttggaaggaacagaaagaaactgtcttcctatccaaagcaaattttacgcagaaaaatgctgtaatttcttgggaagattttaatgtacacctatttgtaaagtcatcagaatagtgtggattattaaatatctagtttggaagaaaataatttatataaattattgtaaatttttatgtaaacagaaggtcttcaataagtaaagtaactccatatggagtgattgtttcagtccaggcaatttttctattttatattaagacttcatacatttatatatgtaaatatggcttattaatggaatgttaaataaaatgtatacttcacagtc

SEQ ID NO: 8335 - DNA, 3716 bp, Homo sapiens
agcatggtatcaacccagagtgcccattacggccggggtgttcggagtttattcagcaaagctccatgaaatctcctttgtacctagtatcccgttcactgccctcaagttcgcaattaaaaggatcgcctcaggccatctccagggcttcagaattacatttgcttgaaactcctcttgtagttaagaaagctaaaagtttggccatgtcagttactacttctggattttctgagttcactcctcagtccatcctgaggtctactcttcgatcaacacctttagcatctccctctccatcacctggaaggtctcctcaacgacttaaagaaactagaatttcatttgtggaagaagatgtccacccaaaatggattcctggggctgcagatgatagcaaattagaagtatttactacacctaaaaaatgtgcagttccagtggaaactgaatggctgaagagcaaagataggaccacatcttttttcctgaacagccctgaaaaggagcatcaagaaatggatgaggggtcacaaagtttagagaaactggatgtgagcaaaggaaacagcagtgtttcaatcacatccgatgagactaccttagagtatcaggatgcaccgtcaccggaagaccttgaagagactgttttcacggcctctaagcccaaaagctcttccactgcactaactactaatgtaactgaacaaactgaaaaggatggagataaagatgtatttgcatcagaagtaactccttcagacctacagaaacaaatgggcaatttagaagatgcagaaacaaaggatctcttagttgcagcagaggcattttcagaattgaatcacttaagcccggttcaaggaactgaagcttctctttgtgcaccatcagtctatgaagggaaaatcttcacccagaagtccaaggtaccagtgttggacgaaggattaacatctgttgaaacctacacccctgcaattagagcaaatgacaataaatctatggctgatgtccttggtgatggtggaaactcctcgctcactatctctgaaggtcctattgtctctgagcgcaggcttaaccaggaagtagcgctgaacttaaaagaagatcatgaagtagaagttggtgtactaaaagaaagtgttgacttaccagaagaaaagcttcccatttctgacagccctcctgatactcaagaaattcatgtgattgaacaagaaaagcttgaagctcaagattcaggagaagaggctaggaatctttcatttaatgagttatatccctctggaacacttaagcttcagtacaattttgatactattgaccaacagttttgtgacttagctgataacaaagacactgctgaatgtgacattgctgaagtagatggggaactttttgtggctcaaagcaactttaccttgatattggaaggtgaagaaggagaagttgagccaggtgattttgcatcatctgatgtgttacctaaagcagctaacacagcaactgaagaaaaacttgtatgcagtggggaaaatgataatcatggacaaattgcaaatttgccatctgccgtaactagtgaccaaaagtcccaaaaagtagacactttaccatatgtgcctgaacctattaaagtagcaattgcagaaaatttactagatgtaattaaagacacaagaagtaaagaaattacttcagatacaatggaacagtccattcatgaaacaatacctttagtgagccaaaacataatgtgtcccactaaattggtcaaatctgcatttaagactgctcaggaaacaagcacaatgactatgaatgtcagccaggttgatgacgtggtttcctccaaaactcgtacgagaggtcaacgtatccaaaacgtgaatgtcaaatcagcacaacaggaagcatcagcagatgttgctactcctaagatgccagggcagtcagtcaggaagaaaactaggaaggcaaaagaaatttctgaagcttctgaaaacatctattctgatgtcagaggactatctcagaaccagcaaatacctcaaaattctgttacgcctaggagaggaaggagaaagaaagaagttaatcaggacatactagaaaacaccagttctgtggaacaagaattacagatcactacaggtagggaatcaaaaagattaaaatcatctcagctgttggaaccagcagttgaagaaactactaaaaaagaagttaaggtttcatctgttacaaaaaggactcctagaagaattaaaagatctgtagaaaatcaggaaagtgttgaaattataaatgatctaaaagttagtacggtaacaagtcctagcagaatgatcagaaaattgagaagtactaatttagatgcttctgaaaatacaggaaataagcaagatgataaatccagtgacaagcagctgcgtattaaacatgttagaagggtcagagggagagaagttagtccatcagatgtgagagaagactccaaccttgagtcatctcagttgactgttcaagcagaatttgatatgtctgccatacctagaaaacgtggtagaccaagaaaaatcaatccatctgaagatgtaggatctaaggctgttaaggaagagagaagccccaagaagaaagaagctcccagcattagaaggagatctacaagaaataccccagctaaaagtgaaaatgttgatgttggaaaaccagctttaggaaaatccattttagtgccaaacgaggaactttcgatggtgatgagctctaagaaaaaacttacaaaaaagactgaaagtcaaagccaaaaacgttcattgcactcagtatcagaagaacgcacagatgaaatgacacataaagaaacaaatgagcaggaagaaagattgctcgccacagcttccttcactaaatcatcccgcagcagcaggactcggtctagcaaggccatcttgttgccggacctttctgaaccaaacaatgagcctttattttctccagcgtcagaagttccaaggaaagcaaaagctaaaaaaatagaggttcctgcacagctgaaagaattagtttcggatttatcttctcagtttgtcatctcacctcctgctttaaggagcagacaaaaaaacacatccaataagaacaagcttgaagatgaactgaaagatgatgcacaatcagtagaaactctgggaaagccaaaagcgaaacgaatcaggacgtcaaaaacaaaacaagcaagcaaaaacacagaaaaagaaagtgcttggtcacctcctcccatagaaattcggctgatttcccccttggctagcccagctgacggagtcaagagcaaaccaagaaaaactacagaagtgacaggaacaggtcttggaaggaacagaaagaaactgtcttcctatccaaagcaaattttacgcagaaaaatgctgtaatttcttgggaagattttaatgtacacctatttgtaaagtcatcagaatagtgtggattattaaatatctagtttggaagaaaataatttatataaattattgtaaatttttatgtaaacagaaggtcttcaataagtaaagtaactccatatggagtgattgtttcagtccaggcaatttttctattttatattaagacttcatacatttatatatgtaaatatggcttattaatggaatgttaaataaaatgtatacttcacagtc

SEQ ID NO: 8336 - DNA, 5791 bp, Homo sapiens
  misc_feature (28)..(28): n is a, c, g, or t
  misc_feature (55)..(55): n is a, c, g, or t
ggggcaactgggctcagcaaagtccgcncggggtcacgccattctcctgcctctntgtatagtagagacggggtttcaccttgttagccaggatggtctcgatctcctgacctcatgatccacccgcctcggcctcccaagtcagtctagtctttattgtaatcagaaccataaaggcaaaatgaaccaatattcattatatatattacatgtaggtgaatggatattttgcatgttaatgaattttagtaaatagattgccagggaagccttgtcctgttttctttagtattttaaatcattggcagttcatcttcatttgaaaataaatgccaggcacatagtaagagctcagtaaatataggtaaagggaaggaggacgacgcaaactctttttaaaaatcagttgctatgtgcagttcttaattctgttttgcgatgaataattttctgactttttgaatgcatggtagcactttggattacattaatatacttgactgtatttgcatgtggctatcatagttaccagtgaatatagaggtctgattaaatgggatactaaattcttttgttttttcagtataactcaataaatgcgcattctgattacagactgctagatttggttgttcagcctgtcccccggccttctcagtgttcggagtttattcagcaaagctccatgaaatctcctttgtacctagtatcccgttcactgccctcaagttcgcaattaaaaggatcgcctcaggccatctccagggcttcagaattacatttgcttgaaactcctcttgtagttaagaaagctaaaagtttggccatgtcagttactacttctggattttctgagttcactcctcagtccatcctgaggtctactcttcgatcaacacctttagcatctccctctccatcacctggaaggtctcctcaacgacttaaagaaactagaatttcatttgtggaagaagatgtccacccaaaatggattcctggggctgcagatgatagcaaattagaagtatttactacacctaaaaaatgtgcagttccagtggaaactgaatggctgaagagcaaagataggaccacatcttttttcctgaacagccctgaaaaggagcatcaagaaatggatgaggggtcacaaagtttagagaaactggatgtgagcaaaggaaacagcagtgtttcaatcacatccgatgagactaccttagagtatcaggatgcaccgtcaccggaagaccttgaagagactgttttcacggcctctaagcccaaaagctcttccactgcactaactactaatgtaactgaacaaactgaaaaggatggagataaagatgtatttgcatcagaagtaactccttcagacctacagaaacaaatgggcaatttagaagatgcagaaacaaaggatctcttagttgcagcagaggcattttcagaattgaatcacttaagcccggttcaaggaactgaagcttctctttgtgcaccatcagtctatgaagggaaaatcttcacccagaagtccaaggtaccagtgttggacgaaggattaacatctgttgaaacctacacccctgcaattagagcaaatgacaataaatctatggctgatgtccttggtgatggtggaaactcctcgctcactatctctgaaggtcctattgtctctgagcgcaggcttaaccaggaagtagcgctgaacttaaaagaagatcatgaagtagaagttggtgtactaaaagaaagtgttgacttaccagaagaaaagcttcccatttctgacagccctcctgatactcaagaaattcatgtgattgaacaagaaaagcttgaagctcaagattcaggagaagaggctaggaatctttcatttaatgagttatatccctctggaacacttaagcttcagtacaattttgatactattgaccaacagttttgtgacttagctgataacaaagacactgctgaatgtgacattgctgaagtagatggggaactttttgtggctcaaagcaactttaccttgatattggaaggtgaagaaggagaagttgagccaggtgattttgcatcatctgatgtgttacctaaagcagctaacacagcaactgaagaaaaacttgtatgcagtggggaaaatgataatcatggacaaattgcaaatttgccatctgccgtaactagtgaccaaaagtcccaaaaagtagacactttaccatatgtgcctgaacctattaaagtagcaattgcagaaaatttactagatgtaattaaagacacaagaagtaaagaaattacttcagatacaatggaacagtccattcatgaaacaatacctttagtgagccaaaacataatgtgtcccactaaattggtcaaatctgcatttaagactgctcaggaaacaagcacaatgactatgaatgtcagccaggttgatgacgtggtttcctccaaaactcgtacgagaggtcaacgtatccaaaacgtgaatgtcaaatcagcacaacaggaagcatcagcagatgttgctactcctaagatgccagggcagtcagtcaggaagaaaactaggaaggcaaaagaaatttctgaagcttctgaaaacatctattctgatgtcagaggactatctcagaaccagcaaatacctcaaaattctgttacgcctaggagaggaaggagaaagaaagaagttaatcaggacatactagaaaacaccagttctgtggaacaagaattacagatcactacaggtagggaatcaaaaagattaaaatcatctcagctgttggaaccagcagttgaagaaactactaaaaaagaagttaaggtttcatctgttacaaaaaggactcctagaagaattaaaagatctgtagaaaatcaggaaagtgttgaaattataaatgatctaaaagttagtacggtaacaagtcctagcagaatgatcagaaaattgagaagtactaatttagatgcttctgaaaatacaggaaataagcaagatgataaatccagtgacaagcagctgcgtattaaacatgttagaagggtcagagggagagaagttagtccatcagatgtgagagaagactccaaccttgagtcatctcagttgactgttcaagcagaatttgatatgtctgccatacctagaaaacgtggtagaccaagaaaaatcaatccatctgaagatgtaggatctaaggctgttaaggaagagagaagccccaagaagaaagaagctcccagcattagaaggagatctacaagaaataccccagctaaaagtgaaaatgttgatgttggaaaaccagctttaggaaaatccattttagtgccaaacgaggaactttcgatggtgatgagctctaagaaaaaacttacaaaaaagactgaaagtcaaagccaaaaacgttcattgcactcagtatcagaagaacgcacagatgaaatgacacataaagaaacaaatgagcaggaagaaagattgctcgccacagcttccttcactaaatcatcccgcagcagcaggactcggtctagcaaggccatcttgttgccggacctttctgaaccaaacaatgagcctttattttctccagcgtcagaagttccaaggaaagcaaaagctaaaaaaatagaggttcctgcacagctgaaagaattagtttcggatttatcttctcagtttgtcatctcacctcctgctttaaggagcagacaaaaaaacacatccaataagaacaagcttgaagatgaactgaaagatgatgcacaatcagtagaaactctgggaaagccaaaagcgaaacgaatcaggacgtcaaaaacaaaacaagcaagcaaaaacacagaaaaagaaagtgcttggtcacctcctcccatagaaattcggctgatttcccccttggctagcccagctgacggagtcaagagcaaaccaagaaaaactacagaagtgacaggaacaggtcttggaaggaacagaaagaaactgtcttcctatccaaagcaaattttacgcagaaaaatgctgtaatttcttgggaagattttaatgtacacctatttgtaaagtcatcagaatagtgtggattattaaatatctagtttggaagaaaataatttatataaattattgtaaatttttatgtaaacagaaggtcttcaataagtaaagtaactccatatggagtgattgtttcagtccaggcaatttttctattttatattaagacttcatacatttatatatgtaaatatggcttattaatggaatgttaaataaaatgtatacttcacagtcgtttgtgtcttggatttttgaaagggaggggatatctgtttaaatagttttatatgctcattggtctcattttctctataattaaaatactagaccagtcttaaaatggggatgattgaagtattgatatttctttttacagttactattttataatttatgcactttgattctgtgattcagatttctaatcagaaaatgtatttttttgtttttggctgttactatgttaaaattgaattatgggcatgtcattttgccatctttgtagtttcacaaattttgtgtaatctacctcaaatgaataatccaagtattggttaactataatgttggcatctcttattcggcaagcttaaaggctctttaaagtcttaattagtcaaagactaatccaggttagattgaccggttcactgctcacttgcaaccttatcaaagggtttgacaaagggaaatgtaaaataaatctgtttatggatattgagtgcatcttgtatgtgcctaatattgataggatgagatgtctgaacaaatttttataatattgctgtgaaggagcttgctattgaaccacagaaatcccttaatattcaggttttaaaactggcaaattctcacaggacctcaggcacagattattgaggttgggagagagtgagtagatgtagaaaaggagaaaaacaacacacgccctgttctctacagtacaactgtgtgcaattaagcaatggtacttgatgtaggctctaacactcatcaataaataagtgttgtaaaataatttataacaggtaatcgatagtgtgtaatgaatggactattaataattgattatctagaaacgaactgctttcgtgggcttttaatattttaatgtgaagcatatgcagtgtgctttctgcatttatttttctaccaaataatacagataatgagaaattggtgaaaatgcctacgcaaagtgttgacagtgtgaaagcagtgcgagtgcggccttttagtcaggttagtgatggatgttacgctgccttgttgaaaatttcactgactttgattttattacttttttaatgatagttatcaaacttgtatttaagctgcttgtcatttatggaatattgaacttatttaaatgaacttgttaaatgaataaagagctaaacataattcagtaaacaattcctttgcgcaagtagcacaataaacatggatgcaacgtatgtcaagttaatacttttttaaaccaacgcaatttggtgaatatagatgtgtggtacctgtttttaataagtgtactttttttcccccctccgtgaatgtagatcataagcaaacaaattgcctgttctaaatgaactttacatatattttaaatgaatgtatgtacttacgtataaatgtctttatatagcttgaataaaaacactgctcattaaaatgtgttgctacaac

SEQ ID NO: 8337 - DNA, 4202 bp, Homo sapiens
  misc_feature (28)..(28): n is a, c, g, or t
  misc_feature (55)..(55): n is a, c, g, or t
ggggcaactgggctcagcaaagtccgcncggggtcacgccattctcctgcctctntgtatagtagagacggggtttcaccttgttagccaggatggtctcgatctcctgacctcatgatccacccgcctcggcctcccaagtcagtctagtctttattgtaatcagaaccataaaggcaaaatgaaccaatattcattatatatattacatgtaggtgaatggatattttgcatgttaatgaattttagtaaatagattgccagggaagccttgtcctgttttctttagtattttaaatcattggcagttcatcttcatttgaaaataaatgccaggcacatagtaagagctcagtaaatataggtaaagggaaggaggacgacgcaaactctttttaaaaatcagttgctatgtgcagttcttaattctgttttgcgatgaataattttctgactttttgaatgcatggtagcactttggattacattaatatacttgactgtatttgcatgtggctatcatagttaccagtgaatatagaggtctgattaaatgggatactaaattcttttgttttttcagtataactcaataaatgcgcattctgattacagactgctagatttggttgttcagcctgtcccccggccttctcagtgttcggagtttattcagcaaagctccatgaaatctcctttgtacctagtatcccgttcactgccctcaagttcgcaattaaaaggatcgcctcaggccatctccagggcttcagaattacatttgcttgaaactcctcttgtagttaagaaagctaaaagtttggccatgtcagttactacttctggattttctgagttcactcctcagtccatcctgaggtctactcttcgatcaacacctttagcatctccctctccatcacctggaaggtctcctcaacgacttaaagaaactagaatttcatttgtggaagaagatgtccacccaaaatggattcctggggctgcagatgatagcaaattagaagtatttactacacctaaaaaatgtgcagttccagtggaaactgaatggctgaagagcaaagataggaccacatcttttttcctgaacagccctgaaaaggagcatcaagaaatggatgaggggtcacaaagtttagagaaactggatgtgagcaaaggaaacagcagtgtttcaatcacatccgatgagactaccttagagtatcaggatgcaccgtcaccggaagaccttgaagagactgttttcacggcctctaagcccaaaagctcttccactgcactaactactaatgtaactgaacaaactgaaaaggatggagataaagatgtatttgcatcagaagtaactccttcagacctacagaaacaaatgggcaatttagaagatgcagaaacaaaggatctcttagttgcagcagaggcattttcagaattgaatcacttaagcccggttcaaggaactgaagcttctctttgtgcaccatcagtctatgaagggaaaatcttcacccagaagtccaaggtaccagtgttggacgaaggattaacatctgttgaaacctacacccctgcaattagagcaaatgacaataaatctatggctgatgtccttggtgatggtggaaactcctcgctcactatctctgaaggtcctattgtctctgagcgcaggcttaaccaggaagtagcgctgaacttaaaagaagatcatgaagtagaagttggtgtactaaaagaaagtgttgacttaccagaagaaaagcttcccatttctgacagccctcctgatactcaagaaattcatgtgattgaacaagaaaagcttgaagctcaagattcaggagaagaggctaggaatctttcatttaatgagttatatccctctggaacacttaagcttcagtacaattttgatactattgaccaacagttttgtgacttagctgataacaaagacactgctgaatgtgacattgctgaagtagatggggaactttttgtggctcaaagcaactttaccttgatattggaaggtgaagaaggagaagttgagccaggtgattttgcatcatctgatgtgttacctaaagcagctaacacagcaactgaagaaaaacttgtatgcagtggggaaaatgataatcatggacaaattgcaaatttgccatctgccgtaactagtgaccaaaagtcccaaaaagtagacactttaccatatgtgcctgaacctattaaagtagcaattgcagaaaatttactagatgtaattaaagacacaagaagtaaagaaattacttcagatacaatggaacagtccattcatgaaacaatacctttagtgagccaaaacataatgtgtcccactaaattggtcaaatctgcatttaagactgctcaggaaacaagcacaatgactatgaatgtcagccaggttgatgacgtggtttcctccaaaactcgtacgagaggtcaacgtatccaaaacgtgaatgtcaaatcagcacaacaggaagcatcagcagatgttgctactcctaagatgccagggcagtcagtcaggaagaaaactaggaaggcaaaagaaatttctgaagcttctgaaaacatctattctgatgtcagaggactatctcagaaccagcaaatacctcaaaattctgttacgcctaggagaggaaggagaaagaaagaagttaatcaggacatactagaaaacaccagttctgtggaacaagaattacagatcactacaggtagggaatcaaaaagattaaaatcatctcagctgttggaaccagcagttgaagaaactactaaaaaagaagttaaggtttcatctgttacaaaaaggactcctagaagaattaaaagatctgtagaaaatcaggaaagtgttgaaattataaatgatctaaaagttagtacggtaacaagtcctagcagaatgatcagaaaattgagaagtactaatttagatgcttctgaaaatacaggaaataagcaagatgataaatccagtgacaagcagctgcgtattaaacatgttagaagggtcagagggagagaagttagtccatcagatgtgagagaagactccaaccttgagtcatctcagttgactgttcaagcagaatttgatatgtctgccatacctagaaaacgtggtagaccaagaaaaatcaatccatctgaagatgtaggatctaaggctgttaaggaagagagaagccccaagaagaaagaagctcccagcattagaaggagatctacaagaaataccccagctaaaagtgaaaatgttgatgttggaaaaccagctttaggaaaatccattttagtgccaaacgaggaactttcgatggtgatgagctctaagaaaaaacttacaaaaaagactgaaagtcaaagccaaaaacgttcattgcactcagtatcagaagaacgcacagatgaaatgacacataaagaaacaaatgagcaggaagaaagattgctcgccacagcttccttcactaaatcatcccgcagcagcaggactcggtctagcaaggccatcttgttgccggacctttctgaaccaaacaatgagcctttattttctccagcgtcagaagttccaaggaaagcaaaagaaagatgatgcacaatcagtagaaactctgggaaagccaaaagcgaaacgaatcaggacgtcaaaaacaaaacaagcaagcaaaaacacagaaaaagaaagtgcttggtcacctcctcccatagaaattcggctgatttcccccttggctagcccagctgacggagtcaagagcaaaccaagaaaaactacagaagtgacaggaacaggtcttggaaggaacagaaagaaactgtcttcctatccaaagcaaattttacgcagaaaaatgctgtaatttcttgggaagattttaatgtacacctatttgtaaagtcatcagaatagtgtggattattaaatatctagtttggaagaaaataatttatataaattattgtaaatttttatgtaaacagaaggtcttcaataagtaaagtaactccatatggagtgattgtttcagtccaggcaatttttctattttatattaagacttcatacatttatatatgtaaatatggcttattaatggaatgttaaataaaatgtatacttcacagtc

SEQ ID NO: 8338 - DNA, 5737 bp, Homo sapiens
  misc_feature (28)..(28): n is a, c, g, or t
  misc_feature (55)..(55): n is a, c, g, or t
ggggcaactgggctcagcaaagtccgcncggggtcacgccattctcctgcctctntgtatagtagagacggggtttcaccttgttagccaggatggtctcgatctcctgacctcatgatccacccgcctcggcctcccaagtcagtctagtctttattgtaatcagaaccataaaggcaaaatgaaccaatattcattatatatattacatgtaggtgaatggatattttgcatgttaatgaattttagtaaatagattgccagggaagccttgtcctgttttctttagtattttaaatcattggcagttcatcttcatttgaaaataaatgccaggcacatagtaagagctcagtaaatataggtaaagggaaggaggacgacgcaaactctttttaaaaatcagttgctatgtgcagttcttaattctgttttgcgatgaataattttctgactttttgaatgcatggtagcactttggattacattaatatacttgactgtatttgcatgtggctatcatagttaccagtgaatatagaggtctgattaaatgggatactaaattcttttgttttttcagtataactcaataaatgcgcattctgattacagactgctagatttggttgttcagcctgtcccccggccttctcagtgttcggagtttattcagcaaagctccatgaaatctcctttgtacctagtatcccgttcactgccctcaagttcgcaattaaaaggatcgcctcaggccatctccagggcttcagaattacatttgcttgaaactcctcttgtagttaagaaagctaaaagtttggccatgtcagttactacttctggattttctgagttcactcctcagtccatcctgaggtctactcttcgatcaacacctttagcatctccctctccatcacctggaaggtctcctcaacgacttaaagaaactagaatttcatttgtggaagaagatgtccacccaaaatggattcctggggctgcagatgatagcaaattagaagtatttactacacctaaaaaatgtgcagttccagtggaaactgaatggctgaagagcaaagataggaccacatcttttttcctgaacagccctgaaaaggagcatcaagaaatggatgaggggtcacaaagtttagagaaactggatgtgagcaaaggaaacagcagtgtttcaatcacatccgatgagactaccttagagtatcaggatgcaccgtcaccggaagaccttgaagagactgttttcacggcctctaagcccaaaagctcttccactgcactaactactaatgtaactgaacaaactgaaaaggatggagataaagatgtatttgcatcagaagtaactccttcagacctacagaaacaaatgggcaatttagaagatgcagaaacaaaggatctcttagttgcagcagaggcattttcagaattgaatcacttaagcccggttcaaggaactgaagcttctctttgtgcaccatcagtctatgaagggaaaatcttcacccagaagtccaaggtaccagtgttggacgaaggattaacatctgttgaaacctacacccctgcaattagagcaaatgacaataaatctatggctgatgtccttggtgatggtggaaactcctcgctcactatctctgaaggtcctattgtctctgagcgcaggcttaaccaggaagtagcgctgaacttaaaagaagatcatgaagtagaagttggtgtactaaaagaaagtgttgacttaccagaagaaaagcttcccatttctgacagccctcctgatactcaagaaattcatgtgattgaacaagaaaagcttgaagctcaagattcaggagaagaggctaggaatctttcatttaatgagttatatccctctggaacacttaagcttcagtacaattttgatactattgaccaacagttttgtgacttagctgataacaaagacactgctgaatgtgacattgctgaagtagatggggaactttttgtggctcaaagcaactttaccttgatattggaaggtgaagaaggagaagttgagccaggtgattttgcatcatctgatgtgttacctaaagcagctaacacagcaactgaagaaaaacttgtatgcagtggggaaaatgataatcatggacaaattgcaaatttgccatctgccgtaactagtgaccaaaagtcccaaaaagtagacactttaccatatgtgcctgaacctattaaagtagcaattgcagaaaatttactagatgtaattaaagacacaagaagtaaagaaattacttcagatacaatggaacagtccattcatgaaacaatacctttagtgagccaaaacataatgtgtcccactaaattggtcaaatctgcatttaagactgctcaggaaacaagcacaatgactatgaatgtcagccaggttgatgacgtggtttcctccaaaactcgtacgagaggtcaacgtatccaaaacgtgaatgtcaaatcagcacaacaggaagcatcagcagatgttgctactcctaagatgccagggcagtcagtcaggaagaaaactaggaaggcaaaagaaatttctgaagcttctgaaaacatctattctgatgtcagaggactatctcagaaccagcaaatacctcaaaattctgttacgcctaggagaggaaggagaaagaaagaagttaatcaggacatactagaaaacaccagttctgtggaacaagaattacagatcactacaggtagggaatcaaaaagattaaaatcatctcagctgttggaaccagcagttgaagaaactactaaaaaagaagttaaggtttcatctgttacaaaaaggactcctagaagaattaaaagatctgtagaaaatcaggaaagtgttgaaattataaatgatctaaaagttagtacggtaacaagtcctagcagaatgatcagaaaattgagaagtactaatttagatgcttctgaaaatacaggaaataagcaagatgataaatccagtgacaagcagctgcgtattaaacatgttagaagggtcagagggagagaagttagtccatcagatgtgagagaagactccaaccttgagtcatctcagttgactgttcaagcagaatttgatatgtctgccatacctagaaaacgtggtagaccaagaaaaatcaatccatctgaagatgtaggatctaaggctgttaaggaagagagaagccccaagaagaaagaagctcccagcattagaaggagatctacaagaaataccccagctaaaagtgaaaatgttgatgttggaaaaccagctttaggaaaatccattttagtgccaaacgaggaactttcgatggtgatgagctctaagaaaaaacttacaaaaaagactgaaagtcaaagccaaaaacgttcattgcactcagtatcagaagaacgcacagatgaaatgacacataaagaaacaaatgagcaggaagaaagattgctcgccacagcttccttcactaaatcatcccgcagcagcaggactcggtctagcaaggccatcttgttgccggacctttctgaaccaaacaatgagcctttattttctccagcgtcagaagttccaaggaaagcaaaagctaaaaaaatagaggttcctgcacagctgaaagaattagtttcggatttatcttctcagtttgtcatctcacctcctgctttaaggagcagacaaaaaaacacatccaataagaacaagcttgaagatgaactgaaagatgatgcacaatcagtagaaactctgggaaagccaaaagcgaaacgaatcaggacgtcaaaaacaaaacaagcaagcaaaaacacagaaaaagaaagtgcttggtcacctcctcccatagaaattcggctgatttcccccttggctagcccagctgacggagtcaagagcaaaccaagaaaaactacagaagtgacaggaacaggtcttggaaggaacagaaagaaactgtcttcctatccaaagcaaattttacgcagaaaaatgctgtaatttcttgggaagattttaatgtacacctatttgtaaagtcatcagaatagtgtggattattaaatatctagtttggaagaaaataatttatataaattattgtaaatttttatgtaaacagaaggtcttcaataagtaaagtaactccatatggagtgattgtttcagtccaggcaatttttctattttatattaagacttcatacatttatatatgtaaatatggcttattaatggaatgttaaataaaatgtatacttcacagtcgtttgtgtcttggatttttgaaagggaggggatatctgtttaaatagttttatatgctcattggtctcattttctctataattaaaatactagaccagtcttaaaatggggatgattgaagtattgatatttctttttacagttactattttataatttatgcactttgattctgtgattcagatttctaatcagaaaatgtatttttttgtttttggctgttactatgttaaaattgaattatgggcatgtcattttgccatctttgtagtttcacaaattttgtgtaatctacctcaaatgaataatccaagtattggttaactataatgttggcatctcttattcggcaagcttaaaggctctttaaagtcttaattagtcaaagactaatccaggttagattgaccggttcactgctcacttgcaaccttatcaaagggtttgacaaagggaaatgtaaaataaatctgtttatggatattgagtgcatcttgtatgtgcctaatattgataggatgagatgtctgaacaaatttttataatattgctgtgaaggagcttgctattgaaccacagaaatcccttaatattcaggttttaaaactggcaaattctcacaggacctcaggcacagattattgaggttgggagagagtgagtagatgtagaaaaggagaaaaacaacacacgccctgttctctacagtacaactgtgtgcaattaagcaatggtacttgatgtaggctctaacactcatcaataaataagtgttattgattatctagaaacgaactgctttcgtgggcttttaatattttaatgtgaagcatatgcagtgtgctttctgcatttatttttctaccaaataatacagataatgagaaattggtgaaaatgcctacgcaaagtgttgacagtgtgaaagcagtgcgagtgcggccttttagtcaggttagtgatggatgttacgctgccttgttgaaaatttcactgactttgattttattacttttttaatgatagttatcaaacttgtatttaagctgcttgtcatttatggaatattgaacttatttaaatgaacttgttaaatgaataaagagctaaacataattcagtaaacaattcctttgcgcaagtagcacaataaacatggatgcaacgtatgtcaagttaatacttttttaaaccaacgcaatttggtgaatatagatgtgtggtacctgtttttaataagtgtactttttttcccccctccgtgaatgtagatcataagcaaacaaattgcctgttctaaatgaactttacatatattttaaatgaatgtatgtacttacgtataaatgtctttatatagcttgaataaaaacactgctcattaaaatgtgttgctacaac

SEQ ID NO: 8339 - DNA, 867 bp, Homo sapiens
  misc_feature (8)..(8): n is a, c, g, or t
atgtcctngctactgggaggctgaggcaggagaatcgcttgaacccgagaggttgcagtgagccaacatcaggccattgcacgcgacctcaaaaaaaaatcttgattcttttggctcactacgttcctttctgaaccaaacaatgagcctttattttctccagcgtcagaagttccaaggaaagcaaaagctaaaaaaatagaggttcctgcacagctgaaagaattagtttcggatttatcttctcagtttgtcatctcacctcctgctttaaggagcagacaaaaaaacacatccaataagaacaagcttgaagatgaactgaaagatgatgcacaatcagtagaaactctgggaaagccaaaagcgaaacgaatcaggacgtcaaaaacaaaacaagcaagcaaaaacacagaaaaagaaagtgcttggtcacctcctcccatagaaattcggctgatttcccccttggctagcccagctgacggagtcaagagcaaaccaagaaaaactacagaagtgacaggaacaggtcttggaaggaacagaaagaaactgtcttcctatccaaagcaaattttacgcagaaaaatgctgtaatttcttgggaagattttaatgtacacctatttgtaaagtcatcagaatagtgtggattattaaatatctagtttggaagaaaataatttatataaattattgtaaatttttatgtaaacagaaggtcttcaataagtaaagtaactccatatggagtgattgtttcagtccaggcaatttttctattttatattaagacttcatacatttatatatgtaaatatggcttattaatggaatgttaaataaaatgtatacttcacagtc

SEQ ID NO: 8340 - DNA, 2696 bp, Homo sapiens
aaaaggaggatggtagggtgggggcagtttagttcccaatggatatttctggtttttgcagaaaaagtaggaaagggaagtgggatggtttacctctttgtcaggaaagttaggtaactattagtaaaaaacaattatacactttaaaatcctgcaattattttacagaaagcactaaaactgcatgcatgggaagatcactccatttcagatgtatttgttacacagtatcttgtttatgctgtgcttagtaggcatggttgaattcaataaaagcacacgtgaatgcattttatttaagacactatggctaataccactgtttacatataaactggcgtatctatgtgagaaactcaagtttgtgaaattctgtgcatctttgctaattgctgtgtttgatcattgacatttctgacatgccacatgggcctgcggggctgtcatcccctgggctgacaactggtactcggcccgtccttgtaatccagcagtattttttcatacatttgaaacatttagaggaaaattcagtaattgaataattgtttgtaaatattctgatcgaaaatgaaaaaattccccttaatgaaacctgaactctgcttctgattagcttatatgacttaaagcttcacttcagttcccttgaaaccattacatcttttataaaatgaaagcactaagcagtccctaaggtttttctcaacatgttgggaagccaattttattttatagcataatgtgtttattcttacttgatcatatctttttttttcagaaacacagaaaaagaaagtgcttggtcacctcctcccatagaaattcggctgatttcccccttggctagcccagctgacggagtcaagagcaaaccaagaaaaactacagaagtgacaggaacaggtcttggaaggaacagaaagaaactgtcttcctatccaaagcaaattttacgcagaaaaatgctgtaatttcttgggaagattttaatgtacacctatttgtaaagtcatcagaatagtgtggattattaaatatctagtttggaagaaaataatttatataaattattgtaaatttttatgtaaacagaaggtcttcaataagtaaagtaactccatatggagtgattgtttcagtccaggcaatttttctattttatattaagacttcatacatttatatatgtaaatatggcttattaatggaatgttaaataaaatgtatacttcacagtcgtttgtgtcttggatttttgaaagggaggggatatctgtttaaatagttttatatgctcattggtctcattttctctataattaaaatactagaccagtcttaaaatggggatgattgaagtattgatatttctttttacagttactattttataatttatgcactttgattctgtgattcagatttctaatcagaaaatgtatttttttgtttttggctgttactatgttaaaattgaattatgggcatgtcattttgccatctttgtagtttcacaaattttgtgtaatctacctcaaatgaataatccaagtattggttaactataatgttggcatctcttattcggcaagcttaaaggctctttaaagtcttaattagtcaaagactaatccaggttagattgaccggttcactgctcacttgcaaccttatcaaagggtttgacaaagggaaatgtaaaataaatctgtttatggatattgagtgcatcttgtatgtgcctaatattgataggatgagatgtctgaacaaatttttataatattgctgtgaaggagcttgctattgaaccacagaaatcccttaatattcaggttttaaaactggcaaattctcacaggacctcaggcacagattattgaggttgggagagagtgagtagatgtagaaaaggagaaaaacaacacacgccctgttctctacagtacaactgtgtgcaattaagcaatggtacttgatgtaggctctaacactcatcaataaataagtgttgtaaaataatttataacaggtaatcgatagtgtgtaatgaatggactattaataattgattatctagaaacgaactgctttcgtgggcttttaatattttaatgtgaagcatatgcagtgtgctttctgcatttatttttctaccaaataatacagataatgagaaattggtgaaaatgcctacgcaaagtgttgacagtgtgaaagcagtgcgagtgcggccttttagtcaggttagtgatggatgttacgctgccttgttgaaaatttcactgactttgattttattacttttttaatgatagttatcaaacttgtatttaagctgcttgtcatttatggaatattgaacttatttaaatgaacttgttaaatgaataaagagctaaacataattcagtaaacaattcctttgcgcaagtagcacaataaacatggatgcaacgtatgtcaagttaatacttttttaaaccaacgcaatttggtgaatatagatgtgtggtacctgtttttaataagtgtactttttttcccccctccgtgaatgtagatcataagcaaacaaattgcctgttctaaatgaactttacatatattttaaatgaatgtatgtacttacgtataaatgtctttatatagcttgaataaaaacactgctcattaaaatgtgttgctacaac

SEQ ID NO: 8341 - DNA, 3837 bp, Homo sapiens
  misc_feature (28)..(28): n is a, c, g, or t
  misc_feature (55)..(55): n is a, c, g, or t
ggggcaactgggctcagcaaagtccgcncggggtcacgccattctcctgcctctntgtatagtagagacggggtttcaccttgttagccaggatggtctcgatctcctgacctcatgatccacccgcctcggcctcccaagtcagtctagtctttattgtaatcagaaccataaaggcaaaatgaaccaatattcattatatatattacatgtaggtgaatggatattttgcatgttaatgaattttagtaaatagattgccagggaagccttgtcctgttttctttagtattttaaatcattggcagttcatcttcatttgaaaataaatgccaggcacatagtaagagctcagtaaatataggtaaagggaaggaggacgacgcaaactctttttaaaaatcagttgctatgtgcagttcttaattctgttttgcgatgaataattttctgactttttgaatgcatggtagcactttggattacattaatatacttgactgtatttgcatgtggctatcatagttaccagtgaatatagaggtctgattaaatgggatactaaattcttttgttttttcagtataactcaataaatgcgcattctgattacagactgctagatttggttgttcagcctgtcccccggccttctcagtgttcggagtttattcagcaaagctccatgaaatctcctttgtacctagtatcccgttcactgccctcaagttcgcaattaaaaggatcgcctcaggccatctccagggcttcagaattacatttgcttgaaactcctcttgtagttaagaaagctaaaagtttggccatgtcagttactacttctggattttctgagttcactcctcagtccatcctgaggtctactcttcgatcaacacctttagcatctccctctccatcacctggaaggtctcctcaacgacttaaagaaactagaatttcatttgtggaagaagatgtccacccaaaatggattcctggggctgcagatgatagcaaattagaagtatttactacacctaaaaaatgtgcagttccagtggaaactgaatggctgaagagcaaagataggaccacatcttttttcctgaacagccctgaaaaggagcatcaagaaatggatgaggggtcacaaagtttagagaaactggatgtgagcaaaggaaacagcagtgtttcaatcacatccgatgagactaccttagagtatcaggatgcaccgtcaccggaagaccttgaagagactgttttcacggcctctaagcccaaaagctcttccactgcactaactactaatgtaactgaacaaactgaaaaggatggagataaagatgtatttgcatcagaagtaactccttcagacctacagaaacaaatgggcaatttagaagatgcagaaacaaaggatctcttagttgcagcagaggcattttcagaattgaatcacttaagcccggttcaaggaactgaagcttctctttgtgcaccatcagtctatgaagggaaaatcttcacccagaagtccaaggtaccagtgttggacgaaggattaacatctgttgaaacctacacccctgcaattagagcaaatgacaataaatctatggctgatgtccttggtgatggtggaaactcctcgctcactatctctgaaggtcctattgtctctgagcgcaggcttaaccaggaagtagcgctgaacttaaaagaagatcatgaagtagaagttggtgtactaaaagaaagtgttgacttaccagaagaaaagcttcccatttctgacagccctcctgatactcaagaaattcatgtgattgaacaagaaaagcttgaagctcaagattcaggagaagaggctaggaatctttcatttaatgagttatatccctctggaacacttaagcttcagtacaattttgatactattgaccaacagttttgtgacttagctgataacaaagacactgctgaatgtgacattgctgaagtagatggggaactttttgtggctcaaagcaactttaccttgatattggaaggtgaagaaggagaagttgagccaggtgattttgcatcatctgatgtgttacctaaagcagctaacacagcaactgaagaaaaacttgtatgcagtggggaaaatgataatcatggacaaattgcaaatttgccatctgccgtaactagtgaccaaaagtcccaaaaagtagacactttaccatatgtgcctgaacctattaaagtagcaattgcagaaaatttactagatgtaattaaagacacaagaagtaaagaaattacttcagatacaatggaacagtccattcatgaaacaatacctttagtgagccaaaacataatgtgtcccactaaattggtcaaatctgcatttaagactgctcaggaaacaagcacaatgactatgaatgtcagccaggttgatgacgtggtttcctccaaaactcgtacgagaggtcaacgtatccaaaacgtgaatgtcaaatcagcacaacaggaagcatcagcagatgttgctactcctaagatgccagggcagtcagtcaggaagaaaactaggaaggcaaaagaaatttctgaagcttctgaaaacatctattctgatgtcagaggactatctcagaaccagcaaatacctcaaaattctgttacgcctaggagaggaaggagaaagaaagaagttaatcaggacatactagaaaacaccagttctgtggaacaagaattacagatcactacaggtagggaatcaaaaagattaaaatcatctcagctgttggaaccagcagttgaagaaactactaaaaaagaagttaaggtttcatctgttacaaaaaggactcctagaagaattaaaagatctgtagaaaatcaggaaagtgttgaaattataaatgatctaaaagttagtacggtaacaagtcctagcagaatgatcagaaaattgagaagtactaatttagatgcttctgaaaatacaggaaataagcaagatgataaatccagtgacaagcagctgcgtattaaacatgttagaagggtcagagggagagaagttagtccatcagatgtgagagaagactccaaccttgagtcatctcagttgactgttcaagcagaatttgatatgtctgccatacctagaaaacgtggtagaccaagaaaaatcaatccatctgaagatgtaggatctaaggctgttaaggaagagagaagccccaagaagaaagaagctcccagcattagaaggagatctacaagaaataccccagctaaaagtgaaaatgttgatgttggaaaaccagctttaggaaaatccattttagtgccaaacgaggaactttcgatggtgatgagctctaagaaaaaacttacaaaaaagactgaaagtcaaagccaaaaacgttcattgcactcagtatcagaagaacgcacagatgaaatgacacataaagaaacaaatgagcaggaagaaagattgctcgccacagcttccttcactaaatcatcccgcagcagcaggactcggtctagcaaggccatcttgttgccggacctttctgaaccaaacaatgagcctttattttctccagcgtcagaagttccaaggaaagcaaaaggttgaagccgtcgacggcttcaacggaactttatggtatgtagaaattccaattactggtttgtcagtaggattcttagctctgtaaaacgccagtgcagtctctcctggcaccacctgttttaaagaatatatatattatcaatactttgagtctcacaaagttccgttgaagccgt

SEQ ID NO: 8342 - DNA, 1385 bp, Homo sapiens
gagtgactctgcaggatccccaggacagtcttaaaatggggatgattgaagtattgatatttctttttacagttactattttataatttatgcactttgattctgtgattcagatttctaatcagaaaatgtatttttttgtttttggctgttactatgttaaaattgaattatgggcatgtcattttgccatctttgtagtttcacaaattttgtgtaatctacctcaaatgaataatccaagtattggttaactataatgttggcatctcttattcggcaagcttaaaggctctttaaagtcttaattagtcaaagactaatccaggttagattgaccggttcactgctcacttgcaaccttatcaaagggtttgacaaagggaaatgtaaaataaatctgtttatggatattgagtgcatcttgtatgtgcctaatattgataggatgagatgtctgaacaaatttttataatattgctgtgaaggagcttgctattgaaccacagaaatcccttaatattcaggttttaaaactggcaaattctcacaggacctcaggcacagattattgaggttgggagagagtgagtagatgtagaaaaggagaaaaacaacacacgccctgttctctacagtacaactgtgtgcaattaagcaatggtacttgatgtaggctctaacactcatcaataaataagtgttgtaaaataatttataacaggtaatcgatagtgtgtaatgaatggactattaataattgattatctagaaacgaactgctttcgtgggcttttaatattttaatgtgaagcatatgcagtgtgctttctgcatttatttttctaccaaataatacagataatgagaaattggtgaaaatgcctacgcaaagtgttgacagtgtgaaagcagtgcgagtgcggccttttagtcaggttagtgatggatgttacgctgccttgttgaaaatttcactgactttgattttattacttttttaatgatagttatcaaacttgtatttaagctgcttgtcatttatggaatattgaacttatttaaatgaacttgttaaatgaataaagagctaaacataattcagtaaacaattcctttgcgcaagtagcacaataaacatggatgcaacgtatgtcaagttaatacttttttaaaccaacgcaatttggtgaatatagatgtgtggtacctgtttttaataagtgtactttttttcccccctccgtgaatgtagatcataagcaaacaaattgcctgttctaaatgaactttacatatattttaaatgaatgtatgtacttacgtataaatgtctttatatagcttgaataaaaacactgctcattaaaatgtgttgctacaac

SEQ ID NO: 8343 - DNA, 887 bp, Homo sapiens
agaaaaggagaaaaacaacacacgccctgttctacatctactcactctctcccaacctcaataatctgtgcctgaggtcctgtgagaatttgagtagatgtagaaaaggagaaaaacaacacacgccctgttctctacagtacaactgtgtgcaattaagcaatggtacttgatgtaggctctaacactcatcaataaataagtgttgtaaaataatttataacaggtaatcgatagtgtgtaatgaatggactattaataattgattatctagaaacgaactgctttcgtgggcttttaatattttaatgtgaagcatatgcagtgtgctttctgcatttatttttctaccaaataatacagataatgagaaattggtgaaaatgcctacgcaaagtgttgacagtgtgaaagcagtgcgagtgcggccttttagtcaggttagtgatggatgttacgctgccttgttgaaaatttcactgactttgattttattacttttttaatgatagttatcaaacttgtatttaagctgcttgtcatttatggaatattgaacttatttaaatgaacttgttaaatgaataaagagctaaacataattcagtaaacaattcctttgcgcaagtagcacaataaacatggatgcaacgtatgtcaagttaatacttttttaaaccaacgcaatttggtgaatatagatgtgtggtacctgtttttaataagtgtactttttttcccccctccgtgaatgtagatcataagcaaacaaattgcctgttctaaatgaactttacatatattttaaatgaatgtatgtacttacgtataaatgtctttatatagcttgaataaaaacactgctcattaaaatgtgttgctacaac

SEQ ID NO: 8344 - DNA, 695 bp, Homo sapiens
cactgcaagctccgcttcccgggttcacgccattctcctgcctcagcctcccgagtagctgggactacaggcgcccgccaccgcgcccggctaatttttttttttgtatttttagtagagacggggtttcaccttgttagccaggatggtctcgatctcctgacctcatgatccacccgcctcggcctcccaagtcagtctagtctttattgtaatcagaaccataaaggcaaaatgaaccaatattcattatatatattacatgtaggtgaatggatattttgcatgttaatgaattttagtaaatagattgccagggaagccttgtcctgttttctttagtattttaaatcattggcagttcatcttcatttgaaaataaatgccaggcacatagtaagagctcagtaaatataggtaaagggaaggaggacgacgcaaactctttttaaaaatcagttgctatgtgcagttcttaattctgttttgcgatgaataattttctgactttttgaatgcatggtagcactttggattacattaatatacttgactgtatttgcatgtggctatcatagttaccagtgaatatagaggtctgattaaatgggatactaaattcttttgttttttcagtataactcaataaatgcgcattctgattacagactgctagatttggttgttcagcctgt

SEQ ID NO: 8345 - DNA, 510 bp, Homo sapiens
tgttttataagacagaatccctgactcccaggaatttatggtgtggaagaagaccaaagggatcaaaagttcaaaagcaaatggggttccactcccaggtaatgatgtcacctgatgaacatgtagaaggtcctttatatttctctcgggttattaactattcttgatacagcatcatatccaacaaaatgtagcttcacttttgcttacacgtgttctgttctcagaatgcccacacaagcacacgcaggtgaacgttcacagcagcatcaataatagtcaaaaagtgaaaaacaactcaaatgttcatcagcatgtgaatggctcaaaacaacatgatgtataattcaaaggactcttatttggcaataaacaagaaaagaagctcatctgggctgggtgtggtgcctcacgcctgtaatcccagcactttgggaggctgaggtgggtggatcatctgaggtcaggagtttgaaaccagccgggccaacatggtaaaaccctgtctct

SEQ ID NO: 8346 - DNA, 756 bp, Homo sapiens
cctgcttccccagctccagaacttccggccagcgcagccattttggcttcctgaccttgggctacggctgaccgttttttgtggtgtactccgtgccatcatgtccgtcctgacgccgctgctgctgcggggcttgacaggctcggcccggcggctcccagtgccgcgcgccaagatccattcgttgccgccggaggggaagcttgggatcatggaattggccgttgggcttacctcctgcttcgtgaccttcctcctgccagcgggctggatcctgtcacacctggagacctacaggaggccagagtgaaggggtccgttctgtccctcacactgtgacctgaccagccccaccggcccatcctggtcatgttactgcatttgtggccggcctcccctggatcatgtcattcaattccagtcacctcttctgcaatcatgacctcttgatgtctccatggtgacctccttgggggtcactgaccctgcttggtggggtcccccttgtaacaataaaatctatttaaactttaaaaaaaaaaaaaaaaaaaaactcgagactagttctctctctctcgagggatccagggcatctgtgaactggctgcttcttccagagagatctcttggcagagtgagggcctggagataaccagctttggattatcccgcatgcaacattcctgtgatcacataatcctcttcttcatcctcatatgaaataaatgaagagagcttcctcattcaaaaaaaaaa

SEQ ID NO: 8347 - DNA, 773 bp, Homo sapiens
tcgctagtcgagctgggtttgaatcggccgaggaccttgggctacggctgaccgttttttgtggtgtactccgtgccatcatgtccgtcctgacgccgctgctgctgcggggcttgacaggctcggcccggcggctcccagtgccgcgcgccaagatccattcgttgccgccggaggggaagcttgggatcatggaattggccgttgggcttacctcctgcttcgtgaccttcctcctgccagcgggctggatcctgtcacacctggagacctacaggaggccagagtgaaggggtccgttctgtccctcacactgtgacctgaccagccccaccggcccatcctggtcatgttactgcatttgtggccggcctcccctggatcatgtcattcaattccagtcacctcttctgcaatcatgacctcttgatgtctccatggtgacctccttgggggtcactgaccctgcttggtggggtcccccttgtaacaataaaatctatttaaactttaaaaaaaaaaaaaaaaaaaaaaaaaaaaaaaaaaaaaaaaaaaaaaaaaaaaaacaaaacgctccgtgggcgggctcttttcgtcgtgggtgcgggaaagaaagggtggtatatgaaaagtggccaattgcggtctaatatgtgttctcctgtccaccccgtcttttttttcgcacggggggtggtaaaattggggggggcccccaaaaaagaggggccgcgatataaattcgaaaaaagccaggggttaccggtagaaag

SEQ ID NO: 8348 - DNA, 793 bp, Homo sapiens
ggctggtactggtctggagtttatggatggcttcctgaccttgggctacggctgaccgttttttgtggtgtactccgtgccatcatgtccgtcctgacgccgctgctgctgcggggcttgacaggctcggcccggcggctcccagtgccgcgcgccaagatccattcgttgccgccggaggggaagcttgggatcatggaattggccgttgggcttacctcctgcttcgtgaccttcctcctgccagcgggctggatcctgtcacacctggagacctacaggaggccagagtgaaggggtccgttctgtccctcacactgtgacctgaccagccccaccggcccatcctggtcatgttactgcatttgtggccggcctcccctggatcatgtcattcaattccagtcacctcttctgcaatcatgacctcttgatgtctccatggtgacctccttgggggtcactgaccctgcttggtggggtcccccttgtaacaataaaatctatttaaactttaaaaaaaaaaaaaaaaaaaaaaaaaaaaaaaaaaaaaaaaaaaaaaaaaaaaaacaaaagggggggcaaaaaatatctccctcggcgggggcccaggattttacgcggtccgcggctttttgttgtcaagtgtgggccccctatggggaagggggttattaaacgcgtagcgcgctgggcggctggttaaaacaggttcgtgggtgggacacaccgtgcttctgagctgtttggggagggcccctatctcgggggggccacttctggcgcactctag

SEQ ID NO: 8349 - DNA, 897 bp, Homo sapiens
gctggtacggtccggagtgtagggatcgcagccatttggcttcctgaccttgggctacggctgaccgttttttgtggtgtactccgtgccatcatgtccgtcctgacgccgctgctgctgcggggcttgacaggctcggcccggcggctcccagtgccgcgcgccaagatccattcgttgccgccggaggggaagcttgggatcatggaattggccgttgggcttacctcctgcttcgtgaccttcctcctgccagcgggctggatcctgtcacacctggagacctacaggaggccagagtgaaggggtccgttctgtccctcacactgtgacctgaccagccccaccggcccatcctggtcatgttactgcatttgtggccggcctcccctggatcatgtcattcaattccagtcacctcttctgcaatcatgacctcttgatgtctccatggtgacctccttgggggtcactgaccctgcttggtggggtcccccttgtaacaataaaatctatttaaactttaaaaaaaaaaaaaaaatctttctccttggctggatgcttcctgccttgaacatcagactcgaagttcttcagctgggggaatcggatggtctccttgccctcagtttggagcacctattgtgcgacctgtgtgatcatagcacacgtctcgccggtgccaggcaaggcagcgtgggacacggtcatgggagcacctcgtgggataaaatctccactagctgtgagaagtgagggaccgaataagctgtctgcgcgaaggaagaggggaccacccggaaatgcccgtaggatccgtacccaatgatagagggcagcggattgttagaaagggtgacgcgggggtcatggaaaccggcaaaaagatacgcaagt

SEQ ID NO: 8350 - DNA, 560 bp, Homo sapiens
gacggagtcttgctctgtcacccaggctggagtgcagtggtgcgatctcggcttactgcaacctccgcctcccaggtttaagccaagccattctcctgcctcagtctcccgagtagctgggatcacaggcgcccgccaccactcccggctaattttttgtatttttagtagagacggggtttcaccatgttggtcaggctggtctctaactcctgaccttgtgatccgcccgccttggcctcccaaattgctgggattacaggtgtgagccaccatgcccggcccagaccagctttaaaacaggtttcaataaatcctgcttcctgtcccttcctttaccatctggtggtgcatttctctagtaatctcctaaccagtctccatcctacttttccctccattcttgagtctttttcaacacaccagccactgatcatgtgaaaatataaattatgtcatccattcttctattcataacccaccgcacatgaccactcatctcagtacaagcaatattcttactgtgtccctaccagcccttatacaacctacaccacttc

SEQ ID NO: 8351 - DNA, 896 bp, Homo sapiens
  misc_feature (605)..(605): n is a, c, g, or t
  misc_feature (616)..(616): n is a, c, g, or t
cctgcttccccagctccagaacttccggccagcgcagccattttggcttcctgaccttgggctacggctgaccgttttttgtggtgtactccgtgccatcatgtccgtcctgacgccgctgctgctgcggggcttgacaggctcggcccggcggctcccagtgccgcgcgccaagatccattcgttgccgccggaggggaagcttgggatcatggaattggccgttgggcttacctcctgcttcgtgaccttcctcctgccagcgggctggatcctgtcacacctggagacctacaggaggccagagtgaaggggtccgttctgtccctcacactgtgacctgaccagccccaccggcccatcctggtcatgttactgcatttgtggccggcctcccctggatcatgtcattcaattccagtcacctcttctgcaatcatgacctcttgatgtctccatggtgacctccttgggggtcactgaccctgcttggtggggtcccccttgtaacaataaaatctatttaaactttaaaaaaaaaaaaaaaaaaaaaaaaaaaaaaaaaaaaaaaaaaaaaaaaaaaaaacaaaaaaacaaaaaaaaanaaaaaaaaaanaaaaaaaaaaaagggggggggggggccccaacaaaaacaattactctcgcgaggggggagccccacataatatagcgaaaaaaccaaacgatatttttataaaaaaaaagaggggcgccaccaaaaaaaggggagcttcataataaaaaaacaagacgacagggggaggagctaaaacaacaacggccggcggagggaaaaaaaaaacagctcggagcaacactgtgtaagaaaaaaccacttacgtgggggggagacacaaagggggcacaaaccacaa

SEQ ID NO: 8352 - DNA, 793 bp, Homo sapiens
cctgcttccccagctccagaacttccggccagcgcagccattttggcttcctgaccttgggctacggctgaccgttttttgtggtgtactccgtgccatcatgtccgtcctgacgccgctgctgctgcggggcttgacaggctcggcccggcggctcccagtgccgcgcgccaagatccattcgttgccgccggaggggaagcttgggatcatggaattggccgttgggcttacctcctgcttcgtgaccttcctcctgccagcgggctggatcctgtcacacctggagacctacaggaggccagagtgaaggggtccgttctgtccctcacactgtgacctgaccagccccaccggcccatcctggtcatgttactgcatttgtggccggcctcccctggatcatgtcattcaattccagtcacctcttctgcaatcatgacctcttgatgtctccatggtgacctccttgggggtcactgaccctgcttggtggggtcccccttgtaacaataaaatctatttaaactttaaaaaaaaaaaaaaaaaaaaaaaaaaaaaaaaaaaaaaaaaaaaaaaaaaaaaacaaaacgctccgtgggcgggctcttttcgtcgtgggtgcgggaaagaaagggtggtatatgaaaagtggccaattgcggtctaatatgtgttctcctgtccaccccgtcttttttttcgcacggggggtggtaaaattggggggggcccccaaaaaagaggggccgcgatataaattcgaaaaaagccaggggttaccggtagaaag

SEQ ID NO: 8353 - DNA, 749 bp, Homo sapiens
cctgcttccccagctccagaacttccggccagcgcagccattttggcttcctgaccttgggctacggctgaccgttttttgtggtgtactccgtgccatcatgtccgtcctgacgccgctgctgctgcggggcttgacaggctcggcccggcggctcccagtgccgcgcgccaagatccattcgttgccgccggaggggaagcttgggatcatggaattggccgttgggcttacctcctgcttcgtgaccttcctcctgccagcgggctggatcctgtcacacctggagacctacaggaggccagagtgaaggggtccgttctgtccctcacactgtgacctgaccagccccaccggcccatcctggtcatgttactgcatttgtggccggcctcccctggatcatgtcattcaattccagtcacctcttctgcaatcatgacctcttgatgtctccatggtgacctccttgggggtcactgaccctgcttggtggggtcccccttgtaacaataaaatctatttaaactttaaaaaaaaaaaaaaaaaaaaaaaaaaaaattgtgtgcgggggccgccctgcggccctctcagaaaaagagctattctacaaaccccgcgcgttgggggcgcgcgggggccccagtggggtaagtggcaccgtgggctcaccagggtgttcccggagggaaaaccggggcccaggacacagggtgcgggggattctcccaaaaaaaaaacgcacgaga

SEQ ID NO: 8354 - DNA, 752 bp, Homo sapiens
ctcccccctcgcacatcaatacggctaggtcgagcccgtggtaaatcggccgaggggctacggctgaccgttttttgtggtgtactccgtgccatcatgtccgtcctgacgccgctgctgctgcggggcttgacaggctcggcccggcggctcccagtgccgcgcgccaagatccattcgttgccgccggaggggaagcttgggatcatggaattggccgttgggcttacctcctgcttcgtgaccttcctcctgccagcgggctggatcctgtcacacctggagacctacaggaggccagagtgaaggggtccgttctgtccctcacactgtgacctgaccagccccaccggcccatcctggtcatgttactgcatttgtggccggcctcccctggatcatgtcattcaattccagtcacctcttctgcaatcatgacctcttgatgtctccatggtgacctccttgggggtcactgaccctgcttggtggggtcccccttgtaacaataaaatctatttaaactttaaaaaaaaaaaaaaaaaaaaactcgagactagttctctctctctcgagggatccagggcatctgtgaactggctgcttcttccagagagatctcttggcagagtgagggcctggagataaccagctttggattatcccgcatgcaacattcctgtgatcacataatcctcttcttcatcctcatatgaaataaatgaagagagcttcctcattcaaaaaaaaaa

SEQ ID NO: 8355 - DNA, 880 bp, Homo sapiens
  misc_feature (589)..(589): n is a, c, g, or t
  misc_feature (600)..(600): n is a, c, g, or t
ggctggtactggtctggagtttatggatggcttcctgaccttgggctacggctgaccgttttttgtggtgtactccgtgccatcatgtccgtcctgacgccgctgctgctgcggggcttgacaggctcggcccggcggctcccagtgccgcgcgccaagatccattcgttgccgccggaggggaagcttgggatcatggaattggccgttgggcttacctcctgcttcgtgaccttcctcctgccagcgggctggatcctgtcacacctggagacctacaggaggccagagtgaaggggtccgttctgtccctcacactgtgacctgaccagccccaccggcccatcctggtcatgttactgcatttgtggccggcctcccctggatcatgtcattcaattccagtcacctcttctgcaatcatgacctcttgatgtctccatggtgacctccttgggggtcactgaccctgcttggtggggtcccccttgtaacaataaaatctatttaaactttaaaaaaaaaaaaaaaaaaaaaaaaaaaaaaaaaaaaaaaaaaaaaaaaaaaaaacaaaaaaacaaaaaaaaanaaaaaaaaaanaaaaaaaaaaaagggggggggggggccccaacaaaaacaattactctcgcgaggggggagccccacataatatagcgaaaaaaccaaacgatatttttataaaaaaaaagaggggcgccaccaaaaaaaggggagcttcataataaaaaaacaagacgacagggggaggagctaaaacaacaacggccggcggagggaaaaaaaaaacagctcggagcaacactgtgtaagaaaaaaccacttacgtgggggggagacacaaagggggcacaaaccacaa

SEQ ID NO: 8356 - DNA, 792 bp, Homo sapiens
cctgcttccccagctccagaacttccggccagcgcagccattttggcttcctgaccttgggctacggctgaccgttttttgtggtgtactccgtgccatcatgtccgtcctgacgccgctgctgctgcggggcttgacaggctcggcccggcggctcccagtgccgcgcgccaagatccattcgttgccgccggaggggaagcttgggatcatggaattggccgttgggcttacctcctgcttcgtgaccttcctcctgccagcgggctggatcctgtcacacctggagacctacaggaggccagagtgaaggggtccgttctgtccctcacactgtgacctgaccagccccaccggcccatcctggtcatgttactgcatttgtggccggcctcccctggatcatgtcattcaattccagtcacctcttctgcaatcatgacctcttgatgtctccatggtgacctccttgggggtcactgaccctgcttggtggggtcccccttgtaacaataaaatctatttaaactttaaagaaagaacaaaaaaaaaaaaaaaaaaaaaaaaaaaaaaaaaaaaaaaaaacaaaacgctccgtgggcgggctcttttcgtcgtgggtgcgggaaagaaagggtggtatatgaaaagtggccaattgcggtctaatatgtgttctcctgtccaccccgtcttttttttcgcacggggggtggtaaaattggggggggcccccaaaaaagaggggccgcgatataaattcgaaaaaagccaggggttaccggtagaaag

SEQ ID NO: 8357 - DNA, 560 bp, Homo sapiens
cctgcttccccagctccagaacttccggccagcgcagccattttggcttcctgaccttgggctacggctgaccgttttttgtggtgtactccgtgccatcatgtccgtcctgacgccgctgctgctgcggggcttgacaggctcggcccggcggctcccagtgccgcgcgccaagatccattcgttgccgccggaggggaagcttgggatcatggaattggccgttgggcttacctcctgcttcgtgaccttcctcctgccagcgggctggatcctgtcacacctggagacctacaggaggccagagtgaaggggtccgttctgtccctcacactgtgacctgaccagccccaccggcccatcctggtcatgttactgcatttgtggccggcctcccctggatcatgtcattcaattccagtcacctcttctgcaatcatgacctcttgatgtctccatggtgacctccttgggggtcactgaccctgcttggtggggtcccccttgtaacaatagccgaccccctacagatagccgaccctgggaaactctaggtcagc

SEQ ID NO: 8358 - DNA, 810 bp, Homo sapiens
  misc_feature (539)..(539): n is a, c, g, or t
  misc_feature (542)..(542): n is a, c, g, or t
  misc_feature (548)..(548): n is a, c, g, or t
  misc_feature (550)..(550): n is a, c, g, or t
  misc_feature (554)..(554): n is a, c, g, or t
  misc_feature (557)..(557): n is a, c, g, or t
cctgcttccccagctccagaacttccggccagcgcagccattttggcttcctgaccttgggctacggctgaccgttttttgtggtgtactccgtgccatcatgtccgtcctgacgccgctgctgctgcggggcttgacaggctcggcccggcggctcccagtgccgcgcgccaagatccattcgttgccgccggaggggaagcttgggatcatggaattggccgttgggcttacctcctgcttcgtgaccttcctcctgccagcgggctggatcctgtcacacctggagacctacaggaggccagagtgaaggggtccgttctgtccctcacactgtgacctgaccagccccaccggcccatcctggtcatgttactgcatttgtggccggcctcccctggatcatgtcattcaattccagtcacctcttctgcaatcatgacctcttgatgtctccatggtgacctccttgggggtcactgaccctgcttggtggggtcccccttgtaacaataaaatctatttaaactttacaaaanaanaacaananaacnaanaacaaaaaaaaaaaaaaaaaaaaaaaaaaaaaaaaaaaaaaaaaaacaaaacgctccgtgggcgggctcttttcgtcgtgggtgcgggaaagaaagggtggtatatgaaaagtggccaattgcggtctaatatgtgttctcctgtccaccccgtcttttttttcgcacggggggtggtaaaattggggggggcccccaaaaaagaggggccgcgatataaattcgaaaaaagccaggggttaccggtagaaag

SEQ ID NO: 8359 - DNA, 760 bp, Homo sapiens
ggacgcgtgggtcgacccacgcgtccgggctacggctgaccgttttttgtggtgtactccgtgccatcatgtccgtcctgacgccgctgctgctgcggggcttgacaggctcggcccggcggctcccagtgccgcgcgccaagatccattcgttgccgccggaggggaagcttgggatcatggaattggccgttgggcttacctcctgcttcgtgaccttcctcctgccagcgggctggatcctgtcacacctggagacctacaggaggccagagtgaaggggtccgttctgtccctcacactgtgacctgaccagccccaccggcccatcctggtcatgttactgcatttgtggccggcctcccctggatcatgtcattcaattccagtcacctcttctgcaatcatgacctcttgatgtctccatggtgacctccttgggggtcactgaccctgcttggtggggtcccccttgtaacaataaaatctatttaaactttaaagaaagaacaaaaaaaaaaaaaaaaaaaaaaaaaaaaaaaaaaaaaaaaaacaaaacgctccgtgggcgggctcttttcgtcgtgggtgcgggaaagaaagggtggtatatgaaaagtggccaattgcggtctaatatgtgttctcctgtccaccccgtcttttttttcgcacggggggtggtaaaattggggggggcccccaaaaaagaggggccgcgatataaattcgaaaaaagccaggggttaccggtagaaag

SEQ ID NO: 8360 - DNA, 787 bp, Homo sapiens
  misc_feature (516)..(516): n is a, c, g, or t
  misc_feature (519)..(519): n is a, c, g, or t
  misc_feature (525)..(525): n is a, c, g, or t
  misc_feature (527)..(527): n is a, c, g, or t
  misc_feature (531)..(531): n is a, c, g, or t
  misc_feature (534)..(534): n is a, c, g, or t
gcaggctggtaccggtcggaaagggtatgatccttgggctacggctgaccgttttttgtggtgtactccgtgccatcatgtccgtcctgacgccgctgctgctgcggggcttgacaggctcggcccggcggctcccagtgccgcgcgccaagatccattcgttgccgccggaggggaagcttgggatcatggaattggccgttgggcttacctcctgcttcgtgaccttcctcctgccagcgggctggatcctgtcacacctggagacctacaggaggccagagtgaaggggtccgttctgtccctcacactgtgacctgaccagccccaccggcccatcctggtcatgttactgcatttgtggccggcctcccctggatcatgtcattcaattccagtcacctcttctgcaatcatgacctcttgatgtctccatggtgacctccttgggggtcactgaccctgcttggtggggtcccccttgtaacaataaaatctatttaaactttacaaaanaanaacaananaacnaanaacaaaaaaaaaaaaaaaaaaaaaaaaaaaaaaaaaaaaaaaaaaacaaaacgctccgtgggcgggctcttttcgtcgtgggtgcgggaaagaaagggtggtatatgaaaagtggccaattgcggtctaatatgtgttctcctgtccaccccgtcttttttttcgcacggggggtggtaaaattggggggggcccccaaaaaagaggggccgcgatataaattcgaaaaaagccaggggttaccggtagaaag

SEQ ID NO: 8361 - DNA, 998 bp, Homo sapiens
  misc_feature (1)..(1): n is a, c, g, or t
  misc_feature (727)..(727): n is a, c, g, or t
  misc_feature (730)..(730): n is a, c, g, or t
  misc_feature (736)..(736): n is a, c, g, or t
  misc_feature (738)..(738): n is a, c, g, or t
  misc_feature (742)..(742): n is a, c, g, or t
  misc_feature (745)..(745): n is a, c, g, or t
naaaagtttctgaacacattgtcttttataaaatattttttggacacacattttttttcctcccttttggaaaccccaaattcacaatatatgttagcccatttgtaatattttcccacaaattataaattctcttttcaaacccctcccggaactttttctggttttttctctttcaaaatctgtctaaaaattcaactgattcttctcttggatagtgccaataaacgtgtaaggcccatgaaagaaattcatttcggatagaaatttttctttctccgtgccatcatgtccgtcctgacgccgctgctgctgcggggcttgacaggctcggcccggcggctcccagtgccgcgcgccaagatccattcgttgccgccggaggggaagcttgggatcatggaattggccgttgggcttacctcctgcttcgtgaccttcctcctgccagcgggctggatcctgtcacacctggagacctacaggaggccagagtgaaggggtccgttctgtccctcacactgtgacctgaccagccccaccggcccatcctggtcatgttactgcatttgtggccggcctcccctggatcatgtcattcaattccagtcacctcttctgcaatcatgacctcttgatgtctccatggtgacctccttgggggtcactgaccctgcttggtggggtcccccttgtaacaataaaatctatttaaactttacaaaanaanaacaananaacnaanaacaaaaaaaaaaaaaaaaaaaaaaaaaaaaaaaaaaaaaaaaaaacaaaacgctccgtgggcgggctcttttcgtcgtgggtgcgggaaagaaagggtggtatatgaaaagtggccaattgcggtctaatatgtgttctcctgtccaccccgtcttttttttcgcacggggggtggtaaaattggggggggcccccaaaaaagaggggccgcgatataaattcgaaaaaagccaggggttaccggtagaaag

SEQ ID NO: 8362 - DNA, 1111 bp, Homo sapiens
cctgcttccccagctccagaacttccggccagcgcagccattttggcttcctgaccttgggctacggctgaccgttttttgtggtgtactccgtgccatcatgtccgtcctgacgccgctgctgctgcggggcttgacaggctcggcccggcggctcccagtgccgcgcgccaagatccattcgttgccgccggaggggaagcttgggatcatggtgaggaacgggcctggaagagcgcgggaggcgccgtgggctgaccccttctgcctagctgacctcaggtggtcctgagaatgcctcgcgccccgcagcgtagcggggagcagcagtgccggtttgggcatgtctggagggcgcgaacgacggggacagtgcccgggcgacagtcggggctgtcggcgttaggtctttccccacagccccaggatctcgggtctggtcctgtcaggccctccctctcctgtcgcctcctcgctgcgccgcctcctgccgacttctttagccgctctgagcccattttctcgttggttcactgggggatgcctgacgctgtcagcgacgaaacatggaattggccgttgggcttacctcctgcttcgtgaccttcctcctgccagcgggctggatcctgtcacacctggagacctacaggaggccagagtgaaggggtccgttctgtccctcacactgtgacctgaccagccccaccggcccatcctggtcatgttactgcatttgtggccggcctcccctggatcatgtcattcaattccagtcacctcttctgcaatcatgacctcttgatgtctccatggtgacctccttgggggtcactgaccctgcttggtggggtcccccttgtaacaataaaatctatttaaactttaaaaaaaaaaaaaaaaaaaaactcgagactagttctctctctctcgagggatccagggcatctgtgaactggctgcttcttccagagagatctcttggcagagtgagggcctggagataaccagctttggattatcccgcatgcaacattcctgtgatcacataatcctcttcttcatcctcatatgaaataaatgaagagagcttcctcattcaaaaaaaaaa

SEQ ID NO: 8363 - DNA, 965 bp, Homo sapiens
aagggctggacatggtggttcacgcctataatcccaaattgctgggattacaggtgtgagccaccatgcccggcccagaccagctttaaaacaggtttcaataaatcctgcttcctgtcccttcctttaccatctggtggtgcatttctccctgaaccctaaccccagctgtctctccttcctctcactcttccccctccttataactgaccctttacctcaagggttagcgtagctttggacctgctctgtctgctccgtggagcgtggattcctttaacgtgaggatgcggggcctcccacttgcctctgagtcctggctccctgagcggggctttctgctgcctgggaactgcaaggacttagagagcctaggggaatactgactccgaggtgccttctttcttgtgctctgtgtacatggaattggccgttgggcttacctcctgcttcgtgaccttcctcctgccagcgggctggatcctgtcacacctggagacctacaggaggccagagtgaaggggtccgttctgtccctcacactgtgacctgaccagccccaccggcccatcctggtcatgttactgcatttgtggccggcctcccctggatcatgtcattcaattccagtcacctcttctgcaatcatgacctcttgatgtctccatggtgacctccttgggggtcactgaccctgcttggtggggtcccccttgtaacaataaaatctatttaaactttaaaaaaaaaaaaaaaaaaaaactcgagactagttctctctctctcgagggatccagggcatctgtgaactggctgcttcttccagagagatctcttggcagagtgagggcctggagataaccagctttggattatcccgcatgcaacattcctgtgatcacataatcctcttcttcatcctcatatgaaataaatgaagagagcttcctcattcaaaaaaaaaa

SEQ ID NO: 8364 - DNA, 1174 bp, Homo sapiens
gacggagtcttgctctgtcacccaggctggagtgcagtggtgcgatctcggcttactgcaacctccgcctcccaggtttaagccaagccattctcctgcctcagtctcccgagtagctgggatcacaggcgcccgccaccactcccggctaattttttgtatttttagtagagacggggtttcaccatgttggtcaggctggtctctaactcctgaccttgtgatccgcccgccttggcctcccaaattgctgggattacaggtgtgagccaccatgcccggcccagaccagctttaaaacaggtttcaataaatcctgcttcctgtcccttcctttaccatctggtggtgcatttctccctgaaccctaaccccagctgtctctccttcctctcactcttccccctccttataactgaccctttacctcaagggttagcgtagctttggacctgctctgtctgctccgtggagcgtggattcctttaacgtgaggatgcggggcctcccacttgcctctgagtcctggctccctgagcggggctttctgctgcctgggaactgcaaggacttagagagcctaggggaatactgactccgaggtgccttctttcttgtgctctgtgtacatggaattggccgttgggcttacctcctgcttcgtgaccttcctcctgccagcgggctggatcctgtcacacctggagacctacaggaggccagagtgaaggggtccgttctgtccctcacactgtgacctgaccagccccaccggcccatcctggtcatgttactgcatttgtggccggcctcccctggatcatgtcattcaattccagtcacctcttctgcaatcatgacctcttgatgtctccatggtgacctccttgggggtcactgaccctgcttggtggggtcccccttgtaacaataaaatctatttaaactttaaaaaaaaaaaaaaaaaaaaactcgagactagttctctctctctcgagggatccagggcatctgtgaactggctgcttcttccagagagatctcttggcagagtgagggcctggagataaccagctttggattatcccgcatgcaacattcctgtgatcacataatcctcttcttcatcctcatatgaaataaatgaagagagcttcctcattcaaaaaaaaaa

SEQ ID NO: 8365 - DNA, 700 bp, Homo sapiens
cctgcttccccagctccagaacttccggccagcgcagccattttggcttcctgaccttgggctacggctgaccgttttttgtggtgtactccgtgccatcatgtccgtcctgacgccgctgctgctgcggggcttgacaggctcggcccggcggctcccagtgccgcgcgccaagatcctcctgcttcgtgaccttcctcctgccagcgggctggatcctgtcacacctggagacctacaggaggccagagtgaaggggtccgttctgtccctcacactgtgacctgaccagccccaccggcccatcctggtcatgttactgcatttgtggccggcctcccctggatcatgtcattcaattccagtcacctcttctgcaatcatgacctcttgatgtctccatggtgacctccttgggggtcactgaccctgcttggtggggtcccccttgtaacaataaaatctatttaaactttaaaaaaaaaaaaaaaaaaaaactcgagactagttctctctctctcgagggatccagggcatctgtgaactggctgcttcttccagagagatctcttggcagagtgagggcctggagataaccagctttggattatcccgcatgcaacattcctgtgatcacataatcctcttcttcatcctcatatgaaataaatgaagagagcttcctcattcaaaaaaaaaa

SEQ ID NO: 8366 - DNA, 419 bp, Homo sapiens
  misc_feature (404)..(404): n is a, c, g, or t
  misc_feature (415)..(415): n is a, c, g, or t
aagatttcagagaaccgattaaaaaattaatctatgggcattttaatcaccatctaaaatattttatctaggatcacttatctttttttataaaagctcaaatcacaacattctcttttcatcagtccctacagccctgtgttggacaagcacagatgtcaaaaatacacttaaatatacgttgaatttttatccactagaataaaataagcagaatgatatgcattcttggcgatagtcttcactggaaaataccactgtcagcccaaacttacacaactgacttcaaaatcatgacctcttgatgtctccatggtgacctccttgggggtcactgaccctgcttggtggggtcccccttgtaacaataaaatctatttaaactttaaaaaaaaaaaatcctnttcggacccgnccgg

SEQ ID NO: 8367 - DNA, 870 bp, Homo sapiens
  misc_feature (579)..(579): n is a, c, g, or t
  misc_feature (590)..(590): n is a, c, g, or t
accacgcgtcggcattttggcttcctgaccttgggctacggctgaccgttttttgtggtgtactccgtgccatcatgtccgtcctgacgccgctgctgctgcggggcttgacaggctcggcccggcggctcccagtgccgcgcgccaagatccattcgttgccgccggaggggaagcttgggatcatggaattggccgttgggcttacctcctgcttcgtgaccttcctcctgccagcgggctggatcctgtcacacctggagacctacaggaggccagagtgaaggggtccgttctgtccctcacactgtgacctgaccagccccaccggcccatcctggtcatgttactgcatttgtggccggcctcccctggatcatgtcattcaattccagtcacctcttctgcaatcatgacctcttgatgtctccatggtgacctccttgggggtcactgaccctgcttggtggggtcccccttgtaacaataaaatctatttaaactttaaaaaaaaaaaaaaaaaaaaaaaaaaaaaaaaaaaaaaaaaaaaaaaaaaaaaacaaaaaaacaaaaaaaaanaaaaaaaaaanaaaaaaaaaaaagggggggggggggccccaacaaaaacaattactctcgcgaggggggagccccacataatatagcgaaaaaaccaaacgatatttttataaaaaaaaagaggggcgccaccaaaaaaaggggagcttcataataaaaaaacaagacgacagggggaggagctaaaacaacaacggccggcggagggaaaaaaaaaacagctcggagcaacactgtgtaagaaaaaaccacttacgtgggggggagacacaaagggggcacaaaccacaa

SEQ ID NO: 8368 - DNA, 1544 bp, Homo sapiens
gcaggttagcattttattagataaaaacaggaaggagggtgcctacccacccctgcctgctactggctctgaagggcactcctcaacttccccaagaaagaggacgcgtctctgacactgtgatcatgacaggggttcaaacagaaagtgcctgggccctccttctaagtcttgttaccaaaaaaaggaaaaagaaaagatcttctcagttacaaattctgggaagggagactatacctggctcttgccctaagtgagaggtcttccctcccgcaccaaaaaatagaaaggctttctatttcactggcccaggtagggggaaggagagtaactttgagtctgtgggcctcatttcccaggtgccttcaatgctcatcaaaaccaggcatggggaaggccctggcaaactgctccacccgttgcctgaggttggccagacgctgacttgtttctgagtccttaagcaggaaggatttgaaatcctggagcttggcagtcttgctcttcacctctaagccaatgttgaccccttcatctataaagtccacaactctccggaagtcatcctcacggaactgtcgagaagttaaggctggggccccaagccgcaggccgcccggtgtgatggcacttcggtctccaggacaggtgttcttgttggcagtgatggatacaagctctagcacccgctcagcccgagctccatccaggcccttgggccgcaggtccaccagcaccaggtggttgtcagtaccacctgataccagtgagtagcctcgctctagcagggcatctgccatggcccgagcattcttcagaacctgcagggagtactcccggaacatgggggtgcaggcctgctttagggccacagctactgcagcaatggcatgattgtgggggcccccctgcagggatgggaacacggcaaagttgattcggtcctcaaatgtgtaagggatctcccggccagtcttggggtccacagccttcacccctttccggtagaagatgagccctgacctggcccctcgaagagtcttgtgagtagtggtggtgacgatgtccgcgtgcctccgtgccatcatgtccgtcctgacgccgctgctgctgcggggcttgacaggctcggcccggcggctcccagtgccgcgcgccaagatccattcgttgccgccggaggggaagcttgggatcatggaattggccgttgggcttacctcctgcttcgtgaccttcctcctgccagcgggctggatcctgtcacacctggagacctacaggaggccagagtgaaggggtccgttctgtccctcacactgtgacctgaccagccccaccggcccatcctggtcatgttactgcatttgtggccggcctcccctggatcatgtcattcaattccagtcacctcttctgcaatcatgacctcttgatgtctccatggtgacctccttgggggtcactgaccctgcttggtggggtcccccttgtaacaataaaatctatttaaactttaaaaacttatatttgtgcatataaat

SEQ ID NO: 8369 - DNA, 951 bp, Homo sapiens
  misc_feature (644)..(644): n is a, c, g, or t
cctgcttccccagctccagaacttccggccagcgcagccattttggcttcctgaccttgggctacggctgaccgttttttgtggtgtactccgtgccatcatgtccgtcctgacgccgctgctgctgcggggcttgacaggctcggcccggcggctcccagtgccgcgcgccaagatccattcgttgccgccggaggggaagcttgggatcatggaattggccgttgggcttacctcctgcttcgtgaccttcctcctgccagcgggctggatcctgtcacacctggagacctacaggaggccagagtgaaggggtccgttctgtccctcacactgtgacctgaccagccccaccggcccatcctggtcatgttactgcatttgtggccggcctcccctggatcatgtcattcaattccagtcacctcttctgcaatcatgacctcttgatgtctccatggtgacctccttgggggtcactgaccctgcttggtggggtcccccttgtaacaataaaatctatttaaactttaaaaaaaaaaaaaaaaaaaaaaaaaaaaaaaaaaaaaaaaaaaaaaaaaaaaaacaaaaaaaaaaaaaaaaaaaaaaaaaaaaaaaaaaaaaaaaaaaaaaaaatacagcancacccttttgtccatttcgcttttaaatccgaccagccttatcatggggccccttttccaattccttttccaattccccctttaagaactcggttcaccattatttgacccgcttttatcaaacatccccttggtaaacctcttgcggtccccaactaaatccccttttttccaaacccccttttttcctctgggggtcatagccacaacgcccttatccgaaaggtctcttcccaccgtttgtgccaactctatattgcccaggaaaattttttaggcgaaaatttttgtgtaacatttcgggcaa

SEQ ID NO: 8370 - DNA, 564 bp, Homo sapiens
  misc_feature (549)..(549): n is a, c, g, or t
  misc_feature (560)..(560): n is a, c, g, or t
cctgcttccccagctccagaacttccggccagcgcagccattttggcttcctgaccttgggctacggctgaccgttttttgtggtgtactccgtgccatcatgtccgtcctgacgccgctgctgctgcggggcttgacaggctcggcccggcggctcccagtgccgcgcgccaagatccattcgttgccgccggaggggaagcttgggatcatggaattggccgttgggcttacctcctgcttcgtgaccttcctcctgccagcgggctggatcctgtcacacctggagacctacaggaggccagagtgaaggggtccgttctgtccctcacactgtgacctgaccagccccaccggcccatcctggtcatgttactgcatttgtggccggcctcccctggatcatgtcattcaattccagtcacctcttctgcaatcatgacctcttgatgtctccatggtgacctccttgggggtcactgaccctgcttggtggggtcccccttgtaacaataaaatctatttaaactttaaaaaaaaaaaatcctnttcggacccgnccgg

SEQ ID NO: 8371 - DNA, 730 bp, Homo sapiens
accacgcgtcggcattttggcttcctgaccttgggctacggctgaccgttttttgtggtgtactccgtgccatcatgtccgtcctgacgccgctgctgctgcggggcttgacaggctcggcccggcggctcccagtgccgcgcgccaagatccattcgttgccgccggaggggaagcttgggatcatggaattggccgttgggcttacctcctgcttcgtgaccttcctcctgccagcgggctggatcctgtcacacctggagacctacaggaggccagagtgaaggggtccgttctgtccctcacactgtgacctgaccagccccaccggcccatcctggtcatgttactgcatttgtggccggcctcccctggatcatgtcattcaattccagtcacctcttctgcaatcatgacctcttgatgtctccatggtgacctccttgggggtcactgaccctgcttggtggggtcccccttgtaacaataaaatctatttaaactttaaaaaaaaaaaaaaaaaaaaactcgagactagttctctctctctcgagggatccagggcatctgtgaactggctgcttcttccagagagatctcttggcagagtgagggcctggagataaccagctttggattatcccgcatgcaacattcctgtgatcacataatcctcttcttcatcctcatatgaaataaatgaagagagcttcctcattcaaaaaaaaaa

SEQ ID NO: 8372 - DNA, 558 bp, Homo sapiens
cctgcttccccagctccagaacttccggccagcgcagccattttggcttcctgaccttgggctacggctgaccgttttttgtggtgtactccgtgccatcatgtccgtcctgacgccgctgctgctgcggggcttgacaggctcggcccggcggctcccagtgccgcgcgccaagatccattcgttgccgccggaggggaagcttgggatcatggaattggccgttgggcttacctcctgcttcgtgaccttcctcctgccagcgggctggatcctgtcacacctggagacctacaggaggccagagtgaaggggtccgttctgtccctcacactgtgacctgaccagccccaccggcccatcctggtcatgttactgcatttgtggccggcctcccctggatcatgtcattcaattccagtcacctcttctgcaatcatgacctcttgatgtctccatggtgacctccttgggggtcactgaccctgcttggtggggtcccccttgtaacaataaaatctatttaaactttaaaaacttatatttgtgcatataaat

SEQ ID NO: 8373 - DNA, 235 bp, Homo sapiens
cagtgagccgagatcacgccactgcactccagccggggtgaaaagagagagactccgtctcaaaaaaaaaaaaaaaaaaaaatcacaagataccactttatacccactaacatgtgctggtgatgatgctggagaaaacaataacacgtgttggtgatgatggtggagaacatagaatactgctggtaggaatggacaatgatacagctgctgtgggaagtggtttggcagttcc

SEQ ID NO: 8374 - DNA, 2027 bp, Homo sapiens
  misc_feature (1244)..(1244): n is a, c, g, or t
  misc_feature (1254)..(1255): n is a, c, g, or t
  misc_feature (1287)..(1287): n is a, c, g, or t
  misc_feature (1331)..(1331): n is a, c, g, or t
gatgtatatgtttgaagtgtgcgtgtagcattggggacaggcagaggctctgctcactggggaatgatgttctggtggaacaccccatggacttggagcttgagaagtgggctttggccaggccctggcactgaccacctaggaacagtcatcttttccaagcttctggttcctcttctgtaaggtgcgagtccctaaccacctttccaaagacagcatcctgtgcaagctgtcacgggagggggaagggccctggtgaccctcagggcctctagagcctgtgggcaagagctggccctccatgccaaggtgccaggcctaaccctggtgaagagtgacccaactgggcgactgcctgaggcctcagaggaggacaaggagaaggtgcacagcagcagggtgcacaccttgccctggcctctcctagggtagaggacggtgtgagcccccagaggctgtcatccagcctgagaggtttcttggctcttcctcccatgcccagggttctcccagactgcagagcaagatccaggctccacacaatgccagaggccctgcctctatcttctctctggccagcggccctatcgctaaccccacacatgaaggatactgctttggcatcatcgtttgtgagggccaggctggggaagggtggagagagtgtccttccctggggaggctgaacccagggagatggagtgacatgccccaaaaacacagcaagtgggactagaacccatgtctccagatggaaccccaggctcccactgctccatgctgtgcaggttacacctcccaccctgccgctctctccgggggcctcagtccacctcctgagcccatgtcctcagtccatgattggaccgggtccctgggtcccttggaggaccagccaagcccaggtccttctttgcttcttactccccaccccagtctccttgttcttcagtcttttgctttcccactggctcccttctcacacctcccatggctgtgcccatttctccttttaactctgtcaacttttggatcctatatttgaagcaaggcatgcatatatattttaaattttattatctctgttttgatctttttgtcataaaaaattcgtttttatttctaataatacttcctgccttaaagtctacatttcctgtttgaatgatgttcagtgtccattgtgtaaattctcatgtggtaatttcctttaagaaattattgaggggccaggcacagtggcncatgcctgtnntcccagcactttgagaggctgtggtgggatantttcttgagcccaggagttcgagaccagcctgggaagcatggcnaaaccctgtctctacaaaaaaaacacaaaaattagccaggggtgttggtgcatacctgtaatcccagttactcaggaggctgaggtgggaggatcacatgagcctgggaggttgaggctgcagtgagtcaagattgcaccactgcactccagcttgggtgacagagtgagaccctgtctcgaagaaaaagaaattattgagggcagggtggtggcacacgcctgtaatcccagcactttgggaggctgaggcaggaggattgcttgagctcaggaggttgaagctgcagtgagatgtgtttgcgccactgcactccagcttgggtgacggagcgagaccctgtctcaagaaaaaaaggagaagctactgaattgcagtaaaaccgtgtgcttctatgaggggataaagtatttacttgtggctgggcacggtggctcacgcctgtaatcccaacacttcgggaggccgaggcgggaggatcacctgaggtcaggagttcgagaccagcctcaacatggagaaaccccgtctctactaaaaatacaattagccaggcgtggtggtgcatgcctgtaatcccagctactcgggaggctgaggcaggagaattgcttgaacccaggaggcggaggttgcggtgagccaagatcgtgccattgcactccagcctgggcaacaagagcgaaactccatctc

SEQ ID NO: 8375 - DNA, 957 bp, Homo sapiens
attaagggcctgttgaggattaagggcctattgctacagagtggtaatcttgagattgattttgtcgcaatttgaatgattttattcatttcaataagggaaagaaagaaggggactagaaattagtgagtacaaacttcaaggcctttgcacctgctgtttttgctacctgggatgctctttctccacatgtcaatttcctgtctcctcctcagcagttagtgtcagctagaatgtgctctcatcagagaactgttccacgatagtcttttattttttttttttttttgagatggagtcttgctctgtcatccaggctgtggtgctatcttggcccactgcaacctccacctcccaggttcaagtgattctcagcctccccggtagctgggattacaggtgcatgccaccactcccggctaatttttgtatttttagtagagatggggtttcaccatgttggtcaggctgttctcaaactcctaacctcaagtggtccgcccaccttggcctcccaaagagctagaattacaggcattcttatctaaagaagtatttcctcttctcactcccactttctattatttcagcctgttttattgcctttataatacttacaaatcattgtctgaagttatcttgtttatagctttatagtttattgtcctcttcccctattggaatgtacttcctaaatcctcaagcctaggacagtacctggcacataataggtgcttaaaggtgaatgaatgaataaatatgctaggtatatctatacatgatttcacggaatccccacagctacctagtaaagtagacgttgttctgtctgtttcatgtttgaggaaactgaggctcagagaaagtaaatcacttaggccaggcacagtggctcatgcctataacccagcactttggaaggctgaggcaggaggatcatttgaggccaggagtttg

SEQ ID NO: 8376 - DNA, 90 bp, Homo sapiens
tctttttcaaatctatcttttcattgttaatcctaattgtagtaactatgcctaatttttaaataatgtacaaataaatcatgctttagt

SEQ ID NO: 8377 - DNA, 373 bp, Homo sapiens
agggaacatcttgagaacctcgattaagcatgaaaggacaggtccgcggtcctttatatgaaaacttggagctcaagtatgttttggaatttcaaatattcgtatttcagaaagatggagaaacgtttaatctatatacatgacatcttcgtgacttcttcatagcacctcaaatcaaatattacattaaaaattacataaagttccctggagtaaaatacatgactatttacactaacctatataaaattataaatgagcttttgtcagtcaaaattgggtaaggtttcaaccagccaaatgaaataaaaagaaaacataagcctttggttttcaatctctttggatatctggaccatggttgaagaattat

SEQ ID NO: 8378 - DNA, 509 bp, Homo sapiens
tcctgcctcctcccatgacccaccttcctgagaccccccgctcacacatcagttgcagtgccctgggggtgcagtggtggctgaggcagacatggctcctgtccccagtggggaggtggatggtgctcatggtcagcgccgctggaggggagctccgagtggaaagggagacgaaggtggggccctgagcccatcatgagtctgggctcctccgtcgtgctgctcagcatctccttcccatttctcttaccacactgcagcctctgtgagagcaaggatggcgtcttagtcgtgagttcccaaaaccttgtacaatgccccgggtagatgtttaatgagtccaacacagaggctttatccaaggccatgagaaaaatgcccttgcacctcagttacctctgtgacattctgacaactacacagtgaagcagcctcagtgccctcaggccctgcagtatagtccacccctttcccggggctgccggggtggggtttggtgcaagcaagac

SEQ ID NO: 8379 - DNA, 373 bp, Homo sapiens
actgaactgtacacttaagaatggtaaagatggtaaatattatgttttctatatttcaccatgattttttaaaagtttaaacaaggccgggcatggtggctcacgcctgtaatcccagcactttgggaggccgagacaggcggatcactaggtcaaggagatcaagaccatcctggctaacacagtgaaaccccgtctctactaaaaatacacaaaaattagccaggcgtggtggtgggtgcctgtagtcccagctactcaggaggctggggcaggaaaatggcatgaacctgggaggcagagcttgcagtgagccaagatcctgccactgcattccagcctgggagacagagtgagactctgtctcaaaaaa

SEQ ID NO: 8380 - DNA, 772 bp, Homo sapiens
ttgtttttaatataatttatgatctacctttaagagtgcttttaatcagcacttctgtagaaccagctgaaatgccagtgtgtatattaacattataatttaggtactggatcaaacatgtatagctggacttttcctgaggaaaaaagttgacctgaccagtgtatgaaattcaaacactgtataggaacaaggtaaaagcacaggtaggaattgctgaataattacctttagaccagcctgaacaggagacttcccacgagggtgagctcatttaatggttcctaaaactcaatcttgtggatgtcagtggtcatgcttgattatttgcagcagtgttttatgaaaagcagtagaaatgcattgggaggctgcagagaaagaggacaataacgggttttacttttgtaaatgaaatcccttcggtatgagacaagtatgttttttgctgctctgcctaagccactgaaaagggagatgtatgtggatgttagtgtgtgagtatgtgtgtactgttcatgtaggcacatctaaaaactgctgtgcactatggctgatgaccaacaagagacctaaaataaaaagagaaaaaagatgctcattggctttggaaaggaagcaattataaatacagtttaaaagattaacctattttccatttctccactcacctattttcaagaaatgtaataaaacaccaagctctttaccatatgtttacaacatttctaagtaaatataagtcttttaaatgacagacaaaaaaaaaaaa

SEQ ID NO: 8381 - DNA, 528 bp, Homo sapiens
tacatcgatgattctaggaaaataaaagtgaatgaccacatcaagcaaagtccatccttgagaaggcaagaggggatgtgaattggaatgcaagggaggactggtctttgaaaaagggatggtcctttcctccacggcattgaaagagaaggcaggtgcagatggccacagttgcctgcaggtgttttagtggtgagaagacaagacttcatatctaagagcttctcgtatttttaaagaagtcagaggttaagtaactggctgagactataataagagtgtgctctacgggtagaggttgagaaggcagaaaacacttaaaatcattatcttggggagttgggaagagatcttggattgtttggcagttttctgtgcctgtttgagatttttgatcatgaattttaaatgaaaccagtcacagttgtatgattttctgcagcaagacttagctgctgaagtgcaggcaggggtacgtgatagggtttagttggtgccaggattttgctaggattgtaaaaaaggaaa

SEQ ID NO: 8382 - DNA, 388 bp, Homo sapiens
aaataaaatttactggaggccattgttttggactaagctcctgtactagaccccagagtggagtcactcatgttaggtgccacgtaatcaaactgacccttaaaacagtcagctttaaaaaaaacaaacagatttacagcaaccagcagagaaggtcccagtcaacctgagctgatgtgataaggaagtcccctctgctttcatcctacaagaaaagtaactttgaaatgcccagtctactctttgttccttgtttctgttccccttctgccactttgtgcccccaaagacaaccccctcttctcattgggatgtctttttctatttcatcaatgggatgctgcctaattaatgaatcaataataaaagccaatgagtcaactcaatt

SEQ ID NO: 8383 - DNA, 466 bp, Homo sapiens
tgaaagaaatgcttttagtgtttcatcacaaaatgatgtttactataggtttttggtagacgaagttcccttcctcattgctgtggtaatggaactgtaatatgattaacagatagacaccaactgacacagagaatataaagtttaatgacaaaggaaaaagaaacttacaaagatggtttcataaagcaggagataatatattactctctcagataccagtagaactttccaggccctccaaagtttcccatggaaatacaactgtggagagtactacaaacgtattacttactttgtaatacaaagcaagtattataccattttaatagaggttttgtatctccttggccccaacttctgaagaatcttctgtgcctgccagctctccaggtgcaaataaccagtgcaaaacacccttgatgttttattattattattattatttctgggacaattgagtaaa

SEQ ID NO: 8384 - DNA, 168 bp, Homo sapiens
cagcatcacttgacttcctccttctactttccttccttctgcaggccagtctgtagttggctgatgtctgagaatatcacgacttttctgattcttagcagaaaagatgtggttttctaggaagcttctggtgcagcgagccctggttggggtggggctgagggcagt

SEQ ID NO: 8385 - DNA, 815 bp, Homo sapiens
gagtgtgcatccattactttgttgattgatatttgggtcatttccaggttttggctattgtgaataaaactgccttgactattcctgtacaagtctttgtattaaggaacatacgttttattttctcttgaggaagttcctagcaataagattgctgggtcatatggtaggtatatatttagctttaaaagcaactaagtgctttccaaagtgactgtacaatttaacattcctacctgaaatgtaagagaattccagttgctccacattcttgtcaacccttggtagcatcagtctctttaagaattctaatggatatgtaatatggactataggtttaatttgcatttctctgttgactaatgatgttgcacaacttttcatatgtctatcaaccattcttgcatcttcttttatgaaatgtctgttcaaatcatttgtccactttttattgtgtcattttattcagttgtaagagttctttacatattctggaaacaagtcctctgtcacatatataggtactttgaaaatctgtgctttgcctttacatttttttaatggtaactttttaagagtagatagttttggttttgatgaaattcaacttatcagtttttcagttatagtatgtatttttatgacccacctaagaagcatctgtctacccagagttgcaaagatatcccttttcttactagaaatattatagttttatttaccattgcttctatgatacattttaagttaatttttgtgtattaaatgaataaaaagttgaagttcaaaaaaaaaaagtcgacgcggccgcgaat

SEQ ID NO: 8386 - DNA, 373 bp, Homo sapiens
gaggctgaggcaggagaattgctcgaacccggaggttgcagtaagccgggatcgcaccactgcactccaactcgggcaacagtgagagactccgtctcaaaaaaaaaaaaacaccccaaaaactgctttgatgaaagctaaagagtaaactgtaaataaaaattaggcctaattttttgtttgttttttgtttttgtttttgagaccaagtctcactctgtcgcccaggctggagtgcagtggcatgatctcggctcattgcagcctctacctttcaggtttaagtgattctcatgcctcagcctcccaagtagctgggattacagatgcctgccaccatgcccggctaatttttgtatttttagtagagaca

SEQ ID NO: 8387 - DNA, 430 bp, Homo sapiens
attattgaaacaaaaacagcaacataacatactagaacctgtgagatacagcaatagcattgctaagagagctatttatagcaataaatgcttacatcagaaaagtagaaagagctcaaataaacagtttaatgatgcatctcaaggaactagaaaagccagaacaaaccaagccccaaatttagtcgaagaaaaagcaataaagatcagagcagaactaaatcaagtagagactgtaaaaataatacaaaggatcaacaaattgaaatttgtattttttgaagtgataaaaatcaactaacaacaaaaaaagaaaaaattatctaggtgtggtggcacatgcctgtagtcctgggtactcgggagactgaggcaggaggatcacttgtgctcaggagttcatcctgagtgacagtgtgagacctgtctg

SEQ ID NO: 8388 - DNA, 302 bp, Homo sapiens
acctgctgcatcaccaggctgggtgaacggacacaattgccagaactcacagaatagaagtatcagcaccgaaacctcacaggaaaaatgctccacgagtctcacagaacagccacactggctccttcattgtcttcagctccacaaccctcagatttgaacagcggtagcaccacctcctctccaggtcttcagccccatgtccctccctgaacaatcccttctcatgaaattcagcagtcaagaaatctgcagcggaagtaaatgaataaacgttttgttttcaaattgaacctctttta

SEQ ID NO: 8389 - DNA, 409 bp, Homo sapiens
acctgctgcatcaccaggctgggtgaacggacacaattgccagaactcacagaatagaagtatcagcaccgaaacctcacaggaaaaatgctccacgagtctcacagaacagccacactggctccttcattgtcttcagctccacaacctaagacatcagtgggagcaccggctcctccctggacctccagctcaacgaatctcatagacttaaaaggcagcacctgctcctccccaaggctccatctccaccaccctcagatttgaacagcggtagcaccacctcctctccaggtcttcagccccatgtccctccctgaacaatcccttctcatgaaattcagcagtcaagaaatctgcagcggaagtaaatgaataaacgttttgttttcaaattgaacctctttta

SEQ ID NO: 8390 - DNA, 834 bp, Homo sapiens
tgacagctggtttcctctctcctgggtggtcattctgaggagagtttattcctgttgaagaggccctcacgcagtccagcagataacacaaatgccccacatccccacaggtctccggggatttaggatgggcaggcagacagaattccagaagttgattctgggagaatcagttcagttttcccagaagtgcctcatgggcaaagcagtttctgccaagctataaaacggctcacgctggcccctcctacagaggaaaaccagtgtctcatcattgtgcaggtgctgccccacaaaacaggtgtgtttgtgcctttggataacctgtcaccaaacctacagttccttaccatgtgcctgcccttttgtgcagctgcatacaggccccagagccaagcagaagaaatgtaacccttgcccaggagtggatgtgaccacgaccatgcttctcttaaatgtaaagcaagcagagcatccaggggtttcctgtgtcctccgccccttccccgctcgcaggagcgggaaagcttccctccctcctttcacccacctgaatttgcagcgggcagacctgagccggcctaaattgggatgcacagatacttctgtgtctgtccccttattcttaaaacaggactaaccacagccccgacacacagcatccgtagagtgattggatgaggttgcattcagggaatgctcgtcacagtgtggaaacacaaaaatgcttcctgcattgatgctgctatggtttttataaataaaacatgttagaataggaatagatcttgttaatactctttttaaaactttttttgatgcccgacacacata

SEQ ID NO: 8391 - DNA, 327 bp, Homo sapiens
tggacaaggagatgcatgtagttttcctgcctgctgacaacagcagccattctgcagcccatggctgagcagtaattttgactttgaagttttagtatttaagaaatatattttgtgccaggcatggtgtaatcccagcatattgggagaccaaggtgggcggatcatgaggtcaggatttcaagaccagcctggccaacatagtgaaaccccgtctctattaaaaatacaaaaattggccagcatggcagaatgtgcctgtagtcccaactactcaggaggctgaggcaggagaatcacctgaacccaggaggtgaaagttccagt

SEQ ID NO: 8392 - DNA, 749 bp, Homo sapiens
ggagactcagtgctgacctgtgacttcagacttttctgagcctcagtttccccttttatactacaggggagttgagctggagtctattccataaagcaggccatgatgacactgctcagagtgaagtgggtggggtctcagggaccacctctcctcctgccttccacagaagctgctgagaagcctctgaggacctgcaggctctgcagcacctagggacctcaaaaacccctctccctgcactgcactagggacctcaaaacccctctccctgcactgcactagggacctcaaaacccctctccctgcctgcaccagggacctcaaaacccctctccctccctacacttttgttcacactgcctcctcccggcttttgtcccctccaagtcagagccagattgagattcctctctggcagtcagtttcctgagctaccgtctcttccaaacagcaggtgtaagactcccacattctgctccaaccatgctgtctgggggcatgggaacaccagattcttaggcctgcatgacccttctctctccagtcctctgttcccctgtgtgcctggaagtgccaggttcaaaagacccatagaggcctgtcccgttgtgatggcaagaccatgaccatggacaggctgacagtggctcttttcggagctggactggcagagcctgcgcttgtggtgcctggctcggggctgatgcctgctggggatgccttcctgtcccaggaggttctggctg

SEQ ID NO: 8393 - DNA, 393 bp, Homo sapiens
gcttaaaaaaaaaaaaaaaagtaagaaaatatttgttaactttgactccagtgcaaagaacttttatttttgtgttcacagcacttttaaagcaaattagctaaatttgaatctctaactcccagattgctaaaaacaaaaaaacccataaccctgatccatttacttccagagaaatacacattggcattctctctggaatgttttttgccatttggatttagcctataactgataaggactcagcctggcacctggaaggaatgccttcaaatgtgaccatgtggggatgaaattatgttatacttgttgttgttgttgttgtattaagtggttattaactggaccaaagaaaaaatctgtagagaatatttcctaatgaaatttgtctcc

SEQ ID NO: 8394 - DNA, 770 bp, Homo sapiens
tttcacttttctttttttttttttaacaaggatacttcatagggggtaacatcaggaggcacatgtctgccttgtcccacttttagtgatgctaagagtgatcagagggttcaaatggtaacagcctcagctctcttatcaacttttcatctaaagacttgatagtcattccttgaatcaattattacatgaggggctgtaagtggtgattttctaatgctgctggtccaactacatttattagttggaattcttctctcaccaactaaacctattttgatactctgaattacactttatacaggaaaactaggataactatttaattctttccttttaccttccaattttcaaaataaagtactggtgccttagttacatcagtaactgatgtagagtttatttccaactaaatttaacagataccaaaactgaaatatctatttacaaaacatttaaacaaaggagaggagagattctgtgagcaatccaactaacatataaagggtataagccagtacttccgatttgtccagtgatgtattaataaaagtccagccaggcacggtagctcacacctgtaatcccagcactttgggaggccgaggcgggtggatcacgaggtcaggagtttgagaccatcctggctaacatggtgaaaacccgtctctactaaaaatacaaaaaacacacacaaaaaaatgctcaccatcactggccatcagagaaatgcaaatcaaaaccacaatgagataccatctcacaccagt

SEQ ID NO: 8395 - DNA, 630 bp, Homo sapiens
ccatccatccatccatccatccatccatccttccatccaaataacttaattaataccttcagttagatactgcaaaatatgtgctgggagccatggaagatagaaaaaaagtaattaatggggtgattatggcataatttctattattggctattcttaaataatttttatatcttcaaataactttaaaagataggcaaatcaatatctatttgtgtttctaagttaaaataaactatttagtgtattactttttataattctctgctttttttaaaaaaagaaaacccagacatttcatttagctgacagctgtggatgttcgttgcattagatagattttttatcttaatatagaaatcttactgaaccaagaaagttttgcagaatttctgaaggccgaatattcagacttaaataataacaatgtaggcttgcttttcattaacttgattaaaatttaaagttggagttgagaaaagattggaacaattgacattaaatatatatgatgcttatgaatctgtgtttggcactattttcacttatttggtttaccttatcaagactagtttctgttaagccactttaccttattcagtataaataagactgagtaccaaaattcta

SEQ ID NO: 8396 - DNA, 345 bp, Homo sapiens
tattaaatggtaaaaagatgtgcttttcattttgaaagagcagaggggcagttttttacccaacaaactaaataatataaaaagggctttgttttttcatggatcaggcctctggtatctatattcaactggtgctttttaagcgtatacaagtaatttttatcaacctggttgttgtttcatagcgttgatgtgtagtatctctttataggatgcaattttgagacacaatctgcaccttactctcaattaggcaagtatacctattgtaattatcttttacttacgtgattggtgtgctcaatttccttcacaaaataaatggcggcaacttgtcttatgtca

SEQ ID NO: 8397 - DNA, 566 bp, Homo sapiens
ttggattttaattgtgaagctgcagcaagtttacacacaagagtatcagattaacacagaaatctggaaatgttagaactttggttggaaatttcctgtgacccttgggaatgacagctttagagccaggattgtgtgattcacagtatagtcttccacagtctcctgtctcttttataaggtgtcctatgagactaataatatctttcttaggggactgttgagaaggtggaattttgcactgttctatagtaaatgctcagcaggtggtaattaagaagaaattatgtttctggaaatatttgtagatgtaagttatgatcagcatttagcttgcctatccattgttctggttcaaagagttttgcatgttagccgatctcaaaactaaacatcttccattataaagccatcaaatcattctttattgagagtttatcaataagcatttaacttaattaactccctcttgagtaactggataaatgaaaaaaccatattatatatcagaatttgaaacaagaactgaaaactcctaaaacatggaaccaaactcaaccaggtat

SEQ ID NO: 8398 - DNA, 446 bp, Homo sapiens
tctcgaactcctgacctcaggtgatccgcccacctcgtcctcccaaagtgccgggattacaggagttcttcaagaccaccttggccaacacagtgaaacccgtctctactaaaaataaaaaaaaaattagccaatcatcgtggtgtgtgcctatagtctcagctacttgggaggctgaggcaggagaatcgcttgaacctgggaggcagaggttgcagtgagccaagatcgtgccactgcactccagcctgggcaacagagtgagactccatctcaaaaaaataaaaataaaaaataaatgcaaaatataaagtcaggttgtaaacagatacattctaaaacttatctctggctgggcatggtggctcacgtctgtaatcccagcactttggcaggccgaggcgggacacttgaggttaggtgttcgagaccagcctggccaatat

SEQ ID NO: 8399 - DNA, 560 bp, Homo sapiens
taggcagaatatatataggctggtaaaaaaaaaattgtgtttcttttaaccattctgtacccacagtggcatgtaaatattaagtttttttttcttctttttatgagacagagtctccagcccaggctggagtacagtggcacaatcttgactctgcaacctctgcctcccaggttcaagtgattcttgtacctcagccacccaagtagctgggactacaggcatgcaccaccatgcccagctaactttttgtatttgtagcagagatgggcttttgccatgttggccaggatggtctcaaactctcggcctcaagtgatttgcccatctcagcctcctgaagtgctgggattacaggtgtgagccactgcacccagcctaaattatttcttaattgctaatttgttaatgtgaataaaatattcttgtactagaataggatagggtggtagttcttaatcttttttgagcgaagctgtggattcttcttagaataatgcacacaaaaacactttgcttttaattcaaggctttcatagatcctgggttaactaaagacc

SEQ ID NO: 8400 - DNA, 313 bp, Homo sapiens
taggcagaatatatataggctggtaaaaaaaaaattgtgtttcttttaaccattctgtacccacagtggcatgtaaatattaagtttttttttcttctttttatgagacagagtctccagcccaggctggagtacagtggcacaatcttgactctgcaacctctgcctcccaggttcaagtgattcttgtacctcagctactcaggaggctgaggcagggggatcacttgaacccaagaggcggaggttgcagaaaacagagattgcgccactacaccccagcctgggtgacaagaatgaaactctatctcaa

SEQ ID NO: 8401 - DNA, 681 bp, Homo sapiens
tggcttaaacaacagaaatttacttctcttggttatggagtctggaaatccaagataagggctgggcgcggtggctcatgcctgcaatctcagcactctgggaggccgaggaggatggatcacctcagttcaggagcttgaagtgagccgagatcgcgccactgcattccagcctgggcaatagagcgaagactccatctcaaaaaaaaaatcaaaaaacctcaagtaaagaactatcagcggacattacattaactgataaaatgatgaacactgacatcagcaacaagccaagaataatccacaatcatctctattattctgttattgttttagaggttctggctattagagtaagatgaaaaaataaaaacttttttggaaaaaatatttttccttgcagatgatatgattgtattcttagaaaacctcatataccactaaaattaaaaaaaaaattaggtgtgatatggctggtcaaaagactagtatatcagaatcaatggctttttctcccccatagtaccagtaatcacttagaaatggaagccaggcacagtgggatgtgccggtggtcccaactcctccggagtatgaggcaggagaaatacttgagtttgaggatacttagctatgatcgtgtcactagcctgtgcgatatagcgaggctctgtctcttaa

SEQ ID NO: 8402 - DNA, 1117 bp, Homo sapiens
cgcccagcgcagccccggccgctgggcgcacccgtcccgttcgtccccggacgttgctctctaccccgggaacgtcgagactggagcgcccgaactgagccaccttcgcggaccccgagagcggcggcgcgactcaccgcggaggcgcccggacgcgtcaatgtcccccagggcaaggcctgaaccaggtcgcgagggtctgtctcccgtctggggagctgaactgcccgagacactgtcgcagtcgcggggacttgtctggagcggcggggtctgagcccaagtcggaagccgccgccgccgccagcgtcccgtgcgcctgccgccccgggaccagccgcgaaacttcttctcgggacggagacagcgctcgccgcccgggccgaggcccagcccaataggaagcacctgatccacactctttctagccccagggatgctcaggaaagcagcctttctttagggctgtcatctgttctggggatctgttgctgtttcttgggcccacagaatacactccacacctcgggactccataatattggacaaggctggaaggcccatttggctcctgcagcctcttatgcaggaggacctcctgaggcttcgggcaggagctggtgcacacctggaggagagtgctggtgaatggcaggtgtgtgcctcagtgtccttgctgccagggtgtcagccctgcttcaccactggccgtttgtctctgtcccctccactggcctcttgaagcacagagaccctccgggtactttccttcctctgggcttccactcatgctattccctgctccctttttctacctggagacccccattcctcctcctcctctgctgccctcacctccacctgggccctcccagctcccgggagatggctgaaccccactccccacccgctagtcatcctcttcagcggtcctcccagagctgtcctcagcatggcagcctccacagcccctgggtgtcacccccggtttcgtgtctgcctcggactccagacctgcccctcccaggctggcccagatggatcctctacagtgactaacccaaaccagcaccaggcagggacccaataaacctttgtgaatggagaaaaaaaaaaa

SEQ ID NO: 8403 - DNA, 834 bp, Homo sapiens
cgcccagcgcagccccggccgctgggcgcacccgtcccgttcgtccccggacgttgctctctaccccgggaacgtcgagactggagcgcccgaactgagccaccttcgcggaccccgagagcggcggcgcgactcaccgcggaggcgcccggacgcgtcaagtgcgtactttcaaccgtaaatgggtgctgagcgtttaggggtgcggggcaactccctaactcgtggggccctggccggccctgccgcggcgtccgagaccttctgatccctcgctgcgcgcggcgcggggttggcgacttgggctcaggggcggcggggcggggaggtgccttgacctagggacccagaggccgggagcaagtctcctttcgccttggactgcagtgtcccccagggcaaggcctgaaccaggtcgcgagggtctgtctcccgtctggggagctgaactgcccgagacactgtcgcagtcgcggggacttgtctggagcggcggggtctgagcccaagtcggaagccgccgccgccgccagcgtcccgtgcgcctgccgccccgggaccagccgcgaaacttcttctcgggacggagacagcgctcgccgcccgggccgaggtaggagctggctgggctcggtagagcgcgggcgaatcgctttcggcagcgaaggaacgtgtcgggagaagccaactgcaggaccagggccccagcgggcgcgcagagacgcctgccttgggcggaggtcccccctccggttttcgtggctctggtagggccctctgtcccgtgagctcctcactggacctgaggctacaggcttcagcaggtcaagcgcc

SEQ ID NO: 8404 - DNA, 2154 bp, Homo sapiens
ccagcctggtctctcccccttgcgtcagtgctcctaagctgcccctcaccactctgggtaggggtctttcaggtgggctagggaattctccttggaagtccccttgtttgctcccctccatcagggcacctctgagttagccaatcatcctcttttctggcctcttttttgcggggaggagagtagagagagaagcctcctactcggcaggtctctgagaggaggtttgggggggcttctgaggttgctcctcctgggcagagtcaaggggtgttgagggttccaacttttactggacaatctctcaagctctgattccctgatttctgggaggtgtcagtgtagggcttgtgtcctgccccacccacacagcatttggtgcaggcacatgggatggttccccaagcccttttcccacagttagtttcagaaaatgcataagccacctaaggctgggagagcctttctgtgctggctgagatctggtggcatgtgcatgcatatgtgtgcaagtgtgtgtgtgtgtgtgcaagtgtgtgtgcgcatgtgcatgtgtgtggaaagtatggtctgggtggctgtaagactggcccctcttgtcccctctgcaggcccagcccaataggaagcacctgatccacactctttctagccccagggatgctcaggaaagcagcctttctttagggctgtcatctgttctggggatctgttgctgtttcttgggcccacagaatacactccacacctcgggactccataatattggacaaggctggaaggcccatttggctcctgcagcctcttatgcaggtgaggacagacccaaggtccaggcaatgctggcctttggaacacagaacctggctcactgactcccactccagttgtcttttccctctgcctctggagcaaccctctctcctccagagcaacccctgtccctccttcctacctctctctagggctgcacccccagctcaccttagacctggcccttcctacctgttgcccctactgtcttgtcccatcccagtggtcaggagggagagtactggccaaaggcccagctccacctgtgacttaggggagtgccaggcatcacccagaggtcccggccctcgggggcctggcaggctctgctgtgggggaagcagagttagaactggggctgcttctcctgtcccccagcctggctgggcctcccccacctccctttctgcctgccctcttacaactccagcagggggcgggcaggggaaagaaaaggagggacaagttggatggggtccatttggtgtccaggaacaacttggagagaggcggggaggggacaggcagcagggccctggcagagccaggggagggctggcctttggatggccttctgatcccaagcccatcctcctggggcagtcttcccttgaaagggagggtttggtgaaccctggtgcggacccccccgccggacctcactgccccagtgcggggcgtggtaggcgggtttgcaatgggtacagcctctctctccattccagtagagcagctcccagggcccagagaggctgtcactgagacttccctctggggtggggtgggttctggtggccctgtgttcccctgcaggaggacctcctgaggcttcgggcaggagctggtgcacacctggaggagagtgctggtgaatggcaggtgtgtgcctcagtgtccttgctgccagggtgtcagccctgcttcaccactggccgtttgtctctgtcccctccactggcctcttgaagcacagagaccctccgggtactttccttcctctgggcttccactcatgctattccctgctccctttttctacctggagacccccattcctcctcctcctctgctgccctcacctccacctgggccctcccagctcccgggagatggctgaaccccactccccacccgctagtcatcctcttcagcggtcctcccagagctgtcctcagcatggcagcctccacagcccctgggtgtcacccccggtttcgtgtctgcctcggactccagacctgcccctcccaggctggcccagatggatcctctacagtgactaacccaaaccagcaccaggcagggacccaataaacctttgtgaatggagaaaaaaaaaaa

SEQ ID NO: 8405 - DNA, 1704 bp, Homo sapiens
cgcccagcgcagccccggccgctgggcgcacccgtcccgttcgtccccggacgttgctctctaccccgggaacgtcgagactggagcgcccgaactgagccaccttcgcggaccccgagagcggcggcgcgactcaccgcggaggcgcccggacgcgtcaagcccagcccaataggaagcacctgatccacactctttctagccccagggatgctcaggaaagcagcctttctttagggctgtcatctgttctggggatctgttgctgtttcttgggcccacagaatacactccacacctcgggactccataatattggacaaggctggaaggcccatttggctcctgcagcctcttatgcaggtgaggacagacccaaggtccaggcaatgctggcctttggaacacagaacctggctcactgactcccactccagttgtcttttccctctgcctctggagcaaccctctctcctccagagcaacccctgtccctccttcctacctctctctagggctgcacccccagctcaccttagacctggcccttcctacctgttgcccctactgtcttgtcccatcccagtggtcaggagggagagtactggccaaaggcccagctccacctgtgacttaggggagtgccaggcatcacccagaggtcccggccctcgggggcctggcaggctctgctgtgggggaagcagagttagaactggggctgcttctcctgtcccccagcctggctgggcctcccccacctccctttctgcctgccctcttacaactccagcagggggcgggcaggggaaagaaaaggagggacaagttggatggggtccatttggtgtccaggaacaacttggagagaggcggggaggggacaggcagcagggccctggcagagccaggggagggctggcctttggatggccttctgatcccaagcccatcctcctggggcagtcttcccttgaaagggagggtttggtgaaccctggtgcggacccccccgccggacctcactgccccagtgcggggcgtggtaggcgggtttgcaatgggtacagcctctctctccattccagtagagcagctcccagggcccagagaggctgtcactgagacttccctctggggtggggtgggttctggtggccctgtgttcccctgcaggaggacctcctgaggcttcgggcaggagctggtgcacacctggaggagagtgctggtgaatggcaggtgtgtgcctcagtgtccttgctgccagggtgtcagccctgcttcaccactggccgtttgtctctgtcccctccactggcctcttgaagcacagagaccctccgggtactttccttcctctgggcttccactcatgctattccctgctccctttttctacctggagacccccattcctcctcctcctctgctgccctcacctccacctgggccctcccagctcccgggagatggctgaaccccactccccacccgctagtcatcctcttcagcggtcctcccagagctgtcctcagcatggcagcctccacagcccctgggtgtcacccccggtttcgtgtctgcctcggactccagacctgcccctcccaggctggcccagatggatcctctacagtgactaacccaaaccagcaccaggcagggacccaataaacctttgtgaatggagaaaaaaaaaaa

SEQ ID NO: 8406 - DNA, 1341 bp, Homo sapiens
ccagcctggtctctcccccttgcgtcagtgctcctaagctgcccctcaccactctgggtaggggtctttcaggtgggctagggaattctccttggaagtccccttgtttgctcccctccatcagggcacctctgagttagccaatcatcctcttttctggcctcttttttgcggggaggagagtagagagagaagcctcctactcggcaggtctctgagaggaggtttgggggggcttctgaggttgctcctcctgggcagagtcaaggggtgttgagggttccaacttttactggacaatctctcaagctctgattccctgatttctgggaggtgtcagtgtagggcttgtgtcctgccccacccacacagcatttggtgcaggcacatgggatggttccccaagcccttttcccacagttagtttcagaaaatgcataagccacctaaggctgggagagcctttctgtgctggctgagatctggtggcatgtgcatgcatatgtgtgcaagtgtgtgtgtgtgtgtgcaagtgtgtgtgcgcatgtgcatgtgtgtggaaagtatggtctgggtggctgtaagactggcccctcttgtcccctctgcaggcccagcccaataggaagcacctgatccacactctttctagccccagggatgctcaggaaagcagcctttctttagggctgtcatctgttctggggatctgttgctgtttcttgggcccacagaatacactccacacctcgggactccataatattggacaaggctggaaggcccatttggctcctgcagcctcttatgcaggaggacctcctgaggcttcgggcaggagctggtgcacacctggaggagagtgctggtgaatggcaggtgtgtgcctcagtgtccttgctgccagggtgtcagccctgcttcaccactggccgtttgtctctgtcccctccactggcctcttgaagcacagagaccctccgggtactttccttcctctgggcttccactcatgctattccctgctccctttttctacctggagacccccattcctcctcctcctctgctgccctcacctccacctgggccctcccagctcccgggagatggctgaaccccactccccacccgctagtcatcctcttcagcggtcctcccagagctgtcctcagcatggcagcctccacagcccctgggtgtcacccccggtttcgtgtctgcctcggactccagacctgcccctcccaggctggcccagatggatcctctacagtgactaacccaaaccagcaccaggcagggacccaataaacctttgtgaatggagaaaaaaaaaaa

SEQ ID NO: 8407 - DNA, 1516 bp, Homo sapiens
ccagcctggtctctcccccttgcgtcagtgctcctaagctgcccctcaccactctgggtaggggtctttcaggtgggctagggaattctccttggaagtccccttgtttgctcccctccatcagggcacctctgagttagccaatcatcctcttttctggcctcttttttgcggggaggagagtagagagagaagcctcctactcggcaggtctctgagaggaggtttgggggggcttctgaggttgctcctcctgggcagagtcaaggggtgttgagggttccaacttttactggacaatctctcaagctctgattccctgatttctgggaggtgtcagtgtagggcttgtgtcctgccccacccacacagcatttggtgcaggcacatgggatggttccccaagcccttttcccacagttagtttcagaaaatgcataagccacctaaggctgggagagcctttctgtgctggctgagatctggtggcatgtgcatgcatatgtgtgcaagtgtgtgtgtgtgtgtgcaagtgtgtgtgcgcatgtgcatgtgtgtggaaagtatggtctgggtggctgtaagactggcccctcttgtcccctctgcaggcccagcccaataggaagcacctgatccacactctttctagccccagggatgctcaggaaagcagcctttctttagggctgtcatctgttctggggatctgttgctgtttcttgggcccacagaatacactccacacctcgggactccataatattggacaaggctggaaggcccatttggctcctgcagcctcttatgcaggtgaggacagacccaaggtccaggcaatgctggcctttggaacacagaacctggctcactgactcccactccagttgtcttttccctctgcctctggagcaaccctctctcctccagagcaacccctgtccctccttcctacctctctctagggctgcacccccagctcaccttagacctggcccttcctacctgttgcccctactgtcttgtcccatcccagtggtcaggagggagagtactggccaaaggcccagctccacctgtgacttaggggagtgccaggcatcacccagaggtcccggccctcgggggcctggcaggctctgctgtgggggaagcagagttagaactggggctgcttctccactggccgtttgtctctgtcccctccactggcctcttgaagcacagagaccctccgggtactttccttcctctgggcttccactcatgctattccctgctccctttttctacctggagacccccattcctagtcatcctcttcagcggtcctcccagagctgtcctcagcatggcagcctccacagcccctgggtgtcacccccggtttcgtgtctgcctcggactccagacctgcccctcccaggctggcccagatggatcctctacagtgactaacccaaaccagcaccaggcagggacccaataaacctttgtgaatggagaaaaaaaaaaa

SEQ ID NO: 8408 - DNA, 1086 bp, Homo sapiens
ccagcctggtctctcccccttgcgtcagtgctcctaagctgcccctcaccactctgggtaggggtctttcaggtgggctagggaattctccttggaagtccccttgtttgctcccctccatcagggcacctctgagttagccaatcatcctcttttctggcctcttttttgcggggaggagagtagagagagaagcctcctactcggcaggtctctgagaggaggtttgggggggcttctgaggttgctcctcctgggcagagtcaaggggtgttgagggttccaacttttactggacaatctctcaagctctgattccctgatttctgggaggtgtcagtgtagggcttgtgtcctgccccacccacacagcatttggtgcaggcacatgggatggttccccaagcccttttcccacagttagtttcagaaaatgcataagccacctaaggctgggagagcctttctgtgctggctgagatctggtggcatgtgcatgcatatgtgtgcaagtgtgtgtgtgtgtgtgcaagtgtgtgtgcgcatgtgcatgtgtgtggaaagtatggtctgggtggctgtaagactggcccctcttgtcccctctgcaggcccagcccaataggaagcacctgatccacactctttctagccccagggatgctcaggaaagcagcctttctttagggctgtcatctgttctggggatctgttgctgtttcttgggcccacagaatacactccacacctcgggactccataatattggacaaggctggaaggcccatttggctcctgcagcctcttatgcaggaggacctcctgaggcttcgggcaggagctggtgcacacctggaggagagtgctggtgaatggcagctagtcatcctcttcagcggtcctcccagagctgtcctcagcatggcagcctccacagcccctgggtgtcacccccggtttcgtgtctgcctcggactccagacctgcccctcccaggctggcccagatggatcctctacagtgactaacccaaaccagcaccaggcagggacccaataaacctttgtgaatggagaaaaaaaaaaa

SEQ ID NO: 8409 - DNA, 539 bp, Homo sapiens
gacagcggtgtcgccagcagtgggcgccgaaaaactagcttcttggaggacgacttgaatcccttcgactcagaggaactggccctccacctggacagtggggggatccgcaagcgcacctcggcccaatgcagtgatggcatcacagactccccaatccaaaagcgcaaccgaatggtctaaactgcctcattggttgcctgccgccatattgcttgagagtgaactcaaccgtcgacatgcttgtctaaaggttactggagaccatttttcttcccttctctaagttaaacaaagatttctaacaattttgccataaagaaactttaaaagtattccagaagaggcttcatatgactctgactttccaaaaaatataatcctagcagagaacaaatatgtagtagttagcaggatcatttaaagcaaacgtatctggtcaaggcaggagtctgatttatcttgttcacagttatattcctcagcacctagcacagttccaggtgctcaataaatgttcattgaatgaaaaaaaaaaa

SEQ ID NO: 8410 - DNA, 271 bp, Homo sapiens
tggccctggtttcctagccgtctgctgccccggagtgtccggcagtcgccgcagccccaggagctgccggaattaggcctcgtttctcgggtgtgaacccccatttatgcacaggggttcctagacgggctcgggggcctggctggccggcttctccagctcaggagatttctcacctgctccttttcaattctttgacaaactggttttgggggtggcccgcccctattccttccagcctgtgggagtctccgcagccacccttgcctga

SEQ ID NO: 8411 - DNA, 648 bp, Homo sapiens
caaacccacgaaatagcccttgtggttgtggcttttagtaccaggaagtcaggaggagacggttgctaaatgtagttctatctggtactcgagtggggcacaatttttaaaagccaaaagtcaaagggtctcaaatgaactctgagttaccatctttggactgacttttaatataaagctgtaatccttaaatctgtgtcagtagtcccacctactatgtcactttaattggatgaatgcgttaatgaaaagtttgttttcaaacctcactaaactgctacttaagatcacagttaatgtgagtcctgcttaatttggaaagcatttaaaaaatggaaaagtttcttagggaagcaaaaattttgcaactctgcctacaaggtacagtaattggctaggttcttttgaagagcagtgttgactagagttaaggaaaagtcagttgtgaaaaatggacatttttaatagcaaaatgatgtgctttactgtagaaacaggaggaagggtgcattatcctggggaaaatgaattcttcttcagttatattttatgctgctctactttattgcaaaacgctaatattaaatgaatcaagaccacctccccttcccgctttatgaaaataaatagaagtatagaagataaaaa

SEQ ID NO: 8412 - DNA, 227 bp, Homo sapiens
ttgaaagctcagccagggcctgaccccagacgcagtgctcagagaccacagtgcttctagaggcccacaacagtattagagcttcttttaaaatcagaaggaaggaaatgaacctctaagatcaaatagtacatttgcctttataccagtgcagctatacaatatgatttctaatatttgggaggagaagggacccataaggtaaagcaccttggcccatggaagtc

SEQ ID NO: 8413 - DNA, 472 bp, Homo sapiens
tatgccaggatggcaagaatgttgtgcttcatcacttgattttaaaagcagaatttttaaaaattccaggaaacaaagatagtacatttgaaatggtctcttttattcagtaaaatggaatgttgcagtgctctcttttcaaagcaaaaagtgagtttctttttattttaaaactgtacaggctgggcacgatggctcacacctgtaatcccagcactttgggaggccgaggcaggcggatcacgaggtcaggagatcgagatcatcctggctgacacagtgaaaccccgtctctactaaaaatacaaaaaaaaattatccgggcgtggtggcaggcacctgtagtcccagctactcgggaggctgaggcaggagaatggcgtgaacccgggaggtggagcttgcagtgagccgagattgcgccactgcactccagcctgggcaacagagtaagactctgtctcaaaaaaaa

SEQ ID NO: 8414 - DNA, 437 bp, Homo sapiens
gggtatgtggaaactttactattttccctatttttctgtaaatctaaaaccattctaaaaattaaatttactttttaaaaagtttcttaaaacaatgaaatgagtttgaccaatgcaaagctgaagaaagaagataaccatgaaatctaggattcaaagcaaaggttaataaaattttgattatgtgacaccatgacggatatacagtacaataataatatccctatgtttgaaataaggtaggtatcaaattttaatttacaaaccaacacaaattattaaaggaataaaatattctaaagaaaataggctgagtgcagtggctcatgcctctaatcccagcactttgagaggccatggtgggaggatcccttgagcccaggagtttgagaccagcctgagcaacatagcaagaccttatctctactaaaaattaa

SEQ ID NO: 8415 - DNA, 487 bp, Homo sapiens
gttcatattgtaggagtgttgaagaggtacataactgaaagatacttaattctgaaccaagctgaatgttaaaccataaccgtgttcaaaaaatgaaattagttgtaaattagttgtggtataaaaattgcttccagaaatgttgtataagcttggtttaataaatatatatggaactctggatcccacagagaacacacattcatttctaggacacatgaaaaagtttataaaaattgaaaacacataggccatgaaggaagtctcagaaactcaaaagaatcaatctttatattttgaaaatgtgtgttttggccaggtgcagtgactcacacttgtaatcccagcactttgggaggccgaggcacgtggatcacttgaggtcaggagttcaagaccagcctggccaacatggtgaaacccccatctctactaaagatacaaaaattagccgggcgtggtggcacgtgcctgtagtcccagctac

SEQ ID NO: 8416 - DNA, 348 bp, Homo sapiens
gagagggagggagggaaggggcattcggcgttctgagcctggcttcaacccagctctccctgccctctgccccccgcctaccccttccggctccatcacacggcactcaagaccctaaggagcatctgaggctctgggtcccaggagtgcaggtgtttggcccaggatcctcccgggaaacttctcctccccacgactggcagctcccaggatctcttgcccatctccaaattccagcaccacccactgtgctcaccacccagccagccacacccctgggccagccctgcctctcccagacgagctgtctctcaccctgtcctccgggaaggcccctgaagcccctcc

SEQ ID NO: 8417 - DNA, 293 bp, Homo sapiens
ggttgctctcctatcgtaaatctcttttaacgttgagcttcaatcttaatgctcaatcaacatatttttcttgatctcatcaaaatccatagcaataacaactcttaaccatgaccctcagatttttatatccaaccaaaatcattcttttgagctagagacctatccccctgcccatcagttatgctcatgtatgtcacatagttaattcaaaatcagtatatatgagatcaaaaactgccttctaagcaattcttcctccttctctagctcattgaaagacatcatgtgcc

SEQ ID NO: 8418 - DNA, 417 bp, Homo sapiens
actcctatggctctgcattatttgctttgttcttagaaaaggatcttaccctccccaactagactgtgaaatcctggacaactagacacccaacccattctgagaaacacttgaacacttggtgattggtaacaaaatgcatccacatgtagccactatgtaaaacaagtgagagtcacgactgctgccctataagagtctatgtggccaggtgtggtgattcacacctgtaatcccagcactttgggagactgaggtgagaggatcacttgagcacaggagttcaagcccagcctgggcaatgtaacgagacctctatctataaaaaatgaggcaggagttggcaagaggtcaagactgcaatgagccatgatcctgccactatactcctgcctgggtgatgggagaccctgtctc

SEQ ID NO: 8419 - DNA, 436 bp, Homo sapiens
tgtctgtgcatcccatgacccaatcaagttgccataaaattaaccatcacaggaagaaaataataatttcagaaatatatccaaatacatatgagaatttattttatgataaatatagcatctcaactcagtaggcaggaaagatagagtattcagtatttggtaaatgctgttgaggaataattgagcaggcatttgggggaaaaaaattggatccatcattcagaccttacacaggaatacattccagatatattacatgtaaaaactaccaccatgaaagtactaggataagcataggaaaatccttttatgcctgcaaatgtataggctttgtggcctatacatttagtctgtttctattctttggattaaaaaattgacacatttccttgacttatattccttctagaaaaacaaatggacataacattga

SEQ ID NO: 8420 - DNA, 362 bp, Homo sapiens
aatccaaacaccaggttaataaggtggtgaagattctgagagttgtaggagatgttgtaataatcctagttatatttctttctcatataaaaatgaaggaacaggatttattttatcaactctatagaagatttgtttaatctcctatagagagtacatgtgtatctttacaatcaggattaaaaatattattttcaacaattggcaggctaaatttgtactagaaagctaaatttaggccttagataaatgtagtaagtatattttactcaatgtacatttatgcagatttttcaatagtggtaagttgtagtgccttggttcaagacactgaaacaagtaagcagaaaatctcattttca

SEQ ID NO: 8421 - DNA, 314 bp, Homo sapiens
ccatattggctaggcttgtctcgaactcctgacctcaggtgatccacccacctcagcctcccaaagtactgggattataggcataagccaccacgcccagacactatctgatttttatggaaagtttcccaatgcctgaactagtcaatagcccttggatgtcctggcagtctcttacatcccacatttatattaaccatgcctatcatgatgtctgacccatcaaaagccctgagaccagagagggcacttatccaatgggggctaacttatacaatataaacaacccatgctgtatcctgtcctgaaaacat

SEQ ID NO: 8422 - DNA, 863 bp, Homo sapiens
accccgggaaccgttattggccgggtcacaagcccgcccgcccgctgctggagccgcgaccatggaggagtctggcatggctcatgaatcagcagaggacttgtttcatttcaacgtagggggctggcatttctcagttcccagaagcaaactctctcagtttccagactccctgctgtggaaagaggcttcagccttgacctcttcagaaagccagaggctatttatcgacagagatggttccacatttaggcacgtgcactattacctctacacctccaaactctccttctccagttgtgcagaactgaacttgctgtatgagcaagcattgggtttgcagctgatgcctttgctgcagactctagataacctgaaggaagggaaacaccatctacgcgtacggcctgcagacctacctgttgctgagagagcatctctgaactactggcgtacatggaagtgtattagcaaaccctcagaatttccaattaaaagcccagcctttacaggcctacatgataaggcacctctggggctcatggacacacccctgttagacacagaagaggaggtgcactactgcttcctgcccctagacctggtggccaaatatcccagcctagtgactgaagacaacctgctgtggctggctgagacggtggccctcatcgagtgcgagtgcagcgagttccgcttcattgtgaattttcttcgctcacagaagattttactaccggataatttctccaacattgatgttttagaagcagaagtggaaattctggaaatccctgcactcactgaagccgtaaggtggtaccggatgaacatgggtatgtcgccaggaaaccttggctccc

SEQ ID NO: 8423 - DNA, 708 bp, Homo sapiens
aggctgaggcaggagaatcgcttgaacccaggaggtggaggttgcagtgagctgagatcgcaccactgcactccagcctgggcaacaaaacgagactctgtctcaaaaaaaaaaaaaagtaagtcacatactgtttttcctgatcttcacactagaattggtacatagttacttggtttagattctcaagatagtactcttcattatctaacagactctagataacctgaaggaagggaaacaccatctacgcgtacggcctgcagacctacctgttgctgagagagcatctctgaactactggcgtacatggaagtgtattagcaaaccctcagaatttccaattaaaagcccagcctttacaggtgaattgggataggctgtccctccctaaagcccacaccaactttccctctcctcaccctaacagaagtggcttccatccagagagcagagagtgcctgatttctgaggcagtctctgtcatctcctttgatcttctgccctgccacaggccctctccatggctgcttgcctgctggaaccaacattctcctccacactcactcctctgcattctggcttcatgtgggcaaggcgaggtttcattccactccctcctattcatcagggaatgccaccattcttttgagtttcctccaaccaccacacacagaatgtccctaaataatcactgtctgatgggtg

SEQ ID NO: 8424 - DNA, 643 bp, Homo sapiens
accccgggaaccgttattggccgggtcacaagcccgcccgcccgctgctggagccgcgaccatggtacggagcccgctctggcgggggcgccaaaagcaccaaagcggcgaatgggggccgctgtggccaaggattggggctaagtggaggagtctggcatggctcatgaatcagcagaggacttgtttcatttcaacgtagggggctggcatttctcagttcccagaagcaaactctctcagtttccagactccctgctgtggaaagaggcttcagccttgacctcttcagaaagccagaggctatttatcgacagagatggttccacatttaggcacgtgcactattacctctacacctccaaactctccttctccagttgtgcagaactgaacttgctgtatgagcaagcattgggtttgcagctgatgcctttgctgcaggtaagatgctcttgttttctgggagtggtggatcagtaacatggctttacatcactaaatattgtttcctgttatatattggttgctgagatgaccctcttaatgggcaaatgtaataagtgtgttaaagtaataaataatttcctcattagtataggggtgagtaaaaaggaaaaaaaagtaataaacaatacactga

SEQ ID NO: 8425 - DNA, 946 bp, Homo sapiens
accccgggaaccgttattggccgggtcacaagcccgcccgcccgctgctggagccgcgaccatggtacggagcccgctctggcgggggcgccaaaagcaccaaagcggcgaatgggggccgctgtggccaaggattggggctaagtggaggagtctggcatggctcatgaatcagcagaggacttgtttcatttcaacgtagggggctggcatttctcagttcccagaagcaaactctctcagtttccagactccctgctgtggaaagaggcttcagccttgacctcttcagaaagccagaggctatttatcgacagagatggttccacatttaggcacgtgcactattacctctacacctccaaactctccttctccagttgtgcagaactgaacttgctgtatgagcaagcattgggtttgcagctgatgcctttgctgcagactctagataacctgaaggaagggaaacaccatctacgcgtacggcctgcagacctacctgttgctgagagagcatctctgaactactggcgtacatggaagtgtattagcaaaccctcagaatttccaattaaaagcccagcctttacaggcctacatgataaggcacctctggggctcatggacacacccctgttagacacagaagaggaggtgcactactgcttcctgcccctagacctggtggccaaatatcccagcctagtgactgaagacaacctgctgtggctggctgagacggtggccctcatcgagtgcgagtgcagcgagttccgcttcattgtgaattttcttcgctcacagaagattttactaccggataatttctccaacattgatgttttagaagcagaagtggaaattctggaaatccctgcactcactgaagccgtaaggtggtaccggatgaacatgggtatgtcgccaggaaaccttggctccc

SEQ ID NO: 8426 - DNA, 321 bp, Homo sapiens
caaaggcttgtatcccacatggaagtggtcacgaagggaagaaagaatggactgagcttgtgaggcaggaagaatgaattttccatgatttaagaaccacttgagccggctgggcgcggtggctcacacttgtaatcccagcactttgggaggctgaggcgggcaaattacgaggtcaggagacccagaccatcctggctaacacagtgaaaccccgtctctactaaaaatacaaaaaaactagccgggcatggtggcaggcgcctgtagtcccagctgctggggaggctgaggcaggagaatggcatgaacccaggaggc

SEQ ID NO: 8427 - DNA, 324 bp, Homo sapiens
cagtgaatacctttggaagtgagggcaaatgaggtggcactaaaataaagatgcattggtggaaagtctgtttactgagcagttataccctccagcttcctctattcccagcaataagagtactgtccctcccgacactgacaaaagactggagctgaatagttgtgaaaagatagaacacaatctctggactagtggacacatgtcaaaattgaagatggggatgccacagataaaataggaaattaattacatggacacctgccagatgctgatactatagctctcctccttctcagctcccaggaggctgtcaggccactt

SEQ ID NO: 8428 - DNA, 417 bp, Homo sapiens
ccttgttctcgagcctgatttctccatgctgtgggcatgttgattcccaccttctgtgttcccagcctcgttttctatttgctacttaccccagtgccagtcctgtaactttgcctaaaatgctggttaattcccctaacatggctcagcctcagcttggcagccagagtcaggcagccgatgaccttcagagggatggcagtgcctccaccaccaaaggggcttttagacctgattgagggtgtcactaaacctctaggactagatgatatagcctagaatttttaaaagaaagccaatgcaaaatcattattcctgaccccacgtatgtggcactgttggttgcacagcagatggctggccagcagctccactcgtaagaactccagggcatgttggaggcagatgctgggagac

SEQ ID NO: 8429 - DNA, 508 bp, Homo sapiens
agatgtggggtgaagtctgagggaagccaggcttccagggatcctctcccagtggaattaagggcatgttttattccccagcagtgggctgtgacaacatatatgaaatgtcgtctcccagggaagcttgttaggcgcacttggcacctagggtttttattgagagcagtcacgtaggtttcttctgcttggcacataacaaaatccaaacttccaaaaggaaagcaggcattcagagtaaactgtgttgtttgtatatccagtctaggcacagtaaactactcttctcagttgtgggaatgatgggacccctcaaaatccaagttctagaaattagtcaagggtcaaccttgtaagtagacttttgaaaggatagcagtcatttctgcataatgaaacactgtatcttatatattaagaaagatattaataaaactaatgctactgtagtatttatatgttgtatttatgagtaatattttcataataaaattattgaaaaagaatg

SEQ ID NO: 8430 - DNA, 387 bp, Homo sapiens
gaaactaaactgtttctcactttttcttccctcaattctacatatatttattttgcaatttttgttctttgttttcatgcattaaaagagtagttctcatttggaatggtactgatctcaaagggaatgtttaggaataaagcgtggggcaattttggttgtcactatgggggaagagaactatctactagcatgtagtcagcaaggaccagagtttctaaacctcctgcagtacacaggtcagtgtgcacagtggactagttgtcccacctaaaatgccagttatgcctctgttgtgcaacattccaacaaaatgtctccttataaagaaattgatatttaaagagttgaagtttgaaaaacaattaaaatatgcctgctttgcta

SEQ ID NO: 8431 - DNA, 468 bp, Homo sapiens
tcataaatcataactatcttgaaagggaaaaaagatatttataataatataaatgacataaatgactcagcacaagacctggtatatacaacataccttgaaatcgtacattttctccaccccattctctaacacaattctcattttgagaagaggttcaagaatatttatggtttaaaaatctggaataagcatagattatacacaacaatattttatgtattttatttttccccctttgttcttatttatttatttatttatttatttacttttatagagatggggtctcactatgttgaccaggctggtctcaaactcctgacctcaagagatcctcccatcccgttctcccaaagtactgggattacaggcgtaagccatcatagctggcccacaccaatattttaaataacgcaaagaaaataggctgaaaaaaaagacaacacatatttgataaagggtgag

SEQ ID NO: 8432 - DNA, 490 bp, Homo sapiens
ttacaagcaatgacaccccagaggtcttcatttctaataccattttccaattaaaggagcagggggtccttggagaaatgtctgatttctagaaatggggcaagaaatatgagccttatactgctggcaattaaggaagtgctcaaaaacccaaaacagaacaaagaagccacacaacacatagatgggggtgcatcaaatgggcataggagccaaataaaagagttgtaaatggcccaaactggaacacactgagcagaaaaataaaagtctgtcatgacttaaattataaaataaatatgcatgagtccatactgatgtaaataaatgatcagataaattagtaaatggagaagagacaaatctcccttacagaagaattccaaatgatagaggtagatacgtactttaccctcaagaggtgaagtataactctctatttctaaaatgtgggttgggtagagtgatttccatctgaagattgcaatat

SEQ ID NO: 8433 - DNA, 448 bp, Homo sapiens
aagcccaggtggtttgaagagtgagatgtctgggtcagagggaagtggaagtggacttttaggttaagcgagaagtctccagggcagagctgatttaactctgaaaatagctggaggaggactctagtgggtgcgtttacccctgctgtggccggggttggatacttattattcccctttcaactttctgtatcttattctttctaggcctgattgttactctctttcagaaacaagagggcgggggtggtagctcacacctgtaattgcaacacttagggtggcagaggctagaggatggcttgaacccagcctgggcaacatagcaggaccacctccacaaaaagaaaaaaaaaagaaacaaggacactctggggactgactcacgttaattaaaatcacgagactggtattaaaaactcaggaagtcattattaacttacagcaa

SEQ ID NO: 8434 - DNA, 442 bp, Homo sapiens
tgcctcagcctcccgagtagctggattacaggcgcttgccaccacgctctgctaatttttgtatttttagtaaagatgggttttgccatgttggccaggctggtcttgaacttctggtctcaagtgatccgccctcctcagcctcccaaagtgctgggattacaggtgtgagccactgcgtcaggccaatacacatcttctagtttatttaaagtgctagatagtatttcattgtataaaaagaccacagtttattcattcttttgttgatagatctttaaattgtttccattatttttcccttacaaacaatgcatgataaatgtttttgtatgtgtctccttgtgagagttatatatctaggtgtgacatcactgggttctatcacaagtctttggaagtaatttttatgtggatagtgcaacaatatgactagttactt

SEQ ID NO: 8435 - DNA, 206 bp, Homo sapiens
gccaccacacccagttaatttttgtatttttagtagagacggggttttgccatgttggccaggctggtctcgatctcctgacctctggtgatccgcctgccttggcctcccaaagtgctgggattacaggcatgagccactgtgcccgaccaggataacaattcttagacatctatgtgactaacagcaccaactatatatgaggc

SEQ ID NO: 8436 - DNA, 4161 bp, Homo sapiens
ggatcgcgggcggcggcggcatcgcgggcggcggcggcgatgagcgacatagtggagaagacgctgacggcgctgccgggactctttctgcagaaccagcccggtggtgggcccgcggccgccaaggcgtccttctcctcgaggctgggcagccttgtccgcggcatcacagccctcacctccaagcacgaagaagaaaaattaatccagcaggaactgagtagtctgaaagcgactgtttctgctcctactacaacactgaaaatgatgaaggaatgtatggtgagacttatatattgtgaaatgcttggatatgatgcttcctttggctatattcatgcaatcaagttagcccaacaaggaaacctcttagaaaaaagagtaggttatttggctgtttccttatttctacatgaaagtcatgaattattgcttctccttgtgaatacagttgtaaaggatctgcagagcactaacctagtagaagtgtgtatggcactgactgttgttagccagattttcccccgcgaaatgattccagctgttcttccattaatagaagataaacttcaacattctaaggagattgtacgaagaaaagctgttctggcattatacaaattccatctcattgctcctaatcaagtacaacatattcatattaagtttcggaaagcactttgtgacagagatgttggggtcatggctgcctccttgcatatatatcttagaatgattaaggagaattcatctggatataaagacttgactgggagttttgtaaccattttgaagcaagtagttggaggaaagctcccagtagaattcaattaccacagtgtgccagcaccatggttacaaattcagctcttgagaatactgggacttctaggaaaagatgatcaaaggacaagtgaattaatgtatgatgttcttgatgaatccttacgaagagctgagttaaatcacaatgtcacatatgctattttgtttgaatgtgtgcatacagtctattctatttatcctaaatcggaattacttgagaaggctgccaagtgcattggaaaatttgttctgtcacctaaaataaatctaaaatatttaggactgaaggctcttacctatgttatccaacaggatcctactctggctcttcaacaccagatgacaataattgaatgtttagatcatcctgatcccattattaaaagagagactctggaacttctttacagaattactaatgcacagaatataacagttattgtccagaaaatgcttgaatatttacatcagagcaaagaagagtatgtcatcgtcaatttggtcggcaaaatagcagagctggctgagaaatatgctcctgataatgcatggtttattcagacaatgaatgctgtgttttcagtaggaggagatgtaatgcatcctgatattcccaataactttctgagactactagcggaaggttttgatgatgaaacagaagatcagcaattaagactctatgcagttcagtcttatctcactttactggatatggaaaatgtgttctatccacagagatttcttcaagttatgagttgggtattaggggaatattcctacctcttagataaggaaacgccagaggaagttatagctaagctctacaagttacttatgaatgactctgtgtcttcagaaacaaaagcctggttaattgctgctgtgaccaaattgacatctcaggcgcactcttctaatacagttgagagattaatccatgaatttaccatatctttggatacttgtatgagacaacatgcatttgaattaaaacatttgcatgagaatgtggaacttatgaagagcttgcttccagttgacaggagttgtgaagacttggtggtagatgcttctttatcttttctggatggttttgtggctgaaggactcagtcagggtgcagcgccttacaaacctccccatcaacgccaggaggaaaagctttctcaggaaaaagttctcaattttgaaccatatggactctccttttcttcatctggcttcactggacgacagtctcctgctggcatttctcttggttcagatgtatctgggaatagtgctgagacaggactgaaagagacaaatagcttgaagctggaaggtataaagaaattgtgggggaaagaaggctatcttcccaagaaggaaagcaaaactggtgatgaaagtggagctctgcctgttcctcaagagagtataatggagaatgtagatcaagctataactaaaaaggatcaatctcaagttcttacccaatctaaagaggagaaagaaaagcagctgctggcatcatcattatttgttggtctaggatcagaaagtacaatcaacctgctgggaaaagcagatactgtctctcacaagttcagaaggaaatcaaaagtcaaagaagctaaaagtggcgaaacaaccagtactcataatatgacctgttcttcctttagttctttgtcaaatgtggcatatgaagatgattattattcgaatactttgcacgatacaggagacaaggaattaaagaaattttctctcacttcagaacttttggattctgagtcactcacagaactgcccttggttgagaaattctcatattgtagtctgtctacaccttcattgtttgctaataacaacatggaaatttttcaccctcctcaatctactgcagcctcagttgccaaggaaagctctttagcttcatcttttttggaagaaactactgaatacatacactcaaatgctatggaagtctgtaataatgaaactatatcagtgtcttcttataaaatttggaaagatgattgtttattgatggtctggtcagtcactaataagagtggtttggaattgaaaagtgctgacttagaaatttttcctgcagaaaatttcaaggtgactgagcaacctggatgctgtttgcctgtaatggaagcagaaagcaccaaaagctttcaatatagtgtgcagatagaaaaaccttttacagaaggaaatcttactggttttattagttatcatatgatggatactcattctgctcagctggaattttctgtaaacttatcactattagatttcattagaccattaaaaatctcaagtgacgactttgggaaactctggttatccttcgcaaatgatgtgaaacaaaatgtaaaaatgtcagaatctcaagctgcacttccttctgcactaaagactctgcaacagaaactaagactccatattattgagattataggcaatgaagggctattggcctgtcagctgctcccatccatcccctgcttactgcattgccgagttcatgcagatgtattagccctgtggttcagatcctcctgttctactcttcctgactatttactgtatcagtgtcaaaaggtgatggagggatcctagcagaagccctgctaaattttactccatcaagatcaatggtttacatagataaacttatttaccaaagtaaaaagaactcatggtacttctaatgaaaatggggattattacaagtgtggtttatatgttttctttatgattcctggtcaagaaagatccccaaaactgtatccctaacctttaactcaggattgtacagtatgtttaggtccctcaaaaagtgacctaagctaatgttataaactgctaatgatttatatatcacttagtgtgtagagggactgaaaatatttattttgttataaataattttatagcacgtttactctagtgctagctaatttgtaataaagccaagtctcagttttctgcattaaatggaagggagacatgaaattgataatctcaaacttaattcatatttggctttggaatgtagtgtatggtttttggtagggaagtcaatattttcgattatgttttgcttagatcagtgttgaactaagttggcatagcacacactaacagttgtaggagatccatgagcatgctggatattgaggggatccaatctgtgatctattttttattatagataactgttacacataatttcagatcgtttggctgtaaaatttgtctgttttccacttggagttattttaaaattcaaagtaaatcactctattcttattttgaaaactcaga

SEQ ID NO: 8437 - DNA, 1321 bp, Homo sapiens
ggatcgcgggcggcggcggcatcgcgggcggcggcggcgatgagcgacatagtggagaagacgctgacggcgctgccgggactctttctgcagaaccagcccggtggtgggcccgcggccgccaaggcgtccttctcctcgaggctgggcagccttgtccgcggcatcacagccctcacctccaagcacgaagaagaaaaattaatccagcaggaactgagtagtctgaaagcgactgtttctgctcctactacaacactgaaaatgatgaaggaatgtatggtgagacttatatattgtgaaatgcttggatatgatgcttcctttggctatattcatgcaatcaagttagcccaacaaggaaacctcttagaaaaaagagtaggttatttggctgtttccttatttctacatgaaagtcatgaattattgcttctccttgtgaatacagttgtaaaggatctgcagagcactaacctagtagaagtgtgtatggcactgactgttgttagccagattttcccccgcgaaatgattccagctgttcttccattaatagaagataaacttcaacattctaaggagattgtacgaagaaaagctgttctggcattatacaaattccatctcattgctcctaatcaagtacaacatattcatattaagtttcggaaagcactttgtgacagagatgttggggtcatggctgcctccttgcatatatatcttagaatgattaaggtaagttggaaattttagcaagtactgagtagttaccattagaaaaatacaattatggaattaaaaagaaacagatattttggtaaaatgctagttaacattttataattttattattgacctttgaattagtagttttgcaagtgttgagagcatgagttgtaggcacattacagaattagtttttttttttttaatgcctaaaattttttgatgttactaaacaggtgtggaaaaatggtatcagtggaaggtgtcttaagtttgcagatttgtgttttttcaagcagtaattctcttttatataacttcatgggatgcataacattttatagaaatgaggaaaaccagcgggggttgtgcaagctatagattgtagtattgactccatgtattaattctgtatcatatgaggaaagagggttgaatgttatggtaaaacacttttctaaatggcgatggtggatttatactaattcatccttagtgtattgcctgaaaccatttgtgttcaaatatacatatttgtaacagatttcatggcacctactataacaaaataaaatatgctattgaactc

SEQ ID NO: 8438 - DNA, 872 bp, Homo sapiens
ggatcgcgggcggcggcggcatcgcgggcggcggcggcgatgagcgacatagtggagaagacgctgacggcgctgccgggactctttctgcagaaccagcccggtggtgggcccgcggccgccaaggcgtccttctcctcgaggctgggcagccttgtccgcggcatcacagccctcacctccaagcacgaagaagaaaaattaatccagcaggaactgagtagtctgaaagcgactgtttctgctcctactacaacactgaaaatgatgaaggaatgtatggtgagacttatatattgtgaaatgcttggatatgatgcttcctttggctatattcatgcaatcaagttagcccaacaaggaaacctcttagaaaaaagagtaggtatgtatgtgttttaagactttgatgctttcatgttgtccttgaagttccatctattatacaaaatgaatgatggcatgtatatagtatgtttttagaatactgtattataatttctaaaactttaaaagatcacacttcagaaagtcaaagccatttataggaaatcagttttcctgatgcatagcattttggagttaaagagaagactaaaaatttcttgctcttgtgatggcggttagatgactatatatgtcagaactcattgaaccatacacttaaatattttttgtatataaattatatgtctataaagctgacttttttgtatataaattatatgtctataaagagctcttttttttgttgttgttgagacagagtctctctgtgttgcccaggcagaggttgcagtgagctgagattgtgccactgcactccagcctgggcagcagagccagagcatgtctcaaaagaaaaaaaaaaa

SEQ ID NO: 8439 - DNA, 422 bp, Homo sapiens
cacaaatataaaaataaaacaatacaaaaacatatatacccccaaaatgttttgttttgaatttttttaactagtttttcttttttcactatgaaagtaaatacatttatggttttttgctttgtttgaaaaaaaaccctcagaatataaaatgaaaaacagcccccaaaacatctctagctcaaccccgaaaaacaatttctagagattcccttctagaaatttcctacatacaccattagcatatctttctacccctaaaagagatctaattatcatttttgctctccatcctttgtttattgattctcagtcttttctcccctcctaagtacccatcactctccctcaactggatctgcaatgccagggaactcagctactcttctgaaggaacttcactgattttaccctttcttttc

SEQ ID NO: 8440 - DNA, 313 bp, Homo sapiens
attacctcgagtgtaaatgaattaaagtttctactaaaaagatatagatcagctggatgcttaaaaacacatgatcctacaagaaactcatcccacttgtaaagaaacacagagactgaaagaaaagcaatggaaaaacagatggcaagcaaattgaaatgaaaagtgagcaggaatacctatacctacatgagttaaaacagattttatatctaaaacagtaaaaagaaacaaagaagatcattatataatgataaagagatcaattcactaagagaatataacagttacaaacacatccacccaacattgg

SEQ ID NO: 8441 - DNA, 253 bp, Homo sapiens
gcatccgaagatgggtgacctaaccaatatccccacccctcttcctacagggtgggtttctccttgttttagcagcctgccttgcccctctgaccctaccatttgtcattccctgtggccatggtctgccttcttttccctgctccaggtttataggttttttagccaatacaaactgtcacatgaagttgtctctaagtagctgtctttatatcatgtggggccaccaccttgattaaacctatagtcgacg

SEQ ID NO: 8442 - DNA, 297 bp, Homo sapiens
ttttttttttgtatttctgtggggtcagtggtaatggccactttgtcatttccggttgtgttttttcatatattctcttttttatcttgattagtctatctagcagtctaccaatcttattcattccttcaaagagctaaattttagttttgttgatcttctgtatggttttttcacatctcaatttcactcattttaaaacccagtttggttatttcttttggtatggtagcattgggattggtttatgcttgtttttcttttttcttttttttttgtttctttgtttcttttttc

SEQ ID NO: 8443 - DNA, 402 bp, Homo sapiens
cagaagctggaggaagaggggatggagggtgactgctaatgggcacggggtttctttgcggggcgataaaaatattctggattgttagtggagatggttgtacaacactgtgaatatagtaaaaaccactgaattatacactttaaaagggcgaactttatagtgtgtaaattatatctttaaaaaagtcatgttttggattcaaacaggctgaaatcaaactctgtctaaaccatttaccagctgtgtggctatgggcaggttatttgaactctaagtatatccttcatttctaaaatagaaacaatagcagtgtgtaccttaagaagttattaggagatttacactactcaggtaatgggtgcactaaagtcttcaccatcatacaattcagccatgtaa

SEQ ID NO: 8444 - DNA, 411 bp, Homo sapiens
aattttagaacattataacatttttccccatataagcaatgtcacgtaaatgtgtaagtcatccctgggttgctacagatgcttatttacctgtggtatttctgaagtgcctaccattattaactaaaacattttgagcaagtagttctataagttcagcgttccagcttagaatgccaagaaatgtaactattccctctccttttggggttagggtggcaaggattccctgggttctaaacctctctgattgttctcttgctattgatagggtttgtgggataaacagtgggaacaggatttgaagaaccaagatgggaattttgggtgtcatatggggattttttaggaaagcttttttcagatgggagtctcactctgtcacccgggctagagtgcagtggcatgatc

SEQ ID NO: 8445 - DNA, 354 bp, Homo sapiens
gtcagtcatattaaatcacttgtcctattcagagaagtaatactgaaattaataagtttaagataataagtatagactgggtgcagtggctcacacctgtaatccccagcactttgggaggccgaggtaggcagaccacttgaggccaggagttcgagaccagcctggacaacatgaaacccaatctctactaaaaatacaaaaattagctgggcatggtggcacatgcctgtaatccaagctactctagaggctgaagcatgagaatcacttaaacctgggaggcaaaagttgcagtgagccgagatcacaccactgaactccagcctgggtgacagggtgagaccctatctc

SEQ ID NO: 8446 - DNA, 460 bp, Homo sapiens
tgagactgagtctcgctctgtcaccaatgctggaatgcagtggtgcaaactcagctcactgcagcctccgcctcccgggttcaagcgagttcctgcctcagctacctaagtagctaggactacaggtgctggccatcacgctcggctaacttttgtattttttagtagagacagggttttgccatgttggccaggctggtcttgaatttctgacctcaggtgatctgcctgccttggcctcccaaagggctgggattacaggcgtgaaccaccatgcccggcaagcttcaattattaattgaataactttgtcattgtcctgtcctgttctacacgaagggagggcctcactgcacactggaaacagtgcccactgtgcaagggcaggcaggtgtgcacgcacacacacatacgtgtctacaaagccacacatgcacgcctttaacgggagatcctgctg

SEQ ID NO: 8447 - DNA, 846 bp, Homo sapiens
gcacctggccgaaagccaaaacattttaaacaaaatgtgctctatacttcaatcttgacaaatccataacatcattaaaaacatttgttttgttttgttttgttttgagacaggagtttcactcgttgcccaggctggagtgcaacggcgcgatctcagctcactgcaacctccgcctccccagttcaagcgattctcctgcctcagcctcctgagtcactggaattacgggcgcctgacaccacgcccagctaattttttgtatttttagtagacatggggtttcactatgttggccaggctggtctcgaactcctgacctcatgatcctcctgcctcagcctcccaaagcactgggattacaggtgtgagccactgtgcctggtccattaaaaacatttgtaaagctatggtgttgataaagtattatgaaagactgcaaaaaaagatggctaatttttagttattattgcacatgtttagaggagctaatgacattttctatgattaataaaagacattatttatgtttttatttatgtattccacaacatttattttattttctccatttcaggaaaaccactatgttgttacaataaagattttcatgtaatttgtgttcaattgatagtaataatgtaacaagttaaaaatgaaggtaattgtgtttaaaatttgagcatattttcatcaaaatgtaagttaaagtgattgtaaattttaagatcataattactttgtatatcttcaagaaaattattgttttaaaatatttatgcctattaaaattagaaggcaaaataaaaatatatgaataccaacattttaaataaaaatcattta

SEQ ID NO: 8448 - DNA, 712 bp, Homo sapiens
gcacctggccgaaagccaaaacattttaaacaaaatgtgctctatacttcaatcttgacaaatccataacatcattaaaaacatttgttttgttttgttttgttttgagacaggagtttcactcgttgcccaggctggagtgcaacggcgcgatctcagctcactgcaacctccgcctccccagttcaagcgattctcctgcctcagcctcccaaagcactgggattacaggtgtgagccactgtgcctggtccattaaaaacatttgtaaagctatggtgttgataaagtattatgaaagactgcaaaaaaagatggctaatttttagttattattgcacatgtttagaggagctaatgacattttctatgattaataaaagacattatttatgtttttatttatgtattccacaacatttattttattttctccatttcaggaaaaccactatgttgttacaataaagattttcatgtaatttgtgttcaattgatagtaataatgtaacaagttaaaaatgaaggtaattgtgtttaaaatttgagcatattttcatcaaaatgtaagttaaagtgattgtaaattttaagatcataattactttgtatatcttcaagaaaattattgttttaaaatatttatgcctattaaaattagaaggcaaaataaaaatatatgaataccaacattttaaataaaaatcattta

SEQ ID NO: 8449 - DNA, 427 bp, Homo sapiens
gatattagccataaactgaatgtcagccagctcataacacacattgttcctgaatagttgaactcttactgcctcactctgcctctgtggcagctttgagatcttcagtgctcatttccctcatctggtctatttcagcaatagaattggttctgatcccttctcccttaatccttatttaaatactccactcttcaagacacttgtaagttcaaaaattttcccacctatttccattctctggatacctgaagagttacttcaccccagaggttttaagtgtgatacactctttcatggctctgtgccgactgtggaccctctcctgctgatgttgtttgttttttttgtttgtttgtttgttttttgttttttgtttgagatggagtctcactctgtcatgaggctggagtgcagtggcatgatc

SEQ ID NO: 8450 - DNA, 305 bp, Homo sapiens
aaaaaaaaaaaaagttagggggtaaagggtttcaagatgaggatgttgaagaaattcaagagcaaatagatactacaccagagtaattaaattaataggagatgacttgatggaaatgggtgtttccatgttgttcaaggggcagctatgataacaatatcaaacaaactataggttgagtaccctttatccaaaatgctttggaccagaaatttttcagattctggaatatttgcattatacttaccgtttgagcataccaaatccaaaattctgaaatgcaaaatgctctagtgagcatttcc

SEQ ID NO: 8451 - DNA, 485 bp, Homo sapiens
taatctagggtctccaaaaggctgtagacttttccccccaagatccctgcatttttttgtgacaggctgggccttagatgttccaggctcttcaccggactgtcttcttgggaggtcaggccaacaggggtctttaactaagatgaaggatgggttgatggaactggtcactcacaggtcaggtctgaagcccaattcacactcaactaatcacaagtggctgacgttgaggagcagagaggggtgcagctggcacttcctgatctgaggatggctcttagaaccagggaactatccagtctcttaggatgattcagtggacctgagagctttgataatacgtttcaatttggcctatcactgacatttgggtgattctgcaagttctgagccagaagaaaaataaagaatggttgtcaaagttggaatttaaaatggtgggccatttcaacttggcatacttgtccataatgcatatagtaaaa

SEQ ID NO: 8452 - DNA, 404 bp, Homo sapiens
gcatcttgtcttttctcacttcataaagatttccatttaggacctccccgtggcagagcagctgtatctcttcaccctcagtgaccctaccctgcaggaagattccttccctgcaagtggctttatgcctcatgggcttctctgactacatctgggaaatctgtggaggtccttgacctgcaaaagggcaaagcttccccaaaaaacctttttgccctccttgagtgcagaccttctttgctgatggctgggcccgatgggcagtccaagattttcatctggatgatgggagaaataaacagaatgttttcagttgtcttgctccagagaagagatacagttcttgtaatatgggaggattttcatacctacattgaatattaaaatattacataagccatatg

SEQ ID NO: 8453 - DNA, 414 bp, Homo sapiens
atcccttgcctgcctcggagggctgttgcagtcaccaagtgactggacctgaaggtaagctgcccaaggggctcaattgtgagtgttccctcctcccacccaaggtcagccttgtcaataataaacacagtgactctctgagcacctgccaagggccaggcccgccacatacggtgttattctcacaatctacaagaaaagtactattagcgccatattcccaaggaagaaagtgagtgcccagagaaaaaactaaaatttcttggaggtgaaaaatagagaccaggctcagtggctcacacctgtactctgaaagcactttggaaggctgaggcggaaggatcattgagcctgggaggtcgaggttgcagtaagccaaaattgccgcactgcattccagcctgggtggcagag

SEQ ID NO: 8454 - DNA, 1937 bp, Homo sapiens
ggcacgaggggaagttgccggcggccgcgcggcctcccgggcgggcctacagccatgtcccgggacccggggtcgggcggctgggaggaggccccgcgcgcagctgccgcgctctgcaccctgtaccacgaggccggacagcggctgcgccgcctgcaggaccagctcgctgcccgcgacgccctcatcgctcgcctccgcgcccgcctggccgcgctggagggggacgccgcgccgtccctagtggacgcgctgctggagcaggttgcgcgcttccgggagcagctgcgaaggcaggagggcggcgccgccgaggcccagatgcgccaggaaattgagaggctgactgagcgactagaagaaaaagagagggagatgcagcagctgctgagccagccccaacacgagcgagagaaggaagtcgtcctgctacggaggagcatggcagaaggggagcgcgcccgggccgccagtgacgtcctgtgccgctccttggccaacgagacccatcagctgcggaggacgctgaccgccaccgcccacatgtgtcagcatctggccaagtgtctggatgaacgacagcatgcacaaaggaatgtgggggagagaagtcctgaccagtcggaacacacagatgggcacacctctgtccagagtgttattgagaagttgcaggaagaaaatcgactgttaaaacagaaggtgactcacgttgaagacctcaatgccaagtggcagcgctacaacgccagcagggacgaatacgtgagggggctccatgcgcagctcagggggctgcagatcccccacgagcccgagctgatgaggaaggagatctcccggctcaacagacagttggaagagaaaataaatgactgtgccgaagtgaagcaggagctggcggcctccaggacggcccgggatgctgcgttggagcgggtgcagatgctggaacagcagattctcgcttacaaggatgacttcatgtcagaaagggccgatcgggaacgggctcaaagtaggattcaagaactggaggaaaaggtcgcctctttgctgcaccaggtgtcctggagacaggattctcgagagccagacgccggccggattcacgctgggagcaaaactgccaagtatttggccgccgacgcattagagcttatggtgcctggtggctggaggcctgggactgggtcccagcagccagaaccccctgcagagggcgggcatcctggcgcggcccagagaggccagggggaccttcagtgccctcactgcctgcagtgcttcagtgacgagcaaggggaagagctcctcaggcatgtggccgagtgctgccagtgaccgagactcacccgtgcccttgcggcctcctggcccggtgcagctgccctcagggacagggtgggtgctctcagatgccatgggttgagctctactgagagccaaggcccctagaatagttgcggggcactctgatcgttcactttggtccctttggctatggaacaggctgggtcacagggaactgccagtgaggctggaggctggaggtggagatggggtcaggaacatctggcagagggaggtcccagtctgtgtctccatcaggcttaagccagagctatctggtgctggtgtgccagcccctcccccagcctgcctagaaaggggtggctgcctgagggagtcacttgtatggtccccagggtgggagccccatcctgttctatggaataaagcgtcgcctctctgcctcgaaccagtcaaatggagtattgcggctgcacgtcacactagggtggccacccccgccattgcgagccacatgtctgcactgagaaactgcatttcagtagcatttgtcatccagccggaagttaaagcacacttactttattcacctatttttataataaacgttcttgctgctgtga

SEQ ID NO: 8455 - DNA, 2504 bp, Homo sapiens
atggcggcctgtcttagcagaggtggctgtcctcagggcccgtccgtcactgtcatgcagtcagagagcatatctcgggcctcaaagtgtgagctccctacgtgtcctgacctgtctgtgagacgggaaccccgcttaccttgtcatgtagatgtgatggccctgggtgtccagtaacatccccagctcagcctggcacgtggagctgggccttgcagggcaggggcccctcaccccacccctgggctcagtgcttttcctaccatggggtgccttgagggaggcctggcatgaatgggaaccgatgaagttcctcagtgtgtgacccatggcctcttccttctcctcactgacttgtgctctgcaaaaatccaggagaagtttatgtagctcctcatcaagtacctaacacacttttggccctgggaatagcctgggccccactcaaagagcttcctctcctggcacagactgaacagtagtgatgcctcttgagaatcgatgcgtcccgggctggagctaggacgtcagccgtgtttcagggtgtgaacagggaccctggggctgtgaggccaccccccactgccctgttccgagcagccactgggcctcagtggtttctgcttctcctccgcatgaagggcacgggagagtcatggtggactatgggactaaccctgggactaagtctgcagcagagggctggacaggtttttctggccttcatgaattcaaggaagcatgtgatttggattgaaggagcactattggtacaatcgtgaggatggtctcaggccgcctcttgaagattttggaccagatgaactggttccagacttgcaggcccagattcttacccccgggggtaaagttcctggtggggcctgcagaccttgtactaagtggcctctggttccctttcaacagtagcctgtggcccctcgagggttgctcagtccctagatggcacagccagggacagtggtgctgaaggcatgggtgataagctgtagtcccactggggaaagtccacattcagacaggaagtggaagcaccaaggcctgctggaatgaagttcccaggcaagcagtgagggccacaggctgcagtgcttcaggacggatgtttggagaacatgtgccagatcatgccaggtggttggtggggccaagccagggacacctcttgctgctactgaaggaccccctgagccccagagtgctcagcacccccaggccccacagaggaggtgcagagtagggttggtactcagtttgcccagctccccaccagaggctctgccacctccactctgtggtggcctgtgggccacgtcatcagggccaccttctcagtcaggtctcctggggccgataggtccaactgaacaggacttccaccaaggggctggggggtggaccacgccagggcctacttcttcatgagcacatgacggagcgtgtgtgtgatcctcagtcattcactgagcgcccccttgtctgggctctggggcgcagcaggaagcaaagtgaggggctgaagttccgctcagggataggtgaagtgcctctggttgctggaacctgagacctggctttgtgaccgtcagcacagcccacgtatatacacccttgccttttctccaggattctcgagagccagacgccggccggattcacgctgggagcaaaactgccaagtatttggccgccgacgcattagagcttatggtgcctggtggctggaggcctgggactgggtcccagcagccagaaccccctgcagagggcgggcatcctggcgcggcccagagaggccagggggaccttcagtgccctcactgcctgcagtgcttcagtgacgagcaaggggaagagctcctcaggcatgtggccgagtgctgccagtgaccgagactcacccgtgcccttgcggcctcctggcccggtgcagctgccctcagggacagggtgggtgctctcagatgccatgggttgagctctactgagagccaaggcccctagaatagttgcggggcactctgatcgttcactttggtccctttggctatggaacaggctgggtcacagggaactgccagtgaggctggaggctggaggtggagatggggtcaggaacatctggcagagggaggtcccagtctgtgtctccatcaggcttaagccagagctatctggtgctggtgtgccagcccctcccccagcctgcctagaaaggggtggctgcctgagggagtcacttgtatggtccccagggtgggagccccatcctgttctatggaataaagcgtcgcctctctgcctcgaaccagtcaaatggagtattgcggctgcacgtcacactagggtggccacccccgccattgcgagccacatgtctgcactgagaaactgcatttcagtagcatttgtcatccagccggaagttaaagcacacttactttattcacctatttttataataaacgttcttgctgctgtga

SEQ ID NO: 8456 - DNA, 265 bp, Homo sapiens
atgtcctgtccatctccatccccctaaaattaatccacaagtcagtaaaggagatgcaagagttagcagcaggaggtccattttctaagacagcaaagctgcaccgagtccacctccgttcatgctgcttgcgtacgggtgtcatcgtgctgcctcaggattctctagcgggcctagtgtctgctctctacagaacagggaggggcagcttccatttaagaggaaactctcactcagcgaatcactgctaatacataattcacac

SEQ ID NO: 8457 - DNA, 2149 bp, Homo sapiens
ggcacgaggggaagttgccggcggccgcgcggcctcccgggcgggcctacagccatgtcccgggacccggggtcgggcggctgggaggaggccccgcgcgcagctgccgcgctctgcaccctgtaccacgaggccggacagcggctgcgccgcctgcaggaccagctcgctgcccgcgacgccctcatcgctcgcctccgcgcccgcctggccgcgctggagggggacgccgcgccgtccctagtggacgcgctgctggagcaggttgcgcgcttccgggagcagctgcgaaggcaggagggcggcgccgccgaggcccagatgcgccaggaaattgagaggctgactgagcgactagaagaaaaagagagggagatgcagcagctgctgagccagccccaacacgagcgagagaaggaagtcgtcctgctacggaggagcatggcagaaggggagcgcgcccgggccgccagtgacgtcctgtgccgctccttggccaacgagacccatcagctgcggaggacgctgaccgccaccgcccacatgtgtcagcatctggccaagtgtctggatgaacgacagcatgcacaaaggaatgtgggggagagaagtcctgaccagtcggaacacacagatgggcacacctctgtccagagtgttattgagaagttgcaggaagaaaatcgactgttaaaacagaaggtgactcacgttgaagacctcaatgccaagtggcagcgctacaacgccagcagggacgaatacgtgagggggctccatgcgcagctcagggggctgcagatcccccacgagcccgagctgatgaggaaggagatctcccggctcaacagacagttggaagagaaaataaatgactgtgccgaagtgaagcaggagctggcggcctccaggacggcccgggatgctgcgttggagcgggtgcagatgctggaacagcagattctcgcttacaaggatgacttcatgtcagaaagggccgatcgggaacgggctcaaagtaggattcaagaactggaggaaaaggtcgcctctttgctgcaccaggtgtcctggagacaggattctcgagagccagacgccggccggattcacgctgggagcaaaactgccaagtatttggccgccgacgcattagagcttatggtgcctggtggctggaggcctgggactgggtcccagcagccagaaccccctgcagagggcgggcatcctggcgcggcccagagaggccagggggaccttcagtgccctcactgcctgcagtgcttcagtgacgagcaaggggaagagctcctcaggcatgtggccgagtgctgccagtgaccgagactcacccgtgcccttgcggcctcctggcccggtgcagctgccctcagggacagggtgggtgctctcagatgccatgggttgagctctactgagagccaaggcccctagaatagttgcggggcactctgatcgttcactttggtccctttggctatggaacaggctgggtcacagggaactgccagtgaggctggaggctggaggtggagatggggtcaggaacatctggcagagggaggtcccagtctgtgtctccatcaggcttaagccagagctatctggtgctggtgtgccagcccctcccccagcctgcctagaaaggggtggctgcctgagggagtcacttgtatggtccccagggtgggagccccatcctgttctatggaataaagcgtcgcctctctgcctcgaaccagtcaaatggagtattgcggctgcacgtcacactagggtggccacccccgccattgcgagccacatgtctgcactgagaaactgcatttcagtagcatttgtcatccagccggaagttaaagcacacttactttattcacctatttttataataaacgttcttgctgctgtgaaaaaaaaaaaaaaagaaagaatagaacaaaaaagtacaaaaaagagaaggcaaggagagggcggccagatagaagtaacagaccgggggggggacgaagcggtggagggtatccgcgggcggggagcgtgtcacggacgagggaccgcgagactaagtgggggcgtgggggatcggcgaagcgggaagggcgcggcctggtacgacggacgc

SEQ ID NO: 8458 - DNA, 2002 bp, Homo sapiens
ggcacgaggggaagttgccggcggccgcgcggcctcccgggcgggcctacagccatgtcccgggacccggggtcgggcggctgggaggaggccccgcgcgcagctgccgcgctctgcaccctgtaccacgaggccggacagcggctgcgccgcctgcaggaccagctcgctgcccgcgacgccctcatcgctcgcctccgcgcccgcctggccgcgctggagggggacgccgcgccgtccctagtggacgcgctgctggagcaggttgcgcgcttccgggagcagctgcgaaggcaggagggcggcgccgccgaggcccagatgcgccaggtacgagggcgggtaccagaggagctgcgggagcgagagtgcgtgtggcggccgccgggtcctgggaaattgagaggctgactgagcgactagaagaaaaagagagggagatgcagcagctgctgagccagccccaacacgagcgagagaaggaagtcgtcctgctacggaggagcatggcagaaggggagcgcgcccgggccgccagtgacgtcctgtgccgctccttggccaacgagacccatcagctgcggaggacgctgaccgccaccgcccacatgtgtcagcatctggccaagtgtctggatgaacgacagcatgcacaaaggaatgtgggggagagaagtcctgaccagtcggaacacacagatgggcacacctctgtccagagtgttattgagaagttgcaggaagaaaatcgactgttaaaacagaaggtgactcacgttgaagacctcaatgccaagtggcagcgctacaacgccagcagggacgaatacgtgagggggctccatgcgcagctcagggggctgcagatcccccacgagcccgagctgatgaggaaggagatctcccggctcaacagacagttggaagagaaaataaatgactgtgccgaagtgaagcaggagctggcggcctccaggacggcccgggatgctgcgttggagcgggtgcagatgctggaacagcagattctcgcttacaaggatgacttcatgtcagaaagggccgatcgggaacgggctcaaagtaggattcaagaactggaggaaaaggtcgcctctttgctgcaccaggtgtcctggagacaggattctcgagagccagacgccggccggattcacgctgggagcaaaactgccaagtatttggccgccgacgcattagagcttatggtgcctggtggctggaggcctgggactgggtcccagcagccagaaccccctgcagagggcgggcatcctggcgcggcccagagaggccagggggaccttcagtgccctcactgcctgcagtgcttcagtgacgagcaaggggaagagctcctcaggcatgtggccgagtgctgccagtgaccgagactcacccgtgcccttgcggcctcctggcccggtgcagctgccctcagggacagggtgggtgctctcagatgccatgggttgagctctactgagagccaaggcccctagaatagttgcggggcactctgatcgttcactttggtccctttggctatggaacaggctgggtcacagggaactgccagtgaggctggaggctggaggtggagatggggtcaggaacatctggcagagggaggtcccagtctgtgtctccatcaggcttaagccagagctatctggtgctggtgtgccagcccctcccccagcctgcctagaaaggggtggctgcctgagggagtcacttgtatggtccccagggtgggagccccatcctgttctatggaataaagcgtcgcctctctgcctcgaaccagtcaaatggagtattgcggctgcacgtcacactagggtggccacccccgccattgcgagccacatgtctgcactgagaaactgcatttcagtagcatttgtcatccagccggaagttaaagcacacttactttattcacctatttttataataaacgttcttgctgctgtga

SEQ ID NO: 8459 - DNA, 1382 bp, Homo sapiens
ggcacgaggggaagttgccggcggccgcgcggcctcccgggcgggcctacagccatgtcccgggacccggggtcgggcggctgggaggaggccccgcgcgcagctgccgcgctctgcaccctgtaccacgaggccggacagcggctgcgccgcctgcaggaccagctcgctgcccgcgacgccctcatcgctcgcctccgcgcccgcctggccgcgctggagggggacgccgcgccgtccctagtggacgcgctgctggagcaggttgcgcgcttccgggagcagctgcgaaggcaggagggcggcgccgccgaggcccagatgcgccaggaaattgagaggctgactgagcgactagaagaaaaagagagggagatgcagcagctgctgagccagccccaacacgagcgagagaaggaagtcgtcctgctacggaggagcatggcagaaggggagcgcgcccgggccgccagtgacgtcctgtgccgctccttggccaacgagacccatcagctgcggaggacgctgaccgccaccgcccacatgtgtcagcatctggccaagtgtctggatgaacgacagcatgcacaaaggaatgtgggggagagaagtcctgaccagtcggaacacacagatgggcacacctctgtccagagtgttattgagaagttgcaggaagaaaatcgactgttaaaacagaaggtgactcacgttgaagacctcaatgccaagtggcagcgctacaacgccagcagggacgaatacgtgagggggctccatgcgcagctcagggggctgcagatcccccacgagcccgagctgatgaggaaggagatctcccggctcaacagacagttggaagagaaaataaatgactgtgccgaagtgaagcaggagctggcggcctccaggacggcccgggatgctgcgttggagcgggtgcagatgctggaacagcagattctcgcttacaaggatgacttcatgtcagaaagggccgatcgggaacgggctcaaagtaggattcaagaactggaggaaaaggtcgcctctttgctgcaccaggtgtcctggagacaggattctcgagagccagacgccggccggattcacgctgggagcaaaactgccaagtatttggccgccgacgcattagagcttatggtgcctggtggctggaggcctgggactgggtcccagcagccagaaccccctgcagagggcgggcatcctggcgcggcccagagaggccagggggaccttcagtgcccacatgtctgcactgagaaactgcatttcagtagcatttgtcatccagccggaagttaaagcacacttactttattcacctatttttataataaacgttcttgctgctgtga

SEQ ID NO: 8460 - DNA, 1531 bp, Homo sapiens
ggcacgaggggaagttgccggcggccgcgcggcctcccgggcgggcctacagccatgtcccgggacccggggtcgggcggctgggaggaggccccgcgcgcagctgccgcgctctgcaccctgtaccacgaggccggacagcggctgcgccgcctgcaggaccagctcgctgcccgcgacgccctcatcgctcgcctccgcgcccgcctggccgcgctggagggggacgccgcgccgtccctagtggacgcgctgctggagcaggttgcgcgcttccgggagcagctgcgaaggcaggagggcggcgccgccgaggcccagatgcgccaggaaattgagaggctgactgagcgactagaagaaaaagagagggagatgcagcagctgctgagccagccccaacacgacccgagctgatgaggaaggagatctcccggctcaacagacagttggaagagaaaataaatgactgtgccgaagtgaagcaggagctggcggcctccaggacggcccgggatgctgcgttggagcgggtgcagatgctggaacagcagattctcgcttacaaggatgacttcatgtcagaaagggccgatcgggaacgggctcaaagtaggattcaagaactggaggaaaaggtcgcctctttgctgcaccaggtgtcctggagacaggattctcgagagccagacgccggccggattcacgctgggagcaaaactgccaagtatttggccgccgacgcattagagcttatggtgcctggtggctggaggcctgggactgggtcccagcagccagaaccccctgcagagggcgggcatcctggcgcggcccagagaggccagggggaccttcagtgccctcactgcctgcagtgcttcagtgacgagcaaggggaagagctcctcaggcatgtggccgagtgctgccagtgaccgagactcacccgtgcccttgcggcctcctggcccggtgcagctgccctcagggacagggtgggtgctctcagatgccatgggttgagctctactgagagccaaggcccctagaatagttgcggggcactctgatcgttcactttggtccctttggctatggaacaggctgggtcacagggaactgccagtgaggctggaggctggaggtggagatggggtcaggaacatctggcagagggaggtcccagtctgtgtctccatcaggcttaagccagagctatctggtgctggtgtgccagcccctcccccagcctgcctagaaaggggtggctgcctgagggagtcacttgtatggtccccagggtgggagccccatcctgttctatggaataaagcgtcgcctctctgcctcgaaccagtcaaatggagtattgcggctgcacgtcacactagggtggccacccccgccattgcgagccacatgtctgcactgagaaactgcatttcagtagcatttgtcatccagccggaagttaaagcacacttactttattcacctatttttataataaacgttcttgctgctgtga

SEQ ID NO: 8461 - DNA, 1569 bp, Homo sapiens
ggataaggacagtgtgaaaggtggtgtggcctgaagacctcccatccgggctctggcctgggccaggtggggtgggcctgggcagggagaaggtggtcccttgtccctgctttgcttctctaccaaatgaatgatcactacccgctgcactgggggacgcagtgataatctgtggcctcagcctctgggtctagctttctcccctcttgctgtatgtgacagagtgtcttctctctgtcccttcctcatgcagtcggaacacacagatgggcacacctctgtccagagtgttattgagaagttgcaggaagaaaatcgactgttaaaacagaaggtgactcacgttgaagacctcaatgccaagtggcagcgctacaacgccagcagggacgaatacgtgagggggctccatgcgcagctcagggggctgcagatcccccacgagcccgagctgatgaggaaggagatctcccggctcaacagacagttggaagagaaaataaatgactgtgccgaagtgaagcaggagctggcggcctccaggacggcccgggatgctgcgttggagcgggtgcagatgctggaacagcagattctcgcttacaaggatgacttcatgtcagaaagggccgatcgggaacgggctcaaagtaggattcaagaactggaggaaaaggtcgcctctttgctgcaccaggtgtcctggagacaggattctcgagagccagacgccggccggattcacgctgggagcaaaactgccaagtatttggccgccgacgcattagagcttatggtgcctggtggctggaggcctgggactgggtcccagcagccagaaccccctgcagagggcgggcatcctggcgcggcccagagaggccagggggaccttcagtgccctcactgcctgcagtgcttcagtgacgagcaaggggaagagctcctcaggcatgtggccgagtgctgccagtgaccgagactcacccgtgcccttgcggcctcctggcccggtgcagctgccctcagggacagggtgggtgctctcagatgccatgggttgagctctactgagagccaaggcccctagaatagttgcggggcactctgatcgttcactttggtccctttggctatggaacaggctgggtcacagggaactgccagtgaggctggaggctggaggtggagatggggtcaggaacatctggcagagggaggtcccagtctgtgtctccatcaggcttaagccagagctatctggtgctggtgtgccagcccctcccccagcctgcctagaaaggggtggctgcctgagggagtcacttgtatggtccccagggtgggagccccatcctgttctatggaataaagcgtcgcctctctgcctcgaaccagtcaaatggagtattgcggctgcacgtcacactagggtggccacccccgccattgcgagccacatgtctgcactgagaaactgcatttcagtagcatttgtcatccagccggaagttaaagcacacttactttattcacctatttttataataaacgttcttgctgctgtga

SEQ ID NO: 8462 - DNA, 1110 bp, Homo sapiens
cctagaggatccccgttattttccttctttattggagaaaataaatgactgtgccgaagtgaagcaggagctggcggcctccaggacggcccgggatgctgcgttggagcgggtgcagatgctggaacagcagattctcgcttacaaggatgacttcatgtcagaaagggccgatcgggaacgggctcaaagtaggattcaagaactggaggaaaaggtcgcctctttgctgcaccaggtgtcctggagacaggattctcgagagccagacgccggccggattcacgctgggagcaaaactgccaagtatttggccgccgacgcattagagcttatggtgcctggtggctggaggcctgggactgggtcccagcagccagaaccccctgcagagggcgggcatcctggcgcggcccagagaggccagggggaccttcagtgccctcactgcctgcagtgcttcagtgacgagcaaggggaagagctcctcaggcatgtggccgagtgctgccagtgaccgagactcacccgtgcccttgcggcctcctggcccggtgcagctgccctcagggacagggtgggtgctctcagatgccatgggttgagctctactgagagccaaggcccctagaatagttgcggggcactctgatcgttcactttggtccctttggctatggaacaggctgggtcacagggaactgccagtgaggctggaggctggaggtggagatggggtcaggaacatctggcagagggaggtcccagtctgtgtctccatcaggcttaagccagagctatctggtgctggtgtgccagcccctcccccagcctgcctagaaaggggtggctgcctgagggagtcacttgtatggtccccagggtgggagccccatcctgttctatggaataaagcgtcgcctctctgcctcgaaccagtcaaatggagtattgcggctgcacgtcacactagggtggccacccccgccattgcgagccacatgtctgcactgagaaactgcatttcagtagcatttgtcatccagccggaagttaaagcacacttactttattcacctatttttataataaacgttcttgctgctgtga

SEQ ID NO: 8463 - DNA, 1170 bp, Homo sapiens
ggcacgaggggaagttgccggcggccgcgcggcctcccgggcgggcctacagccatgtcccgggacccggggtcgggcggctgggaggaggccccgcgcgcagctgccgcgctctgcaccctgtaccacgaggccggacagcggctgcgccgcctgcaggaccagctcgctgcccgcgacgccctcatcgctcgcctccgcgcccgcctggccgcgctggagggggacgccgcgccgtccctagtggacgcgctgctggagcaggttgcgcgcttccgggagcagctgcgaaggcaggagggcggcgccgccgaggcccagatgcgccaggaaattgagaggctgactgagcgactagaagaaaaagagagggagatgcagcagctgctgagccagccccaacacgagcgagagaaggaagtcgtcctgctacggaggagcatggcagaaggggagcgcgcccgggccgccagtgacgtcctgtgccgctccttggccaacgagacccatcagctgcggaggacgctgaccgccaccgcccacatgtgtcagcatctggccaagtgtctggatgaacgacagcatgcacaaaggaatgtgggggagagaagtcctgaccagtcggaacacacagatgggcacacctctgtccagagtgttattgagaagttgcaggaagaaaatcgactgttaaaacagaaggtgactcacgttgaagacctcaatgccaagtggcagcgctacaacgccagcagggacgaatacgtgagggggctccatgcgcagctcagggggctgcagatcccccacgagcccgagctgatgaggaaggagatctcccggctcaacagacagttggaagagaaaataaatgactgtgccgaagtgaagcaggagctggcggcctccaggacggcccgggatgctgcgttggagcgggtgcagatgctggaacagcagattctcgcttacaaggatgacttcatgtcagaaagggccgatcgggaacgggctcaaagtaggattcaagaactggaggaaaaggtcgcctctttgctgcaccaggtgtcctggagacaggtcgcctctttgctgcaccaggtgtcctggagacaggattctcgagagccagacgccggccggattcacgctggcagttttgctcccagc

SEQ ID NO: 8464 - DNA, 1292 bp, Homo sapiens
ggcacgaggggaagttgccggcggccgcgcggcctcccgggcgggcctacagccatgtcccgggacccggggtcgggcggctgggaggaggccccgcgcgcagctgccgcgctctgcaccctgtaccacgaggccggacagcggctgcgccgcctgcaggaccagctcgctgcccgcgacgccctcatcgctcgcctccgcgcccgcctggccgcgctggagggggacgccgcgccgtccctagtggacgcgctgctggagcaggttgcgcgcttccgggagcagctgcgaaggcaggagggcggcgccgccgaggcccagatgcgccaggaaattgagaggctgactgagcgactagaagaaaaagagagggagatgcagcagctgctgagccagccccaacacgagcgagagaaggaagtcgtcctgctacggaggagcatggcagaaggggagcgcgcccgggccgccagtgacgtcctgtgccgctccttggccaacgagacccatcagctgcggaggacgctgaccgccaccgcccacatgtgtcagcatctggccaagtgtctggatgaacgacagcatgcacaaaggaatgtgggggagagaagtcctgaccagtcggaacacacagatgggcacacctctgtccagagtgttattgagaagttgcaggaagaaaatcgactgttaaaacagaaggtgactcacgttgaagacctcaatgccaagtggcagcgctacaacgccagcagggacgaatacgtgagggggctccatgcgcagctcagggggctgcagatcccccacgagcccgagctgatgaggaaggagatctcccggctcaacagacagttggaagagaaaataaatgactgtgccgaagtgaagcaggagctggcggcggccgatcgggaacgggctcaaagtaggattcaagaactggaggaaaaggtcgcctctttgctgcaccaggtgtcctggagacaggattctcgagagccagacgccggccggattcacgctgggagcaaaactgccaagtatttggccgccgacgcattagagcttatggtgcctggtggctggaggcctgggactgggtcccagcagccagaaccccctgcagagggcgggcatcctggcgcggcccagagaggccagggggaccttcagtgcccacatgtctgcactgagaaactgcatttcagtagcatttgtcatccagccggaagttaaagcacacttactttattcacctatttttataataaacgttcttgctgctgtga

SEQ ID NO: 8465 - DNA, 1007 bp, Homo sapiens
ggcacgaggggaagttgccggcggccgcgcggcctcccgggcgggcctacagccatgtcccgggacccggggtcgggcggctgggaggaggccccgcgcgcagctgccgcgctctgcaccctgtaccacgaggccggacagcggctgcgccgcctgcaggaccagctcgctgcccgcgacgccctcatcgctcgcctccgcgcccgcctggccgcgctggagggggacgccgcgccgtccctagtggacgcgctgctggagcaggttgcgcgcttccgggagcagctgcgaaggcaggagggcggcgccgccgaggcccagatgcgccaggaaattgagaggctgactgagcgactagaagaaaaagagagggagatgcagcagctgctgagccagccccaacacgagcgagagaaggaagtcgtcctgctacggaggagcatggcagaaggggagcgcgcccgggccgccagtgacgtcctgtgccgctccttggccaacgagacccatcagctgcggaggacgctgaccgccaccgcccacatgtgtcagcatctggccaagtgtctggatgaacgacagcatgcacaaaggaatgtgggggagagaagtcctgaccagtcggaacacacagatgggcacacctctgtccagagtgttattgagaagttgcaggaagaaaatcgactgttaaaacagaaggtgactcacgttgaagacctcaatgccaagtggcagcgctacaacgccagcaggaacatctggcagagggaggtcccagtctgtgtcccatcctgttctatggaataaagcgtcgcctctctgcctcgaaccagtcaaatggagtattgcggctgcacgtcacactagggtggccacccccgccattgcgagccacatgtctgcactgagaaactgcatttcagtagcatttgtcatccagccggaagttaaagcacacttactttattcacctatttttataataaacgttcttgctgctgtga

SEQ ID NO: 8466 - DNA, 318 bp, Homo sapiens
gtgggtgaacgagcgggccccgggtcctgaggggttgagggggtactgggtcctggggttgagttggcctcgggtcctgaggggttgggggagcaccaggtcctgggagttgagggggtgccgggtcctgggggtgagggggccccggctcctgaggggttgggggagcatcaggtcctgggggttgagggggtgccgggtcctggggttgaggggacactaggtcctgggggtaaggggccgtcgggtcctgggggtgatagggcaacagcttctggggggtgaggggaccctgggtcctaggggagagagggggac

SEQ ID NO: 8467 - DNA, 476 bp, Homo sapiens
ggggacgcagtgataatctgtggcctcagcctctgggtctagctttctcccctcttgctgtatgtgacagagtgtcttctctctgtcccttcctcatgcagtcggaacacacagatgggcacacctctgtccagagtgttattgagaagttgcaggaagaaaatcgactgttaaaacagaaggtgactcacgtgagtgtctttcacatttcgtttgagaagaacacatggcttacaaactgtaagtgagggttctttccttggctgatgcccagagtcgccccccgccctctggccactaggacttgatacacacagtccctagagactggacttttttgcttaaaacgacgtacgggacatgtcctgtccatctccatccccctaaaattaatccacaagtcagtaaaggagatgcaagagttagcagcaggaggtccattttctaagacagcaaagctgcaccgagtccacctc

SEQ ID NO: 8468 - DNA, 294 bp, Homo sapiens
tgaagacctcaatgccaagtggcagcgctacaacgccagcagggacgaatacgtgagggggctccatgcgcagctcagggggctgcagatcccccacgagcccgagctgatgaggaaggagatctcccggctcaacagacagttggaagagaaaataaatgactgtgccgaagtgaagcaggagctggcggcctccaggacggcccgggatgctgcgttggagcgggtgcagatgctggaacagcaggtgtctgtccctcgggctccggacggcactgaccagatgtctgctgg

SEQ ID NO: 8469 - DNA, 362 bp, Homo sapiens
ctcttatggtttttttaaaaaagcttcataaaacaggaaagaactacatatatcattaaactttcatgattgatgcccaccacatccgtgggggctgtggagctgttttggccacagcctgggcactgctgtccacctggaggaagttcactagaatcagcaagaaaataagccatagcctgtggagcatttagcctttcagattcgcctcctatattaagtggtacatttatagccaagtgaactaaaaagaagtgaaatgactgtgcagaagaaccaatctcagcctctgtgaagattgtgaggccttcacatgaaatctgtgcatatgcactggctttccctccacagttcctctgcag

SEQ ID NO: 8470 - DNA, 380 bp, Homo sapiens
aaagtgctgggattacagatgtgagccaccacgcccagccatattaagctatttacatcagggacttgagcatcctcggatttggtatctacaggaggttctggaatcaatcccccaggaataccaaagaataaatatagagtgagagtgtgcgtgtatgtgtgcatgtgtgtgtgtgtgtgtgtgtgtgtgtgtgtgtataaccacatatataaacatacataaacatatgaacatacacacatatatacatatatacacacatatacacccacacacatacatatatttttttcttgaattggtcttcatacaaaaatggctatgtcccctctcctaaacatttctcatcatgttccacaggaaaaaagaatcttcca

SEQ ID NO: 8471 - DNA, 1730 bp, Homo sapiens
gagcacatttacctaaaaaaaattttttaatttttaaattttttttaaggaagtagaaatattaaatttccaagacaattttctagcatctactacttggtcattttaatttacacttttcaacaacagatttcaatacagttatcatttgcaaattcatacatactttattcatcatctaccacatgatcaaagatgttttatgtgaacgttccctcctacttcataagctctctgccctcactccaaaaagaataaaatgcctcaaggtttattgaaggacatggttctgatgcctgacctaacaaggattggaatggctgggtggcagggtctcactctgttgcaggtgctggagtgcaagtggcatgattttggctaactgcaaccttgacctcccaggctcaaggaattctcccacttcaccctccggagtaactgggactacaggcacagactgaggaattgcgcttggcctaataagaatgattcccctgggggaaagaaacagaagagcatttgacaactacatgggctggcataatggattggaatttaaaggtgctacaaatgtgccaccagtttatcacatgggacattttctcaccgagtgaagcaggaagctggtgggcctaggccaggaaggcagagtgaaatttcatgacgcttagaagacaaagagccttgctaaaattaagtgaatggtcctgcaacaaatacacaacaggtctcccttcttaagaaatccaccagattgtgaaactgcatggggagagaagcacgaaaggattaagtttaaaactccaaagcacagaaaaatgctgaggagacagggactcacgaggctttcaatcagaagcctgaaatggtcacacttgagcatgttgctggctggaaaggcagagtaaaatgtcttgtgatttcatggtgttcaaatctctgaaggacagatgactctccattggtatttcaggctttccctacagtaggcaagtactttggacctaccagtctttcaacaaaaagctcagaagggtcacctctaaggaacaggtataaatcagaggtgaactaagtttcattaaaactatacctcagctccaacctagctcaattccagattggatgtggtgattttcaccttaccacatctagttaacaaggaaaagtttgcaccatctctgggggaaaatagtatcacctgtactttctactatacacaatatatgcatatagttaaaattataacgcatataggaggaagaaaaaggatatcaataatcaagataaaaaacaaacagagccaaatccacccatgatctatatggtggaattagcagacaaatattttaatttaatttaatttttttttttttagagatggggttttgccatgttggccaagctggtctcaaactcctggccccaagtgaccagcctgccttggcctcccaaagtgttgggatttacaggagtgagccaccattcctggccccaaaaaattaaaaatcactattacaaattttaaaaaaataattgaagaagagatataaaagtaagtgaaaaagtagagtgaaaatgtctagtcaattaaaatttatttaaaagaatcaaatgaacaatccagaaatgaaataataaactaatcaaatgggtttaaggacatattagaaagactagtgaacacaaaaacaggtccaataaaaatattcaaactgaacatagaaaga

SEQ ID NO: 8472 - DNA, 499 bp, Homo sapiens
gagcacatttacctaaaaaaaattttttaatttttaaattttttttaaggaagtagaaatattaaatttccaagacaattttctagcatctactacttggtcattttaatttacacttttcaacaacagatttcaatacagttatcatttgcaaattcatacatactttattcatcatctaccacatgatcaaagatgttttatgtgaacgttccctcctacttcataagctctctgccctcactccaaaaagaataaaatgcctcaaggtttattgaaggacatggttctgatgcctgacctaacaaggattggaatggctgggtggcaggcaagtggttttcaataatttattttccatgatagtataaaagaatatagaaagaaaagattaatccttttaattttgcagtaaaatttacattccctaagtgcaaaaagacctcatcctctgacacctttaaccacaaattactaaataaatttatttttgatggca

SEQ ID NO: 8473 - DNA, 414 bp, Homo sapiens
catgccgaaagcgctcagtgctcctgaagctgggtggcaggtgttttcacacacaaaggccttccttgctcgggccatgggataagcctttgagtggagacctagcaaggagctttgaagtctgcgttgggggtggaaggtggcaatcccattagacagctctccctggcgtgaatttatgaagccccatgcagactgtgacttttaaaataatcatttagttggttctagcacatatcgcaggtttcattacaggctgccccttaacgagcattgtaacctggaggaaagaatccaaattctttagtcaccacctaactccacattcattaccttgttgcccagggtggagtccaaaagcagcaactatgtttatttctccatagaaaataaatgttcaccaaggcaaatctg

SEQ ID NO: 8474 - DNA, 491 bp, Homo sapiens
gccaggctggtctcgaactcctgagctcaggcgatctgcctgcctcagcctcccaaagtgccgggtttataggcgtgagccatcccgcctggccccatctcactcagtttttagttcatctgtgactaattccaggtgaagttggctggtgggtcttttgttatttctcttaagttctaacctcatttttaatattctaaattttctatttctcttgtaagaatttgcccttttgggccaggcatgatggttcacacctgtaatctcagcactttgggaggccaaggcaggtggatcacctgaggtcagtagttcaagaccagcctggccaacatggcgaaaccctgtctctactaaaaatacaaaaaattacccgggtgtggtggcgggcacctgtaatctcagctacttgggagactgaggcaggagaatcgcttgaacctggaaggaggaggttgccgtgagccgagatcatgccattccaacctggg

SEQ ID NO: 8475 - DNA, 349 bp, Homo sapiens
tgacagctgcgcattaggcatagtgggaaaactctggaaaagatttacctacgaagacaaatttgttggaatgtttatgtggcctaaattcttgagtaaagtttaaaaaaaattggtgcagagtttggagttgaatttatgatagggtcatagaaaaccaagcaaacaaaaaacacaataattaattttatggagaattaaaaggttactcatgacataccttaaggtaataaaagccatctatgggctgggcacagtggctcatgcctataatcccaggactttgggaagccaaggtaggtggatcacttgaggctaggagttcgagactagcctggccaacatggca

SEQ ID NO: 8476 - DNA, 266 bp, Homo sapiens
tattgctaaaaaacgtaaacttttttaggtctgagcttgaaaaaacattcaataatgaaaaatgctggaaggtcaaatactgaatgtcattttttttcactgcaattggagagaaaacaatcatgaacaatttctccctttattcatgcccatatgttattaattccttgttatgtaccacatgtttaaggcacttctgtcagctatgaatatttctgatattattatcatgttgatgtcaatataatgatttgccttttagcagt

SEQ ID NO: 8477 - DNA, 363 bp, Homo sapiens
ttcctcatctgtaaaatgaagatcatacaactcgtttcatcaggttgtactgaggctggaaaagatagtctaactactgacgcatcgtgtgctcagcctagggtggctgctaccgcgggtgcctgcggactcctaggacgggcaccagcccgggacccctgacaaggtgttgattagggtgtggctaagccccaggcgggagaaagcgttggcatttataaggccagggtctggcgcggtggcctcattccgtcttgaagtagaccctggagaggtcttccaggcttgggctcagcacgcgagcacagggagcgggggtgccggcggcggaggcgcgtacggcccgagcagcccccagccccc

SEQ ID NO: 8478 - DNA, 277 bp, Homo sapiens
gcatgtctagtgtttgcaaatggaaaatggctgaggaaaaacagagtgaaagtttatataaaatatttataccttaaagatcttttatcttgtgtcattcaagagagaagtgaaaaatgtattgggagtacattatcaagagtacattataaatttaaatctcagattgaataatatcagctgctaatgtgtggagctttggaaatgagtcacttttgaatctcaagaacttaactgtaccaggtcagttacacttaagaaggaagtgccttttgaa

SEQ ID NO: 8479 - DNA, 555 bp, Homo sapiens
tgtgcttctccctgcaggatgctggcacgtgtgtcctggtcctcaacaaccttctgtgagcctagggacccatttctcctcctttgacagggacatcagtggagccttctcagacccacaggggtccttggtgaattttgtcatggttatttaaggaaccttgcctagaagtcccaacttgcagttccccatcgacgggaaggcttggactccaagatgattataaaggaatatcggattcctctgccaatgaccgtggaggagtaccgcatcgcccagctgtacatgatacaggtgggtcgtggggcaagggtgggtcatggggtgagggtgggtcgcgccagcgcacagacaccacatgtgggttaggtggagttgtggccttcacagtgcagtgcctgccccagaacttcctggtaagtgtgaattgtgctggacccctggcctctaggcacgatgccaggcgcacagagcacaccatgggcgcacggcatcagattgctttccggcactgtgtcccgccgcctacaacgcgaacacttgcccttgcgttca

SEQ ID NO: 8480 - DNA, 5859 bp, Homo sapiens
tgtgcttctccctgcaggatgctggcacgtgtgtcctggtcctcaacaaccttctgtgagcctagggacccatttctcctcctttgacagggacatcagtggagccttctcagacccacaggggtccttggtgaattttgtcatggttatttaaggaaccttgcctagaagtcccaacttgcagttccccatcgacgggaaggcttggactccaagatgattataaaggaatatcggattcctctgccaatgaccgtggaggagtaccgcatcgcccagctgtacatgatacagaagaagagccgtaacgagacatatggcgaaggcagcggcgtggagatcctggagaaccggccgtacacagatggcccaggcggctctgggcagtacacacacaaggtgtatcatgtgggcatgcacattcccagctggttccgctccatcctgcccaaggcagccctgcgggtggtggaggagtcttggaatgcctacccctacacccgaaccaggttcacctgtcctttcgtggagaaattctccatcgacattgaaaccttttataaaactgatgctggagaaaaccccgacgtgttcaacctctctcctgtggaaaagaaccagctgacaatcgacttcatcgacattgtcaaagaccctgtgccccacaacgagtataagacagaagaggaccccaagctgttccagtcaaccaagacccagcgggggcccctgtccgagaactggatcgaggagtacaagaagcaggtcttccccatcatgtgcgcatacaagctctgcaaggtggagttccgctactggggcatgcagtccaagatcgagaggttcatccacgacaccggactacggagggtgatggtgcgggctcaccggcaggcctggtgctggcaggacgagtggtatgggctgagcatggagaacatccgggagctggagaaggaggcacagctcatgctttcccgtaagatggcccagttcaatgaggatggtgaggaggccactgagctcgtcaagcacgaagccgtctcggaccagacctctggggagcccccggagcccagcagcagcaatggggagcccctagtggggcgcggcctcaagaaacagtggtccacatcctccaagtcgtctcggtcgtccaagcggggagcgagtccttcccgccacagcatctcagagtggaggatgcagagtattgccagggactcggatgagagctcagatgatgagttcttcgatgcgcacgaggacctgtccgacacagaggaaatgttccccaaggacatcaccaagtggagctccaatgacctcatggacaagatcgagagcccagagccggaagacacacaagatggtctgtaccgccagggtgcccctgagttcagggtggcctccagtgtggagcagctgaacatcatagaggacgaggttagccagccgctggctgcaccgccctccaagatccacgtgctgctactggtgctgcacggaggcaccatcctggacacaggcgccggggaccccagctccaagaagggcgatgctaacaccatcgccaacgtgttcgacaccgtcatgcgcgtgcactaccccagcgccctgggccgccttgccatccgcctggtgccctgcccgcccgtctgctctgacgcctttgccctggtctccaacctcagcccctacagccatgacgaaggctgtctgtccagcagtcaggaccacattcccctggctgccctccccctgctggccacctcctccccccagtaccaggaggcagttgccacagtgattcagcgagccaaccttgcctatggggacttcatcaagtcccaggagggcatgaccttcaatgggcaggtctgcctgattggggactgcgtcgggggcatcctggcatttgatgccctgtgctacagtaaccagccggtgtctgagagtcagagcagcagccgccggggcagcgtggtcagcatgcaggacaatgacctgctgtccccgggcatcctgatgaatgcagcacactgctgcggtggtggcggtggcggcggtggcggtggtggcagcagtggtggtggtggcagtagtggtggctccagcctggagagcagtcggcacctgagccgaagcaacgtcgacatcccccgcagcaacggcactgaggaccccaaaaggcaactgccccgcaagaggagcgactcatccacctacgagctggataccatccagcagcaccaggccttcctgtccagcctccatgccagcgtgctgaggactgagccctgctcacgccattccagcagctccaccatgctggatggcacaggtgccctgggcaggtttgactttgagatcaccgacctcttcctcttcgggtgcccgctggggctggtcctggccttgaggaagactgtcatcccagccctggatgttttccagctgcggccggcctgccagcaagtctacaacctcttccaccccgcggacccgtcagcttcacgcctggagccgctgctggaacggcgctttcacgccctgccgcctttcagcgtcccccgctaccaacgctacccgctgggggatggctgctccacgctgctggcggatgtgctccagacccacaatgcagccttccaagagcatggcgccccctcctcgccgggcactgcccctgccagtcgtggcttccgccgagccagtgagatcagcatcgccagccaggtgtcaggcatggctgagagctacacggcatccagcatcgcccagaaggcccccgatgcgctcagccatacccccagcgtcaggcgtctgtccctgctcgccctgcccgcccccagccccaccacccctggcccccaccctccagccaggaaggcaagccctggcctggagagggcccctggcctccctgagctggacattggagaagtcgctgcaaagtggtggggccagaagcggatcgactacgccctgtactgccctgacgccctcacggccttccccacggtggctctgcctcacctcttccacgccagctactgggagtcaacagacgtggtctcctttctgctgagacaggtcatgaggcatgacaactccagcatcttggagctggatggcaaggaagtgtcggtgttcaccccctcaaagccaagggagaagtggcagcgcaagcggacccacgtgaagctgcggaacgtgacggccaaccaccggatcaatgatgcccttgccaatgaggacggcccccaggttctgacgggcaggttcatgtatgggcccctggacatggtcaccctgactggggagaaggtggatgtgcacatcatgacccagccgccctcaggcgagtggctctacctggatacgctggtgaccaacaacagtgggcgtgtctcctacaccatccctgagtcgcaccgcctgggcgtgggtgtctaccctatcaagatggtggtcaggggagaccacacgtttgccgacagctacatcaccgtgctgcccaagggcacagagttcgtggtcttcagcatcgacggttcctttgccgctagcgtgtccatcatgggcagcgaccccaaggtgcgggccggggccgtggacgtggtgcggcactggcaggacctgggctacctcatcatctacgtgacgggccggcccgacatgcagaagcagcgggtggtggcgtggctggcccagcacaacttcccccatggcgtggtgtccttctgtgacggcctggtgcatgacccgctgcggcacaaggccaacttcctgaagctgctcatctccgagctgcacctgcgcgtgcacgcggcctatggctccaccaaggacgtggcggtgtacagcgccattagcctgtcccccatgcagatctacatcgtgggccggcccaccaagaagctgcagcagcagtgccagttcatcacggatggctacgcggcccacctggcgcagctgaagtacagccaccgggcgcggcccgctcgcaacacggccacccgcatggcgctgcgcaagggcagcttcggcctgcccggccagggcgactttctgcgctcccggaaccacctgcttcgcaccatctcggcccagcccagcgggcccagccaccggcacgagcggacacagagccaggcggatggcgagcagcggggccagcgcagcatgagtgtggcggccggctgctggggccgcgccatgactggccgcctggagccgggggcagccgcgggccccaagtagggcaccgtgagtgcagcgcggggtctccatggtgctaggccagggtggccagccccgccaggaggcctggcctgggcacacgcactgacgtgggcctgggagattgtcccagggccttgtggaggacacgggccgcaccacacagtgctccctgccctgcctcacgtcctcgggcctgacgggtccggcttgtcatggaagctggcagggaccaccagccccaggatggcagagggaccagaacctcccactcagactggcccgggaggttctcccagacattttgccctgtgtggatctccaagtgtcctggtgccaggtgtgggcccaggcgcagcctgccacctccccatccactggccaccctcactcccaggtcccctcccatttggtagcagctccaacaggggtccagcctgcatcttgttaactcgagtttctcaactgttcaacctcactggttttgcactgatttttgagagcggagacccattaccacctcctatggctacagccccgttgacatgcatgaaactcagtacctgctgacccaggacctacaaccacactgaaggctccagtgcggcagagcctcgtgcaagcaggagagaaaggctgtatcttaatttctgcaccccggaccctgcccacctgtctgcctgccccgcctggagcccaggccagtgttgtttccagcctcaggccacgggctggacgggcctggccgcctcttccgctccctgccatcagtcaaggccgcccgcccacgtttctacgcctttctacttctcaatctgatttctatgaggtttttttaaacgagcaatccttggctgcttccttttcttaactctttcagtactgagagcagcccctccacactgaaaacacccagcactgtgacggagtccagcctggttctgggtaccgtgggccctgctcctgcccacttagcgaggcatgggctccttgcctcacctggccccggcaatcccactgaatttctactctggggtgggtggggcacacacttcggtttttttaatgccaattccgttttcatgccgaatctaagaagccacaacttgctttgtcagcttcagggcaggcagccatgacttcatttctcgcctgaacaaggaccatgctgtcctgcacgctgggtctgaccgtctgccctctctccccagcaccaagcgtgaccttggctgtggcgctcaacggccagctccggcggcccctctgctgctcctcggctttcccggaagtgggagagcctgcctggcctcggcctttgtccagcgaccaggctctgtccccgagaagctacggccgacctgggtctggtgttgggacgcatggaccgggctggggaggtgcacagagtgatgttaactttttcccgtgtgtagatatgtacagccaaagggtcgtgtaaatgttctgcaaaagtgggtctatacagagtgaaagctatttattttgtgcagagaaaaaagtctggagggatggaaccttcagggtttattcatatttaagatgtagctttttgttgtttcaggcattatgtataaagcaacgattattttatgg

SEQ ID NO: 8481 - DNA, 6699 bp, Homo sapiens
atgcctcccggtaaccaggtgtcgtcagcaggagctttctggatctgtgtcccctgtgtcacttcctttctttgtttcttcacacacttcctgagatgtgaaccctgcctgggacaatcgcttttgttcctggagacagtgtacagagcttggaattctctgaggggttcctgagatggcgccattcaagccagggggttgaatagcttgactcttcatttcagcagcacgattgacccctcagtggatcagcagcgattcattccacacgtatttagggtccttggtgaattttgtcatggttatttaaggaaccttgcctagaagtcccaacttgcagttccccatcgacgggaaggcttggactccaagatgattataaaggaatatcggattcctctgccaatgaccgtggaggagtaccgcatcgcccagctgtacatgatacagaagaagagccgtaacgagacatatggcgaaggcagcggcgtggagatcctggagaaccggccgtacacagatggcccaggcggctctgggcagtacacacacaaggtgtatcatgtgggcatgcacattcccagctggttccgctccatcctgcccaaggcagccctgcgggtggtggaggagtcttggaatgcctacccctacacccgaaccaggttcacctgtcctttcgtggagaaattctccatcgacattgaaaccttttataaaactgatgctggagaaaaccccgacgtgttcaacctctctcctgtggaaaagaaccagctgacaatcgacttcatcgacattgtcaaagaccctgtgccccacaacgagtataagacagaagaggaccccaagctgttccagtcaaccaagacccagcgggggcccctgtccgagaactggatcgaggagtacaagaagcaggtcttccccatcatgtgcgcatacaagctctgcaaggtggagttccgctactggggcatgcagtccaagatcgagaggttcatccacgacaccggactacggagggtgatggtgcgggctcaccggcaggcctggtgctggcaggacgagtggtatgggctgagcatggagaacatccgggagctggagaaggaggcacagctcatgctttcccgtaagatggcccagttcaatgaggatggtgaggaggccactgagctcgtcaagcacgaagccgtctcggaccagacctctggggagcccccggagcccagcagcagcaatggggagcccctagtggggcgcggcctcaagaaacagtggtccacatcctccaagtcgtctcggtcgtccaagcggggagcgagtccttcccgccacagcatctcagagtggaggatgcagagtattgccagggactcggatgagagctcagatgatgagttcttcgatgcgcacgaggacctgtccgacacagaggaaatgttccccaaggacatcaccaagtggagctccaatgacctcatggacaagatcgagagcccagagccggaagacacacaagatggtctgtaccgccagggtgcccctgagttcagggtggcctccagtgtggagcagctgaacatcatagaggacgaggttagccagccgctggctgcaccgccctccaagatccacgtgctgctactggtgctgcacggaggcaccatcctggacacaggcgccggggaccccagctccaagaagggcgatgctaacaccatcgccaacgtgttcgacaccgtcatgcgcgtgcactaccccagcgccctgggccgccttgccatccgcctggtgccctgcccgcccgtctgctctgacgcctttgccctggtctccaacctcagcccctacagccatgacgaaggctgtctgtccagcagtcaggaccacattcccctggctgccctccccctgctggccacctcctccccccagtaccaggaggcagttgccacagtgattcagcgagccaaccttgcctatggggacttcatcaagtcccaggagggcatgaccttcaatgggcaggtctgcctgattggggactgcgtcgggggcatcctggcatttgatgccctgtgctacagtaaccagccggtgtctgagagtcagagcagcagccgccggggcagcgtggtcagcatgcaggacaatgacctgctgtccccgggcatcctgatgaatgcagcacactgctgcggtggtggcggtggcggcggtggcggtggtggcagcagtggtggtggtggcagtagtggtggctccagcctggagagcagtcggcacctgagccgaagcaacgtcgacatcccccgcagcaacggcactgaggaccccaaaaggcaactgccccgcaagaggagcgactcatccacctacgagctggataccatccagcagcaccaggccttcctgtccagcctccatgccagcgtgctgaggactgagccctgctcacgccattccagcagctccaccatgctggatggcacaggtgccctgggcaggtttgactttgagatcaccgacctcttcctcttcgggtgcccgctggggctggtcctggccttgaggaagactgtcatcccagccctggatgttttccagctgcggccggcctgccagcaagtctacaacctcttccaccccgcggacccgtcagcttcacgcctggagccgctgctggaacggcgctttcacgccctgccgcctttcagcgtcccccgctaccaacgctacccgctgggggatggctgctccacgctgctggcggatgtgctccagacccacaatgcagccttccaagagcatggcgccccctcctcgccgggcactgcccctgccagtcgtggcttccgccgagccagtgagatcagcatcgccagccaggtgtcaggcatggctgagagctacacggcatccagcatcgcccagaaggcccccgatgcgctcagccatacccccagcgtcaggcgtctgtccctgctcgccctgcccgcccccagccccaccacccctggcccccaccctccagccaggaaggcaagccctggcctggagagggcccctggcctccctgagctggacattggagaagtcgctgcaaagtggtggggccagaagcggatcgactacgccctgtactgccctgacgccctcacggccttccccacggtggctctgcctcacctcttccacgccagctactgggagtcaacagacgtggtctcctttctgctgagacaggtcatgaggcatgacaactccagcatcttggagctggatggcaaggaagtgtcggtgttcaccccctcaaagccaagggagaagtggcagcgcaagcggacccacgtgaagctgcggaacgtgacggccaaccaccggatcaatgatgcccttgccaatgaggacggcccccaggttctgacgggcaggttcatgtatgggcccctggacatggtcaccctgactggggagaaggtggatgtgcacatcatgacccagccgccctcaggcgagtggctctacctggatacgctggtgaccaacaacagtgggcgtgtctcctacaccatccctgagtcgcaccgcctgggcgtgggtgtctaccctatcaagatggtggtcaggggagaccacacgtttgccgacagctacatcaccgtgctgcccaagggcacagagttcgtggtcttcagcatcgacggttcctttgccgctagcgtgtccatcatgggcagcgaccccaaggtgcgggccggggccgtggacgtggtgcggcactggcaggacctgggctacctcatcatctacgtgacgggccggcccgacatgcagaagcagcgggtggtggcgtggctggcccagcacaacttcccccatggcgtggtgtccttctgtgacggcctggtgcatgacccgctgcggcacaaggccaacttcctgaagctgctcatctccgagctgcacctgcgcgtgcacgcggcctatggctccaccaaggacgtggcggtgtacagcgccattagcctgtcccccatgcagatctacatcgtgggccggcccaccaagaagctgcagcagcagtgccagttcatcacggatggctacgcggcccacctggcgcagctgaagtacagccaccgggcgcggcccgctcgcaacacggccacccgcatggcgctgcgcaagggcagcttcggcctgcccggccagggcgactttctgcgctcccggaaccacctgcttcgcaccatctcggcccagcccagcgggcccagccaccggcacgagcggacacagagccaggcggatggcgagcagcggggccagcgcagcatgagtgtggcggccggctgctggggccgcgccatgactggccgcctggagccgggggcagccgcgggccccaagtagggcaccgtgagtgcagcgcggggtctccatggtgctaggccagggtggccagccccgccaggaggcctggcctgggcacacgcactgacgtgggcctgggagattgtcccagggccttgtggaggacacgggccgcaccacacagtgctccctgccctgcctcacgtcctcgggcctgacgggtccggcttgtcatggaagctggcagggaccaccagccccaggatggcagagggaccagaacctcccactcagactggcccgggaggttctcccagacattttgccctgtgtggatctccaagtgtcctggtgccaggtgtgggcccaggcgcagcctgccacctccccatccactggccaccctcactcccaggtcccctcccatttggtagcagctccaacaggggtccagcctgcatcttgttaactcgagtttctcaactgttcaacctcactggttttgcactgatttttgagagcggagacccattaccacctcctatggctacagccccgttgacatgcatgaaactcagtacctgctgacccaggacctacaaccacactgaaggctccagtgcggcagagcctcgtgcaagcaggagagaaaggctgtatcttaatttctgcaccccggaccctgcccacctgtctgcctgccccgcctggagcccaggccagtgttgtttccagcctcaggccacgggctggacgggcctggccgcctcttccgctccctgccatcagtcaaggccgcccgcccacgtttctacgcctttctacttctcaatctgatttctatgaggtttttttaaacgagcaatccttggctgcttccttttcttaactctttcagtactgagagcagcccctccacactgaaaacacccagcactgtgacggagtccagcctggttctgggtaccgtgggccctgctcctgcccacttagcgaggcatgggctccttgcctcacctggccccggcaatcccactgaatttctactctggggtgggtggggcacacacttcggtttttttaatgccaattccgttttcatgccgaatctaagaagccacaacttgctttgtcagcttcagggcaggcagccatgacttcatttctcgcctgaacaaggaccatgctgtcctgcacgctgggtctgaccgtctgccctctctccccagcaccaagcgtgaccttggctgtggcgctcaacggccagctccggcggcccctctgctgctcctcggctttcccggaagtgggagagcctgcctggcctcggcctttgtccagcgaccaggctctgtccccgagaagctacggccgacctgggtctggtgttgggacgcatggaccgggctggggaggtgcacagagtgatgttaactttttcccgtgtgtagatatgtacagccaaagggtcgtgtaaatgttctgcaaaagtgggtctatacagagtgaaagctatttattttgtgcagagaaaaaagtctggagggatggaaccttcagggtttattcatatttaagatgtagctttttgttgtttcaggcattatgtataaagcaacgattattttatggaccaagttttcatgtaactgttgcagtgaaagtgcaatatctgacccccctgctcccagcaggaagttgcttggcccgacaatcacagcccctgtcaggggccctgtggccagtgcctcctcctctcttggccccaccttatcctgtcttgcctgctgcctgggagaccagccatccagagaagcacctggaagagtctcgggccctcctgcaataaaggccgggaggccctgtgggcagtgggctcagcctctccccaggggggcagctcccccacggctcctcactccccgcctgcctgcccagccgccagccatgccaaggacaacagcaatagtcccctggggctctcccagcggccctcagccatagatggcaaggtgggcagcctgcccccccatgggaagtctcttctgtatccaggtctgctttccacctcccttcagattccttttggcacattctcctcttgaggaagtaccagtctttctgaaactaagagagggagggcagcgtcctttaaaaataccaaaaatgtttacagagttgggtgctgagctgcagggctcaggcctgaccagtcataaccaaagggtgaggcaggccttgctgactgccaccccccaggcctgttagaatagaagccttagtcccactcccaggtgctctccaaggtgcagcagg

SEQ ID NO: 8482 - DNA, 2527 bp, Homo sapiens
ggtacccgtacgaatgtgcgggcccgtacggatgtgcgggccagtacggatgtgcgggccagtacggatgtgggcctgggagattgtcccagggccttgtggaggacacgggccgcaccacacagtgctccctgccctgcctcacgtcctcgggcctgacgggtccggcttgtcatggaagctggcagggaccaccagccccaggatggcagagggaccagaacctcccactcagactggcccgggaggttctcccagacattttgccctgtgtggatctccaagtgtcctggtgccaggtgtgggcccaggcgcagcctgccacctccccatccactggccaccctcactcccaggtcccctcccatttggtagcagctccaacaggggtccagcctgcatcttgttaactcgagtttctcaactgttcaacctcactggttttgcactgatttttgagagcggagacccattaccacctcctatggctacagccccgttgacatgcatgaaactcagtacctgctgacccaggacctacaaccacactgaaggctccagtgcggcagagcctcgtgcaagcaggagagaaaggctgtatcttaatttctgcaccccggaccctgcccacctgtctgcctgccccgcctggagcccaggccagtgttgtttccagcctcaggccacgggctggacgggcctggccgcctcttccgctccctgccatcagtcaaggccgcccgcccacgtttctacgcctttctacttctcaatctgatttctatgaggtttttttaaacgagcaatccttggctgcttccttttcttaactctttcagtactgagagcagcccctccacactgaaaacacccagcactgtgacggagtccagcctggttctgggtaccgtgggccctgctcctgcccacttagcgaggcatgggctccttgcctcacctggccccggcaatcccactgaatttctactctggggtgggtggggcacacacttcggtttttttaatgccaattccgttttcatgccgaatctaagaagccacaacttgctttgtcagcttcagggcaggcagccatgacttcatttctcgcctgaacaaggaccatgctgtcctgcacgctgggtctgaccgtctgccctctctccccagcaccaagcgtgaccttggctgtggcgctcaacggccagctccggcggcccctctgctgctcctcggctttcccggaagtgggagagcctgcctggcctcggcctttgtccagcgaccaggctctgtccccgagaagctacggccgacctgggtctggtgttgggacgcatggaccgggctggggaggtgcacagagtgatgttaactttttcccgtgtgtagatatgtacagccaaagggtcgtgtaaatgttctgcaaaagtgggtctatacagagtgaaagctatttattttgtgcagagaaaaaagtctggagggatggaaccttcagggtttattcatatttaagatgtagctttttgttgtttcaggcattatgtataaagcaacgattattttatggaccaagttttcatgtaactgttgcagtgaaagtgcaatatctgacccccctgctcccagcaggaagttgcttggcccgacaatcacagcccctgtcaggggccctgtggccagtgcctcctcctctcttggccccaccttatcctgtcttgcctgctgcctgggagaccagccatccagagaagcacctggaagagtctcgggccctcctgcaataaaggccgggaggccctgtgggcagtgggctcagcctctccccaggggggcagctcccccacggctcctcactccccgcctgcctgcccagccgccagccatgccaaggacaacagcaatagtcccctggggctctcccagcggccctcagccatagatggcaaggtgggcagcctgcccccccatgggaagtctcttctgtatccaggtctgctttccacctcccttcagattccttttggcacattctcctcttgaggaagtaccagtctttctgaaactaagagagggagggcagcgtcctttaaaaataccaaaaatgtttacagagttgggtgctgagctgcagggctcaggcctgaccagtcataaccaaagggtgaggcaggccttgctgactgccaccccccaggcctgttagaatagaagccttagtcccactcccaccacacccccacgccccaccacctgccttctctttgatttctaaagagggattcagcagagaccccccacccctccctggctcggtctgagtcccactgcccaccccatcacagccttcacgtctcagcccctcccgtctggtctgtccgtgtgccgtctgtttctctgggccatgtgtgagcagtgtccccatctccccatccgtccctgctgtccccgcatcattgggcctgagtgtgctctgtatacaacgtcatgtctgttacaccaattaaagaagcgggaaggcttc

SEQ ID NO: 8483 - DNA, 6015 bp, Homo sapiens
atgcctcccggtaaccaggtgtcgtcagcaggagctttctggatctgtgtcccctgtgtcacttcctttctttgtttcttcacacacttcctgagatgtgaaccctgcctgggacaatcgcttttgttcctggagacagtgtacagagcttggaattctctgaggggttcctgagatggcgccattcaagccagggggttgaatagcttgactcttcatttcagcagcacgattgacccctcagtggatcagcagcgattcattccacacgtatttagggtccttggtgaattttgtcatggttatttaaggaaccttgcctagaagtcccaacttgcagttccccatcgacgggaaggcttggactccaagatgattataaaggaatatcggattcctctgccaatgaccgtggaggagtaccgcatcgcccagctgtacatgatacagaagaagagccgtaacgagacatatggcgaaggcagcggcgtggagatcctggagaaccggccgtacacagatggcccaggcggctctgggcagtacacacacaaggtgtatcatgtgggcatgcacattcccagctggttccgctccatcctgcccaaggcagccctgcgggtggtggaggagtcttggaatgcctacccctacacccgaaccaggttcacctgtcctttcgtggagaaattctccatcgacattgaaaccttttataaaactgatgctggagaaaaccccgacgtgttcaacctctctcctgtggaaaagaaccagctgacaatcgacttcatcgacattgtcaaagaccctgtgccccacaacgagtataagacagaagaggaccccaagctgttccagtcaaccaagacccagcgggggcccctgtccgagaactggatcgaggagtacaagaagcaggtcttccccatcatgtgcgcatacaagctctgcaaggtggagttccgctactggggcatgcagtccaagatcgagaggttcatccacgacaccggactacggagggtgatggtgcgggctcaccggcaggcctggtgctggcaggacgagtggtatgggctgagcatggagaacatccgggagctggagaaggaggcacagctcatgctttcccgtaagatggcccagttcaatgaggatggtgaggaggccactgagctcgtcaagcacgaagccgtctcggaccagacctctggggagcccccggagcccagcagcagcaatggggagcccctagtggggcgcggcctcaagaaacagtggtccacatcctccaagtcgtctcggtcgtccaagcggggagcgagtccttcccgccacagcatctcagagtggaggatgcagagtattgccagggactcggatgagagctcagatgatgagttcttcgatgcgcacgaggacctgtccgacacagaggaaatgttccccaaggacatcaccaagtggagctccaatgacctcatggacaagatcgagagcccagagccggaagacacacaagatggtctgtaccgccagggtgcccctgagttcagggtggcctccagtgtggagcagctgaacatcatagaggacgaggttagccagccgctggctgcaccgccctccaagatccacgtgctgctactggtgctgcacggaggcaccatcctggacacaggcgccggggaccccagctccaagaagggcgatgctaacaccatcgccaacgtgttcgacaccgtcatgcgcgtgcactaccccagcgccctgggccgccttgccatccgcctggtgccctgcccgcccgtctgctctgacgcctttgccctggtctccaacctcagcccctacagccatgacgaaggctgtctgtccagcagtcaggaccacattcccctggctgccctccccctgctggccacctcctccccccagtaccaggaggcagttgccacagtgattcagcgagccaaccttgcctatggggacttcatcaagtcccaggagggcatgaccttcaatgggcaggtctgcctgattggggactgcgtcgggggcatcctggcatttgatgccctgtgctacagtaaccagccggtgtctgagagtcagagcagcagccgccggggcagcgtggtcagcatgcaggacaatgacctgctgtccccgggcatcctgatgaatgcagcacactgctgcggtggtggcggtggcggcggtggcggtggtggcagcagtggtggtggtggcagtagtggtggctccagcctggagagcagtcggcacctgagccgaagcaacgtcgacatcccccgcagcaacggcactgaggaccccaaaaggcaactgccccgcaagaggagcgactcatccacctacgagctggataccatccagcagcaccaggccttcctgtccagcctccatgccagcgtgctgaggactgagccctgctcacgccattccagcagctccaccatgctggatggcacaggtgccctgggcaggtttgactttgagatcaccgacctcttcctcttcgggtgcccgctggggctggtcctggccttgaggaagactgtcatcccagccctggatgttttccagctgcggccggcctgccagcaagtctacaacctcttccaccccgcggacccgtcagcttcacgcctggagccgctgctggaacggcgctttcacgccctgccgcctttcagcgtcccccgctaccaacgctacccgctgggggatggctgctccacgctgctggcggatgtgctccagacccacaatgcagccttccaagagcatggcgccccctcctcgccgggcactgcccctgccagtcgtggcttccgccgagccagtgagatcagcatcgccagccaggtgtcaggcatggctgagagctacacggcatccagcatcgcccagaaggcccccgatgcgctcagccatacccccagcgtcaggcgtctgtccctgctcgccctgcccgcccccagccccaccacccctggcccccaccctccagccaggaaggcaagccctggcctggagagggcccctggcctccctgagctggacattggagaagtcgctgcaaagtggtggggccagaagcggatcgactacgccctgtactgccctgacgccctcacggccttccccacggtggctctgcctcacctcttccacgccagctactgggagtcaacagacgtggtctcctttctgctgagacaggtcatgaggcatgacaactccagcatcttggagctggatggcaaggaagtgtcggtgttcaccccctcaaagccaagggagaagtggcagcgcaagcggacccacgtgaagctgcggaacgtgacggccaaccaccggatcaatgatgcccttgccaatgaggacggcccccaggttctgacgggcaggttcatgtatgggcccctggacatggtcaccctgactggggagaaggtggatgtgcacatcatgacccagccgccctcaggcgagtggctctacctggatacgctggtgaccaacaacagtgggcgtgtctcctacaccatccctgagtcgcaccgcctgggcgtgggtgtctaccctatcaagatggtggtcaggggagaccacacgtttgccgacagctacatcaccgtgctgcccaagggcacagagttcgtggtcttcagcatcgacggttcctttgccgctagcgtgtccatcatgggcagcgaccccaaggtgcgggccggggccgtggacgtggtgcggcactggcaggacctgggctacctcatcatctacgtgacgggccggcccgacatgcagaagcagcgggtggtggcgtggctggcccagcacaacttcccccatggcgtggtgtccttctgtgacggcctggtgcatgacccgctgcggcacaaggccaacttcctgaagctgctcatctccgagctgcacctgcgcgtgcacgcggcctatggctccaccaaggacgtggcggtgtacagcgccattagcctgtcccccatgcagatctacatcgtgggccggcccaccaagaagctgcagcagcagtgccagttcatcacggatggctacgcggcccacctggcgcagctgaagtacagccaccgggcgcggcccgctcgcaacacggccacccgcatggcgctgcgcaagggcagcttcggcctgcccggccagggcgactttctgcgctcccggaaccacctgcttcgcaccatctcggcccagcccagcgggcccagccaccggcacgagcggacacagagccaggcggatggcgagcagcggggccagcgcagcatgagtgtggcggccggctgctggggccgcgccatgactggccgcctggagccgggggcagccgcgggccccaagtagggcaccgtgagtgcagcgcggggtctccatggtgctaggccagggtggccagccccgccaggaggcctggcctgggcacacgcactgacgtgggcctgggagattgtcccagggccttgtggaggacacgggccgcaccacacagtgctccctgccctgcctcacgtcctcgggcctgacgggtccggcttgtcatggaagctggcagggaccaccagccccaggatggcagagggaccagaacctcccactcagactggcccgggaggttctcccagacattttgccctgtgtggatctccaagtgtcctggtgccaggtgtgggcccaggcgcagcctgccacctccccatccactggccaccctcactcccaggtcccctcccatttggtagcagctccaacaggggtccagcctgcatcttgttaactcgagtttctcaactgttcaacctcactggttttgcactgatttttgagagcggagacccattaccacctcctatggctacagccccgttgacatgcatgaaactcagtacctgctgacccaggacctacaaccacactgaaggctccagtgcggcagagcctcgtgcaagcaggagagaaaggctgtatcttaatttctgcaccccggaccctgcccacctgtctgcctgccccgcctggagcccaggccagtgttgtttccagcctcaggccacgggctggacgggcctggccgcctcttccgctccctgccatcagtcaaggccgcccgcccacgtttctacgcctttctacttctcaatctgatttctatgaggtttttttaaacgagcaatccttggctgcttccttttcttaactctttcagtactgagagcagcccctccacactgaaaacacccagcactgtgacggagtccagcctggttctgggtaccgtgggccctgctcctgcccacttagcgaggcatgggctccttgcctcacctggccccggcaatcccactgaatttctactctggggtgggtggggcacacacttcggtttttttaatgccaattccgttttcatgccgaatctaagaagccacaacttgctttgtcagcttcagggcaggcagccatgacttcatttctcgcctgaacaaggaccatgctgtcctgcacgctgggtctgaccgtctgccctctctccccagcaccaagcgtgaccttggctgtggcgctcaacggccagctccggcggcccctctgctgctcctcggctttcccggaagtgggagagcctgcctggcctcggcctttgtccagcgaccaggctctgtccccgagaagctacggccgacctgggtctggtgttgggacgcatggaccgggctggggaggtgcacagagtgatgttaactttttcccgtgtgtagatatgtacagccaaagggtcgtgtaaatgttctgcaaaagtgggtctatacagagtgaaagctatttattttgtgcagagaaaaaagtctggagggatggaaccttcagggtttattcatatttaagatgtagctttttgttgtttcaggcattatgtataaagcaacgattattttatgg

SEQ ID NO: 8484 - DNA, 6951 bp, Homo sapiens
  misc_feature (2898)..(2898): n is a, c, g, or t
atgcctcccggtaaccaggtgtcgtcagcaggagctttctggatctgtgtcccctgtgtcacttcctttctttgtttcttcacacacttcctgagatgtgaaccctgcctgggacaatcgcttttgttcctggagacagtgtacagagcttggaattctctgaggggttcctgagatggcgccattcaagccagggggttgaatagcttgactcttcatttcagcagcacgattgacccctcagtggatcagcagcgattcattccacacgtatttagggtccttggtgaattttgtcatggttatttaaggaaccttgcctagaagtcccaacttgcagttccccatcgacgggaaggcttggactccaagatgattataaaggaatatcggattcctctgccaatgaccgtggaggagtaccgcatcgcccagctgtacatgatacagaagaagagccgtaacgagacatatggcgaaggcagcggcgtggagatcctggagaaccggccgtacacagatggcccaggcggctctgggcagtacacacacaaggtgtatcatgtgggcatgcacattcccagctggttccgctccatcctgcccaaggcagccctgcgggtggtggaggagtcttggaatgcctacccctacacccgaaccaggttcacctgtcctttcgtggagaaattctccatcgacattgaaaccttttataaaactgatgctggagaaaaccccgacgtgttcaacctctctcctgtggaaaagaaccagctgacaatcgacttcatcgacattgtcaaagaccctgtgccccacaacgagtataagacagaagaggaccccaagctgttccagtcaaccaagacccagcgggggcccctgtccgagaactggatcgaggagtacaagaagcaggtcttccccatcatgtgcgcatacaagctctgcaaggtggagttccgctactggggcatgcagtccaagatcgagaggttcatccacgacaccggactacggagggtgatggtgcgggctcaccggcaggcctggtgctggcaggacgagtggtatgggctgagcatggagaacatccgggagctggagaaggaggcacagctcatgctttcccgtaagatggcccagttcaatgaggatggtgaggaggccactgagctcgtcaagcacgaagccgtctcggaccagacctctggggagcccccggagcccagcagcagcaatggggagcccctagtggggcgcggcctcaagaaacagtggtccacatcctccaagtcgtctcggtcgtccaagcggggagcgagtccttcccgccacagcatctcagagtggaggatgcagagtattgccagggactcggatgagagctcagatgatgagttcttcgatgcgcacgaggacctgtccgacacagaggaaatgttccccaaggacatcaccaagtggagctccaatgacctcatggacaagatcgagagcccagagccggaagacacacaagatggtctgtaccgccagggtgcccctgagttcagggtggcctccagtgtggagcagctgaacatcatagaggacgaggttagccagccgctggctgcaccgccctccaagatccacgtgctgctactggtgctgcacggaggcaccatcctggacacaggcgccggggaccccagctccaagaagggcgatgctaacaccatcgccaacgtgttcgacaccgtcatgcgcgtgcactaccccagcgccctgggccgccttgccatccgcctggtgccctgcccgcccgtctgctctgacgcctttgccctggtctccaacctcagcccctacagccatgacgaaggctgtctgtccagcagtcaggaccacattcccctggctgccctccccctgctggccacctcctccccccagtaccaggaggcagttgccacagtgattcagcgagccaaccttgcctatggggacttcatcaagtcccaggagggcatgaccttcaatgggcaggtctgcctgattggggactgcgtcgggggcatcctggcatttgatgccctgtgctacagtaaccagccggtgtctgagagtcagagcagcagccgccggggcagcgtggtcagcatgcaggacaatgacctgctgtccccgggcatcctgatgaatgcagcacactgctgcggtggtggcggtggcggcggtggcggtggtggcagcagtggtggtggtggcagtagtggtggctccagcctggagagcagtcggcacctgagccgaagcaacgtcgacatcccccgcagcaacggcactgaggaccccaaaaggcaactgccccgcaagaggagcgactcatccacctacgagctggataccatccagcagcaccaggccttcctgtccagcctccatgccagcgtgctgaggactgagccctgctcacgccattccagcagctccaccatgctggatggcacaggtgccctgggcaggtttgactttgagatcaccgacctcttcctcttcgggtgcccgctggggctggtcctggccttgaggaagactgtcatcccagccctggatgttttccagctgcggccggcctgccagcaagtctacaacctcttccaccccgcggacccgtcagcttcacgcctggagccgctgctggaacggcgctttcacgccctgccgcctttcagcgtcccccgctaccaacgctacccgctgggggatggctgctccacgctgctggtcgagaccgtgcagagaaaccctgagctggtcctggagggcggccccctggcccctctcccccacggggacggcttcctggaaaccagtatgcctgttcccgcgcccacctggcaagacggnccccgcccgggctgtgccgagtcggatgtgctccagacccacaatgcagccttccaagagcatggcgccccctcctcgccgggcactgcccctgccagtcgtggcttccgccgagccagtgagatcagcatcgccagccaggtgtcaggcatggctgagagctacacggcatccagcatcgcccagatcgctgcaaagtggtggggccagaagcggatcgactacgccctgtactgccctgacgccctcacggccttccccacggtggctctgcctcacctcttccacgccagctactgggagtcaacagacgtggtctcctttctgctgagacaggtcatgaggcatgacaactccagcatcttggagctggatggcaaggaagtgtcggtgttcaccccctcaaagccaagggagaagtggcagcgcaagcggacccacgtgaagctgcggaacgtgacggccaaccaccggatcaatgatgcccttgccaatgaggacggcccccaggttctgacgggcaggttcatgtatgggcccctggacatggtcaccctgactggggagaaggtggatgtgcacatcatgacccagccgccctcaggcgagtggctctacctggatacgctggtgaccaacaacagtgggcgtgtctcctacaccatccctgagtcgcaccgcctgggcgtgggtgtctaccctatcaagatggtggtcaggggagaccacacgtttgccgacagctacatcaccgtgctgcccaagggcacagagttcgtggtcttcagcatcgacggttcctttgccgctagcgtgtccatcatgggcagcgaccccaaggtgcgggccggggccgtggacgtggtgcggcactggcaggacctgggctacctcatcatctacgtgacgggccggcccgacatgcagaagcagcgggtggtggcgtggctggcccagcacaacttcccccatggcgtggtgtccttctgtgacggcctggtgcatgacccgctgcggcacaaggccaacttcctgaagctgctcatctccgagctgcacctgcgcgtgcacgcggcctatggctccaccaaggacgtggcggtgtacagcgccattagcctgtcccccatgcagatctacatcgtgggccggcccaccaagaagctgcagcagcagtgccagttcatcacggatggctacgcggcccacctggcgcagctgaagtacagccaccgggcgcggcccgctcgcaacacggccacccgcatggcgctgcgcaagggcagcttcggcctgcccggccagggcgactttctgcgctcccggaaccacctgcttcgcaccatctcggcccagcccagcgggcccagccaccggcacgagcggacacagagccaggcggatggcgagcagcggggccagcgcagcatgagtgtggcggccggctgctggggccgcgccatgactggccgcctggagccgggggcagccgcgggccccaagtagggcaccgtgagtgcagcgcggggtctccatggtgctaggccagggtggccagccccgccaggaggcctggcctgggcacacgcactgacgtgggcctgggagattgtcccagggccttgtggaggacacgggccgcaccacacagtgctccctgccctgcctcacgtcctcgggcctgacgggtccggcttgtcatggaagctggcagggaccaccagccccaggatggcagagggaccagaacctcccactcagactggcccgggaggttctcccagacattttgccctgtgtggatctccaagtgtcctggtgccaggtgtgggcccaggcgcagcctgccacctccccatccactggccaccctcactcccaggtcccctcccatttggtagcagctccaacaggggtccagcctgcatcttgttaactcgagtttctcaactgttcaacctcactggttttgcactgatttttgagagcggagacccattaccacctcctatggctacagccccgttgacatgcatgaaactcagtacctgctgacccaggacctacaaccacactgaaggctccagtgcggcagagcctcgtgcaagcaggagagaaaggctgtatcttaatttctgcaccccggaccctgcccacctgtctgcctgccccgcctggagcccaggccagtgttgtttccagcctcaggccacgggctggacgggcctggccgcctcttccgctccctgccatcagtcaaggccgcccgcccacgtttctacgcctttctacttctcaatctgatttctatgaggtttttttaaacgagcaatccttggctgcttccttttcttaactctttcagtactgagagcagcccctccacactgaaaacacccagcactgtgacggagtccagcctggttctgggtaccgtgggccctgctcctgcccacttagcgaggcatgggctccttgcctcacctggccccggcaatcccactgaatttctactctggggtgggtggggcacacacttcggtttttttaatgccaattccgttttcatgccgaatctaagaagccacaacttgctttgtcagcttcagggcaggcagccatgacttcatttctcgcctgaacaaggaccatgctgtcctgcacgctgggtctgaccgtctgccctctctccccagcaccaagcgtgaccttggctgtggcgctcaacggccagctccggcggcccctctgctgctcctcggctttcccggaagtgggagagcctgcctggcctcggcctttgtccagcgaccaggctctgtccccgagaagctacggccgacctgggtctggtgttgggacgcatggaccgggctggggaggtgcacagagtgatgttaactttttcccgtgtgtagatatgtacagccaaagggtcgtgtaaatgttctgcaaaagtgggtctatacagagtgaaagctatttattttgtgcagagaaaaaagtctggagggatggaaccttcagggtttattcatatttaagatgtagctttttgttgtttcaggcattatgtataaagcaacgattattttatggaccaagttttcatgtaactgttgcagtgaaagtgcaatatctgacccccctgctcccagcaggaagttgcttggcccgacaatcacagcccctgtcaggggccctgtggccagtgcctcctcctctcttggccccaccttatcctgtcttgcctgctgcctgggagaccagccatccagagaagcacctggaagagtctcgggccctcctgcaataaaggccgggaggccctgtgggcagtgggctcagcctctccccaggggggcagctcccccacggctcctcactccccgcctgcctgcccagccgccagccatgccaaggacaacagcaatagtcccctggggctctcccagcggccctcagccatagatggcaaggtgggcagcctgcccccccatgggaagtctcttctgtatccaggtctgctttccacctcccttcagattccttttggcacattctcctcttgaggaagtaccagtctttctgaaactaagagagggagggcagcgtcctttaaaaataccaaaaatgtttacagagttgggtgctgagctgcagggctcaggcctgaccagtcataaccaaagggtgaggcaggccttgctgactgccaccccccaggcctgttagaatagaagccttagtcccactcccaccacacccccacgccccaccacctgccttctctttgatttctaaagagggattcagcagagaccccccacccctccctggctcggtctgagtcccactgcccaccccatcacagccttcacgtctcagcccctcccgtctggtctgtccgtgtgccgtctgtttctctgggccatgtgtgagcagtgtccccatctccccatccgtccctgctgtccccgcatcattgggcctgagtgtgctctgtatacaacgtcatgtctgttacaccaattaaagaagcgggaaggcttc

SEQ ID NO: 8485 - DNA, 1786 bp, Homo sapiens
atgcctcccggtaaccaggtgtcgtcagcaggagctttctggatctgtgtcccctgtgtcacttcctttctttgtttcttcacacacttcctgagatgtgaaccctgcctgggacaatcgcttttgttcctggagacagtgtacagagcttggaattctctgaggggttcctgagatggcgccattcaagccagggggttgaatagcttgactcttcatttcagcagcacgattgacccctcagtggatcagcagcgattcattccacacgtatttagggtccttggtgaattttgtcatggttatttaaggaaccttgcctagaagtcccaacttgcagttccccatcgacgggaaggcttggactccaagatgattataaaggaatatcggattcctctgccaatgaccgtggaggagtaccgcatcgcccagctgtacatgatacagaagaagagccgtaacgagacatatggcgaaggcagcggcgtggagatcctggagaaccggccgtacacagatggcccaggcggctctgggcagtacacacacaaggtgtatcatgtgggcatgcacattcccagctggttccgctccatcctgcccaaggcagccctgcgggtggtggaggagtcttggaatgcctacccctacacccgaaccaggttcacctgtcctttcgtggagaaattctccatcgacattgaaaccttttataaaactgatgctggagaaaaccccgacgtgttcaacctctctcctgtggaaaagaaccagctgacaatcgacttcatcgacattgtcaaagaccctgtgccccacaacgagtataagacagaagaggaccccaagctgttccagtcaaccaagacccagcgggggcccctgtccgagaactggatcgaggagtacaagaagcaggtcttccccatcatgtgcgcatacaagctctgcaaggtggagttccgctactggggcatgcagtccaagatcgagaggttcatccacgacaccggactacggagggtgatggtgcgggctcaccggcaggcctggtgctggcaggacgagtggtatgggctgagcatggagaacatccgggagctggagaaggaggcacagctcatgctttcccgtaagatggcccagttcaatgaggatggtgaggaggccactgagctcgtcaagcacgaagccgtctcggaccagacctctggggagcccccggagcccagcagcagcaatggggagcccctagtggggcgcggcctcaagaaacagtggtccacatcctccaagtcgtctcggtcgtccaagcggggagcgagtccttcccgccacagcatctcagagtggaggatgcagagtattgccagggactcggatgagagctcagatgatgagttcttcgatgcgcacgaggacctgtccgacacagaggaaatgttccccaaggacatcaccaagtggagctccaatgacctcatggacaagatcgagagcccagagccggaagacacacaagatggtctgtaccgccagggtgcccctgagttcagggtggcctccagtgtggagcagctgaacatcatagagatcaaaaataagatcttcaccttgtgcccagcctgtctgctgtccctgaagataaaaagacgaaaagggaggaagcgacagtcgtctaggcagaagtgatgtggccgtggccgacaagatggccccgcgggaggcaggcggagctcagtgtgtccaataaaactgtcttggtagagcgccaaaaaaaaat

SEQ ID NO: 8486 - DNA, 485 bp, Homo sapiens
ttttttggtaataatttaacttaaataccacacagaagaaatgctacctagagctgactgttttccagtaagaagtcagcaatattaccacagttgggacacaaatatggaatcttactatgtttgcaaaggaccaaaaaggacctaagaaataaaaggaaaagtgcacactcaaaaaactgtcatcagatttgtagttagcttggaaatattctgtattttaaacttactattttctatgatccagaaacatcaattatttaacaaagaggtttatttagaggaggtaaaaaaaataggaggggaaaataccaagctgtaagagtaacaaaaagtttattttaaaatctgcaaagcatgactttgtcaacagctctagcatccagagtgtggtggattaaccctgtgtttacatacatccaaatctgttttctaaaagtatgtgttttaaatgccaaaaatgacctctatgagagaaatggaag

SEQ ID NO: 8487 - DNA, 189 bp, Homo sapiens
caactgccggcgcccgggcacacagccgacttagcgccgtccggaagcagagcacgtgcttcgtaaaaaatgaaatgactctctgcactctgaaatctttgaacatgtgcatctcctgaggcttggctgtggttttaacttctatatgccttaaatttcccaacaaacgaataaaattatgaatataaa

SEQ ID NO: 8488 - DNA, 711 bp, Homo sapiens
cactcctggactcaatctgcccacattggcttcccaaagtgctgggattatagacatgagctaccacacccagcctgtatggctgttgtgaataatatgctgttatgaacatgggcacactaaacaccattcaacttaaaaaaataatcaaagccttaagaactgaaccaaaatggcttaggtgaaaataaaataccaaactctgctctaagaaaaggaaagaacattcactgaattataccttcagcaataagcacttaatggaacttgtttcatttaaaatgcaccacaatcctgtaaattgataatcatcataccccaattttatagatgagcatggtattaggcggacctttttcaaaaggtcatacagctagtgacgaatatttccaaatttttcataacatttctttttttgagacggagtcttgctctgtggcccaggctggagtgcagtggtgcaatctcggctcactgcaagccttgcctcccaggttcacgccattctcctgtctcagcctccctagtagctgggactacaggcacccaccaccatgcccggataatgtttttgtattttcagtagagacggggcttcactgtgttagccaggatggtctcaatctcctgaccttgtgattctcccgccttggcctcccaaagtgctgggattacagacgtgagccactgtgccaggcctaacatttctgt

SEQ ID NO: 8489 - DNA, 414 bp, Homo sapiens
tgaagctgagggatcccatcccaggcccctcccagcccgttgtcttcaaggaagtgttgcgtaatcatcaggccacttcaatcttaccaaggggatgttcccctgcatgtaccacctcaatcttaccacagggatgttcacctggcacgtaccaccttaatcttaccacggggatgttcatctgcacctaccacttcaatcttaccacggggatgttcacctggcatgtaccacttcaatgttaccacggggatgttcacctggcatgtaccacttcaatctttccacagggatgttcacctgccatgtactacttcaatcttaccacggggatgatgttcacctggcatgtaccacttcaatcttaccgtgaggatgttcacctggcacgtaccactttggcttcaacgttga

SEQ ID NO: 8490 - DNA, 426 bp, Homo sapiens
ctgtgggtgtgtttcagccacctgtgatgcgtgttacaaaggcagtcacctaagatctcaccctggagctgggatccatggagctgggcaggttgaggtggttccaagttcagtacaggtggttcaaggtccctactctgagaaactgacatcaaatgaaagaagacaagtttagcgtgacagtcctttatcttcacacctcataattggcaagccacactgcttagccacattcaaagtcactggcaagtgattttattttattttcaagcgtgggacaacttaattttgtgaaatgtatattttttggtcatagcataagctaccactcctcagttctttttggctgttttacaaaccagtcaggaaatgtatggcaaaaacagcaaaaggaaagtcgattttaaaaatgtacgatgcatgttt

SEQ ID NO: 8491 - DNA, 359 bp, Homo sapiens
tactgatatgttatatcttatataatttagattacaaatcaataacattatgtctagtattcaacaaatttaaattactagtgaactccactgtgctaaacagtaaggccaccaaggtgagcaaaagcagtccctgctgtcaagaagcttagaggacagaggaatgttcaatcatagtatatatcatttgaatgtttatcttaataaagaaataaaactcagaagtagatggcctgcacattaatgtagttaatcttaaatctcaggtctgtgcaaagccccgtaagcagatcactcaactgaaagtcattgcagcatcacataccactgataatcacctgaactgcagacagagtgac

SEQ ID NO: 8492 - DNA, 1742 bp, Homo sapiens
gttaagaagcttcctgcagggggtgagaaattggactcaatgtcctcctgaaaagttcagctacagaaaggctgggtccctttggtacactcctcaccttgatccttagcaccgttgttaagtatactgattaatccaatcagtaagggcctgcggagtgagctgggctctggagtagatgtgattcaagacagaaaagcaggagggtacgccactcagatctcaaggcacttaggatccagttaaaggtactattaagacattatcagctgaagagtcagactgacctaagtttaaatctgggctgagccacaactagaccaggctttctcaacttcggcacccctgacttttttttgtgtgtgtgaaatggagtctcatctgtctcccaggctggagtgcagtggtgtgatctcggctcactgcaagctctgcctcccaggtttatgccattctcctgccttagcctcctgagtaactgggacaataggcgtccgccaccacgcctggctaattttttgtatttttagtagagatgggatttcaccgtgttaaccagggtggtctcgatatcctgacctcatgatccgcccgcctcggcctcccaaagtgttgggattacaggcgtgagcctctgtgccagcctttttgtattttttttttttggagacagggtctggttctattgcccaggctggagtgcagtgatgtgattagggctcactgcagccttgacctcctgggcataattgattctcctgagcttaaatgattctcccacctcagtcccccaagtataagagctgggactacaggcatccggccatcatacctgggctaatttttgttttgttttgttttgtagagactaggttttgccatgttgtccaggctggtctcgaactcatgagtttaagtgatcctcctatctcagccttcccaaagtgctggcattgtaggtgtgagctactgcacctggccaactttgccacaaatgaccagataattctttgttgtagggggtgttctgtgaatcacggatgttgggcagcatccctggcctctatctactagattccagtgccttccccgccaattgtgacaaccaaaaatgttgacagacattgccaaaagttcactgagcaaagaattgccaagattgtccgtccctggttggaagccactggactagcttgtatgacttttggcagacaaactaaactcttggtattagttccatcttttttaatgtatgacaacaatacctgctgtaagaatgaaatgaaatagcattaatcaagcttctaccagggagcctggcacaaagtagacagacacatctgagaaagaaccttcacacccaggttagtgggggaggcagggaagcttcaaaaagtgggaagcatttgacgtcgacttgaaggatgagaacatattttccaaaaggactagaagtattgtgattattattattcatcctccttcctctacccttgcaggcctcctctcacttgctggtcactccttcttctctcctgtaaaaatcaaccaaagagactcttctaaatcctcagctcctggaaacaggagatttggttctggcctcacatttaaccctccctgcgcctgctgctccaggagtgcatagactcgccccttgttctggagcaggccaagaatgacccgtttccccaccttgttaagtatgaattggaaatttgtacccatgcagtttccttgca

SEQ ID NO: 8493 - DNA, 333 bp, Homo sapiens
tgccaaatgcctcctgtggaacttccttaagtatctatgaatgtgtggcaagtagactaggatgggtaagctggaaagacccaggtttcctatccaaatggacgtggctttgagttgcaagagtcacaacccattagttggatggtcctgaacaagtcacacagcccccagtgatgctgtccctcatgtgtcaactggataaggtggcccagtacacaaggattcccaaggcaggctgtcattgtgtgtgccctctgcatcatggagatcctcagatgtctcttccccatctgccttggatcccttgttcatgttatggaagaagtgataact

SEQ ID NO: 8494 - DNA, 483 bp, Homo sapiens
acaatttcctaacatgggcctctgatattagggagattctggagttacatatcttgataatttaggagtaaatctcccttagcaacagttaattatgccttaatttattttgtgttgctaaagagcaaatgatgaacccattgagttgctgttgaagctttgatttgaatttagtaattcctgattgcctgtatcatgggactttctctagtattagacaatcttccagttcctcaaatgaggcatgttctattaggcagcaactggtgtgtttgagaccatttgtaagtattttaggtgatagacaataatacacatagtgccaatgataaagtcaatccagtcacaggaccacccagaaaatattggggactctaacaaaaggagcaacaaaatccaaaacaatcataacaaaaaatgaaagagggaacactgaatttgatgaattaaaaattatgagaagatttttgttggaaatattca

SEQ ID NO: 8495 - DNA, 303 bp, Homo sapiens
aatacattctgaagagagagaagtttggaagggagctgatatgtaaggatgctgacgtggctcttggggaggagaagaaaagactggaacgagaggttgaggccactttgtggaaagtcttaaaggtcaatcttgactgaagaattgggatttcttttcatccatgtctgcttgtgaactgcccactcttcagaatacccaattgctccatcatggatcactgggtctactgaactggaactgttctgatggattgacactgtagtgggaagagggagctctcgatgacgagatggcatggtt

SEQ ID NO: 8496 - DNA, 316 bp, Homo sapiens
cttggtcaattatcagttacacaggcagacctgtagtggccaggctgggcgtggtgccttacgccagcactttgggaggccaaggcaggtggatcacttgaggccaggagttagagaccagcctggccaacatggcgaaaccccgtctctactaaaaatacaaaaattagctcggtgtggtggtgcatgcctttaattccagctactagggaggctgaggcacgagaatcacttgaagccaggaggcagaggttgcagtgagctgagaagatcacactgttgtactccagcctgagcaacagagcaagactgtctt

SEQ ID NO: 8497 - DNA, 265 bp, Homo sapiens
ggtgtacaccttagagaagagacagacaagtatatgacgtaatcggataaatgtctcgacaatctattacagcagctcaacaaagggccacctaattgaacctggaagtatcaggaaggcttcctggaaaacgtgatagctaagtggagtttttaacaatagtagtaataataacaaccttgttattctaaatggttcatatttattttttaataaaaaatatttcatattttttatttatgaataaatatttaatatttgcagc

SEQ ID NO: 8498 - DNA, 403 bp, Homo sapiens
gcccctctgtcttccctcctgccctctgctctgctaacccgcatccccccactggcattggcctcggcctcttacacccctcagcctgtctctccatctttatcttttccttcttattagttttgttgtgttgtgttttttatttttcattaaaaaagtttttttgtggactgggtgtggtggctcacccctgtaatcccagcactttgtggggctgaggcaaatggatcacttgagcccaggagttcgagaccagtctggccaacatggtgaaacctcgtctctactaaaaatacaaaaaattagctgggcttggtggtgcatgcctgtgattccagctactcaggaggctgaggcggagaatggcttgaacctgggaggcagaggttgcggtgagccgagg

SEQ ID NO: 8499 - DNA, 492 bp, Homo sapiens
acacagatctacttcttcacacaggtttaggaaacagctcctccatgatcttactgaaagaaacaaaagggcgactagtgagataaaccaattcttttctgcagttattcttggggctgcaactggtgctcactctccctatcctccactgttcattctaagtttccctcagccttaactattaactcaggaagtctgggtggcttacctggttggtgagactcaaacttacatacatgatcttcatgtatcaagtccaaacatttgatagtttatactcttctcaatttgaggttgctgcacatgtctcttcacagttgcagttgaggcaaggaagacccattccaatctcctgctgtggggatcacagttgattgacactcccagctttcactcccctgaatccatcactgtgtttatgctgaagccatgttgccctcaatgtgctgtcagccagtgactaagcatgacaaggacactagtctcagaata

SEQ ID NO: 8500 - DNA, 138 bp, Homo sapiens
agagttcatgaatcacgctgtatctgctcagactctagtgacatcaaagtattttaaatgaacaaaatgtctttgggaattctgctttttggcaatctggacccttctgtctgcactgtgtgtctcttgtgcaacttg

SEQ ID NO: 8501 - DNA, 396 bp, Homo sapiens
ctctgcttcccaactctttctccatgaccaccagcgtttcttctgttgctttgaaatggagggcaccatcagctttcaactacttatcaaaaatgagcaacatcattgtgctctgaatcatttgctgtaatttctcaggcaaaacctggtttgagaaataaaacctaagaatagggactgggtgtgaggtctagagaacactccgacatcaaggccaggctggccaaccctgttctgcagagcaattagctacgtcttgcagctagatggctgtgttgtttttgtttacaggtgtccaatcttttagcttccctgggccacagtggaggaagaattgtcttcggccacgcataaactacactaacactaacaatagctgatgagcgttaaaaaaaa

SEQ ID NO: 8502 - DNA, 185 bp, Homo sapiens
tcaatgtgtgagattgctgacctttggatagggttattgtggttattttttgttatttattgtttttcttttaacagtctgaccactgtgtgtagggctgctgtggttttctggaggtctgctccagaccctggtgcccttggctttttcagtatctggaagtatcaccagttaaggctgtgaaa

SEQ ID NO: 8503 - DNA, 634 bp, Homo sapiens
tttctcttactaccactggtcatctgtcatttattaagaacctactgttggtttgactgtgtgtcaaatactgaaggcttttattattagctctttaatgtcatagtcttaattgaatactttgaggcattgtgaggacactagtttctccagggcttgggttgacattgtaaactaatgtggcctagggacctgcagcgtcagcattacttagggatcttgttaaagtttggggtggtgttcttcaattgccaacatgaatggaactaaaaaagtctggtctcccaacctcttgttagctatttgatggtggccaagcctcactgtgtgtctgttgccttacgtgtcaagaatggggatcctggagcaggtaatgggggttgaaggtggaagggttgggtagatgttggtcaagggatacaaaattaaatccattatccaacatggtgactatagttaataacaatgtattatatttttgaaaattgctatgagtggattttaagtgttctcaccacaaaaagtatgtgaggtaatgcatatgttaattccctggatttaaccatttcacaaggcacacatatttcaaaataatgtgttatatgtagataaacatacacaatttttgtcaatg

SEQ ID NO: 8504 - DNA, 600 bp, Homo sapiens
acaccatgggctagtgcatcctgctgctggtgtccttgaaccaaagcgaaggcttaggggatgctcagtccttgcttccccaaagagaacagcttctttattctctgggaccagactgatgtccttgtgagcccaagaccatctctcccactccatcccattcctccaagcagcacagatataacgtgttttgtaaatgctctctctgtcctgctcattttaaactgtcttcgtcttgtagacattttatttctttcaagtctgagcctctctggaggctgcttcgtctttctgcttccttctttctaaaatggcgtggaggtggggaatggaattgtggccattcatcagctcagcgtcttgaggatgatgatgaggattatgcaggcagaataatgcctcccagaggcagagagaccatgggtggagtttagaccaccagaaatctgtgttaaaaactcagtgaggtctagtgcacactttagtatttaaagcaataggaattagaggcacaaaaagcaaagcaaaacaaaacaaaactctttaaatttgaaaagaggaagaattgggccagctttgttctcctttcaagctcctgtg

SEQ ID NO: 8505 - DNA, 621 bp, Homo sapiens
gagaaaatgtgacaacccctgcttgtctcttttttcattcttcattgtttcttatttctttgtttttagctttatataacatgagagccctaccactgggtttcttaaccatttgttctttatcaaataaaaatattcataatgcaacatgcaggcacatcagtgtggtacagaactagccagctagtttactataggtaaatatacacacatgcatgcacacacacaatttttacctgagacatgtcagaagtgtttcctaaaattgtggatttttctgagtcattctggtaaagggtaggttttcaggttttaggccaagccagaagaagaaagtaaaaacagaataaacaacagggggagaaaaagagaaataccacacacacaactggaacttctggtaaaagagtgatattcttggatgcaatggaagttttaaaaaggaaaaagaaaatttataaaaagctgccacatttgtggaattcaactaaaaactgtttattattaacaaagtgatgttcaaaatttaagagttcttggcctggcatgatgacttatgcctgtaatcccagtgttttgggaggctaaggtgggaggatcacttgaggccaggaattcaaa

SEQ ID NO: 8506 - DNA, 513 bp, Homo sapiens
gcagaggttgcagtgagccgagatcacaccattgcactccagcctgggcaacaagagcaaaactccatctaaaaaaaacccacattttcatgaatatcagccatcaacaatgcagaaagtaatagactagtcttctgaattattaaccctagcaattgtcaccaagtgaaaaccttggtcactaaaacttcttggaatagcattcaaggtcttgctttaacacaaaaccccaaaacttggcggtacaaaacaaccattttctgatggatcgggaatccatgtctgaagtctcagctaagaagactccaaggctgggttccaggctggaactgcctggggcatctccccacacacacacactggtacttggctggaccaccagcaggttctactccccgtgtttcttcgcagtttgtcatttgggctgatttgggtttgctcacagagtatcagccaagatcccaagatcaagtatccaaagagaacccggtgggacttatatttccttttatg

SEQ ID NO: 8507 - DNA, 306 bp, Homo sapiens
agatggggtttcaccgtgttagccaggatggtctcgatctcctgaacttgtgatccgcccgcctcggcctcccagagtgctgggattacaggcgtgagccaccgctcccggcaccacttggttctttatggctgttgagcatagctcatcctcgaagtttgtttaatgctcattttatgctgtcccacagaaaagactattgccaaagagcagagccacttttgttgaaggctgtgccactcacccagagtcccctgtgcaaaggaagggaggctcacacagagccaagggagggcagggcgcacc

SEQ ID NO: 8508 - DNA, 466 bp, Homo sapiens
attaatcaagaactaagtaggtggagagacacatacacagtgttcagtggaagacttaatgttgttaagatgccagttctccccaagtggatgtatacattcagcacaatctcattgtaaatccctgatgtcttttatcatagagatggacaaactgatcctaaagttcatatgggaatgcaaaatatcaagaaaaaccacaaggatgttagaatagaaaggaaatgtgggatggttaacaccacctaatttcagatctattacaaagcctcagaaatcaggacaggattgtatttccttaatggtaaacaaatagatgcatggtacaatagtgtccgcacatagacccacatatttatggacaactggtttttgacagatttagaaaggtaattctgtggagaatggacaaccttttcaacaaatgattctagaacaattgtatgtccatatgcaaaaaaaaaaa

SEQ ID NO: 8509 - DNA, 343 bp, Homo sapiens
ctttctatgataatgatgtttctaaagatttctaaaggttggttttcttgttttcttttaaccactaacctagtgtcagccgcaacttccatattaactgcaagtagacacactggaaaatgttaggagataccatggcagaagaaaacaaaactgtgctgttttataaaagatcatccacccatgtaattgtgatggccttaccctgatttctttatgtccctcaacactactactaattctattatcagttgacttggctattatgggtctcctccaccaggctgaagttccctgcaagcagagaggtaggtggtcacagatggctgtgcaggccactggc

SEQ ID NO: 8510 - DNA, 1141 bp, Homo sapiens
tccagaaagttcaggaaacaatgccaataaaaagccaagcaatgacctccccacttaccccccaccaaaaaaaaacaccactgagcaatatcatagtcaaatgtcagaaaatcaaaaacaaaaaaaaatcttaaaagaaatcaaggtgggagggaaccttacctacagggtagcaaaggcaagaattacatctaacttcttagaaaccatgcaagcaggaaagagtagaatgaaatatttatagcactgagagggggaaaaataacaccaacctagaattctgcaccctgaaaaagtatccttcaaagtgaaagagacaaacaaaattgaggggatttgtttccaggaaacctatgttgccaaaattatttcagaaagaaggaaaatgatccaggtaggaaacacagattagaggactggagagggaattaagtgaagattcaaaaaaaattgatttttcttattcttaattaaaagtagtttgttcaaaataataacaataacaatgtactcgattaagtatgcttccttatgtatttatgcgtgcttataagtaaaatgaatggcaacaatgagacaggaaggcggaatcagaaatatttgttattactggtaaaggcataccttggagatattacaggttcagttccagactatcgcaaaaaagcaaatgtcacaataaagtaagtcacacgaatatattggtttcccatatgcaaacattatttttacactattaagtgtgcaataccattatgtcttaaaaaaaaaaaagcacagactttaattataagtattttaccaataaaaaaatgctaatgaagtgagcacatgcaactggaaaaatggcgctgataccctggcaaatacggggttgccataaaccttcaatttgttcattaaaacacacacacacacacacacacacacaaacacacagtatctgcaaagtgaaagaaagtgagccacaataaaacgaggtataatacctgtatgtgcactacctctgtagtgttatttgaaagtggacatggattaactgcaaatatttgtggcaaactccagtgtaaccctttaaaagctaaaaaacgtttaccaaatatgctaagaaagaagataacagtggaaatcatataaaatg

SEQ ID NO: 8511 - DNA, 318 bp, Homo sapiens
aggtggttatcaccaggctaaaactggacaaggatcggaaaaaaattcttgaacgcaaagccaagtctcgacaagttggaaaagagaaaggcaaatataaagaagaacttattgagaaaatgcaggaataaatagaacctgttgtgcaaccacggtttaaccggagattttgaggctagggtgtgtttctttcgaacttttcggaatgtctggaacatttcatttcctgttttgttacctgtgcctctgtaaatctacttttgcaattttaagtaataattttatgaataaaaatgggaaatgcttcctaattccaca

SEQ ID NO: 8512 - DNA, 389 bp, Homo sapiens
aagaagttagcatgaactttccctcaaactatccccattgcagaaagataatcagcacataattagagaggagtgaatttccttaccaatgtttgtagtggatgtgaaagttaaccaagaccaggagctacaacatgtctaggaggaattcatggtaaagtaaaaagaggcaacctggttagctcccacatttggactcaaggatctcagaagagtgaagcacctgaaggtttctgggagtttctgtgggagctgcagaatctttgcttctgtttctgattgaaaatgtatcagaatcctcagaaaaggaggtgttattctctgatgtgctcagcctgggttgacagctgagggatcactgggaggagctgggccatgaaacctcctgc

SEQ ID NO: 8513 - DNA, 1177 bp, Homo sapiens
tttttttttgcctggaattttttgtactttccccctgctacggctttagtgtgggaagtggaattcatttttctagcctggagttgagctgtggttgagatttttttattgcgatggttaccttccatgtaccacaggcttcaagttttcctagcagtcctcgtgtgtagggtggaacagatctgcagaaggtgattcttagtgtcttctctaccttcagctctaggtctttcttttgttttgcaccttagagagggtctgtctttatactctcacagttcttccagccatattccactgtcactggtccttcggtgccttttcgcctgtttgggagggagcagggagttagcaaggactccatagttgtttaagcctcagtccaggcagacactcgtgtccctgagtctcaggactgtggccttcccactgctcctgcacccccacctaacccttcagagtgtttttttctgttcccttcccctctcttcattgactttaaccaacgccctaaggttggcagggttcattgtcttcccccacccccattgagtcttttgtttcatagaggagaagggtccaggtggggttgctggtccctcccatagcagctgctgttaccctgtcataggtctacagcaggagggtcagtctgtcaggattctcactggtcttttatgtgggcatttggtgaggtccttggagaaaagccagtaagaagatgtgaaccccctgactccacagaggccctatactttctcaccagcctcactgggcccccaccaacccattcactattttagctaaatgcttactggcatctggctgcatctgccccaggtaaggaaggactgtcctttctctccctgtatcagcctgtctctccttagattgcaggctagttggctgccccacctctctcatggatttaagaagagccatgaccttgtagtttgccctgcttgagccagagactttttccggttctgcaccatgaatagaaacttctttcaataattgcctttgaactaagtgccatggcttacacctgtgatcccagctatttgggagactgaggcaggagaattacatgaacccaggagttcaaggccacagcaagctctgatggcaccactgcactccagcctgggagacagagcaaaacccaactctttaa

SEQ ID NO: 8514 - DNA, 1310 bp, Homo sapiens
tttttttttgcctggaattttttgtactttccccctgctacggctttagtgtgggaagtggaattcatttttctagcctggagttgagctgtggttgagatttttttattgcgatggttaccttccatgtaccacaggcttcaagttttcctagcagtcctcgtgtgtagggtggaacagatctgcagaaggtgattcttagtgtcttctctaccttcagctctaggtctttcttttgttttgcaccttagagagggtctgtctttatactctcacagttcttccagccatattccactgtcactggtccttcggtgccttttcgcctgtttgggagggagcagggagttagcaaggactccatagttgtttaagcctcagtccaggcagacactcgtgtccctgagtctcaggactgtggccttcccactgctcctgcacccccacctaacccttcagagtgtttttttctgttcccttcccctctcttcattgactttaaccaacgccctaaggttggcagggttcattgtcttcccccacccccattgagtcttttgtttcatagaggagaagggtccaggtggggttgctggtccctcccatagcagctgctgttaccctgtcataggtctacagcaggagggtcagtctgtcaggattctcactggtcttttatgtgggcatttggtgaggtccttggagaaaagccagtaagaagatgtgaaccccctgactccacagaggccctatactttctcaccagcctcactgggcccccaccaacccattcactattttagctaaatgcttactggcatctggctgcatctgccccaggtaaggaaggactgtcctttctctccctgtatcagcctgtctctccttagattgcaggctagttggctgccccacctctctcatggatttaagaagagccatgaccttgtagtttgccctgcttgagccagagactttttccggttctgcaccatgaatagaaacttctttcaataattgcctttgaactaagtgccatggcttacacctgtgatcccagctatttgggagactgaggcaggagaattacatgaacccaggatgcagtggcgcaatctcggctcactgcaagctccgcctcccaggttcacgccattctcctgcctcagcctcccgagtagctgggactacaggcatccgccaccacacccggctaattttttgtatttttagtagagacggggtttcaccgtgttagccaggatggtctcgatcttctgacctcatgatccacctgcctcagcctccca

SEQ ID NO: 8515 - DNA, 355 bp, Homo sapiens
cctggccaacatggtgaaaccccatctctactaaaaaaacaaaaaaaatagctgggcatagtggcaggcgcatgtaatcccagctactcaggaggctgagacaggagaatcgcttgaacccgggaggcggaggttgcagtgagccgagattgtgccattgcactccagcctgggcaacaacatcaaaactctgtctactaaattgaatatctgcacaccctatgagccagcaagtccacttctaggtttacagccaacagaaatgcatgcagatgtaccaagaaacaagtacagtactcagcagccattgctctttccatatgtccatcaacaagagaatggatgaatatatgtt

SEQ ID NO: 8516 - DNA, 484 bp, Homo sapiens
agtttataagttctgaaatcatacactttgtgaattcaaataaaattattttttagttctgtggtctagaataagacatgtagagattacatgacttatactttcctcatctttaatgtagggatagtaatagactctgcctcataaaattgctttgaggattaaattaaataatgcatgcctaaggttttggcctgatttctgactcaataactattagttcctgttgttgttgttgttgaaataaaaatttaattagaaaaaaattttaggccaggcacggtggctcatgcctgtaatcccaacactttgggaggccaaggtgagtagattgcctgaggtcaggagttcaagaccagcctggctaacatggtgaaaccccgtctctactaaaaatacaacaactagctggacatggtggtgcatgcttgtagtcccagctacttgggaggctgaggcagaagaatcactggaacccgggagg

SEQ ID NO: 8517 - DNA, 356 bp, Homo sapiens
aaataacagtgggtgatctactttccgaacagcgtgagaaagatccagagaatgttagttttgcactgaagccgcttcaacttctacttttccaatattacaggaagtttcctagcattgagaggaaaaagaaacagtggccagatactttctcctaaaaatatacaggaaggacaatgtggaggccaagactaatctgggtgatgagctccaggcctgcctcaaaacaggagctgatgggagtgagtttctgatcttcttccaaggttgtttcaatatccaaagtaggtcctccatggcagctgctattcaatcagccacatttcctgaactggatatttttactttgcaggaaa

SEQ ID NO: 8518 - DNA, 341 bp, Homo sapiens
gttttaatgtaggacaagtttgttcttgtctctggactttcctcattcccttccagtgctgttagaagaattatatttgacattacacaagtgatattgttgcattaacatatagcattattataatcattgtaaggtcctgaaataagagactcatgcctgtttaattaaattatatggatcatattttgagctaaaaatactcatgatctaacaaatgatttattttttgtttgtgagtttaaatagcaagacttcaaatgtataaaatgaaataataatcaatcatgtttttaactaaaggtaatattgaacagaataaaattaaataaaatatcagt

SEQ ID NO: 8519 - DNA, 471 bp, Homo sapiens
agagactaatgatgataagtcaatatctccatattcttaaagaagacacttgccggccgggcgcgctggttcacacctgtaatcccagcactttgggaggctaaggcaggtggatcacctgaggtcgagagtttgagaccagcctggccagtatggtgaaactccgtctctaataaaaatacaaaagttagccaggcatggtggcacatgcctgtagtcccagctgctcaggaggctgaagcagaagaattgcttgaacccggaaggtggaggttgcagtgagccaagactgtgccactgcactccagcctgggtgacagagcaagactccatctcaaaaaaaaaaaatacaaaaattagccaggtgtggtggcatgcacctgtagtcccagctactcgggaggctgagacaggagaattgcttgaacctgggaggcggaagttgaagtgagccgagatcatgccactgca

SEQ ID NO: 8520 - DNA, 366 bp, Homo sapiens
agaaactcaatgagatatgttgtcatcttccctgttttatggatgaagttctaagtagaggttcggagaagatgttcagcctcagaacgtagccaccttgctgtgagaaagcccaaccatcttgtacagcgagaccacatggagaggcgcatgtggaaaggaacggaggctacaagccgatagccagcatcgactgccaggcacggagagtgagtcttcagatgaatccagcctcagcctagagtcttttgtctcaggccccagacactgtggagcagggacaagccatccccactgtgtcccacccgcattcctgatccacagaatctatgagcacaataaatagttgctttatggcagagaaac

SEQ ID NO: 8521 - DNA, 4453 bp, Homo sapiens
cctgagagcatatcccgtggagtaccgtacacctgggaaaggcgggtttggtcccagccccagagggatctcagctgtcgctcggggcccgacctatctcggtccatctaagggtccgaggcacagccccgccaagaggccacaagtgtcagctgcttccgcgggaagggtgagggctaccggggcacagccaataccaccaccgcgggcgtaccttgccagcgttgggacgcgcaaatcccgcatcagcaccgatttacgccagaaaaatacgcgtgcaagtgaggtgggcgggggggcgggcgttgggacgtgctgctgcgggtgagacgggaggagggtagtcacgggcttagggctggaggctggcgggctagggctgagtggagcgcctgcttagagaccttcgggagaacttctgctggaacctcgacggctcagaggcgccctggtgcttcacactgcggcccggcacgcgcgtgggcttttgctaccagatccggcgttgtacagacgacgtgcggccccagggtgaggcccaagcttgggggctacagagccggggctggaagcctggaaccggagggccggggcgaggtctcggcctgatggctgcccgcaccggccgcagactgctaccacggcgcgggggagcagtaccgcggcacggtcagcaagacccgcaagggtgtccagtgccagcgctggtccgctgagacgccgcacaagctgcagtgagtccctggtgctcccggccccgccagggccctaaccctggggcggcatgctttgatgtctgggaccagagcctggaaatggttgagactaccctgccacgattttgctcccgctcccgcctcggttcacgtttacctccgaaccacatgcacaactggaggagaacttctgccagacccagatggggatagccatgggccctggtgctacacgatggacccaaggaccccattcgactactgtgccctgcgacgctgcgctgatgaccagccgccatcaatcctggacccccccagaccaggtgcagtttgagaagtgtggcaagagggtggatcggctggatcagcgtcgttccaagctgcgcgtggctgggggccatccgggcaactcaccctggacagtcagcttgcggaatcggcagggccagcatttctgcgcggggtctctagtaaaggagcagtggatactgactgcccggcagtgcttctcctcctgccatatgcctctcacgggctatgaggtatggttgggcaccctgttccagaacccacaacatggagagccaggcctacagcgggtcccagtagccaagatgctgtgtgggccctcaggctcccagcttgtcctgctcaagctggagagatctgtgaccctgaaccagcgtgtggccctgatctgcctgccgcctgaatggtatgtggtgcctccagggaccaagtgtgagattgcaggctggggtgagaccaaaggtacgggtaatgacacagtcctaaatgtggccttgctgaacgtcatctccaaccaggagtgtaacatcaagcaccgaggacatgtgcgggagagcgagatgtgcactgagggactgttggcccctgtgggggcctgtgagggtgactacgggggcccacttgcctgctttacccacaactgctgggtcctgaaaggaattagaatccccaaccgagtatgcgcaaggtcgcgctggccagccgtcttcacgcgtgtctctgtgtttgtggactggattcacaaggtcatgagactgggttaggcccagccttgacgccatatgctttggggaggacaaaacttgtaagtacagtcaaggacaagacttgtactcaaggttgagatttaataaaattaatatttttactacttcaccaaggactttcttaaacgaaaatggtttttccccctgcaagtaaacagtaatgaagaagagaattattcctagtgcagtttgttttcatggtcttaatttttgctaagactccactgtttttgccttatcaatacaagtgccaacacagtgaaaaggcaaatatcatcttagtattactctgaaaatagttctgagctaatggcctactgaaaggaaaagagtggctcctgctattctattagacttattacaattatcttaagtattctttctaccctcctttaattgaatggaaacagggatggattggaagagctgtttttctcctttctttcccccggcaatatttaccatttaatgccacttactaacactcaaagaaacaaaaccaaacttctcaattgacagtgcagtgacccaacaaagacacgggttcttgaattcaaagtggagcaggagagacggtaaatacacatttactttaatatatatatatttattatttatgtgtttaaagcacaaattagtttggtaaaaaacatctcatgtctgttttatttccacatccctgagactgacaatgggatgcctatcaattaattcatttagagagccatacaccacaagaaataaattatttgtcctctggagcttgtcacagggggatttttaaaaaaccattaaacagaaagacaactgtgcatcttagaaagataaaaggccaattcttcctctccggctgataggttcttaataatagtgatatctactaataaggtgttttacatagtgtaaagcatgttcacatacaaattacttagcctctttgagcctcagttttcttatatgtaaaactggattaatagtacattttgtgtttaaaaagataatgtatatgaagtgtttaccatttttgcttggcatctagttcagttctcagtaactgatgtggtggtggtggtggtcatagtagcagtaagatccgtagtaatagtagcagcagttgttttagaaattagtaactgaggcctggcaaagttaaaggctctttcattaacacccagaggggaagaaatgaagctggtcttcagaggcaggctattttcactctgtgtcccaaattttcccccctagaccgtttttatacttctggggcctcagaaaatattctcagctattctgttagcttgatctcctaccatctgagagtgggcttccttcaaacaaccaaatttccaggtatttctaaactgcccttcccctacaccattctttggttcagtatttcaagacccctaagagaaatggtacatttacatgtaagcacaggatagtgaagtatttacaacaagtgctttggagccagcaaatatgaatcagaatccagctttcctttcctacatacatgacattgggcagctaatttctaagattttacttctttatctatgaaagtggagtactagtacttgctctgtgcaactgtgatggttgttacatgaggtagcatctagaagcagcttgcacattgccagacacccagtggaaggtcaatgaatgactatttgaggactaactattacagaaatgtttactcttctgagtcctgatttctagtctcctggactaaataggttcactgttttcctcccggttcagtttccagacacatcacagaattataagaatattaaaaactcaggcttatacctacacaggattttctataaccctctttctgctttgagctcctaaagctatttcatagatgaccttatttttaaatagagggggcagttgaaaatcagtgaacgggcctaccccctaatgatttttttctcagacctaattataataattagcattataaagtgctaattatctttggacacagaggacctgcacaccagagacagaggtccgcattaagtgtggatttcactttcttcagttgtgagatttctcttttttcttctttgtaatgatgcaaagatatatcttccaccaagcctcatttaaaagctttttccagttaaggaaactatctcttggccatccacagccagactgcatattgagattatggatattcaaagaaattgtctttcctttgtatattgtcataactttttgtgaaatgtttgttttatagttccaggccagcacctagaacctggctagaataaaaaactgcagaaatcatgagtttcttgtttggatgaaagagcacacctattaacaaatgatagacggctatcctactgtgagtcctgaaaactggtgatgtgattgttgaatgggttaggggtatagcagagaaactcagtgtgggctacatacaatttcagcttgaatcacacttaacagatcctctgttccaaccatttaaatttacaaagaagaaactaaggcacagaactacttgagaagagaagcagaattgaaaactagagctcctgattgttctcaaaataatttttatcatactgcatcgggttctaagtgagagggcttcttatttagtaatgccaaggtcatgtgttaacatgt

SEQ ID NO: 8522 - DNA, 4458 bp, Homo sapiens
ggttcctcgaccaagtctggacgacaactatgccggaatcctgacggctccgagcggcatggtgctacactacggatccgcagatcgagcgagagttctgtgacctcccccgctgcgggtccgaggcacagccccgccaagaggccacaagtgtcagctgcttccgcgggaagggtgagggctaccggggcacagccaataccaccaccgcgggcgtaccttgccagcgttgggacgcgcaaatcccgcatcagcaccgatttacgccagaaaaatacgcgtgcaagtgaggtgggcgggggggcgggcgttgggacgtgctgctgcgggtgagacgggaggagggtagtcacgggcttagggctggaggctggcgggctagggctgagtggagcgcctgcttagagaccttcgggagaacttctgctggaacctcgacggctcagaggcgccctggtgcttcacactgcggcccggcacgcgcgtgggcttttgctaccagatccggcgttgtacagacgacgtgcggccccagggtgaggcccaagcttgggggctacagagccggggctggaagcctggaaccggagggccggggcgaggtctcggcctgatggctgcccgcaccggccgcagactgctaccacggcgcgggggagcagtaccgcggcacggtcagcaagacccgcaagggtgtccagtgccagcgctggtccgctgagacgccgcacaagctgcagtgagtccctggtgctcccggccccgccagggccctaaccctggggcggcatgctttgatgtctgggaccagagcctggaaatggttgagactaccctgccacgattttgctcccgctcccgcctcggttcacgtttacctccgaaccacatgcacaactggaggagaacttctgccagacccagatggggatagccatgggccctggtgctacacgatggacccaaggaccccattcgactactgtgccctgcgacgctgcgctgatgaccagccgccatcaatcctggacccccccagaccaggtgcagtttgagaagtgtggcaagagggtggatcggctggatcagcgtcgttccaagctgcgcgtggctgggggccatccgggcaactcaccctggacagtcagcttgcggaatcggcagggccagcatttctgcgcggggtctctagtaaaggagcagtggatactgactgcccggcagtgcttctcctcctgccatatgcctctcacgggctatgaggtatggttgggcaccctgttccagaacccacaacatggagagccaggcctacagcgggtcccagtagccaagatgctgtgtgggccctcaggctcccagcttgtcctgctcaagctggagagatctgtgaccctgaaccagcgtgtggccctgatctgcctgccgcctgaatggtatgtggtgcctccagggaccaagtgtgagattgcaggctggggtgagaccaaaggtacgggtaatgacacagtcctaaatgtggccttgctgaacgtcatctccaaccaggagtgtaacatcaagcaccgaggacatgtgcgggagagcgagatgtgcactgagggactgttggcccctgtgggggcctgtgagggtgactacgggggcccacttgcctgctttacccacaactgctgggtcctgaaaggaattagaatccccaaccgagtatgcgcaaggtcgcgctggccagccgtcttcacgcgtgtctctgtgtttgtggactggattcacaaggtcatgagactgggttaggcccagccttgacgccatatgctttggggaggacaaaacttgtaagtacagtcaaggacaagacttgtactcaaggttgagatttaataaaattaatatttttactacttcaccaaggactttcttaaacgaaaatggtttttccccctgcaagtaaacagtaatgaagaagagaattattcctagtgcagtttgttttcatggtcttaatttttgctaagactccactgtttttgccttatcaatacaagtgccaacacagtgaaaaggcaaatatcatcttagtattactctgaaaatagttctgagctaatggcctactgaaaggaaaagagtggctcctgctattctattagacttattacaattatcttaagtattctttctaccctcctttaattgaatggaaacagggatggattggaagagctgtttttctcctttctttcccccggcaatatttaccatttaatgccacttactaacactcaaagaaacaaaaccaaacttctcaattgacagtgcagtgacccaacaaagacacgggttcttgaattcaaagtggagcaggagagacggtaaatacacatttactttaatatatatatatttattatttatgtgtttaaagcacaaattagtttggtaaaaaacatctcatgtctgttttatttccacatccctgagactgacaatgggatgcctatcaattaattcatttagagagccatacaccacaagaaataaattatttgtcctctggagcttgtcacagggggatttttaaaaaaccattaaacagaaagacaactgtgcatcttagaaagataaaaggccaattcttcctctccggctgataggttcttaataatagtgatatctactaataaggtgttttacatagtgtaaagcatgttcacatacaaattacttagcctctttgagcctcagttttcttatatgtaaaactggattaatagtacattttgtgtttaaaaagataatgtatatgaagtgtttaccatttttgcttggcatctagttcagttctcagtaactgatgtggtggtggtggtggtcatagtagcagtaagatccgtagtaatagtagcagcagttgttttagaaattagtaactgaggcctggcaaagttaaaggctctttcattaacacccagaggggaagaaatgaagctggtcttcagaggcaggctattttcactctgtgtcccaaattttcccccctagaccgtttttatacttctggggcctcagaaaatattctcagctattctgttagcttgatctcctaccatctgagagtgggcttccttcaaacaaccaaatttccaggtatttctaaactgcccttcccctacaccattctttggttcagtatttcaagacccctaagagaaatggtacatttacatgtaagcacaggatagtgaagtatttacaacaagtgctttggagccagcaaatatgaatcagaatccagctttcctttcctacatacatgacattgggcagctaatttctaagattttacttctttatctatgaaagtggagtactagtacttgctctgtgcaactgtgatggttgttacatgaggtagcatctagaagcagcttgcacattgccagacacccagtggaaggtcaatgaatgactatttgaggactaactattacagaaatgtttactcttctgagtcctgatttctagtctcctggactaaataggttcactgttttcctcccggttcagtttccagacacatcacagaattataagaatattaaaaactcaggcttatacctacacaggattttctataaccctctttctgctttgagctcctaaagctatttcatagatgaccttatttttaaatagagggggcagttgaaaatcagtgaacgggcctaccccctaatgatttttttctcagacctaattataataattagcattataaagtgctaattatctttggacacagaggacctgcacaccagagacagaggtccgcattaagtgtggatttcactttcttcagttgtgagatttctcttttttcttctttgtaatgatgcaaagatatatcttccaccaagcctcatttaaaagctttttccagttaaggaaactatctcttggccatccacagccagactgcatattgagattatggatattcaaagaaattgtctttcctttgtatattgtcataactttttgtgaaatgtttgttttatagttccaggccagcacctagaacctggctagaataaaaaactgcagaaatcatgagtttcttgtttggatgaaagagcacacctattaacaaatgatagacggctatcctactgtgagtcctgaaaactggtgatgtgattgttgaatgggttaggggtatagcagagaaactcagtgtgggctacatacaatttcagcttgaatcacacttaacagatcctctgttccaaccatttaaatttacaaagaagaaactaaggcacagaactacttgagaagagaagcagaattgaaaactagagctcctgattgttctcaaaataatttttatcatactgcatcgggttctaagtgagagggcttcttatttagtaatgccaaggtcatgtgttaacatgt

SEQ ID NO: 8523 - DNA, 4226 bp, Homo sapiens
ggttcctcgaccaagtctggacgacaactatgccggaatcctgacggctccgagcggcatggtgctacactacggatccgcagatcgagcgagagttctgtgacctcccccgctgcgtcacgggcttagggctggaggctggcgggctagggctgagtggagcgcctgcttagagaccttcgggagaacttctgctggaacctcgacggctcagaggcgccctggtgcttcacactgcggcccggcacgcgcgtgggcttttgctaccagatccggcgttgtacagacgacgtgcggccccagggtgaggcccaagcttgggggctacagagccggggctggaagcctggaaccggagggccggggcgaggtctcggcctgatggctgcccgcaccggccgcagactgctaccacggcgcgggggagcagtaccgcggcacggtcagcaagacccgcaagggtgtccagtgccagcgctggtccgctgagacgccgcacaagctgcagtgagtccctggtgctcccggccccgccagggccctaaccctggggcggcatgctttgatgtctgggaccagagcctggaaatggttgagactaccctgccacgattttgctcccgctcccgcctcggttcacgtttacctccgaaccacatgcacaactggaggagaacttctgccagacccagatggggatagccatgggccctggtgctacacgatggacccaaggaccccattcgactactgtgccctgcgacgctgcgctgatgaccagccgccatcaatcctggacccccccagaccaggtgcagtttgagaagtgtggcaagagggtggatcggctggatcagcgtcgttccaagctgcgcgtggctgggggccatccgggcaactcaccctggacagtcagcttgcggaatcggcagggccagcatttctgcgcggggtctctagtaaaggagcagtggatactgactgcccggcagtgcttctcctcctgccatatgcctctcacgggctatgaggtatggttgggcaccctgttccagaacccacaacatggagagccaggcctacagcgggtcccagtagccaagatgctgtgtgggccctcaggctcccagcttgtcctgctcaagctggagagatctgtgaccctgaaccagcgtgtggccctgatctgcctgccgcctgaatggtatgtggtgcctccagggaccaagtgtgagattgcaggctggggtgagaccaaaggtacgggtaatgacacagtcctaaatgtggccttgctgaacgtcatctccaaccaggagtgtaacatcaagcaccgaggacatgtgcgggagagcgagatgtgcactgagggactgttggcccctgtgggggcctgtgagggtgactacgggggcccacttgcctgctttacccacaactgctgggtcctgaaaggaattagaatccccaaccgagtatgcgcaaggtcgcgctggccagccgtcttcacgcgtgtctctgtgtttgtggactggattcacaaggtcatgagactgggttaggcccagccttgacgccatatgctttggggaggacaaaacttgtaagtacagtcaaggacaagacttgtactcaaggttgagatttaataaaattaatatttttactacttcaccaaggactttcttaaacgaaaatggtttttccccctgcaagtaaacagtaatgaagaagagaattattcctagtgcagtttgttttcatggtcttaatttttgctaagactccactgtttttgccttatcaatacaagtgccaacacagtgaaaaggcaaatatcatcttagtattactctgaaaatagttctgagctaatggcctactgaaaggaaaagagtggctcctgctattctattagacttattacaattatcttaagtattctttctaccctcctttaattgaatggaaacagggatggattggaagagctgtttttctcctttctttcccccggcaatatttaccatttaatgccacttactaacactcaaagaaacaaaaccaaacttctcaattgacagtgcagtgacccaacaaagacacgggttcttgaattcaaagtggagcaggagagacggtaaatacacatttactttaatatatatatatttattatttatgtgtttaaagcacaaattagtttggtaaaaaacatctcatgtctgttttatttccacatccctgagactgacaatgggatgcctatcaattaattcatttagagagccatacaccacaagaaataaattatttgtcctctggagcttgtcacagggggatttttaaaaaaccattaaacagaaagacaactgtgcatcttagaaagataaaaggccaattcttcctctccggctgataggttcttaataatagtgatatctactaataaggtgttttacatagtgtaaagcatgttcacatacaaattacttagcctctttgagcctcagttttcttatatgtaaaactggattaatagtacattttgtgtttaaaaagataatgtatatgaagtgtttaccatttttgcttggcatctagttcagttctcagtaactgatgtggtggtggtggtggtcatagtagcagtaagatccgtagtaatagtagcagcagttgttttagaaattagtaactgaggcctggcaaagttaaaggctctttcattaacacccagaggggaagaaatgaagctggtcttcagaggcaggctattttcactctgtgtcccaaattttcccccctagaccgtttttatacttctggggcctcagaaaatattctcagctattctgttagcttgatctcctaccatctgagagtgggcttccttcaaacaaccaaatttccaggtatttctaaactgcccttcccctacaccattctttggttcagtatttcaagacccctaagagaaatggtacatttacatgtaagcacaggatagtgaagtatttacaacaagtgctttggagccagcaaatatgaatcagaatccagctttcctttcctacatacatgacattgggcagctaatttctaagattttacttctttatctatgaaagtggagtactagtacttgctctgtgcaactgtgatggttgttacatgaggtagcatctagaagcagcttgcacattgccagacacccagtggaaggtcaatgaatgactatttgaggactaactattacagaaatgtttactcttctgagtcctgatttctagtctcctggactaaataggttcactgttttcctcccggttcagtttccagacacatcacagaattataagaatattaaaaactcaggcttatacctacacaggattttctataaccctctttctgctttgagctcctaaagctatttcatagatgaccttatttttaaatagagggggcagttgaaaatcagtgaacgggcctaccccctaatgatttttttctcagacctaattataataattagcattataaagtgctaattatctttggacacagaggacctgcacaccagagacagaggtccgcattaagtgtggatttcactttcttcagttgtgagatttctcttttttcttctttgtaatgatgcaaagatatatcttccaccaagcctcatttaaaagctttttccagttaaggaaactatctcttggccatccacagccagactgcatattgagattatggatattcaaagaaattgtctttcctttgtatattgtcataactttttgtgaaatgtttgttttatagttccaggccagcacctagaacctggctagaataaaaaactgcagaaatcatgagtttcttgtttggatgaaagagcacacctattaacaaatgatagacggctatcctactgtgagtcctgaaaactggtgatgtgattgttgaatgggttaggggtatagcagagaaactcagtgtgggctacatacaatttcagcttgaatcacacttaacagatcctctgttccaaccatttaaatttacaaagaagaaactaaggcacagaactacttgagaagagaagcagaattgaaaactagagctcctgattgttctcaaaataatttttatcatactgcatcgggttctaagtgagagggcttcttatttagtaatgccaaggtcatgtgttaacatgt

SEQ ID NO: 8524 - DNA, 4339 bp, Homo sapiens
ggttcctcgaccaagtctggacgacaactatgccggaatcctgacggctccgagcggcatggtgctacactacggatccgcagatcgagcgagagttctgtgacctcccccgctgcgggtccgaggcacagccccgccaagaggccacaagtgtcagctgcttccgcgggaagggtgagggctaccggggcacagccaataccaccaccgcgggcgtaccttgccagcgttgggacgcgcaaatcccgcatcagcaccgatttacgccagaaaaatacgcgtgcaaagaccttcgggagaacttctgctggaacctcgacggctcagaggcgccctggtgcttcacactgcggcccggcacgcgcgtgggcttttgctaccagatccggcgttgtacagacgacgtgcggccccagggtgaggcccaagcttgggggctacagagccggggctggaagcctggaaccggagggccggggcgaggtctcggcctgatggctgcccgcaccggccgcagactgctaccacggcgcgggggagcagtaccgcggcacggtcagcaagacccgcaagggtgtccagtgccagcgctggtccgctgagacgccgcacaagctgcagtgagtccctggtgctcccggccccgccagggccctaaccctggggcggcatgctttgatgtctgggaccagagcctggaaatggttgagactaccctgccacgattttgctcccgctcccgcctcggttcacgtttacctccgaaccacatgcacaactggaggagaacttctgccagacccagatggggatagccatgggccctggtgctacacgatggacccaaggaccccattcgactactgtgccctgcgacgctgcgctgatgaccagccgccatcaatcctggacccccccagaccaggtgcagtttgagaagtgtggcaagagggtggatcggctggatcagcgtcgttccaagctgcgcgtggctgggggccatccgggcaactcaccctggacagtcagcttgcggaatcggcagggccagcatttctgcgcggggtctctagtaaaggagcagtggatactgactgcccggcagtgcttctcctcctgccatatgcctctcacgggctatgaggtatggttgggcaccctgttccagaacccacaacatggagagccaggcctacagcgggtcccagtagccaagatgctgtgtgggccctcaggctcccagcttgtcctgctcaagctggagagatctgtgaccctgaaccagcgtgtggccctgatctgcctgccgcctgaatggtatgtggtgcctccagggaccaagtgtgagattgcaggctggggtgagaccaaaggtacgggtaatgacacagtcctaaatgtggccttgctgaacgtcatctccaaccaggagtgtaacatcaagcaccgaggacatgtgcgggagagcgagatgtgcactgagggactgttggcccctgtgggggcctgtgagggtgactacgggggcccacttgcctgctttacccacaactgctgggtcctgaaaggaattagaatccccaaccgagtatgcgcaaggtcgcgctggccagccgtcttcacgcgtgtctctgtgtttgtggactggattcacaaggtcatgagactgggttaggcccagccttgacgccatatgctttggggaggacaaaacttgtaagtacagtcaaggacaagacttgtactcaaggttgagatttaataaaattaatatttttactacttcaccaaggactttcttaaacgaaaatggtttttccccctgcaagtaaacagtaatgaagaagagaattattcctagtgcagtttgttttcatggtcttaatttttgctaagactccactgtttttgccttatcaatacaagtgccaacacagtgaaaaggcaaatatcatcttagtattactctgaaaatagttctgagctaatggcctactgaaaggaaaagagtggctcctgctattctattagacttattacaattatcttaagtattctttctaccctcctttaattgaatggaaacagggatggattggaagagctgtttttctcctttctttcccccggcaatatttaccatttaatgccacttactaacactcaaagaaacaaaaccaaacttctcaattgacagtgcagtgacccaacaaagacacgggttcttgaattcaaagtggagcaggagagacggtaaatacacatttactttaatatatatatatttattatttatgtgtttaaagcacaaattagtttggtaaaaaacatctcatgtctgttttatttccacatccctgagactgacaatgggatgcctatcaattaattcatttagagagccatacaccacaagaaataaattatttgtcctctggagcttgtcacagggggatttttaaaaaaccattaaacagaaagacaactgtgcatcttagaaagataaaaggccaattcttcctctccggctgataggttcttaataatagtgatatctactaataaggtgttttacatagtgtaaagcatgttcacatacaaattacttagcctctttgagcctcagttttcttatatgtaaaactggattaatagtacattttgtgtttaaaaagataatgtatatgaagtgtttaccatttttgcttggcatctagttcagttctcagtaactgatgtggtggtggtggtggtcatagtagcagtaagatccgtagtaatagtagcagcagttgttttagaaattagtaactgaggcctggcaaagttaaaggctctttcattaacacccagaggggaagaaatgaagctggtcttcagaggcaggctattttcactctgtgtcccaaattttcccccctagaccgtttttatacttctggggcctcagaaaatattctcagctattctgttagcttgatctcctaccatctgagagtgggcttccttcaaacaaccaaatttccaggtatttctaaactgcccttcccctacaccattctttggttcagtatttcaagacccctaagagaaatggtacatttacatgtaagcacaggatagtgaagtatttacaacaagtgctttggagccagcaaatatgaatcagaatccagctttcctttcctacatacatgacattgggcagctaatttctaagattttacttctttatctatgaaagtggagtactagtacttgctctgtgcaactgtgatggttgttacatgaggtagcatctagaagcagcttgcacattgccagacacccagtggaaggtcaatgaatgactatttgaggactaactattacagaaatgtttactcttctgagtcctgatttctagtctcctggactaaataggttcactgttttcctcccggttcagtttccagacacatcacagaattataagaatattaaaaactcaggcttatacctacacaggattttctataaccctctttctgctttgagctcctaaagctatttcatagatgaccttatttttaaatagagggggcagttgaaaatcagtgaacgggcctaccccctaatgatttttttctcagacctaattataataattagcattataaagtgctaattatctttggacacagaggacctgcacaccagagacagaggtccgcattaagtgtggatttcactttcttcagttgtgagatttctcttttttcttctttgtaatgatgcaaagatatatcttccaccaagcctcatttaaaagctttttccagttaaggaaactatctcttggccatccacagccagactgcatattgagattatggatattcaaagaaattgtctttcctttgtatattgtcataactttttgtgaaatgtttgttttatagttccaggccagcacctagaacctggctagaataaaaaactgcagaaatcatgagtttcttgtttggatgaaagagcacacctattaacaaatgatagacggctatcctactgtgagtcctgaaaactggtgatgtgattgttgaatgggttaggggtatagcagagaaactcagtgtgggctacatacaatttcagcttgaatcacacttaacagatcctctgttccaaccatttaaatttacaaagaagaaactaaggcacagaactacttgagaagagaagcagaattgaaaactagagctcctgattgttctcaaaataatttttatcatactgcatcgggttctaagtgagagggcttcttatttagtaatgccaaggtcatgtgttaacatgt

SEQ ID NO: 8525 - DNA, 4571 bp, Homo sapiens
cctgagagcatatcccgtggagtaccgtacacctgggaaaggcgggtttggtcccagccccagagggatctcagctgtcgctcggggcccgacctatctcggtccatctaagggtccgaggcacagccccgccaagaggccacaagtgtcagctgcttccgcgggaagggtgagggctaccggggcacagccaataccaccaccgcgggcgtaccttgccagcgttgggacgcgcaaatcccgcatcagcaccgatttacgccagaaaaatacgcgtgcaagtgaggtgggcgggggggcgggcgttgggacgtgctgctgcgggtgagacgggaggagggtagtcacgggcttagggctggaggctggcgggctagggctgagtggagcgcctgcttagagaccttcgggagaacttctgctggaacctcgacggctcagaggcgccctggtgcttcacactgcggcccggcacgcgcgtgggcttttgctaccagatccggcgttgtacagacgacgtgcggccccagggtgaggcccaagcttgggggctacagagccggggctggaagcctggaaccggagggccggggcgaggtctcggcctgatggctgcccgcaccggccgcagactgctaccacggcgcgggggagcagtaccgcggcacggtcagcaagacccgcaagggtgtccagtgccagcgctggtccgctgagacgccgcacaagctgcagtgagtccctggtgctcccggccccgccagggccctaaccctggggcggcatgctttgatgtctgggaccagagcctggaaatggttgagactaccctgccacgattttgctcccgctcccgcctcggttcacgtttacctccgaaccacatgcacaactggaggagaacttctgccagacccagatggggatagccatgggccctggtgctacacgatggacccaaggaccccattcgactactgtgccctgcgacgctgcgctgatgaccagccgccatcaatcctggacccccccagaccaggtgcagtttgagaagtgtggcaagagggtggatcggctggatcagcgtcgttccaagctgcgcgtggctgggggccatccgggcaactcaccctggacagtcagcttgcggaatcggtgaggcacaactgcctgtctcccacagagaggagctgaggttgtgtcctctgtggttatgccactgggggctgggaatctatccctgcccccagaggtcctagccagaagatggcaggtctagcatctgtcccaggagtctgttccctgtcctaattccccactcctctaggcagggccagcatttctgcgcggggtctctagtaaaggagcagtggatactgactgcccggcagtgcttctcctcctgccatatgcctctcacgggctatgaggtatggttgggcaccctgttccagaacccacaacatggagagccaggcctacagcgggtcccagtagccaagatgctgtgtgggccctcaggctcccagcttgtcctgctcaagctggagagatctgtgaccctgaaccagcgtgtggccctgatctgcctgccgcctgaatggtatgtggtgcctccagggaccaagtgtgagattgcaggctggggtgagaccaaaggtacgggtaatgacacagtcctaaatgtggccttgctgaacgtcatctccaaccaggagtgtaacatcaagcaccgaggacatgtgcgggagagcgagatgtgcactgagggactgttggcccctgtgggggcctgtgagggtgactacgggggcccacttgcctgctttacccacaactgctgggtcctgaaaggaattagaatccccaaccgagtatgcgcaaggtcgcgctggccagccgtcttcacgcgtgtctctgtgtttgtggactggattcacaaggtcatgagactgggttaggcccagccttgacgccatatgctttggggaggacaaaacttgtaagtacagtcaaggacaagacttgtactcaaggttgagatttaataaaattaatatttttactacttcaccaaggactttcttaaacgaaaatggtttttccccctgcaagtaaacagtaatgaagaagagaattattcctagtgcagtttgttttcatggtcttaatttttgctaagactccactgtttttgccttatcaatacaagtgccaacacagtgaaaaggcaaatatcatcttagtattactctgaaaatagttctgagctaatggcctactgaaaggaaaagagtggctcctgctattctattagacttattacaattatcttaagtattctttctaccctcctttaattgaatggaaacagggatggattggaagagctgtttttctcctttctttcccccggcaatatttaccatttaatgccacttactaacactcaaagaaacaaaaccaaacttctcaattgacagtgcagtgacccaacaaagacacgggttcttgaattcaaagtggagcaggagagacggtaaatacacatttactttaatatatatatatttattatttatgtgtttaaagcacaaattagtttggtaaaaaacatctcatgtctgttttatttccacatccctgagactgacaatgggatgcctatcaattaattcatttagagagccatacaccacaagaaataaattatttgtcctctggagcttgtcacagggggatttttaaaaaaccattaaacagaaagacaactgtgcatcttagaaagataaaaggccaattcttcctctccggctgataggttcttaataatagtgatatctactaataaggtgttttacatagtgtaaagcatgttcacatacaaattacttagcctctttgagcctcagttttcttatatgtaaaactggattaatagtacattttgtgtttaaaaagataatgtatatgaagtgtttaccatttttgcttggcatctagttcagttctcagtaactgatgtggtggtggtggtggtcatagtagcagtaagatccgtagtaatagtagcagcagttgttttagaaattagtaactgaggcctggcaaagttaaaggctctttcattaacacccagaggggaagaaatgaagctggtcttcagaggcaggctattttcactctgtgtcccaaattttcccccctagaccgtttttatacttctggggcctcagaaaatattctcagctattctgttagcttgatctcctaccatctgagagtgggcttccttcaaacaaccaaatttccaggtatttctaaactgcccttcccctacaccattctttggttcagtatttcaagacccctaagagaaatggtacatttacatgtaagcacaggatagtgaagtatttacaacaagtgctttggagccagcaaatatgaatcagaatccagctttcctttcctacatacatgacattgggcagctaatttctaagattttacttctttatctatgaaagtggagtactagtacttgctctgtgcaactgtgatggttgttacatgaggtagcatctagaagcagcttgcacattgccagacacccagtggaaggtcaatgaatgactatttgaggactaactattacagaaatgtttactcttctgagtcctgatttctagtctcctggactaaataggttcactgttttcctcccggttcagtttccagacacatcacagaattataagaatattaaaaactcaggcttatacctacacaggattttctataaccctctttctgctttgagctcctaaagctatttcatagatgaccttatttttaaatagagggggcagttgataattagcattataaagtgctaattatctttggacacagaggacctgcacaccagagacagaggtccgcattaagtgtggatttcactttcttcagttgtgagatttctcttttttcttctttgtaatgatgcaaagatatatcttccaccaagcctcatttaaaagctttttccagttaaggaaactatctcttggccatccacagccagactgcatattgagattatggatattcaaagaaattgtctttcctttgtatattgtcataactttttgtgaaatgtttgttttatagttccaggccagcacctagaacctggctagaataaaaaactgcagaaatcatgagtttcttgtttggatgaaagagcacacctattaacaaatgatagacggctatcctactgtgagtcctgaaaactggtgatgtgattgttgaatgggttaggggtatagcagagaaactcagtgtgggctacatacaatttcagcttgaatcacacttaacagatcctctgttccaaccatttaaatttacaaagaagaaactaaggcacagaactacttgagaagagaagcagaattgaaaactagagctcctgattgttctcaaaataatttttatcatactgcatcgggttctaagtgagagggcttcttatttagtaatgccaaggtcatgtgttaacatgt

SEQ ID NO: 8526 - DNA, 4517 bp, Homo sapiens
cctgagagcatatcccgtggagtaccgtacacctgggaaaggcgggtttggtcccagccccagagggatctcagctgtcgctcggggcccgacctatctcggtccatctaagggtccgaggcacagccccgccaagaggccacaagtgtcagctgcttccgcgggaagggtgagggctaccggggcacagccaataccaccaccgcgggcgtaccttgccagcgttgggacgcgcaaatcccgcatcagcaccgatttacgccagaaaaatacgcgtgcaagtgaggtgggcgggggggcgggcgttgggacgtgctgctgcgggtgagacgggaggagggtagtcacgggcttagggctggaggctggcgggctagggctgagtggagcgcctgcttagagaccttcgggagaacttctgctggaacctcgacggctcagaggcgccctggtgcttcacactgcggcccggcacgcgcgtgggcttttgctaccagatccggcgttgtacagacgacgtgcggccccagggtgaggcccaagcttgggggctacagagccggggctggaagcctggaaccggagggccggggcgaggtctcggcctgatggctgcccgcaccggccgcagactgctaccacggcgcgggggagcagtaccgcggcacggtcagcaagacccgcaagggtgtccagtgccagcgctggtccgctgagacgccgcacaagctgcagtgagtccctggtgctcccggccccgccagggccctaaccctggggcggcatgctttgatgtctgggaccagagcctggaaatggttgagactaccctgccacgattttgctcccgctcccgcctcggttcacgtttacctccgaaccacatgcacaactggaggagaacttctgccagacccagatggggatagccatgggccctggtgctacacgatggacccaaggaccccattcgactactgtgccctgcgacgctgcgctgatgaccagccgccatcaatcctggacccccccagaccaggtgcagtttgagaagtgtggcaagagggtggatcggctggatcagcgtcgttccaagctgcgcgtggctgggggccatccgggcaactcaccctggacagtcagcttgcggaatcggtgaggcacaactgcctgtctcccacagagaggagctgaggttgtgtcctctgtggttatgccactgggggctgggaatctatccctgcccccagaggtcctagccagaagatggcaggtctagcatctgtcccaggagtctgttccctgtcctaattccccactcctctaggcagggccagcatttctgcgcggggtctctagtaaaggagcagtggatactgactgcccggcagtgcttctcctcctgccatatgcctctcacgggctatgaggtatggttgggcaccctgttccagaacccacaacatggagagccaggcctacagcgggtcccagtagccaagatgctgtgtgggccctcaggctcccagcttgtcctgctcaagctggagagatctgtgaccctgaaccagcgtgtggccctgatctgcctgccgcctgaatggtatgtggtgcctccagggaccaagtgtgagattgcaggctggggtgagaccaaaggtacgggtaatgacacagtcctaaatgtggccttgctgaacgtcatctccaaccaggagtgtaacatcaagcaccgaggacatgtgcgggagagcgagatgtgcactgagggactgttggcccctgtgggggcctgtgagggtgactacgggggcccacttgcctgctttacccacaactgctgggtcctgaaaggaattagaatccccaaccgagtatgcgcaaggtcgcgctggccagccgtcttcacgcgtgtctctgtgtttgtggactggattcacaaggtcatgagactgggttaggcccagccttgacgccatatgctttggggaggacaaaacttgtaagtacagtcaaggacaagacttgtactcaaggttgagatttaataaaattaatatttttactacttcaccaaggactttcttaaacgaaaatggtttttccccctgcaagtaaacagtaatgaagaagagaattattcctagtgcagtttgttttcatggtcttaatttttgctaagactccactgtttttgccttatcaatacaagtgccaacacagtgaaaaggcaaatatcatcttagtattactctgaaaatagttctgagctaatggcctactgaaaggaaaagagtggctcctgctattctattagacttattacaattatcttaagtattctttctaccctcctttaattgaatggaaacagggatggattggaagagctgtttttctcctttctttcccccggcaatatttaccatttaatgccacttactaacactcaaagaaacaaaaccaaacttctcaattgacagtgcagtgacccaacaaagacacgggttcttgaattcaaagtggagcaggagagacggtaaatacacatttactttaatatatatatatttattatttatgtgtttaaagcacaaattagtttggtaaaaaacatctcatgtctgttttatttccacatccctgagactgacaatgggatgcctatcaattaattcatttagagagccatacaccacaagaaataaattatttgtcctctggagcttgtcacagggggatttttaaaaaaccattaaacagaaagacaactgtgcatcttagaaagatataataaggtgttttacatagtgtaaagcatgttcacatacaaattacttagcctctttgagcctcagttttcttatatgtaaaactggattaatagtacattttgtgtttaaaaagataatgtatatgaagtgtttaccatttttgcttggcatctagttcagttctcagtaactgatgtggtggtggtggtggtcatagtagcagtaagatccgtagtaatagtagcagcagttgttttagaaattagtaactgaggcctggcaaagttaaaggctctttcattaacacccagaggggaagaaatgaagctggtcttcagaggcaggctattttcactctgtgtcccaaattttcccccctagaccgtttttatacttctggggcctcagaaaatattctcagctattctgttagcttgatctcctaccatctgagagtgggcttccttcaaacaaccaaatttccaggtatttctaaactgcccttcccctacaccattctttggttcagtatttcaagacccctaagagaaatggtacatttacatgtaagcacaggatagtgaagtatttacaacaagtgctttggagccagcaaatatgaatcagaatccagctttcctttcctacatacatgacattgggcagctaatttctaagattttacttctttatctatgaaagtggagtactagtacttgctctgtgcaactgtgatggttgttacatgaggtagcatctagaagcagcttgcacattgccagacacccagtggaaggtcaatgaatgactatttgaggactaactattacagaaatgtttactcttctgagtcctgatttctagtctcctggactaaataggttcactgttttcctcccggttcagtttccagacacatcacagaattataagaatattaaaaactcaggcttatacctacacaggattttctataaccctctttctgctttgagctcctaaagctatttcatagatgaccttatttttaaatagagggggcagttgataattagcattataaagtgctaattatctttggacacagaggacctgcacaccagagacagaggtccgcattaagtgtggatttcactttcttcagttgtgagatttctcttttttcttctttgtaatgatgcaaagatatatcttccaccaagcctcatttaaaagctttttccagttaaggaaactatctcttggccatccacagccagactgcatattgagattatggatattcaaagaaattgtctttcctttgtatattgtcataactttttgtgaaatgtttgttttatagttccaggccagcacctagaacctggctagaataaaaaactgcagaaatcatgagtttcttgtttggatgaaagagcacacctattaacaaatgatagacggctatcctactgtgagtcctgaaaactggtgatgtgattgttgaatgggttaggggtatagcagagaaactcagtgtgggctacatacaatttcagcttgaatcacacttaacagatcctctgttccaaccatttaaatttacaaagaagaaactaaggcacagaactacttgagaagagaagcagaattgaaaactagagctcctgattgttctcaaaataatttttatcatactgcatcgggttctaagtgagagggcttcttatttagtaatgccaaggtcatgtgttaacatgt

SEQ ID NO: 8527 - DNA, 4695 bp, Homo sapiens
cctgagagcatatcccgtggagtaccgtacacctgggaaaggcgggtttggtcccagccccagagggatctcagctgtcgctcggggcccgacctatctcggtccatctaagggtccgaggcacagccccgccaagaggccacaagtgtcagctgcttccgcgggaagggtgagggctaccggggcacagccaataccaccaccgcgggcgtaccttgccagcgttgggacgcgcaaatcccgcatcagcaccgatttacgccagaaaaatacgcgtgcaagtgaggtgggcgggggggcgggcgttgggacgtgctgctgcgggtgagacgggaggagggtagtcacgggcttagggctggaggctggcgggctagggctgagtggagcgcctgcttagagaccttcgggagaacttctgctggaacctcgacggctcagaggcgccctggtgcttcacactgcggcccggcacgcgcgtgggcttttgctaccagatccggcgttgtacagacgacgtgcggccccagggtgaggcccaagcttgggggctacagagccggggctggaagcctggaaccggagggccggggcgaggtctcggcctgatggctgcccgcaccggccgcagactgctaccacggcgcgggggagcagtaccgcggcacggtcagcaagacccgcaagggtgtccagtgccagcgctggtccgctgagacgccgcacaagctgcagtgagtccctggtgctcccggccccgccagggccctaaccctggggcggcatgctttgatgtctgggaccagagcctggaaatggttgagactaccctgccacgattttgctcccgctcccgcctcggttcacgtttacctccgaaccacatgcacaactggaggagaacttctgccagacccagatggggatagccatgggccctggtgctacacgatggacccaaggaccccattcgactactgtgccctgcgacgctgcgctgatgaccagccgccatcaatcctggacccccccagaccaggtgcagtttgagaagtgtggcaagagggtggatcggctggatcagcgtcgttccaagctgcgcgtggctgggggccatccgggcaactcaccctggacagtcagcttgcggaatcggtgaggcacaactgcctgtctcccacagagaggagctgaggttgtgtcctctgtggttatgccactgggggctgggaatctatccctgcccccagaggtcctagccagaagatggcaggtctagcatctgtcccaggagtctgttccctgtcctaattccccactcctctaggcagggccagcatttctgcgcggggtctctagtaaaggagcagtggatactgactgcccggcagtgcttctcctcctgccatatgcctctcacgggctatgaggtatggttgggcaccctgttccagaacccacaacatggagagccaggcctacagcgggtcccagtagccaagatgctgtgtgggccctcaggctcccagcttgtcctgctcaagctggagagatctgtgaccctgaaccagcgtgtggccctgatctgcctgccgcctgaatggtatgtggtgcctccagggaccaagtgtgagattgcaggctggggtgagaccaaaggtacgggtaatgacacagtcctaaatgtggccttgctgaacgtcatctccaaccaggagtgtaacatcaagcaccgaggacatgtgcgggagagcgagatgtgcactgagggactgttggcccctgtgggggcctgtgaggttggtggcagggccctgggccagccctggaagggtatggggggctagaaatgaactattttatcatgaagcaggctagtcatggctgtggcccggggccctcatcagttctcctacctgccagggtgactacgggggcccacttgcctgctttacccacaactgctgggtcctgaaaggaattagaatccccaaccgagtatgcgcaaggtcgcgctggccagccgtcttcacgcgtgtctctgtgtttgtggactggattcacaaggtcatgagactgggttaggcccagccttgacgccatatgctttggggaggacaaaacttgtaagtacagtcaaggacaagacttgtactcaaggttgagatttaataaaattaatatttttactacttcaccaaggactttcttaaacgaaaatggtttttccccctgcaagtaaacagtaatgaagaagagaattattcctagtgcagtttgttttcatggtcttaatttttgctaagactccactgtttttgccttatcaatacaagtgccaacacagtgaaaaggcaaatatcatcttagtattactctgaaaatagttctgagctaatggcctactgaaaggaaaagagtggctcctgctattctattagacttattacaattatcttaagtattctttctaccctcctttaattgaatggaaacagggatggattggaagagctgtttttctcctttctttcccccggcaatatttaccatttaatgccacttactaacactcaaagaaacaaaaccaaacttctcaattgacagtgcagtgacccaacaaagacacgggttcttgaattcaaagtggagcaggagagacggtaaatacacatttactttaatatatatatatttattatttatgtgtttaaagcacaaattagtttggtaaaaaacatctcatgtctgttttatttccacatccctgagactgacaatgggatgcctatcaattaattcatttagagagccatacaccacaagaaataaattatttgtcctctggagcttgtcacagggggatttttaaaaaaccattaaacagaaagacaactgtgcatcttagaaagataaaaggccaattcttcctctccggctgataggttcttaataatagtgatatctactaataaggtgttttacatagtgtaaagcatgttcacatacaaattacttagcctctttgagcctcagttttcttatatgtaaaactggattaatagtacattttgtgtttaaaaagataatgtatatgaagtgtttaccatttttgcttggcatctagttcagttctcagtaactgatgtggtggtggtggtggtcatagtagcagtaagatccgtagtaatagtagcagcagttgttttagaaattagtaactgaggcctggcaaagttaaaggctctttcattaacacccagaggggaagaaatgaagctggtcttcagaggcaggctattttcactctgtgtcccaaattttcccccctagaccgtttttatacttctggggcctcagaaaatattctcagctattctgttagcttgatctcctaccatctgagagtgggcttccttcaaacaaccaaatttccaggtatttctaaactgcccttcccctacaccattctttggttcagtatttcaagacccctaagagaaatggtacatttacatgtaagcacaggatagtgaagtatttacaacaagtgctttggagccagcaaatatgaatcagaatccagctttcctttcctacatacatgacattgggcagctaatttctaagattttacttctttatctatgaaagtggagtactagtacttgctctgtgcaactgtgatggttgttacatgaggtagcatctagaagcagcttgcacattgccagacacccagtggaaggtcaatgaatgactatttgaggactaactattacagaaatgtttactcttctgagtcctgatttctagtctcctggactaaataggttcactgttttcctcccggttcagtttccagacacatcacagaattataagaatattaaaaactcaggcttatacctacacaggattttctataaccctctttctgctttgagctcctaaagctatttcatagatgaccttatttttaaatagagggggcagttgataattagcattataaagtgctaattatctttggacacagaggacctgcacaccagagacagaggtccgcattaagtgtggatttcactttcttcagttgtgagatttctcttttttcttctttgtaatgatgcaaagatatatcttccaccaagcctcatttaaaagctttttccagttaaggaaactatctcttggccatccacagccagactgcatattgagattatggatattcaaagaaattgtctttcctttgtatattgtcataactttttgtgaaatgtttgttttatagttccaggccagcacctagaacctggctagaataaaaaactgcagaaatcatgagtttcttgtttggatgaaagagcacacctattaacaaatgatagacggctatcctactgtgagtcctgaaaactggtgatgtgattgttgaatgggttaggggtatagcagagaaactcagtgtgggctacatacaatttcagcttgaatcacacttaacagatcctctgttccaaccatttaaatttacaaagaagaaactaaggcacagaactacttgagaagagaagcagaattgaaaactagagctcctgattgttctcaaaataatttttatcatactgcatcgggttctaagtgagagggcttcttatttagtaatgccaaggtcatgtgttaacatgt

SEQ ID NO: 8528 - DNA, 2935 bp, Homo sapiens
tctccccattcccctcactgcaggtacgggtaatgacacagtcctaaatgtggccttgctgaacgtcatctccaaccaggagtgtaacatcaagcaccgaggacatgtgcgggagagcgagatgtgcactgagggactgttggcccctgtgggggcctgtgagggtgactacgggggcccacttgcctgctttacccacaactgctgggtcctgaaaggaattagaatccccaaccgagtatgcgcaaggtcgcgctggccagccgtcttcacgcgtgtctctgtgtttgtggactggattcacaaggtcatgagactgggttaggcccagccttgacgccatatgctttggggaggacaaaacttgtaagtacagtcaaggacaagacttgtactcaaggttgagatttaataaaattaatatttttactacttcaccaaggactttcttaaacgaaaatggtttttccccctgcaagtaaacagtaatgaagaagagaattattcctagtgcagtttgttttcatggtcttaatttttgctaagactccactgtttttgccttatcaatacaagtgccaacacagtgaaaaggcaaatatcatcttagtattactctgaaaatagttctgagctaatggcctactgaaaggaaaagagtggctcctgctattctattagacttattacaattatcttaagtattctttctaccctcctttaattgaatggaaacagggatggattggaagagctgtttttctcctttctttcccccggcaatatttaccatttaatgccacttactaacactcaaagaaacaaaaccaaacttctcaattgacagtgcagtgacccaacaaagacacgggttcttgaattcaaagtggagcaggagagacggtaaatacacatttactttaatatatatatatttattatttatgtgtttaaagcacaaattagtttggtaaaaaacatctcatgtctgttttatttccacatccctgagactgacaatgggatgcctatcaattaattcatttagagagccatacaccacaagaaataaattatttgtcctctggagcttgtcacagggggatttttaaaaaaccattaaacagaaagacaactgtgcatcttagaaagataaaaggccaattcttcctctccggctgataggttcttaataatagtgatatctactaataaggtgttttacatagtgtaaagcatgttcacatacaaattacttagcctctttgagcctcagttttcttatatgtaaaactggattaatagtacattttgtgtttaaaaagataatgtatatgaagtgtttaccatttttgcttggcatctagttcagttctcagtaactgatgtggtggtggtggtggtcatagtagcagtaagatccgtagtaatagtagcagcagttgttttagaaattagtaactgaggcctggcaaagttaaaggctctttcattaacacccagaggggaagaaatgaagctggtcttcagaggcaggctattttcactctgtgtcccaaattttcccccctagaccgtttttatacttctggggcctcagaaaatattctcagctattctgttagcttgatctcctaccatctgagagtgggcttccttcaaacaaccaaatttccaggtatttctaaactgcccttcccctacaccattctttggttcagtatttcaagacccctaagagaaatggtacatttacatgtaagcacaggatagtgaagtatttacaacaagtgctttggagccagcaaatatgaatcagaatccagctttcctttcctacatacatgacattgggcagctaatttctaagattttacttctttatctatgaaagtggagtactagtacttgctctgtgcaactgtgatggttgttacatgaggtagcatctagaagcagcttgcacattgccagacacccagtggaaggtcaatgaatgactatttgaggactaactattacagaaatgtttactcttctgagtcctgatttctagtctcctggactaaataggttcactgttttcctcccggttcagtttccagacacatcacagaattataagaatattaaaaactcaggcttatacctacacaggattttctataaccctctttctgctttgagctcctaaagctatttcatagatgaccttatttttaaatagagggggcagttgataattagcattataaagtgctaattatctttggacacagaggacctgcacaccagagacagaggtccgcattaagtgtggatttcactttcttcagttgtgagatttctcttttttcttctttgtaatgatgcaaagatatatcttccaccaagcctcatttaaaagctttttccagttaaggaaactatctcttggccatccacagccagactgcatattgagattatggatattcaaagaaattgtctttcctttgtatattgtcataactttttgtgaaatgtttgttttatagttccaggccagcacctagaacctggctagaataaaaaactgcagaaatcatgagtttcttgtttggatgaaagagcacacctattaacaaatgatagacggctatcctactgtgagtcctgaaaactggtgatgtgattgttgaatgggttaggggtatagcagagaaactcagtgtgggctacatacaatttcagcttgaatcacacttaacagatcctctgttccaaccatttaaatttacaaagaagaaactaaggcacagaactacttgagaagagaagcagaattgaaaactagagctcctgattgttctcaaaataatttttatcatactgcatcgggttctaagtgagagggcttcttatttagtaatgccaaggtcatgtgttaacatgt

SEQ ID NO: 8529 - DNA, 1045 bp, Homo sapiens
cctgagagcatatcccgtggagtaccgtacacctgggaaaggcgggtttggtcccagccccagagggatctcagctgtcgctcggggcccgacctatctcggtccatctaagggtccgaggcacagccccgccaagaggccacaagtgtcagctgcttccgcgggaagggtgagggctaccggggcacagccaataccaccaccgcgggcgtaccttgccagcgttgggacgcgcaaatcccgcatcagcaccgatttacgccagaaaaatacgcgtgcaagtgaggtgggcgggggggcgggcgttgggacgtgctgctgcgggtgagacgggaggagggtagtcacgggcttagggctggaggctggcgggctagggctgagtggagcgcctgcttagagaccttcgggagaacttctgctggaacctcgacggctcagaggcgccctggtgcttcacactgcggcccggcacgcgcgtgggcttttgctaccagatccggcgttgtacagacgacgtgcggccccagggtgaggcccaagcttgggggctacagagccggggctggaagcctggaaccggagggccggggcgaggtctcggcctgatggctgcccgcaccggccgcagactgctaccacggcgcgggggagcagtaccgcggcacggtcagcaagacccgcaagggtgtccagtgccagcgctggtccgctgagacgccgcacaagctgcagagaacttctgccagacccagatggggatagccatgggccctggtgctacacgatggacccaaggaccccattcgactactgtgccctgcgacgctgcgctgatgaccagccgccatcaatcctggacccccccagaccaggtgcagtttgagaagtgtggcaagagggtggatcggctggatcagcgtcgttccaagctgcgcgtggctgggggccatccgggcaactcaccctggacagtcagcttgcggaatcggcacggggccaagcaattttcttgccgccgggggtctcctaggttgaactgtgc

SEQ ID NO: 8530 - DNA, 366 bp, Homo sapiens
tccctaaacctattatgatagcaaaatacatctacctacagtcaaactttccctacttcaaaccttccatatttgtgttatttgtctgttacagataattttatctgtataaaacaaatatcatttctcgatttaaaaaatctacaatgactctgcagtcattacaagataaacttaaaactctttaatatagaatcaaaaactcatataaaaaattagcagggagtggtggcatgcactgtaatcccagctactggagaggctgaggcaggagaattccttcaactcgggaggcggaggttgcagtgagcctagatcgcgccactgcactccagcctgggtgacagagcaagactccatctcgga

SEQ ID NO: 8531 - DNA, 1386 bp, Homo sapiens
ggtgattcgtctaagccagacatggcaaagtcctcacctttgccagtgactgattcaggaaagatcatgtgtgaccttattctgggcaatgagatctgaagggaagtctgttgaggaacttgtaacatgtcatggtagtggccatcttgctacagcctgaggaccacagagcacacacagagagtgctgggtccttgggaatgatgttgagcaagcacttatacatgacctggcagccacccagcatctgtactttagttatttggtttttctcaggaggagatcctgagatgaagactcaggagcaggttgttgattttgaggtggtcctgggaaagacagggaggagagtggggaagtgaggcagaaaaggaagggaagttccactccaggagcccacgtggaacatacctcagagttatcccacctgcacagggagggagctgaggtatttacccacccatccttgtcagtcattggtcaagggctatttctgtgcataggcataggcttcagcagaattgcaggtactggcagtcggaaattggaccagcaaacagaaatgattcctacaggggatacaagccaggcacaggcagtgtctgttacttggggttcctgttgcttagagttgaaagcatcataacccatcccaggtgatcatagaaggacctcaaaggaaaaggtgaggggtttggacatttcctgagaatccatgggggaaccattcagggtttggggcaggtgtcaaccacaagaacattaaacaggctcttttggcagcaaagttgggagtggtgttgaagtaactgggaaaactccacagaggctcagcgtccacctctacctgacaccctgccagcaacctgggtgatttccgcaggtgtctgaaccccgatctctcagtgttatggcccccaccaccaggaaggcctccttttctctcttctatagccactcactcctgggccccactgtgaacccagaaatgccacaccatggaaagccacacactctgctgtctccttctgtcctcattcctgtccttctcacagtcagtccctcttggctcttcctagagtccctttcattccctcatttccacttcctgccgctgtactgtcacctgtggcctggatttgcactcttggtccaacaccctcaactccaacacctctgtctttctgccccatccactagacaaaagctgactctggaaaacattaggcactcagaatcaagggttctggggtcagatggataattgccatcatcctcaccaagttgccactggactttcttgcccctaaatccatgggctttgtttgcaactttctgataatttataattatttcaaaataaaaaaattttaaaaataaaaaaaa

SEQ ID NO: 8532 - DNA, 2074 bp, Homo sapiens
ggtgattcgtctaagccagacatggcaaagtcctcacctttgccagtgactgattcaggaaagatcatgtgtgaccttattctgggcaatgagatctgaagggaagtctgttgaggaacttgtaacatgtcatggtagtggccatcttgctacagcctgaggaccacagagcacacacagagagtgctgggtccttgggaatgatgttgagcaagcacttatacatgacctggcagccacccagcatctgtactttagttatttggtttttctcaggaggagatcctgagatgaagactcaggagcaggttgttgattttgaggtggtcctgggaaagacagggaggagagtggggaagtgaggcagaaaaggaagggaagttccactccaggagcccacgtggaacatacctcagagttatcccacctgcacagggagggagctgaggtatttacccacccatccttgtcagtcattggtcaagggctatttctgtgcataggcataggcttcagcagaattgcaggtactggcagtcggaaattggaccagcaaacagaaatgattcctacaggggatacaagccaggcacaggcagtgtctgttacttggggttcctgttgcttagagttgaaagcatcataacccatcccaggtgatcatagaaggacctcaaaggaaaaggtgaggggtttggacatttcctgagaatccatgggggaaccattcagggtttggggcaggtgtcaaccacaagaacattaaacaggctcttttggcagcaaagttgggagtggtgttgaagtaactgggaaaactccacagaggctcagcgtccacctctacctgacaccctgccagcaacctgggtgatttccgcaggtgtctgaaccccgatctctcagtgttatggcccccaccaccaggaaggcctccttttctctcttctatagccactcactcctgggccccactgtgaacccagaaatgccacaccatggaaagccacacactctgctgtctccttctgtcctcattcctgtccttctcacagtcagtccctcttggctcttcctagagtccctttcattccctcatttccacttcctgccgctgtactgtcacctgtggcctggatttgcactcttggtccaacaccctcaactccaacacctctgtctttctgccccatccactagacaaaagctgactctggaaaacattaggcactcagaatcaagggttctggggtcagatggataattgccatcatcctcaccaagttgccactggactttcttgcccctaaatccactgggcatttcattgctacctttcttgacttcttgattgtttttgtgatactgacacatcccccctttcagaacaccctctgcccttggattctgtgcacaggaagctagttgctcccctgaatacactctttcttccttgtaatacagcctctgattttgagcccaagaataaagactacagttctcagactccttcgcaaataaattttgtgactaaactctagtcaacagtaagtgtcatgtagcagctcctgggaatctcctttaaaaagagagcttgtttatacctattgtcatctctgttcttctgtgccccttcttccattttgctgcctggaaagcagatgtgatggctggaattccagtcaccattttggaccatgaggacaacaccctagagatgtggagtggctaaaagaagcctgtgttcctgagaacttagaggaccaggacctctattccaggcttggacacctacatttagactattatatgaggaagcaatcaacttctcacttgtttcaaccactttcacttgcagtcaaacctgaattgtaagtgaaattgctttcctgatagcaaacctgttggattttctccagaatccctgggccacttttagcagtcagattcgtctaatcctcctttaaagatggtggcagtgaaactggtacatgggacctgactgggctttgtttgcaactttctgataatttataattatttcaaaataaaaaaattttaaaaataaaaaaaa

SEQ ID NO: 8533 - DNA, 1454 bp, Homo sapiens
tacttgttattaatagaattatttcttcctccacctccttctggcttttcaggagatgtttcacaaagcagaagaattattttctaaaacaacaaacaatgaagtggatgacatggacacgtcagatacccagtggggctggttttacttggcagaatgtgggaagtggcacatgtttcagccggataccaacagtcagtgttcagttagcagtgaagatatcgaaaaaagcttcaaaacaaacccttgtggctccatttcttttactacttccaaattcagctacaagatagactttgcagaaatgaagcaaatgaatctcaccactggaaagcagcgcttaataaaaagagcccccttttctatcagtgctttcagttacatctgtgaaaacgaggccatccctatgccaccacactgggagaatgtgaatactcaagtaccatatcagcttattcctctgcacaatcaaacacatgaatataatgaagttgctaatctctttgggaagacgatggatcgcaaccgaattaaaagaattcagagaattcaaaacctagatttgtgggagttcttttgcaggaaaaaggctcagctcaagaaaaaaagaggtgtgcctcagattaatgaacaaatgctgtttcatggtaccagcagtgaatttgtggaagcaatctgcattcataactttgattggagaataaatggtatacatggtgctgtctttggaaaaggaacctattttgctagagatgctgcttattccagtcgtttctgcaaagatgacataaagcatgggaacacattccaaattcatggtgtcagcttgcaacagcggcatctgtttagaacatataaatctatgtttcttgctcgagtgctaattggagattacataaacggagactccaaatacatgcgacctccttccaaagacgggagctatgtgaatttatatgacagctgtgtggatgatacctggaacccaaagatctttgtggtttttgatgccaaccaaatctatcctgagtacttgatagactttcattgatttcacttccaaatctcggtggtcaaggaagctttattcttttttgcaggaaggtttgctcttcagtcatctagccactaaatgttaattatctgatacttttgaaacagatatgaaaaaaagtggcctccatataaaaagacatactgacttcaaggttggtttttgttgttttgtttttgcctgtttcttgtagtcttgtttgttaaaagttgatatcattgatgttttaacacataggggtgaaagataccattcaaaatggaatcagctgagtctcaactaatgtggtcattgagatctttaaagtttacgtgtgtgttatcaggataaatgattttagtttaaatagacttattcgtataaatgttgaaaaaaaatacagacataaatgtgtcccttt

SEQ ID NO: 8534 - DNA, 1620 bp, Homo sapiens
  misc_feature (62)..(62): n is a, c, g, or t
  misc_feature (123)..(123): n is a, c, g, or t
  misc_feature (156)..(156): n is a, c, g, or t
  misc_feature (191)..(191): n is a, c, g, or t
cggactggccgcggtctaaagaattgggagttgggtggctgtaaacgctggcttgtgacagnggggaggaggaaggccttcgtaaaggttgcatctccgtcccttcgctcccggggacccgcnggaaaaaaaaaaatccaaacccaggccccgggntagccccttcccacaggctctctccgctcgatttngtcaccgttatgtgggaagcgaatccagagatgtttcacaaagcagaagaattattttctaaaacaacaaacaatgaagtggatgacatggacacgtcagatacccagtggggctggttttacttggcagaatgtgggaagtggcacatgtttcagccggataccaacagtcagtgttcagttagcagtgaagatatcgaaaaaagcttcaaaacaaacccttgtggctccatttcttttactacttccaaattcagctacaagatagactttgcagaaatgaagcaaatgaatctcaccactggaaagcagcgcttaataaaaagagcccccttttctatcagtgctttcagttacatctgtgaaaacgaggccatccctatgccaccacactgggagaatgtgaatactcaagtaccatatcagcttattcctctgcacaatcaaacacatgaatataatgaagttgctaatctctttgggaagacgatggatcgcaaccgaattaaaagaattcagagaattcaaaacctagatttgtgggagttcttttgcaggaaaaaggctcagctcaagaaaaaaagaggtgtgcctcagattaatgaacaaatgctgtttcatggtaccagcagtgaatttgtggaagcaatctgcattcataactttgattggagaataaatggtatacatggtgctgtctttggaaaaggaacctattttgctagagatgctgcttattccagtcgtttctgcaaagatgacataaagcatgggaacacattccaaattcatggtgtcagcttgcaacagcggcatctgtttagaacatataaatctatgtttcttgctcgagtgctaattggagattacataaacggagactccaaatacatgcgacctccttccaaagacgggagctatgtgaatttatatgacagctgtgtggatgatacctggaacccaaagatctttgtggtttttgatgccaaccaaatctatcctgagtacttgatagactttcattgatttcacttccaaatctcggtggtcaaggaagctttattcttttttgcaggaaggtttgctcttcagtcatctagccactaaatgttaattatctgatacttttgaaacagatatgaaaaaaagtggcctccatataaaaagacatactgacttcaaggttggtttttgttgttttgtttttgcctgtttcttgtagtcttgtttgttaaaagttgatatcattgatgttttaacacataggggtgaaagataccattcaaaatggaatcagctgagtctcaactaatgtggtcattgagatctttaaagtttacgtgtgtgttatcaggataaatgattttagtttaaatagacttattcgtataaatgttgaaaaaaaatacagacataaatgtgtcccttt

SEQ ID NO: 8535 - DNA, 1589 bp, Homo sapiens
  misc_feature (62)..(62): n is a, c, g, or t
cggactggccgcggtctaaagaattgggagttgggtggctgtaaacgctggcttgtgacagnggggaggaggaaggccttcgtaaaggttgcatctccgtcccttcgctcccggggacccgaaaaaatccacccagccccgtacccctcccagtctctccgtcattgcacagtgggaagcgaatccagagatgtttcacaaagcagaagaattattttctaaaacaacaaacaatgaagtggatgacatggacacgtcagatacccagtggggctggttttacttggcagaatgtgggaagtggcacatgtttcagccggataccaacagtcagtgttcagttagcagtgaagatatcgaaaaaagcttcaaaacaaacccttgtggctccatttcttttactacttccaaattcagctacaagatagactttgcagaaatgaagcaaatgaatctcaccactggaaagcagcgcttaataaaaagagcccccttttctatcagtgctttcagttacatctgtgaaaacgaggccatccctatgccaccacactgggagaatgtgaatactcaagtaccatatcagcttattcctctgcacaatcaaacacatgaatataatgaagttgctaatctctttgggaagacgatggatcgcaaccgaattaaaagaattcagagaattcaaaacctagatttgtgggagttcttttgcaggaaaaaggctcagctcaagaaaaaaagaggtgtgcctcagattaatgaacaaatgctgtttcatggtaccagcagtgaatttgtggaagcaatctgcattcataactttgattggagaataaatggtatacatggtgctgtctttggaaaaggaacctattttgctagagatgctgcttattccagtcgtttctgcaaagatgacataaagcatgggaacacattccaaattcatggtgtcagcttgcaacagcggcatctgtttagaacatataaatctatgtttcttgctcgagtgctaattggagattacataaacggagactccaaatacatgcgacctccttccaaagacgggagctatgtgaatttatatgacagctgtgtggatgatacctggaacccaaagatctttgtggtttttgatgccaaccaaatctatcctgagtacttgatagactttcattgatttcacttccaaatctcggtggtcaaggaagctttattcttttttgcaggaaggtttgctcttcagtcatctagccactaaatgttaattatctgatacttttgaaacagatatgaaaaaaagtggcctccatataaaaagacatactgacttcaaggttggtttttgttgttttgtttttgcctgtttcttgtagtcttgtttgttaaaagttgatatcattgatgttttaacacataggggtgaaagataccattcaaaatggaatcagctgagtctcaactaatgtggtcattgagatctttaaagtttacgtgtgtgttatcaggataaatgattttagtttaaatagacttattcgtataaatgttgaaaaaaaatacagacataaatgtgtcccttt

SEQ ID NO: 8536 - DNA, 1318 bp, Homo sapiens
  misc_feature (62)..(62): n is a, c, g, or t
  misc_feature (123)..(123): n is a, c, g, or t
  misc_feature (156)..(156): n is a, c, g, or t
  misc_feature (191)..(191): n is a, c, g, or t
cggactggccgcggtctaaagaattgggagttgggtggctgtaaacgctggcttgtgacagnggggaggaggaaggccttcgtaaaggttgcatctccgtcccttcgctcccggggacccgcnggaaaaaaaaaaatccaaacccaggccccgggntagccccttcccacaggctctctccgctcgatttngtcaccgttatgtgggaagcgaatccagagatgtttcacaaagcagaagaattattttctaaaacaacaaacaatgaagtggatgacatggacacgtcagatacccagtggggctggttttacttggcagaatgtgggaagtggcacatgtttcagccggataccaacagtcagtgttcagttagcagtgaagatatcgaaaaaagcttcaaaacaaacccttgtggctccatttcttttactacttccaaattcagctacaagatagactttgcagaaatgaagcaaatgaatctcaccactggaaagcagcgcttaataaaaagagcccccttttctatcagtgctttcagttacatctgtgaaaacgaggccatccctatgccaccacactgggagaatgtgaatactcaagtaccatatcagcttattcctctgcacaatcaaacacatgaatataatgaagttgctaatctctttgggaagacgatggatcgcaaccgaattaaaagaattcagagaattcaaaacctagatttgtgggagttcttttgcaggaaaaaggctcagctcaagaaaaaaagaggtgtgcctcagattaatgaacaaatgctgtttcatggtaccagcagtgaatttgtggaagcaatctgcattcataactttgattggagaataaatggtatacatggtgctgtctttggaaaaggaacctattttgctagagatgctgcttattccagtcgtttctgcaaagatgacataaagcatgggaacacattccaaattcatggtgtcagcttgcaacagcggcatctgtttagaacatataaatctatgtttcttgctcgagtgctaattggagattacataaacggagactccaaatacatgcgacctccttccaaagacgggagctatgtgaatgatgccaaccaaatctatcctgagtacttgatagactttcattgatttcacttccaaatctcggtggtcaaggaagctttattcttttttgcaggaaggtttgctcttcagtcatctagccactaaatgttaattatctgatacttttgaaacagatatgaaaaaaagtggcctccatataaaaagacatactgacttca

SEQ ID NO: 8537 - DNA, 1206 bp, Homo sapiens
tacttgttattaatagaattatttcttcctccacctccttctggcttttcaggagatgtttcacaaagcagaagaattattttctaaaacaacaaacaatgaagtggatgacatggacacgtcagatacccagtggggctggttttacttggcagaatgtgggaagtggcacatgtttcagccggataccaacagtcagtgttcagttagcagtgaagatatcgaaaaaagcttcaaaacaaacccttgtggctccatttcttttactacttccaaattcagctacaagatagactttgcagaaatgaagcaaatgaatctcaccactggaaagcagcgcttaataaaaagagcccccttttctatcagtgctttcagttacatctgtgaaaacgaggccatccctatgccaccacactgggagaatgtgaatactcaagtaccatatcagcttattcctctgcacaatcaaacacatgaatataatgaagttgctaatctctttgggaagacgatggatcgcaaccgaattaaaagaattcagagaattcaaaacctagatttgtgggagttcttttgcaggaaaaaggctcagctcaagaaaaaaagaggtgtgcctcagattaatgaacaaatgctgtttcatggtaccagcagtgaatttgtggaagcaatctgcattcataactttgattggagaataaatggtatacatggtgctgtctttggaaaaggaacctattttgctagagatgctgcttattccagtcgtttctgcaaagatgacataaagcatgggaacacattccaaattcatggtgtcagcttgcaacagcggcatctgtttagaacatataaatctatgtttcttgctcgagtgctaattggagattacataaacggagactccaaatacatgcgacctccttccaaagacgggagctatgtgaatttatatgacagctgtgtggatgatacctggaacccaaagatctttgtggtttttgatgccaaccaaatctatcctgagtacttgatagactttcattgatttcacttccaaatctcggtggtcaaggaagctttattcttttttgcaggaaggtttgctcttcagtcatctagccactaaatgttaattatctgatacttttgaaacagatatgaaaaaaagtggcctccatataaaaagacatactgacttca

SEQ ID NO: 8538 - DNA, 1742 bp, Homo sapiens
  misc_feature (62)..(62): n is a, c, g, or t
  misc_feature (123)..(123): n is a, c, g, or t
  misc_feature (156)..(156): n is a, c, g, or t
  misc_feature (191)..(191): n is a, c, g, or t
cggactggccgcggtctaaagaattgggagttgggtggctgtaaacgctggcttgtgacagnggggaggaggaaggccttcgtaaaggttgcatctccgtcccttcgctcccggggacccgcnggaaaaaaaaaaatccaaacccaggccccgggntagccccttcccacaggctctctccgctcgatttngtcaccgttatgtgggaagcgaatccatgtatttgcatgcccgagtctttgagccgtgctataccagtttgtccagattgtttatactagcaatgcagtttacggtgaagacctgccttccctctgggaatctggagcttcagtaacaggagatgtttcacaaagcagaagaattattttctaaaacaacaaacaatgaagtggatgacatggacacgtcagatacccagtggggctggttttacttggcagaatgtgggaagtggcacatgtttcagccggataccaacagtcagtgttcagttagcagtgaagatatcgaaaaaagcttcaaaacaaacccttgtggctccatttcttttactacttccaaattcagctacaagatagactttgcagaaatgaagcaaatgaatctcaccactggaaagcagcgcttaataaaaagagcccccttttctatcagtgctttcagttacatctgtgaaaacgaggccatccctatgccaccacactgggagaatgtgaatactcaagtaccatatcagcttattcctctgcacaatcaaacacatgaatataatgaagttgctaatctctttgggaagacgatggatcgcaaccgaattaaaagaattcagagaattcaaaacctagatttgtgggagttcttttgcaggaaaaaggctcagctcaagaaaaaaagaggtgtgcctcagattaatgaacaaatgctgtttcatggtaccagcagtgaatttgtggaagcaatctgcattcataactttgattggagaataaatggtatacatggtgctgtctttggaaaaggaacctattttgctagagatgctgcttattccagtcgtttctgcaaagatgacataaagcatgggaacacattccaaattcatggtgtcagcttgcaacagcggcatctgtttagaacatataaatctatgtttcttgctcgagtgctaattggagattacataaacggagactccaaatacatgcgacctccttccaaagacgggagctatgtgaatttatatgacagctgtgtggatgatacctggaacccaaagatctttgtggtttttgatgccaaccaaatctatcctgagtacttgatagactttcattgatttcacttccaaatctcggtggtcaaggaagctttattcttttttgcaggaaggtttgctcttcagtcatctagccactaaatgttaattatctgatacttttgaaacagatatgaaaaaaagtggcctccatataaaaagacatactgacttcaaggttggtttttgttgttttgtttttgcctgtttcttgtagtcttgtttgttaaaagttgatatcattgatgttttaacacataggggtgaaagataccattcaaaatggaatcagctgagtctcaactaatgtggtcattgagatctttaaagtttacgtgtgtgttatcaggataaatgattttagtttaaatagacttattcgtataaatgttgaaaaaaaatacagacataaatgtgtcccttt

SEQ ID NO: 8539 - DNA, 1254 bp, Homo sapiens
  misc_feature (62)..(62): n is a, c, g, or t
  misc_feature (123)..(123): n is a, c, g, or t
  misc_feature (156)..(156): n is a, c, g, or t
  misc_feature (191)..(191): n is a, c, g, or t
cggactggccgcggtctaaagaattgggagttgggtggctgtaaacgctggcttgtgacagnggggaggaggaaggccttcgtaaaggttgcatctccgtcccttcgctcccggggacccgcnggaaaaaaaaaaatccaaacccaggccccgggntagccccttcccacaggctctctccgctcgatttngtcaccgttatgtgggaagcgaatccagagatgtttcacaaagcagaagaattattttctaaaacaacaaacaatgaagtggatgacatggacacgtcagatacccagtggggctggttttacttggcagaatgtgggaagtggcacatgtttcagccggataccaacagtcagtgttcagttagcagtgaagatatcgaaaaaagcttcaaaacaaacccttgtggctccatttcttttactacttccaaattcagctacaagatagactttgcagaaatgaagcaaatgaatctcaccactggaaagcagcgcttaataaaaagagcccccttttctatcagtgctttcagttacatctgtgaaaacgaggccatccctatgccaccacactgggagaatgtgaatactcaagtaccatatcagcttattcctctgcacaatcaaacacatgaatataatgaagttgctaatctctttgggaagacgatggatcgcaaccgaattaaaagaattcagagaattcaaaacctagatttgtgggagttcttttgcaggaaaaaggctcagctcaagaaaaaaagaggtgtgcctcagattaatgaacaaatgctgtttcatggtaccagcagtgaatttgtggaagcaatctgcattcataactttgattggagaataaatggtatacatggtgctgtctttggaaaaggaaggtttgctcttcagtcatctagccactaaatgttaattatctgatacttttgaaacagatatgaaaaaaagtggcctccatataaaaagacatactgacttcaaggttggtttttgttgttttgtttttgcctgtttcttgtagtcttgtttgttaaaagttgatatcattgatgttttaacacataggggtgaaagataccattcaaaatggaatcagctgagtctcaactaatgtggtcattgagatctttaaagtttacgtgtgtgttatcaggataaatgattttagtttaaatagacttattcgtataaatgttgaaaaaaaatacagacataaatgtgtcccttt

SEQ ID NO: 8540 - DNA, 515 bp, Homo sapiens
ggaaaattcaagagcacttaaagtatttgcataaaaaaagagcccagtgcaaatagccaagactatggggaaaaggccttgaaggcatttcagagacctttgcagcagcccttgctgtcataggccctggggaagaggagagaattgtttcctgggccagctccatggcctggctgctgtgtgcatcctcaggacactgctgcctgcatccctgcagatccggctccagccatggctgaaagatgcacaggtacagcttgggtcactgcttcagaggtggctccaagccttgatggcttccacatagtgttaagccaggaggtgcacagagcaagagactagaggcttgggagcctctgtctagactccagaggacgtacagaaaagcctgggtgtccaggcagaagcctttccaagaggcagagcctcatgggaaacctttactagggcaggaaagaagggatgtatcaggtggaagccctcacacagggaggcaccatccttcaaaccccaga

SEQ ID NO: 8541 - DNA, 391 bp, Homo sapiens
tttcaaatattatttaaataggaatgtttccttcaggaccaaatctgtggagaagctatgtacatgtatttatttttttaagttgaaaagtatgcgagtactggatccatattattaataactttggcccacctgttctttctcccagaagcagccccagttggaatcagcccctagagcgaggagtcacctgggaagcttgttacatgcagattctgattctgtgtgtctgggaaggcacctgagactctgcatttcagataaactcctaatgtgttaaacatgcattggccacattttgagaagcaaggccctggggggaaactgtgcacgtagtttcggaaaacctttgatgggttaacttcttcatgtttcaaatgtgaaaagacag

SEQ ID NO: 8542 - DNA, 338 bp, Homo sapiens
caatgttgctgagagttgcaaaggtatcttactgtgtttggggatttacaagtttacttttccatttaaagtttagaccatcatgctattctagctatttattctgttccattcaaaacattgatcaaatgccttctatatgtatttttgtctggagacaaaaatctagtctctaatttcttgacatttttaaaaattctcttacactggtgtttcccaacctcttttctttttcttctttttttttttttttttttttttttttttgagacagtcctactccatcagccagggtggagtgcagtggcatgatatgatcttggctcactgcaacctcc

SEQ ID NO: 8543 - DNA, 810 bp, Homo sapiens
attcccagaatcactaggcgccggcgcctccgaggcagtgtgtttccgcccagagctggagtctcccagctgccagccgaccccgaacccgcactcccgccaaccgcgctttttgtgggcggtcggaaaccacagcctccgttggatatgttcggtgcatgttataaacaaccacttaaaccctccggatctgagcctcccgcagaggaatgcagaatgacgccacggcacgcaggatgtgatgtcaccgagatgcagaggatactcagtcaaccaacatttactgagcatctacttcgtgccgtgtcttgtcaacggaaaggggtccctatccagaccccaagagagcattcttggatctcttgcaagaaagaatttgaggcgaatccatagagtaagcttagtgatgtgtgtcagacctctgagcccaagcaaagccatcatatcccctgtgacctgcatgtatacatccagatggcctgaagcaagtgaagaatcacaaaagaagtgaaaagggccggttcctgccttaactgatgacattccaccattgtgatttgttcctgccccaccttaactgagcgattaacctgtgaacttccttctcctggctcagaagcttccccactgagcaccttgtgacccccgcccctgcctgccatagaacaaccccctttgattgtaattttcctttacctacccaaatcctataaaacggccccacccctatctcccttcgctgacactctctttggactcagcctgcctgcacctaggtgattaaaaagctttattgctcacgcaaaaaaa

SEQ ID NO: 8544 - DNA, 862 bp, Homo sapiens
attcccagaatcactaggcgccggcgcctccgaggcagtgtgtttccgcccagagctggagtctcccagctgccagccgaccccgaacccgcactcccgccaaccgcgctttttgtgggcggtcggaaaccacagcctccgttggatatgttcggtgcatgttataaacaaccacttaaaccctccggatctgagcctcccgcagaggaatgcagaatgacgccacggcacgcaggatgtgatgtcaccgagatgcagaggatactcagtcaaccaacatttactgagcatctacttcgtgccgtgtcttgtcaacggaaaggggtccctatccagaccccaagagagcattcttggatctcttgcaagaaagaatttgaggcgaatccatagagtaagcaaggcaagttacttctatatagaagggtgcacccttacagatcaaacaatgcttagtgatgtgtgtcagacctctgagcccaagcaaagccatcatatcccctgtgacctgcatgtatacatccagatggcctgaagcaagtgaagaatcacaaaagaagtgaaaagggccggttcctgccttaactgatgacattccaccattgtgatttgttcctgccccaccttaactgagcgattaacctgtgaacttccttctcctggctcagaagcttccccactgagcaccttgtgacccccgcccctgcctgccatagaacaaccccctttgattgtaattttcctttacctacccaaatcctataaaacggccccacccctatctcccttcgctgacactctctttggactcagcctgcctgcacctaggtgattaaaaagctttattgctcacgcaaaaaaa

SEQ ID NO: 8545 - DNA, 909 bp, Homo sapiens
  misc_feature (400)..(400): n is a, c, g, or t
attcccagaatcactaggcgccggcgcctccgaggcagtgtgtttccgcccagagctggagtctcccagctgccagccgaccccgaacccgcactcccgccaaccgcgctttttgtgggcggtcggaaaccacagcctccgttggatatgttcggtgcatgttataaacaaccacttaaaccctccggatctgagcctcccgcagaggaatgcagaatgacgccacggcacgcaggatgtgatgtcaccgagatgcagaggatactcagtcaaccaacatttactgagcatctacttcgtgccgtatgtacgaagctagcaaatatgtacagcaccagtactgattgcagggagcactgtagaagaggaatgaaggccaaacaattaaaagcggaggcgnggaggtcttgtcaacggaaaggggtccctatccagaccccaagagagcattcttggatctcttgcaagaaagaatttgaggcgaatccatagagtaagcttagtgatgtgtgtcagacctctgagcccaagcaaagccatcatatcccctgtgacctgcatgtatacatccagatggcctgaagcaagtgaagaatcacaaaagaagtgaaaagggccggttcctgccttaactgatgacattccaccattgtgatttgttcctgccccaccttaactgagcgattaacctgtgaacttccttctcctggctcagaagcttccccactgagcaccttgtgacccccgcccctgcctgccatagaacaaccccctttgattgtaattttcctttacctacccaaatcctataaaacggccccacccctatctcccttcgctgacactctctttggactcagcctgcctgcacctaggtgattaaaaagctttattgctcacgcaaaaaaa

SEQ ID NO: 8546 - DNA, 540 bp, Homo sapiens
tcctgcatctcaccaaccaataactactagtaaagatttaatcagatgctatagatgccaaagtcttattctcacccatttcgtactcacttacgaaagggtgggtcaagaggaattaaggaaatccaaaggtactcccagtttaagaagacagatggcatattaagagcactaatacttgagatttattatttaaacttaattttatgaaggtattttctagccctgttttactagaattaggatattaagtgatgtcaccattttcagcattttgactgagggttaatgatggattggaaattctagtagagacaaaggaactaatcatcaagatacgggttacagagtaagtgagctggaggccatctttttttcctgggaattataacaattgtttacataaacagtaggttaggtgtgcacactttatgtataatggaccctgacgatggaacccttccttgctgtttattcaagggccagagctgctgaaaccattattcttacttcccctgtctgcctctctcaaggagacgg

SEQ ID NO: 8547 - DNA, 2665 bp, Homo sapiens
agcaacaaaatgaaaaatgatatgccacagaggaaattttaccaaggaggtgaacgatttctacaaggaaaactacaaaacactgatgacaaagtttaagaggacggaaagaaatggacagtcatttcatgctcatggaaggaattcatagcattaaaatgaccacactgcccagagcagtctagagattcaatacaacccctaccaaaataccagtgtcatctctcacagaactggaaaatcgtaaaactcatatgaaaccaaaaaagagctcaaagagccaaagtcatcctcagcaaaaacaacaaaactagaagcaccccatttcactgcaaattagaatgacaaaatttttgacaagtgcatggtaaccaaaacagcatggtcctagcataaaactagacacatagatcaatgggacggatgacagagcccagaaagacagccacatagtcttggggcttgtgtctctcctgctgtgcatccatgctgggtgctttacatacaacaggcagacaagaagtccctgttgcaagtgaggacaaagtgtgggaaggccgtgagggtctgcagtcccagatggccttggcctcaccccgcagtgcgcttttgcaccagagtgccaccttcttctccaggtccaggtcttcagcagtgaccccagaccccagctgtaagggaggtggcagcatcagaggctccccttgcctgagtggcagcagaggaaacttgcatctatggggcctagaggcctgggatgtgggggagccattcctgggggcaagtgtctgccctggtgctgcatctgctgccttttcacactgggtgagaccccaagagacagcctgaggccggtcctcactcactgtctttgaggacctgaggggcagctgacagtgggatgaggctggccccctcctctttggtgacaggaagcctcccatggaactgtaggagctcacgatggcattttgtttggtgcacgaactcatccaggaggtctgggatctctggttttatccgacttctgacctctgggcatggaggtctctctgcagaggcccaggcctgggcacgaagggagagaggcctccattgtcccacaggggcctaaatgcagactgtgcatccccggtgccctcaggaacccttctctgatcatcaggattctcttggactctggggtccttgtcctgctcaggcatccctgcccccctcttcaggagggccctcaacacgatcttctctggacaggagtctggggcacaactggatgttgtgggccccaaaggggtgactccctgctcctgggccccacagagagtccttgtgctcagtgcactggctgagctgcaagacatcctggaattgggagcacacagcaccggcttgctgtggtacctgtgcattcaaattgaaggcaggatcgccagcaaggaacacagggcttgcaggatcacagaaaacccttggagttgttttgacacaccactgatgccaagtgtctgggtacttgtaggatggccctgccattccatccaggggcagtggcaacagggagattccacaaacaaagtgaactgggggatgggatgagcaggctccaggcaactgagccctactggcaggcccttggcccccggggccgggacaggggtgacagacacagagtgcccaggtaaccactcctgggagcagtggggaaccgtcggatgcttcaactcttgagagctgggctctaagcatccgccttagctgccaacttggccaaaggctatgcgagcagtttcccgttgacgggcaatgcatctttccaacctgagcgagtgggtgtgtgtgcaaagatggtgcgagtcacggatctgcgcaggaagggtgactttaagggattagcatggccaggtatgcacacaaggcacctgctggcaatgccttggtggggagcgggcagtgcacacaagaggtactggagggagaggcgcgcgggaagaacaggcgcgcacaatggctgcagatccacctgtggatcgctgaagattcctgctgagggttgaggctgctgggctggaggactgtatggtccatgcattgtaatgtccccttctctccctggcccggagccccaagagctatccggactctctccaagacctggttctggcccagcaaagaggtctcggcaggggagcaggattcccggcccagcagctggctcaggaggtgacagctttgggattcgcatctgagcatcctcctactcttctcctgggaactctgttggggagggttgctcagaacagaagtgcctgggacgcccagatcctgctggagtggcagctggggtgatggccagggcaggctgggagggacatactttccataggacccagtgctttcatctccgtgcaactgaccaagagaaaccaaacccaaactccttcctttacacagacctatttgagggaggctgggtattgtttgtgtatttcaacctaacaagattttgagatagttggaatgcagaaggagacaggaggactcaagtgtcctgtcttttgcaaaaatgtcaaacgtagctactcagtctcttttttgtttttttgtttgttttgaagactatggttattttgcaaaatatatattatttgagtttcaaaaaaaacta

SEQ ID NO: 8548 - DNA, 426 bp, Homo sapiens
cccctggaagtagccagacaaacagtggcctgaccactgcccccagccgtcagtctgtccttttgtgaccccttcttttagggctcctttgatgttcattttaatcctgataatacccccagatggaaatgccgggcagggaagtttacattgtgatttacctataacccacaccttttaaggaccccagtccaagcgatgaggcaagaacagagtcatggttaccgcccaagcagctctgcccactgtctggaggagaaagaaaaggtgagaccagagaagactgatacatgcaggtgaggggacggcattaccccagagtggagaaggaaagtagtacctactttaataaaggggcgttgttgcagtaaacatagttattaattgtggtatgtaacaatatatttgcaaacaagattgcccaga

SEQ ID NO: 8549 - DNA, 299 bp, Homo sapiens
tcccaggtcacccagctctgccttgctccttcccacatcagaaagtctctgggggaaagtgggggttaggacagtggctgccattcagcctcttccgtagccacctttgaggactggcccagtaactcggatagtgtcccaggcacctgcgggcttctgcgtggcaggcagactccagtggcaatggggtcccctcagggctgggctgcatggcgacttcttggttccttcctggatgtgtgtaagcatggactgctggccccctgtgcatggttccatcctcggtaggacggtgggcc

SEQ ID NO: 8550 - DNA, 453 bp, Homo sapiens
attgatctattcaaggacttcttcctgttttagtcttggtagggtgtatatgttcaaaaatgtatccatttcttctaggttttctagttcatttgcatataggtgtttatagtattttctgatggtagtttgtatttctgtggggtcagtggtaatatcttatttatcatttattgtttgtatttgattcttctctcttttcatctttattaatctagctagtggtctattttgttaatatttcaaaaaattggtgtaactttctaacttgctaatattgtacgcaactttaagcaacttttggattcactttatggctccaaattattgagaacacatgtgaacttctcctgagaatttttttcatgctcaattctttaatagtataggccaggcatttgaatatctacaggtgagcaaacatccagtcagtatatgaagtatctactcttt

SEQ ID NO: 8551 - DNA, 572 bp, Homo sapiens
ttttttttttttttttaactcgcctatttactggaggtctggcgcgtgcgttgcccttaacgcacggtctggttttaagggtctgaagtgtgcctgtctttccggatgaacagatgcaggagatgttcccctctctgggatacgtagtttcagagccgactgtggaggacttttaaagtttggttacacaataaagattttcttctgtaggtatagtaaggagaggaacacccttaactcgacacagacaggggtcatatgcagagggaccagactcccgttttggggtcctggaaggaattgcccttttatttggccacgtggagcactttggtattttgacagtcagatagatctaccgtaaatattgtggttgtagaacagaggtccctgtttccttgacatgcagttttctttattttgaagcctgtaatgacacatcgaatctttcctgcccttcagatatgtgttgcttccccttttgctccatcacttgtctacagccagagaaaattctctacttttaagagctcatgtgattactttggaaccacctgtaaaatccaggataa

SEQ ID NO: 8552 - DNA, 404 bp, Homo sapiens
gaatatttgggagagcagaatgcaatgatgcttatctaaggggatgtttcagtttgatttcagggctgtaaaaaatggtgaagccattaaaagagacatcccacttcaaatgatatagttatatttgtaaattgtcctattttgttaaacttaaaacagttctatatttaagtaactgtaactacttgtaggcattcggaagaataaaccttaaaataatttattgctttcatggtgattttattgaaaacgtcacttcctttaaatcatttcatcaattattctcataagaaaatacaatgtcagtgaaataaacagaaaatcaaataccacatgaactcacttataagttagagctaaatgacgggtacacatggacactcagagtgaaataatagatacta

SEQ ID NO: 8553 - DNA, 674 bp, Homo sapiens
atatattctgctttgggttctacattgtcagataatagtattatggctaatgagatacttaagtgaaaccagaataaaaccaaaagggaggagaattaacatgattgagcatctcctgttacaaacaactccacttgatgtgaatatcttttcaagcaattctgtgaaatcattatccccattctacaaataagaaaaccagggcttaaaacagccagatgttggtgcctggaatcacattgcttgtgagctgagagtcacgggtccaatctggttatgatgtttctgcttattccacactgaaacctacacatcacctatccacctaaaaacaaatgcattcagaatttgtgtcaggtgtttttatgaaaggagtcactttataagaaaaaaggccaggcatagtggcccatacctgtgacatcagcactttgggaggccaaagtatcactttggatcacttgagcccaagaattcacgaccagcctgggcaacaaagagagaccctgtctctaccaaaaaaataaaaataaaatttttttttaaagccacaggtggtgcatgcctagggtaccagctactcaggagggtgaggtgggaggatcactttggcccagggggttaaggctacaaaactacaaaaacctgggtgacaaagcaagagacctgtctca

SEQ ID NO: 8554 - DNA, 493 bp, Homo sapiens
gagagaaggagagagggtggaaagagaaggaaaggaaggaaaaaatcttcctgggcctttgctctgtttctacctgtcctcctcagggccttctgatgtaagcagagttcacctgttcaaatccaggggctagaattgtcctgtgtattcagaatgtcccaagttgctcagagctgctatcatctaagtctatttggtataggtattacctttaatttgaaggtaactcgtatcttacagtatctgaggtaaaaagaaaagcattagtctgacagaggtagtctaccattcatagttttgaaactagaacattttgctgacaaagagaaatgtatttttaagcctgagttcttaaaagaaaaaaaaaaccaacaacaaaaaaaacccttccatcctagtcctttagctgggctatttctgccagctccccggctatgaacacaacacattcttgcaattcatcacgtctcttggctcgagcctgcctttaaaa

SEQ ID NO: 8555 - DNA, 384 bp, Homo sapiens
taaaaaactgcagtctattctcatttcaattaaaatgaaatccagttcattaactttgttgtctgaagctggatgtgacctggtgcctgcctgcctctccatctcattgagtttccctgtcccctttgcccactatgctctagccctgtgctatccagtaagctagccactagtcttaggagctgttgaacccttgaaatgtggctagtccaaattgagatgtgctgtgagtataaaatataccttgaatttcagacttatgaaaaatcatgtaatattatctcagataataatgttatctcattaataatttttatattatttacatgtttatgataacattttggatatattgggttaaataaaatattttgttaaaattaa

SEQ ID NO: 8556 - DNA, 250 bp, Homo sapiens
tatgagctaagccccaggctcacctccaagtgcatatatgccacacaggcccaaaggagcaaagcagaggcttcgaaaactcaactgccatgtgaaccactgcccaggtcctagattaacccctgagtggcacatgcgctgggcaaacccaaacctcatagcaaaggctttaaaaactaaactgacattagagccactgtccacagaaggtgagacaaaacttgtggtctgagtctcactaggttgattc

SEQ ID NO: 8557 - DNA, 497 bp, Homo sapiens
gcaaacattgttgaatagacagctgagacaaaggctgtcagttttcccctgctcactttacatgcagaaacctgagaggcctttggaaactgcctcccaaacctaaaatgatcaaagagtatattgcataagtcactggggatttttgaaaaagaggcaactttgaagaagttgtgaaaagaatgcaggtgactttttaaatgcctgaatttctcttttagagatatacaaccacctcaggttaaattcaatggattttttcccttctgaaagctgccaagactttgccaaaatatatactgtgtatgtgagctattttattacctactgaaaaattgtctattattggtagaacaataatccatcctgtcacccagaaaagatgtgtagtagaaatagaaagtctttatgtctaggccaggcttttagatatattgagagaggcgacttcaggcagcctgtgatcagaggtgttgagttggcagcttgtgctgatt

SEQ ID NO: 8558 - DNA, 371 bp, Homo sapiens
gttatgatgaccatagttttaataaaagcatccttaaacatcacgtagagtgactcccagttttgttctttatcaaagtattggctattctaggttttttgtttttctatataagttttagaatcagtttgtcaatttctacaaaaaatcctggtgatatttaaattgagattgcattgaatctctagttcagtttggggagaattgacatcttaataaaattgactcagtccatgaacatgatacaactttctatttatttaagtctttggtttctctcagtggacatcattttagatccctgctgtctgctttcccttccctctgccagccttacaaggcaggttcaggagtgtggctgaattgatgga

SEQ ID NO: 8559 - DNA, 622 bp, Homo sapiens
atatttctgaacaataatacaatgagacaatctaccagtgttggaggacgatttggctaacatcctgacttgagcttaatcctctatcagtgcttcccatcccttctactctcttactatccaaagtatatctcatcttcctcttttcccactgggatttactgtaaacccttttctcctccaccatgaaaaactctgccaaggagcttgctgtcattcccagctaccatctcatgccttccatttcttgtactgccagacttcacaattatgaccaattggtgtccttactatttctctatcatacattgtttttatttctctatcatatttaactgcgttatgacttgaaacttctcaatccattggatttactctttctaaagcctctaatggccttagttgccaaatccatgacatttcttcagccattatttattttgatggtagtcatatttgtaccgtgaactcataaagtgcagcgtgtctgatcccccttatttgccaggttccacattcttctcccccacacttccttcctgtgtgatctggtatagtcccaggttttactttctgagagtgtgactcccatattaacatgtttatttctggctttcttaag

SEQ ID NO: 8560 - DNA, 320 bp, Homo sapiens
gaaaagtttttatataaagtctaataatttaaattatatgggcatgtaaaattgccttatattacaacgccagccctacagcaggtagaaaattcctttcaacattctgttgtaaacagtttagattcaactgatcagtcacaggggaatatgggcagtttcaacctcttaccacctttgtctctaaaaagaaattctggatagttctttgtatacttatattaaagccatttctgttcattaaaaactcaatataagcatgttgaagaaggggcaatggaacatgaagcaatgaataaaaagattctgtgcatgtataa

SEQ ID NO: 8561 - DNA, 410 bp, Homo sapiens
gattttccaaagttagtgtttgtcaagcacataattccatccctagtactgttctagatgctgtatgtacattatttctaatcctcctgtagtctctgggaagtaggtattactgagctcattttgcccatgagaaactgagtctgagaaaggttaaatatctagtccgcgtaaccatttatgtatttgtactggttaaacataatcatttatgcatttgtacaaccagtgagtgccttccaagattccaacccaactttgagggaatcccccaaagcatccaccacacaggggccctgtgggcttccaaatctttgctttccatggaactttgaatactcaggcacatttgcatgggctcttgcttctgtttggaatgccctcattcccttgcccgtctcacaggtgca

SEQ ID NO: 8562 - DNA, 595 bp, Homo sapiens
ccttctgctaaaaatacaaaattagctgggtgtggtggtacatgcctgttatcccagatactcaggaggctgaggcaggagaatcacttgaacccgggtggcagaggttgcagtgagccgagattgtgccactacgttccagcctgggtgacaaagcaagactccatctcaaaagaaaagaaaagaaaaagctagtgctcacaatgacttacaagactctaccacgtcatgtctccagttacatctcttaacccctcttcttgagaagagtggacccctcacatatgcttctatgttaggagatttacattggcagttctttctgctagcagggtctttcctggagatccaccttccttagtttctcatatatgaagtctgttcaagtatcactttgtcagtgaagcctgctgtgccccctactttatttaaaattgcaatcccccgccctcccttactgcacatttctggtctcttatcctctcctattttttttttccatagaatttatgacctattttattacatactctttattttgctcattgcctgtctccctctacccctacacttgaataaaagctgttatgtaaga

SEQ ID NO: 8563 - DNA, 741 bp, Homo sapiens
gtctgtaaaaaagaaaaagataaggtctgtcacccaggctggagtatagtggtatggtcatagctcactgcagcctgaaacttctaggcttaagcagtcctcctcctcagcttcctgagtggctgggactacaggtgcatgccattgcacccagctgtttaattttttgtagagatggggtctcagtatgttgcccaggctggtcttgacctccttggcttcaagcagtcctctgccttggcctcccaaaagtgctgggattacaaggatgtgccaagcctcaaatttctatctcatatcagacttctctcccagtctctcatattgaactgtctacttgacacctccacttagttatctggcatttcaaaatcagtatatctgaaactaaattcctgctaaccccttcaccagaaagaaaacatacacaaatcctacaaccttagcctttgccaaccatctcatttaatgacaattccatctttccagttgttgagactaaaacccaggagtcatccttgattcctttctttctgcagtaccctacttccgatctatcaggaagttatatttgctctgttttcataacttatccagaatcagtccacttcttacgaattccactaatttgactataatgcaagccacattatctcttgcctagattatattaatagacccctaacctgtttacgtgtttcctcccctctacaataaagtttctcaatacaattgccagaa

SEQ ID NO: 8564 - DNA, 832 bp, Homo sapiens
tagttttgtcattaaaattaacaaaaatattaactttgattacaggcgtgagccaccgcgcctggcccgcccctacatttcagaagcagcaacagggcatggaattcttctcatgctttgactctctcctgagattagattgggcctacccagatacttcagaataatctcatctccagatccttaaccttaattacatctgcataattccttttgtcaccttaaggtaacatattcacaggttccaggaaattagggaatggacatgtttggggaggcgattggtttgccaaccataatgaaggacataaacaaaaaaccaacttaaatggcacatttaaaacttgttgtgataccctaccttgtttaaacctgagtgactctctcctagcagacagagccggacagactccattttagtttctttgcttgcagccctctttatccccctaagggagtaactagtgcaagctgactccaagcacatccaggaattcacctgctgataagatattgaggcaagctgtaccagcagctcctgggaatgtgctcggtggaaggtacctaaagcccccgcatttatctcttagtgatagtttaagcccctgtacctggaactgtttattttttgtaactgcttctataaccaattaacttttttaactttttgcctattctgcttctgtaaaactgcttcagttaaacccccctcccctatttagaccttagtataaaagaaaatctagccccttcttcagggccgagagaattttgagcgctagctgtctcccggttgccggctaataaaggactccacaatttgtctccaagt

SEQ ID NO: 8565 - DNA, 470 bp, Homo sapiens
ccctaaatagcagcagtagattccataggaaatttgatattgcctgtgtaaggagtgacagacatttgctaccctgaataagataatttttatagaaaattgtttttcctagagtgaaagatcaatttttatatgaacaccaactaaaaatatagttgagttggccaattaaaatgtcttttgaggctgggagtggtggctcacacctcccagcactttggaaggcgaaggtgggcagatcacggggtcaggagatcgagaccatcctggctaacacagtgaaaccccgtctctactaaaaaaaaaaaaaaaaaaaaaaaattagccgggcgaggtggtgggcgcctgtagtcccagctactcgggaggctgaggcagtagaatggtgtgaacccgggaggcagagcttgcaatgagccgagatcacgccactgcactccagcctgggcgacagagcgagactccatctc

SEQ ID NO: 8566 - DNA, 489 bp, Homo sapiens
aatgagaaatctttgatggaattagccatgcagaacagatattaaatgcatcctcattcttctcatagtcaaaagtatttgcctaagctggatgggaaaaagagaatcccatttcactaagtataaaagaggggattttagagaaggtctcagaagaaagagatgtggcggtttggtgaaactcaccagaggctgaaccctctccagcataacacacggattgggaggagtggggtggcattaggccaggtgcgtagcccagtgctgctctctctggacttgtttgctagctgaactcatccatttgcataattttcagtgccatttctcagctgatgagtcctgaacttttgtcttgaggttagacttctccttcaaacagcagtcttaaacactcaacttctttcttgttttttccacttgtcaactcatgaacacctcaaccttgttaaatccaaagccaaactcatggcttggagtggtaggtga

SEQ ID NO: 8567 - DNA, 267 bp, Homo sapiens
gcttgtaggtacagagattgcatgtgtaatcaaaacctgctggacagaaatggtcctgagcgtctctgggtgtttggcctctgtttcatttcttattaaatgggggagatacagcaggattataaagactgcaggcaatgtctgtaaaatgcaaacatgccaggtttttggtaaatagtagctgttgcccttttctctaaatcagttaataagataaataaaagattttgccttatatagttcctcattcccctcctggccaccctc

SEQ ID NO: 8568 - DNA, 311 bp, Homo sapiens
caattataattgagactatctctactaaggtctaatatctctaatagaaataaggtcatgcctaaagaggttagaagatgcaaattcagtagccatactgttaacataattgctctaattctgtatccatgttttattaaagcattgtttttgtcaaaaaagaaaagcaagaaaagttgtctagttctagttttcagaaaggagaaagtgaaagcataacttgaattaaaattctaatgttggctactaaatagggaatatagaataatgtactggacagtttctttgtaaaatgcagacgcatgcttcag

SEQ ID NO: 8569 - DNA, 578 bp, Homo sapiens
tgtgagtgtttgacagccaggtcttggaaaggaaggccaacatgccctgggctgatcagactccatcatgttgactcctgggaggcacatttttgagaaacaattaggaaccaggaagcattctgaggaggaaagccaggataaagaagactcagataaaaaagtcatcccaccaggtctggatgcagtgtgactgtatcagtcagcttttgctgggttatgccaagtaacaaacaggattcaggctgaaagatcagctatgaaactgctggttttgaggcacaggaaaaagagtgatggcagaactgagaaatgactttaaagcctctgctcagaagtggcttatatccctctgttcacattttattggccacagagaatcacatgatcaaatatgtcttcagacttgatgggcttagggagataccatgctcccacagggaggggtggtaactatttggccagcacagagtagataccaacagttattaaactgtttgttgaatgaatgaatagatgaattctctgatcctggaaggatttaaataaagaatggatgaccatttgtattacctatc

SEQ ID NO: 8570 - DNA, 687 bp, Homo sapiens
tgtgagtgtttgacagccaggtcttggaaaggaaggccaacatgccctgggctgatcagactccatcatgttgactcctgggaggcacatttttgagaaacaattaggaaccaggaagcattctgaggaggaaagccaggataaagaagactcagataaaaaagtcatcccaccaggtctggatgcagtgtgactgtatcagtcagcttttgctgggttatgccaagtaacaaacaggtaccaaactcagtggcttataataattataataaaaagggttgttcttattaatgttgcacattgcctgcagtaggtgtgagcctgttctatgtttttttcattctaggattcaggctgaaagatcagctatgaaactgctggttttgaggcacaggaaaaagagtgatggcagaactgagaaatgactttaaagcctctgctcagaagtggcttatatccctctgttcacattttattggccacagagaatcacatgatcaaatatgtcttcagacttgatgggcttagggagataccatgctcccacagggaggggtggtaactatttggccagcacagagtagataccaacagttattaaactgtttgttgaatgaatgaatagatgaattctctgatcctggaaggatttaaataaagaatggatgaccatttgtattacctatc

SEQ ID NO: 8571 - DNA, 439 bp, Homo sapiens
gccacagtgaacatggacggaaaggagaccacagcacccgggcgtggcatggacagctttggagggcagccttgcactcagcagctgcccactccccatgcggagaaaatatgtccatgagcccgaggtgttttcagcaccatgtgcttaggccaaccctagtcttgattgacagtatcacataatcctagcatgtcagagctggaactatccaataagcacactgtgcagaaggggaaactgaggccatgacagtgacatgccccaagtcatagagtaagtggcagcaaatccagaacccgaatccgggggtctccaatcaggaaccttttgcatcccactttgctgttaactcagtcaccagcccatgcaatgtgggactagggctgctacacccccacccctatttcatcgaataaacacatcagtgcttactata

SEQ ID NO: 8572 - DNA, 389 bp, Homo sapiens
tgcgattaaaaaaaatgagaacaaaattctcactggctcattctatcccacctaacacctttcaggatcagcatagagtctcttgaacagcatgggtctgaaccactcagtccacttacatgcaggttttttcttttttaacagaagttacactgagtgtgcctgcctctccttccccctcttccacatccaccacctatgagacagcaagaccagcccctccccctcctcctcagtctactcaacttgaagatggcgaggctgaagacatttacgatgatccacttccccttagtgaacggcaaatatattttctccttcttaagattcttaataacagtcttttctctagcttactttattgtaggaaaatggtatataatacacat

SEQ ID NO: 8573 - DNA, 990 bp, Homo sapiens
cactcttaatgggagagctataaaaggcagagctatgtgtaaatattttaagagcatgcagccatcttggtgtgtgcatgagtattgtctcttttgatatcaggattatttattgctaacgtaaatagatagcattgtaaataatcatcacaatgatcaaatcactgaaccatgtctccgcacatttccctaaaagtacaatgtttagactgctatggtaatacatattttaaattctaaaagcatacacaatgtgtaactgaatggtttgtgaaaaatatattgatatatatactagttgctgtgaaaatatcatggaataatagggattttagggtggatactttattttcttttatatttctatatgttgcgttgtgatgacattatcttttaaattaaaaagagatttggctagttgtgtgtgtaatgttactttacagtccgactctcctgatgtacctcttttcatgatctttttctttccttcccaagaaactgaggaatgtttaatatgaaaacatacatcggatatgtgaaaagcacaacaaaattcttaatgtacacagtaaaaaagtaaatatataaatgtagatggcatttaggaccacagcttgctggatttgtgttagctatgggaataacttgattttgtataagctatttagagtgaggctggaggtggcagcttcacagaactggagaacacaggccaagtcccctccccaacctaattaggtcattcaggacagctaagtcagtatatttagagcaatactagcatacgtttttcttaattgtaatcagcattgaccaagtggtttggaaggaggcatgctttaatatcacaataattttgatttgtaaccagaaattaatcctgtgttatctaacttcataatagcaatattgccgaaagtaagggtattacaacaggtctttaagggggccggttacccttcacatactggtgtgtccaagttttttccc

SEQ ID NO: 8574 - DNA, 756 bp, Homo sapiens
  misc_feature (738)..(738): n is a, c, g, or t
  misc_feature (743)..(743): n is a, c, g, or t
  misc_feature (752)..(752): n is a, c, g, or t
cactcttaatgggagagctataaaaggcagagctatgtgtaaatattttaagagcatgcagccatcttggtgtgtgcatgagtattgtctcttttgatatcaggattatttattgctaacgtaaatagatagcattgtaaataatcatcacaatgatcaaatcactgaaccatgtctccgcacatttccctaaaagtacaatgtttagactgctatggtaatacatattttaaattctaaaagcatacacaatgtgtaactgaatggtttgtgaaaaatatattgatatatatactagttgctgtgaaaatatcatggaataatagggattttagggtggatactttattttcttttatatttctatatgttgcgttgtgatgacattatcttttaaattaaaaagagatttggctagttgtgtgtgtaatgttactttacagtccgactctcctgatgtacctcttttcatgatctttttctttccttcccaagaaactgaggaatgtttaatatgaaaacatacatcggatatgtgaaaagcacaacaaaattcttaatgtacacagtaaaaaagtaaatatataaatgtagatggcatttaggaccacagcttgctggatttgtgttagctatgggaataacttgattttgtataagctatttagagtgaggctggaggtggcagcttcacagaactggagaacacaggcccaagatgaggggatcctctagagngacancaggcagcnaagc

SEQ ID NO: 8575 - DNA, 851 bp, Homo sapiens
cactcttaatgggagagctataaaaggcagagctatgtgtaaatattttaagagcatgcagccatcttggtgtgtgcatgagtattgtctcttttgatatcaggattatttattgctaacgtaaatagatagcattgtaaataatcatcacaatgatcaaatcactgaaccatgtctccgcacatttccctaaaagtacaatgtttagactgctatggtaatacatattttaaattctaaaagcatacacaatgtgtaactgaatggtttgtgaaaaatatattgatatatatactagttgctgtgaaaatatcatggaataatagggattttagggtggatactttattttcttttatatttctatatgttgcgttgtgatgacattatcttttaaattaaaaagagatttggctaaaaaaaaaaaaaaaaaaaaaaaaaaaaaaaaaggggggggggaaaaataacctcccgggaggggggcacaaagtttatgcggcgacacccagtcttctttgtggtcaaacagagggggggccccataagagaggaggcgcgttaattaaaacagcaagaggagcagaggggcgcggctgttaaaacaaaaggctcggcgcgggcgggaaaacccggctctcgcggggcataccctggggagaaaggaacccctcattcgcggggggggggacacacaacggcgcgagcagcactgcccaaagaagaataaaaagagtcccacggacacataccaaacatccgcagcgctcttcacgggcgacacacacgaggccactaaagacggcggtctgaacaatcgcgcaccgactctgtttccgaacaatacttcgagg

SEQ ID NO: 8576 - DNA, 650 bp, Homo sapiens
cctgggcaacagtgagactccgtctcaaaataaaaaaacaaaaaaaatgtaaaaaataaataattgtattgaatttattagttgtgtctcagtctccttcagtctacagtttaggcttgcttttgcacctttgcattttaaggtaagaggctattgtgtaaactcgaattgggtttgttggtgtttcttcatgatttggttcaggctctgcattttgggcaggaatattcagaggtgatgctgtgttcctcccataggatcgtatcaggcgacacatgattatgaatttccccattattggtgatgtcacttagttgtgttgtctgccaggttctgccactgtaaagttaataagtattttgtagggaagtgctttgagactaaatatcctgttcctcatcaaacttctaccccctagtttcagtatctattgctgttttttgtctgaataactatgatagttgccaaatagtggtttctgatccttccattccttctacactgattggttggtattttgtacagaaaagctttctcatatctgatttacttgtctcaatatggacccatgggtatttgagtttcttgtggggttatttgttgttgtttttgagacagcctgggcaacaagagtgaaatccgtctcaaaa

SEQ ID NO: 8577 - DNA, 1371 bp, Homo sapiens
cctgggcaacagtgagactccgtctcaaaataaaaaaacaaaaaaaatgtaaaaaataaataattgtattgaatttattagttgtgtctcagtctccttcagtctacagtttaggcttgcttttgcacctttgcattttaaggtaagaggctattgtgtaaactcgaattgggtttgttggtgtttcttcatgatttggttcaggctctgcattttgggcaggaatattcagaggtgatgctgtgttcctcccataggatcgtatcaggcgacacatgattatgaatttccccattattggtgatgtcacttagttgtgttgtctgccaggttctgccactgtaaagttaataagtattttgtagggaagtgctttgagactaaatatcctgttcctcatcaaacttctaccccctagtttcagtatctattgctgttttttgtctgaataactatgatagttgccaaatagtggtttctgatccttccattccttctacactgattggttggtattttgtacagaaaagctttctcatatctgatttacttgtctcaatatggacccatgggtatttgagtttcttgtggggttatttgttgttgtttttgagacaggctcacccaggctggagtgcagcagcacgatcactgcttactgcttactgcagcctcgacctcccatgctcaagtgattctcccaccccggcctcccgagtggatgggactacaggcatgtgccaccaagcctaatttttgtattttttgtagagacagggtttcaccatgtgtcccaggctggtcttgagctcctgagctcaagcaatcctcccacctcggcctcccaaagtgctgggatgagccaccgcgactggccccacttaatgggttttcagaggtgggagcaaagaatgaagggaggaagagagctcccatcttttccattaccgtatttacttaaaactggaaaaaactgaaccactgggatggcatttcatttatcttttgaaatgaagaatagatacattaatttaaatgattctctaaagactgtccttcagcatccctaaagcattgcaaaactataggcacagtttttattttatctttctggcacctggtttgggctttggcttagattaaaaagacgagccttctcctgcccctgctcccttttattccctgccatctgctaagctcgactttttatctctcaggccaaatttgactctgtaagggactttgcataacgtttcatcctcagaatcgctaatgatgggcagaggactgttacatgtgttgggagggattaaagtatatgacctcagtgccacttaaaaaataaatactgtctcaactatcagtctggct

SEQ ID NO: 8578 - DNA, 1038 bp, Homo sapiens
tggataatcaagagagtctcagcctttaggtagctgacactgtgataagagcatcctgtgaactacccaaataaggaggaaaacgaacgcagctgagcatgggatgccatataaaaatcacttaaaccagtcgccactccttgtttcctgagttgtcctgtgctggaggtctgctcagacgaaggtctccatggcgttagaagtcttgatgctcctcgctgtcttgatttggaccggtgctgagaacctccatgtgaaaataagttgctctctggactggttgatggtctcagttatcccagttgcagaaagcagaaatctgtatatatttgcggatgaattacatctgggaatgggctgccctgcaaatcggatacatacatatgtatatgagtttatatatcttgttcgtgattgtggcatcaggacaagggtagtttctgaggaaactctcctttttcaaaccgagctgtactttaccccaaggaatatagatcatgaccctcaggaaatccatttggagtgttccacctctaggaaatcagtgtggcttacaccagtttctactgagaatgaaataaaattggatcctagtccttttattgctgactttcagacaacagcagaagagttaggattattatcttctagtccaaacttgctctgagctaaaggagaaatggaaacttgaagctggtgttatgtattttgcaggaaaacagtttcattttttcatagcaaaaatatagttggtgtatatctctccttaagtctctggtttctaaaaaccctacttcagtaaaggtcctgattagttgattagtgaatgtgtatttctaaatatttgtattcagtaggggtatggctgattaatttaacattaactattaggtaattcatattatacatttaagttctttctgttctgtgtagaagattcagaaatatgtcttcaaagacaatgacttgatctaattgataagaacctccaataaatatgttctaatatttttcaggaagaataaagaatagagagag

SEQ ID NO: 8579 - DNA, 521 bp, Homo sapiens
tggataatcaagagagtctcagcctttaggtagctgacactgtgataagagcatcctgtgaactacccaaataaggaggaaaacgaacgcagctgagcatgggatgccatataaaaatcacttaaaccagtcgccactccttgtttcctgagttgtcctgtgctggaggtctgctcagacgaaggtctccatggcgttagaagtcttgatgctcctcgctgtcttgatttggaccggtgctgagaacctccatgtgaaaataagttgctctctggactggttgatggtctcagttatcccagttgcagaaagcagaaatctgtatatatttgcggatgaattacatctgggaatgggctgccctgcaaatcggatacatacatatgtatatgagtttatatatcttgttcgtgattgtggcatcaggacaagggtaagaacagtgattgtttgtaaaaaatactgcatgttttgtcagacttttatgcctagtattaaaattgtcttttaaaaaaataatg

SEQ ID NO: 8580 - DNA, 715 bp, Homo sapiens
tggataatcaagagagtctcagcctttaggtagctgacactgtgataagagcatcctgtgaactacccaaataaggaggaaaacgaacgcagctgagcatgggatgccatataaaaatcacttaaaccagtcgccactccttgtttcctgagttgtcctgtgctggaggtctgctcagacgaaggtctccatggcgttagaagtcttgatgctcctcgctgtcttgatttggaccggtgctgagaacctccatgtgaaaataagttgctctctggactggttgatggtctcagttatcccagttgcagaaagcagaaatctgtatatatttgcggatgaattacatctgggaatgggctgccctgcaaatcggatacatacatatgtatatgagtttatatatcttgttcgtgattgtggcatcaggacaagggtagtttctgaggaaactctcctttttcaaaccgagctgtactttaccccaaggaatatagatcatgaccctcaggaaatccatttggagtgttccacctctagtgtttgatgcagaaatcatggggagactatctggaattagttcttctgtaagcctatctgctcaaatcctgtaccaagagtccacgaggatctagaaggcgtagtatgctggctctatgccatactcctgaatgactattctgtatatgatcatgatattaaacagtggtaaaactga

SEQ ID NO: 8581 - DNA, 335 bp, Homo sapiens
gcagcctcaacctcttgggttcaagtgatcctcccgcctcagcctcccatgtagctgggaccacaggcacatgccactacacccagctaatttttttatttttttgtagagatggggtctcactctgttgcccaggctggtggggatggtttttattattaaattactaggctgataaccaatagtcattatgaaaacataattcctcaaaactcttaggagcagcataattcgttagggtttaccattttgttatgccctaatttgtagagactcttaaacagatatcttatgtctgatccatactggcaaccagccagttgtccctggttttg

SEQ ID NO: 8582 - DNA, 334 bp, Homo sapiens
tttcagtaactactaggttgggacctacgctatcttttagggggagacattaaggatttagttaaggctccacagctgatgacagcagcgtttctccatccttcgagaaggccacccaaactgaggttgtactttctcagtagcggccacttggggcactagagctgcctcagtgaagtacgcaagggagcagcgggggtaccatcgaagctccacttcactgtgatcaagacagcagtggggtaccattgaggatcaaccctagggaccctgaaacagggtggcaacctccttatgttcctcaattggccttcccatcttttttttttttttg

SEQ ID NO: 8583 - DNA, 413 bp, Homo sapiens
acccacaacagtgaagtcctgctcaaaatgtcaatagtgtcaaggttgagaactcttgtcctagatgaggaaccttgtgggaattaactactcttactaagtacattatttttctcttgctgctataacaaataatcccaaacttggtggcttaaaacaatgcaaattttttcttttacatttatggaggccggaaatctgaaatcaggttcatttggttaaaatcaaggtgttggtagggctggttctttctgcagggtgtaggggagaatttgtttcattgcagctctagacctcttccagcttctagaggtcacctgcatcatggctctttcctgcatcgttttatcctctgcttccgtcatcacatctcctactgtgtttttgactcctagtgtgtgttttgtttcccc

SEQ ID NO: 8584 - DNA, 412 bp, Homo sapiens
agtttggtgttggaaagctgctttgtcatgtcatccttcagatttgagcatctctgctgctatacaactttttaaattcaagaaaaagaaaaataatattttaataattaagaaagcacattacatcataacatgttgaatgatactgtacaaatacatttaaaacatgattgcaatataacgtcaataagacattcaatgctttagtggcatacttatcatgtgcatttcctaatctaatgtcacatgcctgatttagagaagagtcatgaaaagcatgctgggccagtcttatcttctaaaacaaagtggcgatttgtccaaaatcagcgtaaccaatataccaattgaatttatatttctgcattgctgaaactctgaaaaatgaaagctttgaaaaacctcggaaaaa

SEQ ID NO: 8585 - DNA, 821 bp, Homo sapiens
ttatggccgggcgccatggctcactcttgtaatcccagcactctgggaggtgggtggagcacttgaggccaggagttcgagaccaacctgggtaatatggagaaaccttgcttctactaaaaataacaaaaaaaattagctgggcgtggtgacacctgtccgtaatcccagctacatgagagactgaggcatgataaccatttcaaccagggaggcagaagttgcggtgagccaagatcctgccactgtactccaacctaggcaacaaagtgagacttttatctagttgttctgcagtctcagtggcagtggcttttctccttttgtgaatatcaacaacaaactacagagttgactcacaggatgtaaaaaattggggtgacatgcatgggagactgtgttgatactaatatttgcatgactgattgagaaagtttgtcagaaacattgtcactagtactattgtaggaactacgctatgagtggggtgaagtcttgccctagcattagtataaatccttagcctgctgggcatagtcttaagaaacaacccattcagggtcgggtgtggtggcctgtaatctcagcactttgggaggtgggtggattgcttgaagtcaggagctcgagaccagcctggccaacatgacgagaccccgtttctacaaaaaatgcaaaaatcagctgggcgtggtggtacacacctgtaatcccagatacatgggaggccaaggcatgagaattgcttgaactggggaggcgaaggttgcagtgagccgagatcatgccactgcactaggtgacagcaagactgtgtctca

SEQ ID NO: 8586 - DNA, 598 bp, Homo sapiens
gcacgagtcttaaatcagatattcctaatgctattaatacttcctctaagcacgttggttttggggaggtgttatcccagttttacacataagtctgatgccagggaatggtgttaaagaaagtgagtaactgattaagtagaatatctgtgaagagagagcactgccattgaatattactggcttttccactctctgtcagctttagccttcaactcgttaggcttcttcaaacttaccttatataggtacatagaagtctcataaaaggtatggtctaaagcttttgtagcaaaagtttgatttttaatacttgcattgaatatggctgtgtctaattggggaaccaaatagtaagatcaatttcagagattactcaaaaagctaccatgcccctgcgctccttttttctcccctctgaacaatagtataaagtgagttgtgttgctctgtttttatgaaagtggggtgggatgtcaaattaagtggttcctaatgttagaatcagaattgtgggaagagagaagaggcagttgttcaaatatgaaacataaaagtgctgcagaggtacatgcagagtgtgtcagtagatggtaaa

SEQ ID NO: 8587 - DNA, 416 bp, Homo sapiens
cccccacactggaatcttctctgctttttttgttttgttttgttttagatatgtctgagtcttctgattctccatcttttaaaatgagaactaggtctttaaccttcagggcaggaggaaaaaagcccaaagcaaaatctgagacacatgaaccacagaatgcaaaaacaggagagggtttttcaaattggctgcacagaaatcaaacagacgtaggagtgaggtgaaaagaaggccaagacaaagaagcactgggtggcctatggatgccgcacatggggccacccttagagcagcagagcccaaggcctgagagcaccgactgcggggctcaggctggtctggccaagtgcctgctgacacagatggaagattctccaccaaagcccagttctaatgaccagcacacatgctac

SEQ ID NO: 8588 - DNA, 467 bp, Homo sapiens
aatgctacttactgtataattctacttacacaacgtttttgaaaaggcaaaactatagtgatagattagtagttactaggtgccacaggtagaaaaaaagtatttgctggcaaggtggcgaggaattttgggggtaatagaaatactctatatcatttttgtgatgcttacacaactgtccatctttgtcagaaatcatctatcctcccaacttatgaattttattctatataaattatatgtctataaagatgattttaaaaaacaatttatttttgcttttcagggtcagtgccaggggttgttcagcctacgtttagtaccactattcatctattatattcctgtcagcttgagagatacagtcagggagcacctaaaatcccgcagtgtttcagcacaaatacccggggcaagcctgggctagttttgttctactgctttctcagcaaaccataataggaggt

SEQ ID NO: 8589 - DNA, 762 bp, Homo sapiens
gtcttttgttctactactagccgacatagaaagcacctgtcatgtgccagtgtcaaatactgcgctaggaactgggaactcaaggcacaggagcctggcttttgcgcagggcgctcacaggccggtgggtgcaaaccctgaaggacacacagcctgtccctttagcgcccatcgcttctggtgtgagctcccgctaagggtgggtgagtactggggtgggcttccagaagaggcctcctttgagccgaatctgcagagaccaagtgtctatgagaactgctcaagagtgctttgcacattctcctccacaaaggtcgaggctcccactgcgcccaggaatgcgcctcgtcagacattaggcgccccttgattttgtgtttgcatctcacgcggtcctctagctgacaagtgcatcagaagagtcacagtggctgtcacaagccagagactcgcagaggacaggaacgcgggaaatctaggcaattacctccagcatataccaagagctattgcgaggatcagatccctttaaaaatggtgacgagacaggagagggcggctcctctagagctttccggaacgtctttacctctgtgtcctttataccttttatctcccccaaacaaggtccttagtcagtttctctttctatttccccatcttcctcccccacctccctgtgtagttctagggggaaaaaatgtgttgttttcctttttttctgatgcttctaatattaaatgcgtctattttcccactctc

SEQ ID NO: 8590 - DNA, 451 bp, Homo sapiens
ctccgtcatctgttcctgccttacttagatggaaaataatgaaatctgtgtaggaagggaggaaattctctgaagaggacactttacctggctggacaggaagcacggcagcatctactcggcttctgaggcgtcctcaggaaacctacaatcaaggtggaaggcgacaggggaagcagacatgttttatgtggctggaggaagaggaagagaagtggggggaggtgccacacacttaaacaaccaggtctcttgagaactccatcacaacagcaccacgaggatggtgctaaaccattcatgaaggatccaccaccacagtccagtcaccttccaccaggctccacctccaacactgggggttacaatttgaaatgagatttggtagggacacagaaccaaaccatatcagacagttcttaaaaatctttttcaatttaacatttaaacc

SEQ ID NO: 8591 - DNA, 527 bp, Homo sapiens
tttctttctttttttccccagctacagtgtaattgcctacctgcctgggccccttctagaggaaggtgggctttccttgtccgtcaggctgcactcatgaggtgatatcgtaaagcagcagaaagactgagggtgcaaagaaaccacagctgccattcacggggcagctccctctagctcttctgcccagtgaccttacaggctttagaggagcctgatgagagctatcctgggggccaagggatgcattccctgcagcttcctcctgggggacccacaggtcagcccattccaggagaagcagtcttaggcccgtttgcatcccctgccactgccatgtgcctgccagcccggtttctgatgaagacgtggctcagtccctgctctccttgtcgcagtggcttgtacttcatgtgcagtagcccagggcccgccttctagagtgaatgtttccctcgagcccttggatatttttattctattttgaatggttccgatcaattaatgttgctttgtgtggggttctt

SEQ ID NO: 8592 - DNA, 328 bp, Homo sapiens
ctgagacaaatttcaggaaagaatacttactatgcaaagtgaattctggtgtttcctacttgttaacagtttttaatattggatgaaaccacttaatcgatttcacttccaataatttgaaatacactgacttaaaagctttgccatagggcacaatcgccttttaatactaagaaagtaagggagatgtgttccaaggggcaaaagaaataatgcatttttggccaggtgcggtggctcacgcctgtaatcccagcactttgggaggccgaggcgggcagatcacctgaggtcgggagtttgagaccagcctggccaacatggagaa

SEQ ID NO: 8593 - DNA, 514 bp, Homo sapiens
cacgcctggcccttgctcctggatttttggcttggaatagccttgtcccatctctgtgataaaatcccagttgttctttgagtgcccacccgtggagaccctcttcataaagctgctcttaaaccctgtcccttttccccatccccagttccacacacctgggagcacctctaatcacctctgctagaagtcgtctcccccagaacatttggattctctctcttggctttttatcatagttcaccttcttttctgtttatatgaatacttgtcttatttcttctaggaacctgtaaaatcctagaagacaaggaacctgtctttttcctttctctttcattccccctcttccctctcttccaccctactccctcttcctttccctctcccttcagtatcatgaacctcggagccccaccctagaactcctgaatcagacactttgagggtggctgggcgcaatggctcacggctgtaatcccagcacttggtgaggccgaggcgggtggatcac

SEQ ID NO: 8594 - DNA, 372 bp, Homo sapiens
ggtgccacatgtctaactcatctcctactgttagcagaggtttctggcaaagctaaaaattatgattaaacaggccaggcatggtggctcatgtctgtaatccctgcactttgggaggctgaggcgagtggatcacctgaggtcaggagttcgagaccaacctggtgaaacctggtgaaaccccgtctctactaaaaatacaaaaattagctgggtgtggtggcgggcacctgtgatcccagctactcaggaggctgaggcaggagaatcacttaaacccgggaggcagaggttgcagtgaactgagatcgcaccactgttctgcaggctgggagacagaaggagactctgtctgaaaaaaaaaaaaaaaaa

SEQ ID NO: 8595 - DNA, 486 bp, Homo sapiens
ggttttgctccagacttaaggtgcacggaaaccggagcattcagcccttcatggatgcctcccgaaaacctcaccatgccagtgacacgactgcaaacggcgggtggcacatgccgggggcttgggatgggagggtttggaaacctcgctccaaggacgccctcagccaaggagcttcggctccttcctagaatttctagaagcacttttggagggaccgagggcttccggccgggcccagaggaatttgagcgcttgcccgggcaggcagaagcgcagcctggggagtggagaggctgctgggccacattccggcccagcttcccccgctaggccccagccctgccgcggcgccccaggaagcacctccgaaaacaaagcgctgtggtttcagcccaaggttaaagtccaccgcgagcgtgttttttcccccctccagaatctaagagcgatagcgtttctccaaataaaccgccaataaatcag

SEQ ID NO: 8596 - DNA, 305 bp, Homo sapiens
ggctaatttacaaaaaaaattctataattaaaatcagtaaataatagcatatgtatcgtttaacatgttaattaatagccagagtaaatccctgcacactatggtattgttaccttagtgagtcataggatgtaagcataataaataactgtacatttggcataataaatgtgtaaaataagtacttcagacgtcattatttagcagtttaaaaatgatgccaactgcatatggaatatttaatgaagttttcttgtgggaatacagaaattgattttatcaaaggattaaacagattttttaaa

SEQ ID NO: 8597 - DNA, 536 bp, Homo sapiens
tattaaattccttcaatcaatgactgtatattagttagagaatagcataaagttccttttgcctatcattttgaagataatgtgacttctgcaacccacctacaaagcacttttaaacttcgtcagacctgcattaacctattgtcaacctactttagtaaaggaggctttgacaataattttcttcaatgacatacagtattttatagttagtcataagctttcaccactagctttgacaatgatatactgcgatctttggtcttctggaataagttatctacaataaagaagtccttaatgacatcaacatccctactgtgactaagcagaagcatgcttttatttccttgctactgcagaaatactaagatcaatatatttaaggtaaagcaaaaaaaaagaaaaaaaacacgcaaaaatcccataacaaaatatagatgaaaaattgtggctctgtgggtggcatcctttgcttgtatgtaccaagttcttccggggatagactataaaattggtttcagacagtgtttgag

SEQ ID NO: 8598 - DNA, 880 bp, Homo sapiens
ctaactgatatgccggtaggatggggggaccttgccacaaggtataattgtggtgggatggctgtgtcttgctcccattcaggatccatggaaagctcctcctccttcctgttcccctggatgccaagcgatgggcctgagaccctggctttgccatgtggatgctccccctcaggactttggatgtgcagtgattgctacaaaaagggcaatgaagatgcctggaccacagccacacagtctccatcacagcagtggtattctgtggaatgagtactaattttctggccacattttctgttaaaaactggttgttgagctgcccacttgtcttggtcaagggatgctggagtggcctgggaaggcagtgttgtttgcttttcttaggatggaacacacttaggcatatttttggtcaaagcaaaagaagaattcaaaggtgagagaagttgaagataaaaaggggaaaatgagggtagcagatgaagcaaagtcacacagaaagctggcaggcgagtagtagaatcagagtacaggctgagcatcccaaatctgaaaatccaaaatcggaagtgctccaaaacctgaaacttttggagcaccaacacaatgctcaaagtaaatgctcagtgaagcattttggatttcatattttcagatttgggtttgcccaaccggtgtaatacaaatattccaaaatcaaaaaaaaaaaaaaaaaaaaatctaaagtctgaaacactcctggtcccaagcattttgaatacaggatactcaacctgtatgacactttcctattggaccctctttcctaccccaaataatacttaataagtttttgtttcaaaagtgccactctgagcatctttggctataaggagca

SEQ ID NO: 8599 - DNA, 611 bp, Homo sapiens
ccagtgctgttggtatctctgcctcctttcatactgtttctaagtgtttgtaactattcaatgtagagagtatcttttatatctcaattaggtcattgcaattcccctagctttttgttccttctcccaaattatatatgtaacgtggggaaaagcaagttgaaagatgagtgtgctgctattaggggaaagacaggttaaataagggaaattattctaaggttgacttgtccatctctcaaaatctgattgtgtcttctcccgaattttatcttcgatactgagccactcttttccctgtgccttcccaaactctgtagctattccttttattttcaattgctccctaatgcatcttttaaacaaccattaaagctgtggtacattacttataataagtactcaatacatgtttcttcacgttttcagtgccttacattaattttaaaatttgaacttttagatgcactttcacttaggatgtttggacctcgtagcagctctgacaaattccttcgtaccactcattcactaggttatatttagctagtgaggaaactaaaacgtaaaaagttgagccacctcattctcaattcttcatgccttccgtt

SEQ ID NO: 8600 - DNA, 959 bp, Homo sapiens
gtcttccctatcttctgccatattctaagctttgcatatgttctcctgaggaacaggatagttataacttaaacttgcatttatatatttctgattaagttgttaactatggttctagatagaagaataaagaagtaaaattagatttcttaatttgatatatttaagtcccttattttgatctaatatatttgataaaatagtaatcttttaatagtagccctgttatacataataataatacctatcagatagggttgtggtgaggattagaccatatagtaaatgtaacatgtctagtgctgtgccctgaacttaacacgtgcttattaaatattaactattgctattaccattatcatcatcattaataaacatctatattttatatccccatgacttaatgtacagtataaagcataaatagtaaaattacccaaagacaaagaggaatgggaaggtccagttgattagcttcttgtttagagaagcagattattccgggggttaggaaatagtttcctgtaaggcatgtttagctttcattcatggattgatggcaatataaatcgctcttttgatgtgagaaaaatataatgatggcattacatcaattataaatttcatgagggtagggactgtgttcggtttaccttgtgtccttagctcccattttaatgtctgacccatggaaggcatttcattaaatatttgttgtcatctgtctatgttttcttctttgtctttctttagcttccaaaaagagttgtttttatattcataatttcttatttcatcagtaatgtgactcccctagaagtattggttaaaatacagatctttcttggaaggagactgttttgtttgaagcaaatgacttgggagatgacttaagaacattcaggctttaggtgtttttgtagaaagactaatatttggtcctaaaaaacaaaaaaaac

SEQ ID NO: 8601 - DNA, 550 bp, Homo sapiens
tcagacgaattcctgggaactgcggatatagctcgccacagtatcttatcagttaattgcattcttggatgtgctgggagtcagcttgcacaagttaagtccttgaggaaggggctgccagtgaaagagccaagatggagtctgtctggctctcttatgtaagggagagtcaattcaggtggaaacaagtctaggtgattaaaggaaagggagaatctaaaaacagggttagtaaaaacaaggttgggcattacatcacagaatcctctagtgagaactgatagtggaacagtgtgctcgttggtgaccttacctcgttagatgcagtctttattttttatttttttgagacggagtttcactcttgttgcccaggctggatgcaatggcgtgatctcggctcaccgcaatctccgcctcctgggttcaagcgattctcctgcctcagcctcccgagtaggtgtcattacaggcatgcgccactgcacctggctaattttttgtatgtttagtagagatggagtttctccatgtaggtcaggctggtctc

SEQ ID NO: 8602 - DNA, 720 bp, Homo sapiens
cagcagtgcaaagccctgaggtgggagtgtacatggcatcctgaaagaaaagcaagagggccaggatagcgggggcagagcaagctggccagggtggtgggaaatgaggcctcagaagtggctgggccagttgcgcagggctttgtggctttcgttctcagtaaaatgggagaccattacagggttttgggcagaggagtgacataatttttcggtatttattttgaaaattttcaaacctacagaaaagttacaataatggtacaaagaaccaatgtatatccttcacattgattcatcagttgttaacattttgcctatgcttctcacctaccatacacacttattttaggggaacaaggtaacaagaagttgcagacttcatgaatcttcaccctaaaatattttgctatatatctcataagagcaaagatactgtcttatgtaggtacaatgcatttatcaaattgaggaaatttaacactaataaaatattactatataaaatatacagtccatattcagattgctccatttgtcccttacttacttttgtgacactttgtttttcctgcttcagggtccaattcaagattactcttgacatttattgtcatgatattgtctgtttggtaatcctttattttggaagagtttctcagtctttgtctttcataacattgacgtttttaaaaagatagccagttcttctgtagaatg

SEQ ID NO: 8603 - DNA, 2268 bp, Homo sapiens
  misc_feature (1580)..(1580): n is a, c, g, or t
gtgttgatatgtgagaatgtgtgtgtatgtcactgtggggaggtggctccaggcttcctggtgtgcccggggtggccacagtaaggaggctgcactcaggccctgcccgtactcctgccctccccgggtggcccaaccttgtgtgactgcaagtgactggaggaggccagggggttggaggacgtgtccaggtcctatgtcacaggccaggggcacatccacacacctgcgcccctggctgagctgtgttgtcagggaccctcagcacctgggaaggtgtggggaggccaagaggccaggtcctaggaaggcttgtagtggacccttcatctgcccaggggatccatttgtggggtcaagggaggtcctccagccaggcccaccccgaccccggccagagcatcttccccacccctgggctcccacccagctgcccactggcccacgtccctacctgtccccggttcttgccgctccctgtcctgggaggcaggttgggatctggccttacttccagtaaaatgacttctctttcatattaggccaaggcgagagagcggagacatttatgaaactttgtttaatgtactgaaaagccatcggccagaacatttaggaaattgattttcctggcattgatgaactcgttttattttaccccagtattaattacttttttttaaaacaaattaatttaagagtcgtaaaacctaacaagtgagccaaacgtccatagatcgtgtcctgctccgcccctccccacactgaccccctccctctatgggtgggggcccccagtggggggacctcctgtccctcccactccctcccagaggtgatgcgcccccatcctcctctgcaggagaggcctcctcgctgcgggactacgcggcctccaccatgaccgagttcctcggcatgtttggctatgatgaccagaacacgcgggacgagctggccaggaagatcagctttgagaagctgcacgcgggctccaccccggaggcagccacctcctccatgctgcccacctccgaggataccctcagcaagcgggcgcggttctctaagtatgaggagtacatccgcaagctcaaggctggcgagcagctctcctggccggcccccagcaccaagaccgaggagcgggtgggcaaggaggtggtgggcaccctgcccggcctgcggctgcccagcagcacggcccacctggagaccaaggccaccatcctgcccctgccgtcgcacagcagtgtccagatgcagaacctggtagcccgggcctccaagtacgacttcttcatccaaaaactgaagaccggcgagaatctgcggccccagaacgggagcacctacaagaagccatccaagtacgacctggagaatgtcaagtacctgcacctcttcaaacccggggagggcagccccgacatgggcggggccatcgccttcaagacaggcaaggtggggcgcccttccaagtacgacgtccggggcatccagaagccaggccccgccaaggttccgcccacccccagcctggctcccgcacccctcgccagcgtgcccagtgcccccancgcccccgggccagggccagagcctcctgcctccctgtccttcaacactcccgagtacctgaagtcaaccttctccaaaacagactccatcaccacggggaccgtctccactgtcaagaacggactgcccacagataaaccagccgtcactgaagatgtaaacatttaccagaaatatattgccaggtaggcccctggggaggagcctgccgtggagagaaggtggggggccaggactgaccgggcactctgaggccattcgtttgatatctgacctctagggccaaggtagctgcctcctcccatccccatccacttcggtccctccaccgcaccgagggctgccctgcacgcccgtttgggagcctccctctgctctgtgtagtccaggccacacattccctcagcagcctgtgcccccagttagggccggggtcccgacgcagggcctggccacaggtgagtgcagctcccccagcttgcctgggtcctgctgtcacacagagccttgagtagggtgcaggccaccgtgaaactgtcagggctgggaaggtagaggcaggccaggtgcagtggctcatgcctgtaatcccagcactgtgggaggccaagatgggaggatcacttgaggccaggagtttgagatcatcctgggcaacagagtgagaccctatctctttaaaaaaac

SEQ ID NO: 8604 - DNA, 933 bp, Homo sapiens
taggggactggggtgttgttggataccaatgcgctgtggcctgtgtgcgccgtttacacggcacacccgcctccatcatggagaggatctctgcaagcaagggcctcatctcgcccatgatggccaggctggctgcagctgccctcaagccctctgccacctttgacccaggtgagcaggctgggtcctgcccagaaagcaggcaccttctggactggggtggccacctggcctcaggctgcagagcagagtcggggggtgtttggaagaagtgtccgtgtggcccctgcttgccagcaccccctctttgcctgatcttcgcccccatcctgttggtttctatgtggggcccctggttctggctccccacagtaggggggccatgcttctgtttccccatctgtgagctgggggcgatggtccctgcctcctcggctgccctgcatccctggggccactgcaggtcccccctccctgtctgctcaccctcccacatcccaagtccaccctgataagagcaggcccagggcccctggcgtgccgagcgtttcctccagctgacctggagcagggcctgcgtccagcccagcggtagtggggctgcacctcacacctggacacctccaggcccagggacgcccttcccaggctccctcctccatgagtgccattgcagtaggactttccaggccttggaagccttctattctgcagtgtttgacttggcagccactggccacgtgtgactgttggtgcttgaagctgggtctgtgattgggaagcgggattgtcactttaaacaaccacacttggccagggactgccacgtcagacagaaaagggccagagccccggagttgcatcttccttcttcacgctggttcactgaggggcgcagttctctttcctgccttcctataatttcataaatat

SEQ ID NO: 8605 - DNA, 4363 bp, Homo sapiens
  misc_feature (1580)..(1580): n is a, c, g, or t
gtgttgatatgtgagaatgtgtgtgtatgtcactgtggggaggtggctccaggcttcctggtgtgcccggggtggccacagtaaggaggctgcactcaggccctgcccgtactcctgccctccccgggtggcccaaccttgtgtgactgcaagtgactggaggaggccagggggttggaggacgtgtccaggtcctatgtcacaggccaggggcacatccacacacctgcgcccctggctgagctgtgttgtcagggaccctcagcacctgggaaggtgtggggaggccaagaggccaggtcctaggaaggcttgtagtggacccttcatctgcccaggggatccatttgtggggtcaagggaggtcctccagccaggcccaccccgaccccggccagagcatcttccccacccctgggctcccacccagctgcccactggcccacgtccctacctgtccccggttcttgccgctccctgtcctgggaggcaggttgggatctggccttacttccagtaaaatgacttctctttcatattaggccaaggcgagagagcggagacatttatgaaactttgtttaatgtactgaaaagccatcggccagaacatttaggaaattgattttcctggcattgatgaactcgttttattttaccccagtattaattacttttttttaaaacaaattaatttaagagtcgtaaaacctaacaagtgagccaaacgtccatagatcgtgtcctgctccgcccctccccacactgaccccctccctctatgggtgggggcccccagtggggggacctcctgtccctcccactccctcccagaggtgatgcgcccccatcctcctctgcaggagaggcctcctcgctgcgggactacgcggcctccaccatgaccgagttcctcggcatgtttggctatgatgaccagaacacgcgggacgagctggccaggaagatcagctttgagaagctgcacgcgggctccaccccggaggcagccacctcctccatgctgcccacctccgaggataccctcagcaagcgggcgcggttctctaagtatgaggagtacatccgcaagctcaaggctggcgagcagctctcctggccggcccccagcaccaagaccgaggagcgggtgggcaaggaggtggtgggcaccctgcccggcctgcggctgcccagcagcacggcccacctggagaccaaggccaccatcctgcccctgccgtcgcacagcagtgtccagatgcagaacctggtagcccgggcctccaagtacgacttcttcatccaaaaactgaagaccggcgagaatctgcggccccagaacgggagcacctacaagaagccatccaagtacgacctggagaatgtcaagtacctgcacctcttcaaacccggggagggcagccccgacatgggcggggccatcgccttcaagacaggcaaggtggggcgcccttccaagtacgacgtccggggcatccagaagccaggccccgccaaggttccgcccacccccagcctggctcccgcacccctcgccagcgtgcccagtgcccccancgcccccgggccagggccagagcctcctgcctccctgtccttcaacactcccgagtacctgaagtcaaccttctccaaaacagactccatcaccacggggaccgtctccactgtcaagaacggactgcccacagataaaccagccgtcactgaagatgtaaacatttaccagaaatatattgccaggttctcgggcagccagcactgtggccacatccactgtgcctaccagtaccgcgagcactaccactgccttgaccctgagtgtaactaccagaggttcacgagtaagcaggacgtgatccgccactacaacatgcacaagaagcgcgacaactccctgcagcacggcttcatgcgtttcagcccgctggacgactgcagcgtctactaccacggctgccacctcaatgggaagagcacccactatcactgcatgcaggtgggctgtaacaaggtgtacacgagcacgtctgacgtgatgacccacgagaacttccacaagaagaatacccagctcattaacgacggcttccagcgcttccgagccaccgaagactgtggcacagccgactgccagttctacggacagaagaccacgcacttccactgcaggcgccccggctgcacattcactttcaagaacaagtgtgacatcgagaagcacaagagctaccacatcaaggacgatgcctacgccaaggacggcttcaagaagttctacaagtacgaggagtgcaagtacgagggctgcgtgtacagcaaggctaccaaccacttccactgcatccgcgccggctgcggcttcaccttcacctccaccagccagatgacctctcacaagcgcaagcatgagcgccggcacatccgctcctcgggcgcgctggggctgccgccctcgctgctgggcgccaaggacacggagcacgaggagtccagcaacgacgaccttgttgacttctccgccctgagcagcaagaactccagcctgagcgcctcccctaccagccagcagtcctctgcgtccctggctgccgccactgccgccaccgaggctgggcccagtgccaccaaacctcccaacagcaagatctcggggctgctgccccagggcctgcctggctcaatccccctggccctggccctctccaactcgggcctgcccacccccacgccctacttccccatactggctggccgtgggagcacctccctgcctgtgggcacccccagcctcctgggtgccgtgtcgtctgggtcagcagcctcagccacccctgacacacccacgctggtcgcctcgggagctggagactcagcccccgtggctgccgcctctgtcccggcaccacccgcctccatcatggagaggatctctgcaagcaagggcctcatctcgcccatgatggccaggctggctgcagctgccctcaagccctctgccacctttgacccaggaagcgggcagcaggtcaccccagccaggttccccccggcccaagtgaagccggaacccggtgagagcaccggcgccccaggcccccacgaagcctcccaggaccgcagtctagacctgactgtgaaggagcccagcaacgaatcaaatggccacgcagtcccggcaaattcatctcttttatcctcgcttatgaataagatgtctcagggcaaccctggcctgggcagcctgctgaacatcaaggcggaagcggaggggagccccgctgcggagccctcgcccttcctaggcaaggccgtgaaggcgctggttcaggagaagttggcagagccctggaaggtgtacctgcgcaggtttggtacaaaggacttctgtgacggccagtgtgacttcctccacaaggcccacttccactgcgtggtggaggaatgcggcgcgctcttcagcaccttggacggggccatcaagcacgcaaacttccacttccggacagagggaggagcagcaaaaggaaacacagaggctgcctttccggcctcggccgccgagaccaaacctcccatggccccctcgtcccctccggtccctcctgtcaccacggccacggtgtcctctctggaggggcccgctcccagcccggcctccgtgccctccacccccaccctgctcgcctggaagcagctggcttccaccataccccagatgcctcagatcccagcgtcagtgcctcacctgcccgcctcgcccttggcaacgacttctctagagaacgccaagccccaggtcaaacccggattcctccagttccaggagaacgatccttgcctcgccacggactgcaagtacgccaacaagttccacttccactgtctctttgggaactgcaagtacgtctgcaaaacgtctggcaaggccgaatcccactgcctggaccacatcaaccccaacaacaacctggtgaacgtgcgagaccagtttgcatactactctctgcagtgtctctgtcccaaccagcactgcgagttccgaatgcgtgggcactaccactgcctccgcaccggctgctattttgtgaccaacatcaccaccaagctcccctggcacatcaagaagcatgagaaggcggacgggcgggcagccaatggcttcaaatacttcaccaagcgcgaggagtgtggcaggctaggttgcaagtacaaccaggtgaacagccacttccactgcatccgggagggctgccagttctccttcctcctcaagcaccagatgacctcccacgcgcggaagcacatgcggaggatgctggggaagaacttcgaccgcg

SEQ ID NO: 8606 - DNA, 3445 bp, Homo sapiens
  misc_feature (1580)..(1580): n is a, c, g, or t
gtgttgatatgtgagaatgtgtgtgtatgtcactgtggggaggtggctccaggcttcctggtgtgcccggggtggccacagtaaggaggctgcactcaggccctgcccgtactcctgccctccccgggtggcccaaccttgtgtgactgcaagtgactggaggaggccagggggttggaggacgtgtccaggtcctatgtcacaggccaggggcacatccacacacctgcgcccctggctgagctgtgttgtcagggaccctcagcacctgggaaggtgtggggaggccaagaggccaggtcctaggaaggcttgtagtggacccttcatctgcccaggggatccatttgtggggtcaagggaggtcctccagccaggcccaccccgaccccggccagagcatcttccccacccctgggctcccacccagctgcccactggcccacgtccctacctgtccccggttcttgccgctccctgtcctgggaggcaggttgggatctggccttacttccagtaaaatgacttctctttcatattaggccaaggcgagagagcggagacatttatgaaactttgtttaatgtactgaaaagccatcggccagaacatttaggaaattgattttcctggcattgatgaactcgttttattttaccccagtattaattacttttttttaaaacaaattaatttaagagtcgtaaaacctaacaagtgagccaaacgtccatagatcgtgtcctgctccgcccctccccacactgaccccctccctctatgggtgggggcccccagtggggggacctcctgtccctcccactccctcccagaggtgatgcgcccccatcctcctctgcaggagaggcctcctcgctgcgggactacgcggcctccaccatgaccgagttcctcggcatgtttggctatgatgaccagaacacgcgggacgagctggccaggaagatcagctttgagaagctgcacgcgggctccaccccggaggcagccacctcctccatgctgcccacctccgaggataccctcagcaagcgggcgcggttctctaagtatgaggagtacatccgcaagctcaaggctggcgagcagctctcctggccggcccccagcaccaagaccgaggagcgggtgggcaaggaggtggtgggcaccctgcccggcctgcggctgcccagcagcacggcccacctggagaccaaggccaccatcctgcccctgccgtcgcacagcagtgtccagatgcagaacctggtagcccgggcctccaagtacgacttcttcatccaaaaactgaagaccggcgagaatctgcggccccagaacgggagcacctacaagaagccatccaagtacgacctggagaatgtcaagtacctgcacctcttcaaacccggggagggcagccccgacatgggcggggccatcgccttcaagacaggcaaggtggggcgcccttccaagtacgacgtccggggcatccagaagccaggccccgccaaggttccgcccacccccagcctggctcccgcacccctcgccagcgtgcccagtgcccccancgcccccgggccagggccagagcctcctgcctccctgtccttcaacactcccgagtacctgaagtcaaccttctccaaaacagactccatcaccacggggaccgtctccactgtcaagaacggactgcccacagataaaccagccgtcactgaagatgtaaacatttaccagaaatatattgccaggttctcgggcagccagcactgtggccacatccactgtgcctaccagtaccgcgagcactaccactgccttgaccctgagtgtaactaccagaggttcacgagtaagcaggacgtgatccgccactacaacatgcacaagaagcgcgacaactccctgcagcacggcttcatgcgtttcagcccgctggacgactgcagcgtctactaccacggctgccacctcaatgggaagagcacccactatcactgcatgcaggtgggctgtaacaaggtgtacacgagcacgtctgacgtgatgacccacgagaacttccacaagaagaatacccagctcattaacgacggcttccagcgcttccgagccaccgaagactgtggcacagccgactgccagttctacggacagaagaccacgcacttccactgcaggcgccccggctgcacattcactttcaagaacaagtgtgacatcgagaagcacaagagctaccacatcaaggacgatgcctacgccaaggacggcttcaagaagttctacaagtacgaggagtgcaagtacgagggctgcgtgtacagcaaggctaccaaccacttccactgcatccgcgccggctgcggcttcaccttcacctccaccagccagatgacctctcacaagcgcaagcatgagcgccggcacatccgctcctcgggcgcgctggggctgccgccctcgctgctgggcgccaaggacacggagcacgaggagtccagcaacgacgaccttgttgacttctccgccctgagcagcaagaactccagcctgagcgcctcccctaccagccagcagtcctctgcgtccctggctgccgccactgccgccaccgaggctgggcccagtgccaccaaacctcccaacagcaagatctcggggctgctgccccagggcctgcctggctcaatccccctggccctggccctctccaactcgggcctgcccacccccacgccctacttccccatactggctggccgtgggagcacctccctgcctgtgggcacccccagcctcctgggtgccgtgtcgtctgggtcagcagcctcagccacccctgacacacccacgctggtcgcctcgggagctggagactcagcccccgtggctgccgcctctgtcccggcaccacccgcctccatcatggagaggatctctgcaagcaagggcctcatctcgcccatgatggccaggctggctgcagctgccctcaagccctctgccacctttgacccaggaagcgggcagcaggtcaccccagccaggttccccccggcccaagtgaagccggaacccggtgagagcaccggcgccccaggcccccacgaagcctcccaggaccgcagtctagacctgactgtgaaggagcccagcaacgaatcaaatggccacgcagtcccggcaaattcatctcttttatcctcgcttatgaataaggtaagagccatccatcacacgcctcccgttcccccacccagagaaattaaagctgtgctggggggtggggggatgtgtttgttttttaatgttttgcctctaataagatgagtttgtaccatttaaattttgaggccatttttcatcggatataatttcagagccactgcttacaaattaatttaatgaactggctgaagaaatatat

SEQ ID NO: 8607 - DNA, 3755 bp, Homo sapiens
  misc_feature (883)..(883): n is a, c, g, or t
aagagctgcctcccgagggtgtctacatggtgcagccccaggggtgcagcgatgaggaagaccacgcggaggagccctccaaggacggcggtgccctggaggagaaggattcggacggggcagcctccaaggaggacagcggccccagcaccaggcaggcttcaggagaggcctcctcgctgcgggactacgcggcctccaccatgaccgagttcctcggcatgtttggctatgatgaccagaacacgcgggacgagctggccaggaagatcagctttgagaagctgcacgcgggctccaccccggaggcagccacctcctccatgctgcccacctccgaggataccctcagcaagcgggcgcggttctctaagtatgaggagtacatccgcaagctcaaggctggcgagcagctctcctggccggcccccagcaccaagaccgaggagcgggtgggcaaggaggtggtgggcaccctgcccggcctgcggctgcccagcagcacggcccacctggagaccaaggccaccatcctgcccctgccgtcgcacagcagtgtccagatgcagaacctggtagcccgggcctccaagtacgacttcttcatccaaaaactgaagaccggcgagaatctgcggccccagaacgggagcacctacaagaagccatccaagtacgacctggagaatgtcaagtacctgcacctcttcaaacccggggagggcagccccgacatgggcggggccatcgccttcaagacaggcaaggtggggcgcccttccaagtacgacgtccggggcatccagaagccaggccccgccaaggttccgcccacccccagcctggctcccgcacccctcgccagcgtgcccagtgcccccancgcccccgggccagggccagagcctcctgcctccctgtccttcaacactcccgagtacctgaagtcaaccttctccaaaacagactccatcaccacggggaccgtctccactgtcaagaacggactgcccacagataaaccagccgtcactgaagatgtaaacatttaccagaaatatattgccaggttctcgggcagccagcactgtggccacatccactgtgcctaccagtaccgcgagcactaccactgccttgaccctgagtgtaactaccagaggttcacgagtaagcaggacgtgatccgccactacaacatgcacaagaagcgcgacaactccctgcagcacggcttcatgcgtttcagcccgctggacgactgcagcgtctactaccacggctgccacctcaatgggaagagcacccactatcactgcatgcaggtgggctgtaacaaggtgtacacgagcacgtctgacgtgatgacccacgagaacttccacaagaagaatacccagctcattaacgacggcttccagcgcttccgagccaccgaagactgtggcacagccgactgccagttctacggacagaagaccacgcacttccactgcaggcgccccggctgcacattcactttcaagaacaagtgtgacatcgagaagcacaagagctaccacatcaaggacgatgcctacgccaaggacggcttcaagaagttctacaagtacgaggagtgcaagtacgagggctgcgtgtacagcaaggctaccaaccacttccactgcatccgcgccggctgcggcttcaccttcacctccaccagccagatgacctctcacaagcgcaagcatgagcgccggcacatccgctcctcgggcgcgctggggctgccgccctcgctgctgggcgccaaggacacggagcacgaggagtccagcaacgacgaccttgttgacttctccgccctgagcagcaagaactccagcctgagcgcctcccctaccagccagcagtcctctgcgtccctggctgccgccactgccgccaccgaggctgggcccagtgccaccaaacctcccaacagcaagatctcggggctgctgccccagggcctgcctggctcaatccccctggccctggccctctccaactcgggcctgcccacccccacgccctacttccccatactggctggccgtgggagcacctccctgcctgtgggcacccccagcctcctgggtgccgtgtcgtctgggtcagcagcctcagccacccctgacacacccacgctggtcgcctcgggagctggagactcagcccccgtggctgccgcctctgtcccggcaccacccgcctccatcatggagaggatctctgcaagcaagggcctcatctcgcccatgatggccaggctggctgcagctgccctcaagccctctgccacctttgacccaggaagcgggcagcaggtcaccccagccaggttccccccggcccaagtgaagccggaacccggtgagagcaccggcgccccaggcccccacgaagcctcccaggaccgcagtctagacctgactgtgaaggagcccagcaacgaatcaaatggccacgcagtcccggcaaattcatctcttttatcctcgcttatgaataagatgtctcagggcaaccctggcctgggcagcctgctgaacatcaaggcggaagcggaggggagccccgctgcggagccctcgcccttcctaggcaaggccgtgaaggcgctggttcaggagaagttggcagagccctggaaggtgtacctgcgcaggtttggtacaaaggacttctgtgacggccagtgtgacttcctccacaaggcccacttccactgcgtggtggaggaatgcggcgcgctcttcagcaccttggacggggccatcaagcacgcaaacttccacttccggacagagggaggagcagcaaaaggaaacacagaggctgcctttccggcctcggccgccgagaccaaacctcccatggccccctcgtcccctccggtccctcctgtcaccacggccacggtgtcctctctggaggggcccgctcccagcccggcctccgtgccctccacccccaccctgctcgcctggaagcagctggcttccaccataccccagatgcctcagatcccagcgtcagtgcctcacctgcccgcctcgcccttggcaacgacttctctagagaacgccaagccccaggtcaaacccggattcctccagttccaggagaagtgagtccctcgatgagccgggagtcccgcgttcccctcgcgtctcgggagtaggtgctagcaagggcgctaggaggccctgttcctcactgcggatggtgctgctgtccccagcctctctggggcatggccatcgggtgatgtccttctagccaaagatgctgctgctcctacctcactgcctgtcccagagcaggccagcccgcgtgggccgatggtggcggcagtggctactgctcctgcagggcatgtggtgatcctgccagggccaggtggggtggactgggcgtggtggtcctcagaggacaactcccagcctgacaaggagggctgcgtctccctccgagcctccgtattggcctcctctgtggctcacacccatggctgaatctctgcagggcacgtgaagtcacgggtaggggccaggcccctccaggccgtcactggcctgcacagtggtctgagctcttgggtggaagggaccctcctcactggatggtggtggctccttgcagggagaacggtgactttgtattgtcatgtgtgcggcttcctgttctcaataaaagtaataaattggattatttatatcgcctga

SEQ ID NO: 8608 - DNA, 4452 bp, Homo sapiens
  misc_feature (1580)..(1580): n is a, c, g, or t
gtgttgatatgtgagaatgtgtgtgtatgtcactgtggggaggtggctccaggcttcctggtgtgcccggggtggccacagtaaggaggctgcactcaggccctgcccgtactcctgccctccccgggtggcccaaccttgtgtgactgcaagtgactggaggaggccagggggttggaggacgtgtccaggtcctatgtcacaggccaggggcacatccacacacctgcgcccctggctgagctgtgttgtcagggaccctcagcacctgggaaggtgtggggaggccaagaggccaggtcctaggaaggcttgtagtggacccttcatctgcccaggggatccatttgtggggtcaagggaggtcctccagccaggcccaccccgaccccggccagagcatcttccccacccctgggctcccacccagctgcccactggcccacgtccctacctgtccccggttcttgccgctccctgtcctgggaggcaggttgggatctggccttacttccagtaaaatgacttctctttcatattaggccaaggcgagagagcggagacatttatgaaactttgtttaatgtactgaaaagccatcggccagaacatttaggaaattgattttcctggcattgatgaactcgttttattttaccccagtattaattacttttttttaaaacaaattaatttaagagtcgtaaaacctaacaagtgagccaaacgtccatagatcgtgtcctgctccgcccctccccacactgaccccctccctctatgggtgggggcccccagtggggggacctcctgtccctcccactccctcccagaggtgatgcgcccccatcctcctctgcaggagaggcctcctcgctgcgggactacgcggcctccaccatgaccgagttcctcggcatgtttggctatgatgaccagaacacgcgggacgagctggccaggaagatcagctttgagaagctgcacgcgggctccaccccggaggcagccacctcctccatgctgcccacctccgaggataccctcagcaagcgggcgcggttctctaagtatgaggagtacatccgcaagctcaaggctggcgagcagctctcctggccggcccccagcaccaagaccgaggagcgggtgggcaaggaggtggtgggcaccctgcccggcctgcggctgcccagcagcacggcccacctggagaccaaggccaccatcctgcccctgccgtcgcacagcagtgtccagatgcagaacctggtagcccgggcctccaagtacgacttcttcatccaaaaactgaagaccggcgagaatctgcggccccagaacgggagcacctacaagaagccatccaagtacgacctggagaatgtcaagtacctgcacctcttcaaacccggggagggcagccccgacatgggcggggccatcgccttcaagacaggcaaggtggggcgcccttccaagtacgacgtccggggcatccagaagccaggccccgccaaggttccgcccacccccagcctggctcccgcacccctcgccagcgtgcccagtgcccccancgcccccgggccagggccagagcctcctgcctccctgtccttcaacactcccgagtacctgaagtcaaccttctccaaaacagactccatcaccacggggaccgtctccactgtcaagaacggactgcccacagataaaccagccgtcactgaagatgtaaacatttaccagaaatatattgccaggttctcgggcagccagcactgtggccacatccactgtgcctaccagtaccgcgagcactaccactgccttgaccctgagtgtaactaccagaggttcacgagtaagcaggacgtgatccgccactacaacatgcacaagaagcgcgacaactccctgcagcacggcttcatgcgtttcagcccgctggacgactgcagcgtctactaccacggctgccacctcaatgggaagagcacccactatcactgcatgcaggtgggctgtaacaaggtgtacacgagcacgtctgacgtgatgacccacgagaacttccacaagaagaatacccagctcattaacgacggcttccagcgcttccgagccaccgaagactgtggcacagccgactgccagttctacggacagaagaccacgcacttccactgcaggcgccccggctgcacattcactttcaagaacaagtgtgacatcgagaagcacaagagctaccacatcaaggacgatgcctacgccaaggacggcttcaagaagttctacaagtacgaggagtgcaagtacgagggctgcgtgtacagcaaggctaccaaccacttccactgcatccgcgccggctgcggcttcaccttcacctccaccagccagatgacctctcacaagcgcaagcatgagcgccggcacatccgctcctcgggcgcgctggggctgccgccctcgctgctgggcgccaaggacacggagcacgaggagtccagcaacgacgaccttgttgacttctccgccctgagcagcaagaactccagcctgagcgcctcccctaccagccagcagtcctctgcgtccctggctgccgccactgccgccaccgaggctgggcccagtgccaccaaacctcccaacagcaagatctcggggctgctgccccagggcctgcctggctcaatccccctggccctggccctctccaactcgggcctgcccacccccacgccctacttccccatactggctggccgtgggagcacctccctgcctgtgggcacccccagcctcctgggtgccgtgtcgtctgggtcagcagcctcagccacccctgacacacccacgctggtcgcctcgggagctggagactcagcccccgtggctgccgcctctgtcccggcaccacccgcctccatcatggagaggatctctgcaagcaagggcctcatctcgcccatgatggccaggctggctgcagctgccctcaagccctctgccacctttgacccaggaagcgggcagcaggtcaccccagccaggttccccccggcccaagtgaagccggaacccggtgagagcaccggcgccccaggcccccacgaagcctcccaggaccgcagtctagacctgactgtgaaggagcccagcaacgaatcaaatggccacgcagtcccggcaaattcatctcttttatcctcgcttatgaataagatgtctcagggcaaccctggcctgggcagcctgctgaacatcaaggcggaagcggaggggagccccgctgcggagccctcgcccttcctaggcaaggccgtgaaggcgctggttcaggagaagttggcagagccctggaaggtgtacctgcgcaggtttggtacaaaggacttctgtgacggccagtgtgacttcctccacaaggcccacttccactgcgtggtggaggaatgcggcgcgctcttcagcaccttggacggggccatcaagcacgcaaacttccacttccggacagagggaggagcagcaaaaggaaacacagaggctgcctttccggcctcggccgccgagaccaaacctcccatggccccctcgtcccctccggtccctcctgtcaccacggccacggtgtcctctctggaggggcccgctcccagcccggcctccgtgccctccacccccaccctgctcgcctggaagcagctggcttccaccataccccagatgcctcagatcccagcgtcagtgcctcacctgcccgcctcgcccttggcaacgacttctctagagaacgccaagccccaggtcaaacccggattcctccagttccaggagaagtgagtccctcgatgagccgggagtcccgcgttcccctcgcgtctcgggagtaggtgctagcaagggcgctaggaggccctgttcctcactgcggatggtgctgctgtccccagcctctctggggcatggccatcgggtgatgtccttctagccaaagatgctgctgctcctacctcactgcctgtcccagagcaggccagcccgcgtgggccgatggtggcggcagtggctactgctcctgcagggcatgtggtgatcctgccagggccaggtggggtggactgggcgtggtggtcctcagaggacaactcccagcctgacaaggagggctgcgtctccctccgagcctccgtattggcctcctctgtggctcacacccatggctgaatctctgcagggcacgtgaagtcacgggtaggggccaggcccctccaggccgtcactggcctgcacagtggtctgagctcttgggtggaagggaccctcctcactggatggtggtggctccttgcagggagaacggtgactttgtattgtcatgtgtgcggcttcctgttctcaataaaagtaataaattggattatttatatcgcctga

SEQ ID NO: 8609 - DNA, 3799 bp, Homo sapiens
  misc_feature (1580)..(1580): n is a, c, g, or t
gtgttgatatgtgagaatgtgtgtgtatgtcactgtggggaggtggctccaggcttcctggtgtgcccggggtggccacagtaaggaggctgcactcaggccctgcccgtactcctgccctccccgggtggcccaaccttgtgtgactgcaagtgactggaggaggccagggggttggaggacgtgtccaggtcctatgtcacaggccaggggcacatccacacacctgcgcccctggctgagctgtgttgtcagggaccctcagcacctgggaaggtgtggggaggccaagaggccaggtcctaggaaggcttgtagtggacccttcatctgcccaggggatccatttgtggggtcaagggaggtcctccagccaggcccaccccgaccccggccagagcatcttccccacccctgggctcccacccagctgcccactggcccacgtccctacctgtccccggttcttgccgctccctgtcctgggaggcaggttgggatctggccttacttccagtaaaatgacttctctttcatattaggccaaggcgagagagcggagacatttatgaaactttgtttaatgtactgaaaagccatcggccagaacatttaggaaattgattttcctggcattgatgaactcgttttattttaccccagtattaattacttttttttaaaacaaattaatttaagagtcgtaaaacctaacaagtgagccaaacgtccatagatcgtgtcctgctccgcccctccccacactgaccccctccctctatgggtgggggcccccagtggggggacctcctgtccctcccactccctcccagaggtgatgcgcccccatcctcctctgcaggagaggcctcctcgctgcgggactacgcggcctccaccatgaccgagttcctcggcatgtttggctatgatgaccagaacacgcgggacgagctggccaggaagatcagctttgagaagctgcacgcgggctccaccccggaggcagccacctcctccatgctgcccacctccgaggataccctcagcaagcgggcgcggttctctaagtatgaggagtacatccgcaagctcaaggctggcgagcagctctcctggccggcccccagcaccaagaccgaggagcgggtgggcaaggaggtggtgggcaccctgcccggcctgcggctgcccagcagcacggcccacctggagaccaaggccaccatcctgcccctgccgtcgcacagcagtgtccagatgcagaacctggtagcccgggcctccaagtacgacttcttcatccaaaaactgaagaccggcgagaatctgcggccccagaacgggagcacctacaagaagccatccaagtacgacctggagaatgtcaagtacctgcacctcttcaaacccggggagggcagccccgacatgggcggggccatcgccttcaagacaggcaaggtggggcgcccttccaagtacgacgtccggggcatccagaagccaggccccgccaaggttccgcccacccccagcctggctcccgcacccctcgccagcgtgcccagtgcccccancgcccccgggccagggccagagcctcctgcctccctgtccttcaacactcccgagtacctgaagtcaaccttctccaaaacagactccatcaccacggggaccgtctccactgtcaagaacggactgcccacagataaaccagccgtcactgaagatgtaaacatttaccagaaatatattgccaggttctcgggcagccagcactgtggccacatccactgtgcctaccagtaccgcgagcactaccactgccttgaccctgagtgtaactaccagaggttcacgagtaagcaggacgtgatccgccactacaacatgcacaagaagcgcgacaactccctgcagcacggcttcatgcgtttcagcccgctggacgactgcagcgtctactaccacggctgccacctcaatgggaagagcacccactatcactgcatgcaggtgggctgtaacaaggtgtacacgagcacgtctgacgtgatgacccacgagaacttccacaagaagaatacccagctcattaacgacggcttccagcgcttccgagccaccgaagactgtggcacagccgactgccagttctacggacagaagaccacgcacttccactgcaggcgccccggctgcacattcactttcaagaacaagtgtgacatcgagaagcacaagagctaccacatcaaggacgatgcctacgccaaggacggcttcaagaagttctacaagtacgaggagtgcaagtacgagggctgcgtgtacagcaaggctaccaaccacttccactgcatccgcgccggctgcggcttcaccttcacctccaccagccagatgacctctcacaagcgcaagcatgagcgccggcacatccgctcctcgggcgcgctggggctgccgccctcgctgctgggcgccaaggacacggagcacgaggagtccagcaacgacgaccttgttgacttctccgccctgagcagcaagaactccagcctgagcgcctcccctaccagccagcagtcctctgcgtccctggctgccgccactgccgccaccgaggctgggcccagtgccaccaaacctcccaacagcaagatctcggggctgctgccccagggcctgcctggctcaatccccctggccctggccctctccaactcgggcctgcccacccccacgccctacttccccatactggctggccgtgggagcacctccctgcctgtgggcacccccagcctcctgggtgccgtgtcgtctgggtcagcagcctcagccacccctgacacacccacgctggtcgcctcgggagctggagactcagcccccgtggctgccgcctctgtcccggcaccacccgcctccatcatggagaggatctctgcaagcaagggcctcatctcgcccatgatggccaggctggctgcagctgccctcaagccctctgccacctttgacccaggtgagcaggctgggtcctgcccagaaagcaggcaccttctggactggggtggccacctggcctcaggctgcagagcagagtcggggggtgtttggaagaagtgtccgtgtggcccctgcttgccagcaccccctctttgcctgatcttcgcccccatcctgttggtttctatgtggggcccctggttctggctccccacagtaggggggccatgcttctgtttccccatctgtgagctgggggcgatggtccctgcctcctcggctgccctgcatccctggggccactgcaggtcccccctccctgtctgctcaccctcccacatcccaagtccaccctgataagagcaggcccagggcccctggcgtgccgagcgtttcctccagctgacctggagcagggcctgcgtccagcccagcggtagtggggctgcacctcacacctggacacctccaggcccagggacgcccttcccaggctccctcctccatgagtgccattgcagtaggactttccaggccttggaagccttctattctgcagtgtttgacttggcagccactggccacgtgtgactgttggtgcttgaagctgggtctgtgattgggaagcgggattgtcactttaaacaaccacacttggccagggactgccacgtcagacagaaaagggccagagccccggagttgcatcttccttcttcacgctggttcactgaggggcgcagttctctttcctgccttcctataatttcataaatat

SEQ ID NO: 8610 - DNA, 299 bp, Homo sapiens
tttattactactactaaattcgcggccgcgtcgacgcaaactcctccaacactcctcagaccccctaccctgctttatcgaccccagttgcacgtttcaccttggaggatatattttgcatttctgtttacttgttattgcctatctcccctccttgaatgaaagttttactcgggcaggtaccttatcttcttcactgtttatatctgacatctcagcggtacctggtctatagtaggtgtttaataaaaatatttgctaaaaaaaaagtcgacgcggccgcgaatttagtagtagta

SEQ ID NO: 8611 - DNA, 313 bp, Homo sapiens
ccccagtcctggcattgcagaatgggaaagtcaatatcacacgttaactcagagaggccttccctgaccacccagtcccaggacgcaaactcctccaacactcctcagaccccctaccctgctttatcgaccccagttgcacgtttcaccttggaggatatattttgcatttctgtttacttgttattgcctatctcccctccttgaatgaaagttttactcgggcaggtaccttatcttcttcactgtttatatctgacatctcagcggtacctggtctatagtaggtgtttaataaaaatatttgctaaaa

SEQ ID NO: 8612 - DNA, 263 bp, Homo sapiens
ccacacctcacccatgttgctagatttagttaccctaatcacaggcccactgaccagcccattcagcactgtgtaacttatttttggggaaggagactttcttactgaggtctgtgaaagtatgtatcattgctcaaaattccgtttttgtttttaatgagagacatttgtcttttggaataaaccttcacccacagtggtaaaggggataccaagaagcttgtttgacagatattttgaatttggacacaaaaacgtcgacg

SEQ ID NO: 8613 - DNA, 824 bp, Homo sapiens
gtggcttttgcaataaagacatttagttatgtaacataacaggatttaagaggaagaaggcaaggacttgaaaaggctcagtgatgtagctgaggccccagattccttttatcattttgtccaaaggctccaccttcctgaatattactgctttatacccttggagcttcatgatcacaggatggctgttatagctccagccatcatgaccaagttcagactccaggaacaagatggaggaagctatgtcaaggggggcttttcttgatgtgtctctcgcctttaaccagtgaagaaaatcttcttagaaggacacagcagacttctccttatgtctcattatgcagaagtggaccacaggacagtccctactgtaaactctttcaagtatcaggcaaaaaggaacaaaaggccccagcctggcttaaaccaaccttgagtcatcacctgacactggacactttgtttatccaagcaaaatcaggattttctgttagcaagcaaaggaactgctcatgggtaagaaattaacagtgtgtgccataattcatatttgtcgccaagcatcttctcaggctgacactgtgccaaacaagggattatagagatgaagatgcagcttccatccctgaaagctcacagtccattctctcagggcaatcccggtaacctcctcatcacaatcatccatccagatcatggaagtccctttactccccaaataagaaggagtagcaggaaaaagtgacctcatcaagctgactcgagtttttccaaaagcaaataaataaataaataactttttaacctgcacagccaaatat

SEQ ID NO: 8614 - DNA, 313 bp, Homo sapiens
ggggggttggggggtgtttttttttctgagcttcctgtggtattgaaactatctcccacttcctcctttttgtctcaaaagatcttaagcattgggccagacacagtggctcctgcctgtaatcccagtactttgggaggccgaggtgggcagattgctttagcccaggtgttcgagacgagtctgggcaacgtaaaaatagcccatctctaaaaaaataaaataaaataaaagcaggaaaagaggggcaaatgaggagtcgggggacttgtgatcttcatttttgcccagggatggaagctcgtgcccgaat

SEQ ID NO: 8615 - DNA, 421 bp, Homo sapiens
cctgcacagccaaatatcaaataaatacatgtgtgttttttgggggggttggggggtgtttttttttctgagcttcctgtggtattgaaactatctcccacttcctcctttttgtctcaaaagatcttaagcattgggccagacacagtggctcctgcctgtaatcccagtactttgggaggccgaggtgggcagattgctttagcccaggtgttcgagacgagtctgggcaacgtaaaaatagcccatctctaaaaaaataaaataaaataaaatacaaaaattagccaggcatagaggtggatgcatgtagttccagctacctgggaggctgaggtgggaggatcacttgagccccaggggttgaggctgcagtgaaccatgatcatcacatctgggcaacagagcaagaccctgtctc

SEQ ID NO: 8616 - DNA, 461 bp, Homo sapiens
tctcccaaagtgctaggattacagacgtgaaccactgcacccagccaaataattcaaacttaaagctgttggaacttaaattgttctgagtcttgagaggaatgtgactatgcagcctgagtcacatggcatgcagctgcaacttctgccttttttccacctataaataattgagactaagtggtgccagagataaaaccccctcagatcactgccccttctacagagtaataatgtcatcttccttgggatgcagcaatctgtaaccaatcaaatcactgtaacatatgcactgtcttgtatggaaaatgttataatcctgctaaaatttttctgtctgtctctgtataagtaaaaccttaacttcttcactttggaacgctgaacccattcgtttggagttgaggtctcctgggtggtatccgcacactcaaataaactctatgtgtaatcatatttta

SEQ ID NO: 8617 - DNA, 572 bp, Homo sapiens
actagattgatttttcttgcccttgagtgtcacagtggtggcactctatactttaaaaagtgtgaaataacaaccaggagagatagggaaaacccaattggcttttaaaaaaatgaatacatgtcaaagattttatattaggcattaattaataattaattaactggcaaagtaagtggttactgcagtccaaaggaaaatccaaagagtagacacatacataggcaatggagaatgtgaaaatgaatttgttagcagacgcacagctggcttctcccatgggcagggtggagtgtgggattaggtgtgtcttaactggacaagatttgtttgcagtaatatcagtattctttaagagttgtaaatagatcagtaaaaatactaaaaggtgtagtcccctgtagaatcagatagcccagaaaagtgtgctagacaacacctgaagttccgctgaaaagatacccagtgatcactttttgcccatttcaaatctttctcagtttatctgactgtgcttcccccctcctcccctgtgatcgtaataatctcagtgattatccttcatttaaaaa

SEQ ID NO: 8618 - DNA, 218 bp, Homo sapiens
gaacttaaaaagagttatacttccttagtatgagaattgtattgtggttatacaagataatgtccctgttcttctgaacaggaagtggaaaacgtcgacaattctcaaatggctcagaaaaaaaagaaaaacagagacataaacatggcaaaatgttaactaataaatctttgtgaagggtgtatgggtagtaataacacaacttttctttaggtttg

SEQ ID NO: 8619 - DNA, 412 bp, Homo sapiens
cacatatttggatatagttctgttctggcttaaatgttactgtatagaaataaaggtttacagaaggtcattctgtgaacagaggtatggaaagtctacacgtggcacttcctgtgaacagatggcatggtacgttaagagagcataaggtgggatttctgttatgggcaaagggggaaatgaatctgaaaggacagggcaaggtcaaggtggtggaaaggcctttattctatgctgagaagtttgaaccctctgttgccagaggaggtcttgattaaaaaaatcagcctagtagcaatatagaagattgatggaggagaaaggaaagtggtgccagggagactagattgtgatcatttcagtatttaaagttagataaaagctaagtctgaatttcagtaggaacagagga

SEQ ID NO: 8620 - DNA, 574 bp, Homo sapiens
tctgagattccccaaagtggaaagtcctaggaatactgcctgaaatgacagtgcatttgctgttcaggtaaaattctttaggaattttctctgattctgatttctatttctaaaattttcgatcatcttcaccattttcccccaaaaaatgaggggtgcatttctgtcattttgtgtgtggttgggtggtattgttgcgtctcagttaggggttgtgaaatggaagctctggagggaggaaaggcattcttggtttgcaactgagagcaaaaggtaccacctaagcatcttctgtgagactagggtgcttcctttagataaatgtgtatctgtaatcagcttaactaagcaggtaaggtgttcattagctaggcagggttttcaaagagagagagagggagagtgagaggaagagagagagaatgaatgtggaagagtgagaagaacaaacaagtcaaagcatttgttcatgctgcaatctacacatcaattatcccgctgtgctaattaccacctttccataccccaggtacctaagcattcacacttactcactttcatgcctctgatcaaa

SEQ ID NO: 8621 - DNA, 908 bp, Homo sapiens
gtataatatataaccaactgtttcgggctagtgggtttttagaccacatagcctttggggatgatgctgttagaagagcttgcttcgcatttgtttttaaaaagcttttcatccttacagtgcaaattttaagatagaagaactcctatataagcagtgcccactttctgcatcttgatattttgcccatttgtttaatgttctttttaatgaccaacacattgacttctcactacttagttgacagtttctgctgatgtccaacctaatgaaggcagtaacacacgttcacttaggatctggccatatggcaattcgctttaaacaatagtgttcaggaagaaatatattgtatgtataaaagtagggactgcttatttcttaggattcctcataaactgtgggctatagatcttaaaaggcagggatcgaggaaggataatgtcaaattctgccataacacaaacctctataagagatatctcagaattccagtctatccagtggcctacttatttcacacagttccaattttacagaagaatatagctactcttttggagtaaaagtaaaaatcttcgatttgcctttccaccagtccagtatccagaatgttatatattaataaattagtgaattctgttgcagagatagggagaaaggaagaggaactgctttagagtcagaatgataatttcaagaaaaactttgtcagaagacgttgctaaccattaaagagacgtacctgtggctgggcatggtggctttcgcctgtagtcctagctactggggaagctgaggtaggaggatcgcttgagcccaggagtttgaggttgcagtgagttatgattgcagcacggcactccagcctgggcagcagagtgaggaccctgtctcaaaaaaaaaaa

SEQ ID NO: 8622 - DNA, 673 bp, Homo sapiens
cttgtttccttttagtattttcctagcctgtggtaggtaggttgaaatagatatataacattgactttttctattacgtggaagctgttcagataattaacaaaggaaatcaatgacacacaactcagtttaagtgttgttttttctttagggtatgttgtgcagaagaaagagagctagcctaagagcattggacttttgggagctgtccagactcccccgccccccagaaccctgctgaagcccacctgcctagtccagtgaataaaaaaagtgcatgtctcacttcttttcagtgtccttcagagatgtgccattattactattttcttgacacattctgtgaattactagatcagggcaacaatattggaaacattaaatattcaaaatacaatctaaaatagatatgtactgctggcaaatgggattcatccatcaaaatttccttttgaattccattcctttacaataggttgagttgactgtggaagctctccagctaaacttgaatgtggctttcttattaaacttacttattttttcattttcttttcaaaatgtcacctattttgagttatttcttaggaggaaaacacccatgcacatacagatttttttccagcatctgtttcctgttgatcttacagtaatatcaaagaacagttgatcc

SEQ ID NO: 8623 - DNA, 489 bp, Homo sapiens
tgacacaaaaagaaacacattggtgcagatctatgaaagcatacctgaaatggttaagaaggtatgggattagagttaggaagccatacaaagttaggctagaggaagagcagtggctatgatcaacaattataaattcatggaggattccttttggtaaacaaaactcctatcatcctagaacttgaaagacaaaaggaagataaagtagtttgttcccacatatcagaaatgcaggctaaaagccaaataacttgaataatagcctaactaaatgtatagataacattgtggagaaaacacactttaggaattttaaaaatcttttgtgtgtccaggcgcggtggctcacgcctataatcccagcactttgggaggctgaggcgggcggatcacaaggtcaggagatcgagaccatcctggctaacatggtgaaactccgtctctactaaaaatacaaaaattagctgggcgtggtgatgggcatct

SEQ ID NO: 8624 - DNA, 271 bp, Homo sapiens
cttttcagtctttatttgattggccccatctgcattatttcatactggttgcaattgtcccttctttctttggggaccacacattcctggtccttttccttcttcctgatgattccttcttagtcaattttgttggtccttttatcagcttacagcctttgtattcctaaatgttctattctttgattactatttcttttatttacatgttcttcctgtcgtagttcatccactcccatggctttaggagcatgattccaaatcttagttt

SEQ ID NO: 8625 - DNA, 651 bp, Homo sapiens
gtcagctggggcctggtcagaggctgacttcagcaacatgatgtcaacacactatccagcccccaggcaccaagtcaccacatggtcctgtccccaagccattgtgtcaccacacggtcctgtccctgggccaccgtgtcaccacatggtccttttctctggccatcatgtcaccacacaatcttattcctgggtcaccatgtcactatatggtcctgtccccaagccatcatgtgaccatgtggtcctatcctcagggctaccatgtcatcatgcggtcctgtccccaggccatcatgccaccctgtggtcatgtccttaggggtaactatattaccacatgatcctttcccctgggccactatgtcaccactttcctgtccctgggccaccgtgtcaccatgtggtcaggtccttagagtcactgtaccaccacatagtcctgtccctgggccattatgtcaccacacggtcctgtccctagggccactatgtcaccacacggtcctgtccctggatcaccacgtcaccgcatgatcctgtccttagggccaccatgtcaccacatggtcctgtccttggggccactatgtcaccacactgttctgttcctgaggccaccacatcaccacacagtcctatccccaggcc

SEQ ID NO: 8626 - DNA, 417 bp, Homo sapiens
tgtcctatctttagtctaatcaactttagttcttctatgttctttattctcagcctaaatcctgccttcaaagaagcctcccctaactacctggcccatatgaactgtgccttttctgattttctaccacacacacatagacgctactcacatggctcctcttgtaccctgactccaacactcctttatgcctgttgcggtctacaatcgaatgacaacttttcattgtcctcacatctctcatcttccctctgtacctggtgtaagtgacctccatggttgatcattagaatcattcctttgactatattttcaactcttgcttataatacgtgcttaacaaaaccctgatccaagcagtttcaactttctgcctatggtgcaaccgcctttacatagctgagcatgactgactga

SEQ ID NO: 8627 - DNA, 420 bp, Homo sapiens
cagttaacagcagtacagacaaaacttaatgaacccataaaatagaatgtggcaattcacattgaaatgatggaagttctggatgaaatacacagaaaacataggcaaggaaaatagtcaaaggttttcaaaactggaagtggaaacaaagatctcagccagactgttaagaaagtgtatagagtgcctctcagcataatgttcaaagatagacatccacttgtcaatgtcttaatcacagagtaaaaatttattttagaaaaataaaacgacaactttactcagatgttatagaaaagatgccaggtgcggtggctcacgcctgtaatcccagctctttaggaggccgaggaggatggatcacgaggtcaggaggtcaagaccagcctggccaagatggtgaaaccctgtctctactag

SEQ ID NO: 8628 - DNA, 434 bp, Homo sapiens
  misc_feature (374)..(374): n is a, c, g, or t
cagttaacagcagtacagacaaaacttaatgaacccataaaatagaatgtggcaattcacattgaaatgatggaagttctggatgaaatacacagaaaacataggcaaggaaaatagtcaaaggttttcaaaactggaagtggaaacaaagatctcagccagactgttaagaaagtgtatagagtgcctctcagcataatgttcaaagatagacatccacttgtcaatgtcttaatcacagagtaaaaatttattttagaaaaataaaacgacaactttactcagatgttatagaaaagatgccaggtgcggtggctcacgcctgtaatcccagctctttaggaggccgaggaggatggcgtgagcccgggagncggagcttgcggtgagccgagattgcgccactgcagtccgcagtccggcctgggcgacgg

SEQ ID NO: 8629 - DNA, 595 bp, Homo sapiens
tagttgaaaggaaagagaaatctaacctgacaagacactttttaaagtttgccttaagcttttaagttctttataattttcttaatgtgatacataaaatacacaaggactcaaacaaatgtatctctttgagcaccagaaaaagaaaaagaattacattttaaagttcaatgaaaaaacagaaaacaggtcagttgatactattagccagttttatctcaaggaagtgtgctatagaggagcggatgtgtcgattaaaattagtacaatggctcataaaattatcaacaatcattatattttccatagataggataaaagatactgattctttacgctatcagggtatgtgatacttaaggtaacaacaacaaaaaagccaaatctgagaaagtatgtgagatcttactacatatcttggcttatattgcagattcccatcagaattttctattttaaaataaaacgtagagggagtcgttgttttcccttttacactttgctgtgtttcagcaaccctacagaataaatgggagttttataagaaaggaatcattcatacatgaaaagattatagatgacagaatttcataac

SEQ ID NO: 8630 - DNA, 356 bp, Homo sapiens
tccagttgcttttgctatataacaatcccaaacttagtgccataaaaaaaccaaccatttttttatggtcacagtttctgtgggtcaggcattcagaaagggcacagcagcttttctgtcttccatggtgtctgaggtcttagctggaggaccgaaagatcctggaagattctatggctggcaactgcaatcaacagaagcctcgtttactcgcatacctgatggttgatgctggctgtcagctgagaactcagcttgggttatcatccagaacacctacatggacctctacatataactttgggcttacttacagcatgatggctgggttctagaagacagtggcccaagacaac

SEQ ID NO: 8631 - DNA, 495 bp, Homo sapiens
ggggttacggtgacagatcagaccccttcccagctcaggggctctgagttatagagacgatgattcagaatccatccctgaagttgtgtcataaaaatgtcctgaagcaataattccgagaaggcaggtggcagcttttggctatgccatgcaaagtgccacacccaggaaagagccatgtggcctagcccatgtggccaaacagccccggttccctcctgggacctcagcagcccagactcatgagcttgcctgccaagctgtgcaccagagggcgctgttgaaacacaccaggagcccaggtgacagacaggccatcctgttccccagccagcctcccaagcacagcgctccaggacccagaagagaaaccctgaaaagacagtgtgagccctgccacagacctgtgtgacagcagagctgtttggctgctgtatgagtgtcaccggccctgcatttttttcttttttaataaagacaaagtcttgctgtgtt

SEQ ID NO: 8632 - DNA, 393 bp, Homo sapiens
tcccatagcccaaattgtcataatattcaataatgatgatcccagaactttgggaggctaaggtgggaggatccctcaaactcctgacttcaagtgatccgcttgcctcagcctcccaaagtgctgggattacaggtgtgagccaccgcgtctggccaagcagttggttttaacgatagtattaacgtatacagattcacaacttaacacagtgtttttctttccatgtaatttggaaaaaatgtttgaattggccatctctcccctattccccctttaaactgatggagcggtcttgtctgttttttcaatcattattcacaggtcttttatttttccggaggagaaaatacacactcctcttgaaatatacacttttcttgaaatgtcaaa

SEQ ID NO: 8633 - DNA, 391 bp, Homo sapiens
tatttttgaatttaaagaaatgtccaccatgactattttttaataagcaaaagacaattaatacattttaaaagaataatagttcttattatgccacatataataataaatcccagttggatataagatctaagaaagccaaccaaaatcctttcaatcttgtataataatggaagaaaactagcatgacattctgtaatcccaaaagataaaagaataaaaaagattttcaacaatgattaatttggagataaaacacaaatgtgataaatgtaaaaagattctttagaacaaggtgatttttaatttacaaaaaaattattataacctgtcaaattggcattataaaactgcatttgtgggaaaagggccgttgccataatattggtga
